United States Patent Application Publication US 2011/0252501 A1 - sequence listing, part 6

SEQ ID NO: 23501 - protein, 546 aa, Burkholderia pseudomallei K96243
MSQAIEVKVPDIGDYKDVPVIEVLVKPGDAVEPEQSLVTLESDKATMDVPSPSAGTVKEVKVKVGDAVSQGSLIVLLDGAQAAAQPAQANGAATSAAQPAAAPAAAPAPAAAAGGGTVDVKVPDIGDYKDVPVIEIAVKIGDTVEKEQSLVTLESDKATMDVPSPAAGVVKDIKVKVGDAVSEGSLIVVLEASGGAAASAPQAAAPAPAPAPAPAPAPQAAPAAAPAPAQAPAPAASGEYRASHASPSVRKFARELGVDVSRVTGTGPKSRITKDDVTAFVKGVMTGQRAAPGAAAAPAGGGELNLLPWPKVDFSKFGPFEAKPLSRIKKISGANLHRNWVMIPHVTNNDEADITELEALRVQLNKEHEKAGVKFTMLAFVIKAVVAALKKFPTFNASLDGDNLVFKQYYHIGFAADTPNGLVVPVIRDADKKGLVDIAKEMAELSKAAREGKLKPDQMQGGCFSISSLGGIGGTHFTPIINAPEVAILGLSRGQMKPVWDGKQFVPRLMLPLSLSYDHRVIDGAEAARFNAYLGALLADFRRIIL

SEQ ID NO: 23502 - protein, 573 aa, Oryza sativa
  misc_feature (25)..(25): Xaa can be any naturally occurring amino acid
MGKASKKSVAVAVAPAAVPAKGKGXCKKREAEDEIEKAVSAKKQKAAAAPPAKAVPAPKADAKKAKKQPPPKKAASSSSGSSSEEDSSESEEEVKVQVKKTTKPVKQESSSDESSDESSDDEDAKPAAPVANNGLKKGKPASSDSESDSDDEMDEDEKPAAPVKKTSVTAQKKKDDSDSSESESDESDSDEDVPTKSKAPAVAAKNDDSTDGSESESDSEDEDAAPKGAAKKESSSDEEDDSSEESSDDEPKQPQQKKAQEESSEESSEEDSDEEDEKLAKTPKKKTPAATKSQNDEPKTPASNQSQGTESATLFMGNLSFNLNQDQVKEFFQEVGEVISVRLATHEDGSSRGFGHVQFASSEEAKKALELHGCDLDGRPVRLDLAHERGAYTPHSRNDTGSFQKQNRGSSQSIFVKGFDSSLEESKIRESLEGHFADCGEITRVSVPMDRETGASKGIAYIDFKDQASFSKALELSGSDLGGYNLYVDEAKPKGDSRDGGGRRGGRSGDRFGGRSGDRFGGRSGGRFGGRDGGRRGGRGGRDGGRRGGRGGFQSRQSAGTASTGKKTTFGDE

SEQ ID NO: 23503 - protein, 135 aa, Debaryomyces hansenii CBS767
MPEDMAASLPHPKIVKKHTKKFKRHHSDRYDRVAENWRKQKGIDSCVRRRFRGTISQPNIGYGSNRKTRHMMPSGHKAFLVKNLKDLDVLLLHSKTYAAEISHNVSARNRVEIVAKAKKLGVKVTNPKGRVSLEA

SEQ ID NO: 23504 - protein, 523 aa, Gloeobacter violaceus PCC 7421
MERIYLYDTTLRDGAQREGMSLSVEDKLRIAHKLDELGVPFIEGGWPGANPKDDQFFERLHSTRFKHSAVVPFCSTRRPQVRASEDAGLRKILAAGTEWVTTFGKCWELHVHEGLRTSLEENLAMIEDTVAFFRTQDRRVIFDCEHWFDGYYKNPEYALAALRAAAHAGAQWVVLCDTNGGMLPQQIRTSVEAVRDYCREHNLEVQLGIHTHNDSETAVANALAAVEAGARMVHGTVNGYGERCGNANLCALIPNLQLKMNYALIAPEQLARLTEVSHFVSEVANLAPNDHAAYVGASAFAHKGGIHVSAVQRNPQTYEHIVPESVGNRRRIVISDQAGLSNVLTKLTEMGFSFERHDPAVGRILQQIKLLESEGYQFEAAEASFELLVRECLEIRKSLFSLEGLYTACQTFPDGTVRSEATVRVRVGEVLQHTAADGNGPVSALDAALRKALVGCYPQVAGMHLVDYKVRILDSAHGTSARTRVLVESSDGLGRWTTIGVSANIIEASCRAVIEGIEYGLSR

SEQ ID NO: 23505 - protein, 283 aa, Thermobifida fusca YX
MTAQVLDGKATAAAIREELKERVAALRARGVVPGLGTILVGDDPGSHAYVRGKHRDCAEVGIASIRKDLPADATQADVEAAVAELNADPACTGFIVQLPLPRGLDENRVLEKIDPAKDADGLHPSNLGKLVLMEEAPLPCTPRGIVELLNRYGVSLRGAEVVVVGRGVTVGRPLGLLLTRRSENATVTLCHTGTRDLAAHTRRADIVVAAAGVPGLITKDMVSPGAVVLDVGVTRTEKGLVGDVAPDVAEVAGYLSPNPGGVGPMTRAMLLTNVVEAAERSLS

SEQ ID NO: 23506 - protein, 468 aa, Methanosarcina acetivorans C2A
MISRKMNLESLDESKKYRVGAYSARYVPKTKEKGIPKYEFPEEGMSPRAAYQLVHDEQSLDGNPFLNLASFVNTWMEPEADKLVMENISKNIIDIFEYPQTSRVIHHNMVNMLGRLFNGHHTDFVGTSTAGSSEAIMLGLLAHKWSWKKSGRGTDKPNIIFGNDAHVCWDKFARYFDVDTRKVPIDKDRRTITAEAVAERIDENTICVGCVLGTTFTGEIDPVKDINDLLLEYKEEKGWDIPIHIDAASGGFILPFTEPDFEWDFRLERVKSINVSGHKYGLTYPGLGWLIFRNKNALPEDLIFHVNYLGEMEDSYTLNFSGGSAMVAAQYYNFLRFGRAGYTGIMKKILAVSQDLAEKVDRLGRFEMLNKGERLPIIAFRQKEKTGYSLLQLSHKLREKGWIVPAYCLPENAADIEIMRIVVRENLTPDMASIIVEDLEKACQFLENGTEAGAEKPCPSGKDMAHIC

SEQ ID NO: 23507 - protein, 285 aa, Burkholderia pseudomallei K96243
MTATLIDGNALSKTLRAQAAERAAALAARGHRPGLAVILVGDNPASEVYVRNKIKACEDNGFFSLKDRYPATLSEPELLARIDELNRDPKIHGILVQLPLPAHIDSHKVIEAIAPEKDVDGFHVANAGALLTGKPLFRPCTPYGVMKMFEAYKIPLQGANAVVIGRSNIVGKPMALLLLEAGATVTICHSKTRELAAHTRAADIVVAAVGKRNVLTADMVKPGATVIDVGMNRNDEGKLCGDVDFAGVSQVAGHITPVPGGVGPMTITMLLVNTIEAAERAAAAA

SEQ ID NO: 23508 - protein, 1029 aa, Aspergillus nidulans FGSC A4
MTGSECQPRHSASSGTGRDIHTLSWDGDHDPANPFNWSISRKWAVTYLAALISFLTMMNGTIITVAHFEIAELFNIDETAFPHTYWPVTTWAVGGAFSALFLLPLAEDFGTRPVFLVTYFAFVCFLIPQAVAQNFATLVATRFFAGACVAILANTAAGVIGNVWDTEWSRSIPVSLYIFGYMAGSSMGPVIGAAVLQSLSWRWIGYMQLIWFGALFPIYYFFFYESRGDIILAQRDRKMGKNGKDILPGHPAHSKLNLQNLAVSSTRPVILFCTEPVLFVSTLWSAFTVGTIFLFTQSVEQVFIGTYDWTISKTGYVQAAVVIGEGIGFFFSFLSRELYFASASRNTEVPNSLIPEARLYMAVLGGLFGISGGMFTYAWTSYPFIPWIAPAISLAMVGAGSVLVVTGVSDYVVDAYSQYAGSAIGAVATGENIFSAFLPLATMSMYNNLGFQWASTLLAFVSLVLALVPTLMFVWGRELDNYALPTIATYAYSPANHYCTTQQAFQCHCSNFPSLHSCPTTTRHRPTNHLLKMPSLANTLKDPTLFIESSYIDGKWVTSSSSRTFNVYDPATEEFIGTCPESNIDDINSAIRAAATAFPKWRALSGRQRGRILRRWFDLIVENKEDIGKIITAENGKAKGDAEGEALFSAGFFEWFSEEAARIYGDVVPHSNPSSRVQVLKEPVGVCGLITPWNFPMAMGARKVAAALAAGCTVVLKSDGLTPYSSNVLALLAERAGVPGGVFNVVTALENTPALGLALCESDNVKKISFTGSTRVGKLLMKQSSHTLKKLSLELGGNAPFIVFDDADLETAVTSAVACKFKVTGQTCVCANRFYVQEGIYEAFSKRFVEEVKKCQVGHGLDPGVTHGPLTNGIAKTQEHIQDALNKGATVLLGGSRLPSLGKNFHELTILGDVDDSMKVASEETFGPLAALSKFKAEDEVVRRANGVEVGLASYLITSDLGKAHRVSEKLEFGMVAINTGVISDSAAPFGGVKHSGMGREGSKYGIDDYLNIKTIVTGGIHTAYSAHL

SEQ ID NO: 23509 - protein, 209 aa, Sorghum arundinaceum
LAEKAALAYAAEHGMELVTIITTLVVGPFLSTGMPPSMITALALVTGNEAHYSILKQVQFVHLDDLCDAHIFLFEHPAAAGRYVCSSCDTTIHDLAAMLRDRYPEYDIPERFPAGTGIEDDLQMVHMSAKKLQDLGFTFRYTRMEDMYDDAIRTCREKGLIPLAAAGRDDGSASVRAPGERDVTATAGGDVVSAPVRAPGGETDVTIGA

SEQ ID NO: 23510 - protein, 254 aa, Oryza sativa
MISPDAARNVVGIIGNVISFGLFLAPVPTFWRICKRKDVEEFKADPYLATLLNCMLWVFYGIPIVHPNSILVVTINGIGLVVEGTYLFIFFLYSPNKKRLRMLAVLGVELVFMLAVILGVLLGAHTHKKRSMIVGILCVFFGSIMYFSPLTIMGKVIKTKSVEYMPFFLSLVCFLNGVCWTAYALIRFDIYVTIPNGLGAIFGAIQLILYACYYRTTPKKTKAAKDVEMPSVISGPGAAATASGGSVVSVTVER

SEQ ID NO: 23511 - protein, 114 aa, Nicotiana tabacum
MEMVGKIACFVVLCMVVVAPHAEALSCGQVQSGLAPCLPYLQGRGPLGSCCGGVKGLLGAAKSLSDRKTACTCLKSAANAIKGIDMGKAAGLPGACGVNIPYKISPSTDCSKVQ

SEQ ID NO: 23512 - protein, 206 aa, Sorghum arundinaceum
LAEKAALAYAAEHGMELVNIITTLVVGPFLSTGMPPSMITALALVTGNEAHYSILKQVQFVHLDDLCDAHIFLFEHPAAAGRYVCSSCDTTIHDLAAMLRDRYPEYDIPERFPAGIEDDLQMVHMSAKKLQDLGFTFRYTRMEDMYDDAIRTCREKGLIPLAAAGRDDGSASVRAPGERDVTATAGGDVSAPVRAPGGETDVTIGA

SEQ ID NO: 23513 - protein, 409 aa, Legionella pneumophila str. Lens
MSIEVKVPVLPESVADATVAAWHKKVGDKVSRDENLVDLETDKVVLEVPSPVDGVLSDILFNTGDTVGSGDLLAKISQSVSVESQKTEKEEKPVKKEEIKISESESVSTKEDKSTSPVVRRMMAENDLKAGQIQGTGKDGRITKEDVLSYIESNREKSNQTAEVQKESSMKALSFGGREEKRVPMTRLRAKIAERLLQAQHNAAMLTTFNEVNLKAVMDMRSQYKDSFEKKHGVKLGFMSFFTKAVVESLKRFPAVNASIDGQDIVYHGFYDIGIAVSTERGLVVPVIRDADQLSMAEIELAINDAASKARTGKLSMEEMQGGTFTITNGGVFGSLLATPIINPPQTGILGMHKIEERPIVEKGQIVIRPMMYVALSYDHRLIDGKDSVQFLVSVKELLEDPSRLLLNV

SEQ ID NO: 23514 - protein, 579 aa, Corynebacterium glutamicum ATCC 13032
MAHSYAEQLIDTLEAQGVKRIYGLVGDSLNPIVDAVRQSDIEWVHVRNEEAAAFAAGAESLITGELAVCAASCGPGNTHLIQGLYDSHRNGAKVLAIASHIPSAQIGSTFFQETHPEILFKECSGYCEMVNGGEQGERILHHAIQSTMAGKGVSVVVIPGDIAKEDAGDGTYSNSTISSGTPVVFPDPTEAAALVEAINNAKSVTLFCGAGVKNARAQVLELAEKIKSPIGHALGGKQYIQHENPFEVGMSGLLGYGACVDASNEADLLILLGTDFPYSDFLPKDNVAQVDINGAHIGRRTTVKYPVTGDVAATIENILPHVKEKTDRSFLDRMLKAHERKLSSVVETYTHNVEKHVPIHPEYVASILNELADKDAVFTVDTGMCNVWHARYIENPEGTRDFVGSFRHGTMANALPHAIGAQSVDRNRQVIAMCGDGGLGMLLGELLTVKLHQLPLKAVVFNNSSLGMVKLEMLVEGQPEFGTDHEEVNFAEIAAAAGIKSVRITDPKKVREQLAEALAYPGPVLIDIVTDPNALSIPPTITWEQVMGFSKAATRTVFGGGVGAMIDLARSNIRNIPTP

SEQ ID NO: 23515 - protein, 115 aa, Triticum aestivum
MAHSAVAQVVLVAVVAAMLLAATEAAVSCGQVSSALSPCISYARGNGANPSAACCSGVRSLASSARSTADKQAACKCIKSAAAGLNAGKAAGIPTKCGVSVPYTISSSVDCSKIR

SEQ ID NO: 23516 - protein, 115 aa, Sorghum x drummondii
LAEKAALAYAAEHGMELVTIITTLVVGPFLSTGMPPSMITALALVTGNEAHYSILKQVQFVHLDDLCDAHIFLFEHPAAAGRYVCSSCDTTIHDLAAMLRDRYPEYDIPERFPAG

SEQ ID NO: 23517 - protein, 229 aa, Wolbachia endosymbiont of Synergus gallaepomiformis
LCDKKIQLGINLTKGLGAGALPDVGKGAAEESIDEIMEHIKDSHMLFITAGMGGGTGTGAAPVIAKAAREARAAVKDRAPKEKKILTVGVVTKPFGFEGVRRMRIAELGLEELQKYVDTLIVIPNQNLFRIANEKTTFSDAFKLADNVLHIGIRGVTDLMVMPGLINLDFADIETVMSEMGKAMIGTGEAEGEDRAISAAEAAISNPLLDNVSMKGAQGILINITGGGD

SEQ ID NO: 23518 - protein, 320 aa, Vibrio cholerae
MIKKIGVLTSGGDAPGMNAAIRGVVRTALGAGLEVFGIYDGYQGLYEDRIKQLDRSSVSDVINRGGTFLGSARFPQFREVEVREKAIENLKKHGIEALVVIGGDGSYMGAKKLTEMGFPCIGLPGTIDNDIAGTDYTIGYLTALNTVIEAIDRLRDTSSSHQRISIVEIMGRHCGDLTLTSAIAGGCEYIITPETGLNMEQLISNIKDGIAKGKKHAIIALTELMMDANKLAKEIESATGRETRATVLGHIQRGGKPTAFDRVLASRMGNYAVHLLMEGHGGRCVGIQKEQLVHHDIIDAIENMKRPVRTDLYKVAEELF

SEQ ID NO: 23519 - protein, 229 aa, Wolbachia endosymbiont of Callyrhytis glandium
LCDKKIQLGINLTKGLGAGALPDVGKGAAEESIDEIMEHIKDSHMLFITAGMGGGTGTGAAPVIAKAAREARAAVKDRAPKEKKILTVGVVTKPFGFEGVRRMRIAELGLEELQKYVDTLIVIPNQNLFRIANEKTTFSDAFKLADNVLHIGIRGVTDLMVMPGLINLDFADIETVMSEMGKAMIGTGEAEGENRAISAAEAAISNPLLDNVSMKGAQGILINITGGGD

SEQ ID NO: 23520 - protein, 334 aa, Geobacillus stearothermophilus
AVKVGINGFGRIGRNVFRAALKNPDIEVVAVNGLTDANTLAHLLKYDSVHGRLDAEVSVNGNNLVVNGKEIIVKAERDPENLAWGEIGVDIVVESTGRFTKREDAAKHLEAGAKKVIISAPAKNEDITIVMGVNQDKYDPKAHHVISNASCTTNCLAPFAKVLHEQFGIVRGMMTTVHSYTNDQRILDASHKDLRRARAAAESIIPTTTGAAKAVALVLPELKGKLNGMAMRVPTPNVSVVDLVAELEKEVTVEEVNAALKAAAEGELKGILAYSEEPLVSRDYNGSTVSSTIDALSTMVIDGKMVKVVSWYDNETGYSHRVVDLAAYIASKGL

SEQ ID NO: 23521 - protein, 461 aa, Parvularcula bermudensis HTCC2503
MPMPILMPALSPTMEEGTLAKWMVAEGDKISSGDVIAEIETDKATMEVEAVDDGIVGKILVESGTEAVKVNQMIGVLLEEGESADDIDLEALRSSVPTDAGEDNGAAKKDAAQSSKEATSPPKESPSESQEPSADRSAPSPTSTPSGSQSSSADAKAEGERLFASPLARRIAEQEGLSLPLIEGTGPRGRIVKRDVEKALEEGQAQPDGKGAVAGAGGGLDPRLYSPETYTAIKNDGMRKTIAKRLNQSFNQEVPHFPLNIDIDLTQLLAARERINAASPEKGSEGTYKISVNDFIVKASAQALMVVPGANASFTEEAILRHHHADIGVAVAIDGGLITPIVWRAETKGLQAISEEIRDLAGRARDKKLKPEEYQGGTFAVSNLGMFGIKSFASIVNTPHGAILSVGAGEDRPVVRNGEIVVRPIMTVTLTCDHRVVDGATGAEFLAAFKRFCEEPASMLL

SEQ ID NO: 23522 - protein, 229 aa, Wolbachia endosymbiont of Ceroptres cerri
LCDKKIQLGINLTKGLGAGALPDVGKGAAEESIDEIMEHIKDSHMLFITAGMGGGTGTGAAPVIAKAAREARAVVKDKGAKEKKILTVGVVTKPFGFEGVRRMRIAELGLEELQKYVDTLIVIPNQNLFRIANEKTTFADAFQLADNVLHIGIRGVTDLMIMPGLINLDFADIETVMSEMGKAMIGTGEAEGEDRAISAAEAAISNPLLDNVSMKGAQGILINITGGGD

SEQ ID NO: 23523 - protein, 140 aa, Triticum aestivum
  misc_feature (45)..(45): Xaa can be any naturally occurring amino acid
  misc_feature (61)..(61): Xaa can be any naturally occurring amino acid
  misc_feature (73)..(73): Xaa can be any naturally occurring amino acid
  misc_feature (85)..(85): Xaa can be any naturally occurring amino acid
  misc_feature (120)..(120): Xaa can be any naturally occurring amino acid
  misc_feature (130)..(130): Xaa can be any naturally occurring amino acid
  misc_feature (136)..(136): Xaa can be any naturally occurring amino acid
LQYGFPIVQKFLEGASSIDNHFYSSSFEKNIPVLLGLLSVWNVSXFLGYPARAILPYSQAXLEKLAPHIQQLXSMESNGKGVSIXDGAQLPLETGEMIWVNLGTNGQHTSYQLIHPGRVXPCDLLVLVKXHTCLLXKGKL

SEQ ID NO: 23524 - protein, 245 aa, Zea mays
  misc_feature (16)..(16): Xaa can be any naturally occurring amino acid
MISPDAARNVVGIIGXNVISFGLFLSPVLPFWRIYKAKDAEEFKPDPYLATLLNCMLWVFYGIPVVHPNSILVVTINGIGLVIEAVYLTIFFLYSDSQKRKKAFAILAVEILFMVAVVLGVILGAHTHEKRSMIVGILCVIFGSMTYASPLTIMSRVIKTKSVEYMPFLLSLVSFLNGCCWTAYALIRFDLYVTIPNALGAFFGLIQLILYFCYYKSTPKKEKNVELPTVSSNVGGGNVTVSVER

SEQ ID NO: 23525 - protein, 229 aa, Wolbachia endosymbiont of Plagiotrochus quercusilicis
LCDKKIQLGINLTKGLGAGALPDVGKGAAEESIDEIMEHIKDSHMLFITAGMGGGTGTGAAPVIAKAAREARAAVKDRAPKEKKILTVGVVTKPFGFEGVRRMRIAELGLEELQKYVDTLIVIPNQNLFRIVNEKTTFSDAFKLADNVLHIGIRGVTDLMVMPGLINLDFADIETVMSEMGKAMIGTGEAEGEDRAISAAEAAISNPLLDNVSMKGAQGILINITGGGD

SEQ ID NO: 23526 - protein, 586 aa, Pisum sativum
MCGILAVLGCSDDSQAKRVRILELSRRLKHRGPDWSGLHQHGDNYLAHQRLAIVDPASGDQPLFNEDKSIIVTVNGEIYNHEELRKQLPNHKFFTQCDCDVIAHLYEEHGENFVDMLDGIFSFVLLDTRDNSFIVARDAIGVTSLYIGWGLDGSVWIASELKGLNDECEHFEVFPPGHLYSSKEREFRRWYNPPWFNEAIIPSTPYDPLVLRNAFEKAVIKRLMTDVPFGVLLSGGLDSSLVASVTARYLAGTKAAKQWGAKLPSFCVGLKGAPDLKAGKEVADFLGTVHHEFEFTIQDGIDAIEDVIYHTETYDVTTIRAATPMFLMSRKIKSSGVKWVISGEGSDEIFGGYLYFHKAPNREEFHQETCRKIKALHRYDCLRANKSTYAWGLEARVPFLDKDFIKVAMDIDPEFKMIKHDEGRIEKWILRKAFDDEENPYLPKHILYRQKEQFSDGVGYGWIDGIKDHAAKHVTDRMMFNASHIFPFNTPNTKEAYYYRMIFERFFPQNSARLTVPGGPSVACSTEKAIEWDASWSNNLDPSGRAALGVHVSAYEHQINPVTKGVEPEKIIPKIGVSPLGVAIQT

SEQ ID NO: 23527 - protein, 582 aa, Solibacter usitatus Ellin6076
MLHCLAYHGRDRSSIHYRVRPGRGGLRLLANLAASKKIDASIVRDPKEPRRQRPSVLKCIQLPVRLKQCLLHDILAIHRRSGHARTITVQPGPGMSDGLQECEEPRFERARRVDTHPVIHIVFTHLNAFRIRGAACVPTRILVGLFPMRFFISLLIFTMLAGAQSLDVQTTTLDNGMKILVQQDRNIPNVAMYFFYRIGSRNEAPGTTGISHFFEHMMFNGAKKYGPKQFDNEMEKAGGNNNASTGQDLTIYTDWFPSSALELMMDMEGDRIRDLAFDPKIVQSERGVVYSERRTSVDNNNFGILHEQLQAAAFTAHPYHWPVVGWPSDIEAWTMQDLKNYFAIGYAPNNCTMVVVGDVTAERVIALAKKYIEPIPRHEPPPPVRTKEPEQLGERRVIVRKPAQLPLQMIAFHVPEARNPDAKVLDLIATVLSTGQSSRLYKRMVDEEALALSVNGRAGDSFDPTLMIFTIQPRSGVDLARTEKALYDELERLQTAEVPARELQKAKNQMLAAQYRQMKTIAGRASMLGHYEVVLGDYRKLFTLDKDLEAVTAGDVQRVARKYFLEKNRTVATLIPESKEGK

SEQ ID NO: 23528 - protein, 490 aa, Staphylococcus aureus subsp. aureus Mu50
MTSKSSPLIFERSREGRYAYSLPKSDIKTNSVESLLDDKFIRKNKAEFPEVAELDLVRHYTELSNKNFGVDNGFYPLGSCTMKYNPKINEKVARIPGFSESHPLQDEDQVQGSLEIIYSLQEELKEITGMDEVTLQPAAGAHGEWTALMIFKAYHENNGEGHRDEVIVPDSAHGTNPASASFAGFKSVTVKSNERGEVDIDDLKRVVNENTAAIMLTNPNTLGIFEKNIMEIREIVHNAGGLLYYDGANLNAIMDKVRPGDMGFDAVHLNLHKTFTGPHGGGGPGSGPVGVVKELASYLPKPMVIKDGDKFKYDNDIKNSIGRVKPFYGNFGIYLRAYTYIRTMGATGLKEVSEAAVLNANYIKARLSEHFEIPYKQYCKHEFVLSGVRQKEFGVRTLDMAKRLLDFGVHPPTIYFPLNVEEGMMIEPTETESKETLDYFIDTLISIAEEAKNDPDKVLEAPHTTVIDRLDEATAARKPILKFENLKQEK

SEQ ID NO: 23529 - protein, 583 aa, Pisum sativum
MCGILAVLGCSDPSRAKRVRVLELSRRLKHRGPEWSGLHQHGDCYLAQQRLAIVDPASGDQPLFNEDNPSIVTVNGEIYNHEDLRKQLSNHTFRTGSDCDVIAHLYEEYGEDFVDMLDGIFSFVPLDTRDNSYIVARDAIGVTSLYIGWGLDGSVWISSEMKGLNDDCEHFECFPPGHLYSSKDSGFRRWYNPSWYSEAIPSAPYDPLALRHAFEKAVVKRLMTDVPFGVLLSGGLDSSLVASITSRYLATTKAAEQWGSKLHSFCVGLEGSPDLKAGKEVADYLGTVHHEFTFTVQDGIDAIEDVIYHVETYDVTSIRASTPMFLMSRKIKSLGVKWVISGEGSDEIFGGYLYFHKAPNKEEFHEETCRKIKALHQYDCQRANKSTYAWGLEARVPFLDKAFINVAMNIDPENKMIKRDEGRIEKYILRKAFDDEENPYLPKHILYRQKEQFSDGVGYSWIDGLKAHAAKHVTDKMMLNAGNIFPHNTPNTKEAYYYRMIFERFFPQNSARLTVPGGPTVACSTAKAVEWDAAWSNNLDPSGRAALGVHDSAYENHNKVNKTVEFEKIIPLEAAPVELAIQG

SEQ ID NO: 23530 - protein, 402 aa, Methanosarcina mazei Go1
MACFSSLSTGVLDMYDLIIVGGGPSGASAGRVAGKAGISTLLIEKENFPRYKPCGGALSPYALSCLDFKLPEYLIEKDISRIRVHFRELCTEMQKDYSIALLVSRKAFDNFLLDKARETGIDIHSGEKVLDCEEGEECVEVRTSQNTYLAKFVLIAEGSEGVLKYSVRKRKDRRTEYDLALVSEIPERDKVIRKRFPNAIDMHFGIASGGYGWIFPHSEHYSVGIVGTAEHLKHPKAVMQDFLQANGFSGDFQVHSHIIPVGGIKRKTISSRILLSGDAAGFVDAFIGEGISYAIRSGQLAAENVAEIVLYNRKLSDLKEYETSCRKEFGNFLSSSLKLEKAMHRFPETSFRLALSRKEIIDKYLEEVVINRSHKDYVRWLLLNFSLSEPASKIKSIKDKNQ

SEQ ID NO: 23531 - protein, 583 aa, Oryza sativa (japonica cultivar-group)
MATARARAALVFVALLQMAAVVVVRASHVVYPELQSLEAKHVDGKLRTGYHFQPPKHWINGPMYYKGLYHLFYQYNPKGAVWGNIEWAHSVSTDLIDWTALEPGIYPSKTFDEKGCWSGSATVLPSGVPVIMYTGIDPDERQVQNVAYPVNLSDPYLREWYKPDYNPIINPDGGINASAFRDPTTAWYGPDGHWRLLVGSKVNMKGLAVLYRSRDFKKWVKAHHPLHSAHTGMWECPDFFPVAVAGGSRHYRRGVDTAELHDAAVAEEVKYVLKVSLDLTRYEYYTVGWYDHATDRYVPDAAFPDNDYGLRYDYGDFYASKSFYDPAKRRRIVWGWANESDTVPDDRRKGWAGIQAIPRKLWLSADGKQLVQWPVEELKALRAKHVNVTDKVIKKGNYFEVTGFKSVQSDVDMAFAIKDLSKAEEFDPAWRTDAEALCKKLGSDVDGGVGPFGLWALASGDLKERTAVFFRVFKANDSSHVVLMCNDPTRSSYESKIYRPTFAGFVDVDIAKNKQIALRTLIDHSVVESFGARGKTCILTRVYPRKAVGDDAHLFVFNNGESDVKVTNLDAWEMKTPKMNAEE

SEQ ID NO: 23532 - protein, 448 aa, Staphylococcus aureus subsp. aureus Mu50
MSHRYIPLTEKDKQEMLQTIGAKSIGELFGDVPSDILLNRDLNIAEGEAETTLLRRLNRIASKNITKETHTSFLGAGVYDHYAPSVVDAMISRSEFYTAYTPYQPEISQGELQAIFEFQTLICELTDMDVANSSMYDGMTSFAEACILAFSQTKKNKIVVSKGLHYQALQVLHTYAKTRKEFEVVEIDLDGTVTDLKKLEAAVDDETAAVAVQYPNFYGSIEDLEKIQSFIEDKKALFIVYANPLALGLLTPPGSFGADIVVGDTQPFGIPAQFGGPHCGYFATTKKLMRKVPGRLVGQTQDDEGNRGFVLTLQAREQHIRRDKATSNICSNQALNALASSIAMSALGKQGIYDIAVQNIEHANYAKQQFIKKGFEVLDGTSFNEFVVKFDKPIQQVNEELVKYNIIGGFDLGVVSDDFKNHMLIAVTELRTKDEIDTFVEKAGELND

SEQ ID NO: 23533 - protein, 595 aa, Oryza sativa (japonica cultivar-group)
MGVLGSRVAWAWLVQLLLLQQLAGASHVVYDDLELQAAATTADGVPPSIVDSELRTGYHFQPPKNWINAPMYYKGWYHLFYQYNPKGAVWGNIVWAHSVSRDLINWVALKPAIEPSIRADKYGCWSGSATMMADGTPVIMYTGVNRPDVNYQVQNVALPRNGSDPLLREWVKPGHNPVIVPEGGINATQFRDPTTAWRGADGHWRLLVGSLAGQSRGVAYVYRSRDFRRWTRAAQPLHSAPTGMWECPDFYPVTADGRREGVDTSSAVVDAAASARVKYVLKNSLDLRRYDYYTVGTYDRKAERYVPDDPAGDEHHIRYDYGNFYASKTFYDPAKRRRILWGWANESDTAADDVAKGWAGIQAIPRKVWLDPSGKQLLQWPIEEVERLRGKWPVILKDRVVKPGEHVEVTGLQTAQADVEVSFEVGSLEAAERLDPAMAYDAQRLCSARGADARGGVGPFGLWVLASAGLEEKTAVFFRVFRPAARGGGAGKPVVLMCTDPTKSSRNPNMYQPTFAGFVDTDITNGKISLRSLIDRSVVESFGAGGKACILSRVYPSLAIGKNARLYVFNNGKAEIKVSQLTAWEMKKPVMMNGA

SEQ ID NO: 23534 - protein, 157 aa, Saccharomyces cerevisiae
MSDEEHTFETADAGSSATYPMQCSALRKNGFVVIKSRPCKIVDMSTSKTGKHGHAKVHLVAIDIFTGKKLEDLSPSTHNMEVPVVKRNEYQLLDIDDGFLSLMNMDGDTKDDVKAPEGELGDSLQTAFDEGKDLMVTIISAMGEEAAISFKEAARTD

SEQ ID NO: 23535 - protein, 408 aa, Burkholderia pseudomallei K96243
MPAAYPFSALIGQAALQQALLLVAVDPGLGGVLVSGPRGTAKSTAARALAELLPEGRFVTLPLSASDEQVTGSLDLASALADNTVRFSPGLVARAHLGVLYVDEINLLPDALVDALLDAAASGVNTVERDGVSHSHAARFALVGTMNPEEGELRPQLLDRFGLMVELANCYDAATRQRIVKARLAFDLDPHGFRAQYRDAQAALVAQIRAARAALPALAFDDAAHARVAELCIGAAVDGLRGDLVMLRAARALAALDGAARVAAAHVERVAADVLRHRRTRFEPQPEFQPGFQPGSQAGPQPMGRREPPPASRSAGGDAPGGRADPGEAEATRAPTPRDALPGGASGPAHPAARAPSDAQRRAADERGAARDGGRGPAADDSDWGYLPPEPAGIAPVKGVIPLPLKKR

SEQ ID NO: 23536 - protein, 157 aa, Brassica napus
MWFTGGGGGGLRKLCRASATVFENEMSCNSLLVRYMSRERAVNVRKINPKVSIQEAHIISSSLYEVFKKHGPLSVPNTWLRAQEAGVSGLNSKTHMKLMLKWMRGRKMLKLICNQVGSSKKFFHTVLPDDDIQQETPLAATPAATENKKQTSKRRSK

SEQ ID NO: 23537 - protein, 447 aa, Streptococcus pyogenes MGAS8232
MASNHMNEQEREQAKFSLSGATLYGINAVIGSGIFLLPRAIYKGLGPASIAVMFGTAILTIMLAVCFAEVSGYFGKNGGAFQYSKRAFGDFIGFNVGFLGWTVTIFAWAAMAAGFARMFIITFPAFEGWHIPLSIGLIILLSLMNIAGLKTSKIVTITATIAKLIPIVAFCVCTLFFIKNGLPNFTPFVQLEPGTNLLGAISNTAVYIFYGFIGFETLSIVAGEMRDPEKNVPRALLGSISIVSVLYMLIIGGTIAMLGSQIMMTNAPVQDAFVKMVGPAGAWMVSIGALISITGLNMGESIMVPRYGAAIADEGLLPAAIAKQNQNGAPLVAILVSGAIAIVLLLTGSFENLAKLSVVFRFFQYIPTALAVMKLRKDAPDANVIFRVPFGPIIPILAVIVSLVMIWGDNPMNFVYGAVGVIIASSVYYLMHGRNHQMDQMPPEEQI

SEQ ID NO: 23538 - protein, 461 aa, Zea mays
MPRTTVVESSGCPPLRALTTDILGLVKVVEAHARPAGAAKVVETWGAPDASRAIVAASLADRAADPVLAVARRNGVVELLNPLNGSALAAVKTAGSAPNDSGAEGDPLAALHLFARQTSDSILGTFLACTEKGKASIRSITKENADSGSDVGPSATWDVCNGANVQFCSVDHGESYVIFGGKGIEVNLWDITSSSKTWSAKSPRANSLGIFTRPWFTAGTFLCKNDHRKIVACTNNHQVRLYDTALQGRPAVSVDFRESPIKAVAADPNGHDVYIGTGTGDLASFDMRTGKLLGCYIGKCSGSIRSIVRHPELPLIASCGLDSYLRIWDTNTRQLLSAVFLKQHLTTVVLDSHFSVEEPGEMKFKQLESLVEAEAEVRKEKKKKKSRPTEEDEEQVGVVDHSDNNGEMYARKEKKKKKKKKSRTIERDEEPDNDGEMCSPKRRKSVERSKCLKKSKKQQVA

SEQ ID NO: 23539 - protein, 407 aa, Buchnera aphidicola str. Bp (Baizongia pistaciae)
MKRVVITGLGIISSIGNNKIEVLTSLLETKSGISFSKEMERSGMRSHVWGNIKLDNYQENIDRKIFRFMNDASIYSYLSMKQAIEDAKLTSKMYQNNPRVGVIIGSSSGSPRCQINGVSIIKKTKRLKSVSPYTVIKSMTSSISACLSTLFKIQGVNYSISSACATSAHCIGNAMELIQLGKQDLIFAGGGEELSWELACAFDSMGALSTMYNSQPILSSRVFDYYRDGFVISGGAGILVVEELNYALSRSAHIYAEIVGYGTSSDGYNVVVPSGNGAMRCMNIAMSNIQEPIDYLNVHSTSTKIGDLIELNAIQQVFRKTSIPILSSTKSITGHSLGASGVQEMIYSLLMLKYNFIVPSINIFKLDPKAKNCNILTTMMRKELSIIMSNSFGFGGTNVSLIIKKFV

SEQ ID NO: 23540 - protein, 112 aa, Debaryomyces hansenii CBS767
MSTSKTGKHGHAKVHLVAIDIFTGKKLEDLSPSTHNMEVPNVGRREFQLLDIDDGFLSLMTNDGDTKDDVKVPEGELGDKIQSEFDEGKDLLVTIVSAMGEEAAISFKEAPK

SEQ ID NO: 23541 - protein, 133 aa, Brassica napus
EAQRCAKRDAKHYIEFWGQIPSNEPYRAILGDVRDKLYNTRERARQLLSSGVSDVPEDAVFTSVDQATPELEYGRMNIGSRPSKRKPSGGIESLRAIPWIFAWTQTRFHLPVWLGFGSAFKRVIQKDAKNLNM

SEQ ID NO: 23542 - protein, 204 aa, Zea mays
LCLLCEDRGPAGSTQTSGGFRSRTFRPPLSPGSGTAALSLVTLGKMGEPGCCQCFAHSRIYCQISTALRLLCSFLSPLCLCLTFPPLRPLPPATAQRKGRRLSTQRSPSTPPPRIGTPALRNPPMAEESGRPLPKFGDWDVNDPASADGFTVIFNKARDEKKGGNGQDTESPSKDTRTERVESYAAKPSTKKWFCCVTASPTQS

SEQ ID NO: 23543 - protein, 464 aa, Magnaporthe grisea 70-15
MFAPILRRRALQKTSSLRYVTPALTRWYASYPPHTVVKMPALSPTMTAGNIGAWHKKPGDGIAPGDVLVEIETDKAQMDFEFQEEGVLAKVLKETGEKDIAVGNPIAVLVEEGTDVKAFENFTLADAGGEAPASSPPKEEKNVEESSKAASTPTPTPAPEPENTKSAGRLQNALDREPNAEPAAKRLANEKGIKLDGVKGSGKNGKITAEDVKKLGSSGPAAAAAAGPAGALYEDIPISNMRKTIANRLKESVSENPHYFVSSSLSVSKLLKLRQALNSSSEGKYKLRVNDFLIKAIAVASKKVPQVNSSWRDGVIRQFNTVDVSVAVSTPSGLITPIVKAVETKGLESISASVKELAKRARDNKLKSDEYQGGTISISNMGMNTAVERFTAVINPPQAAIVAIGTTKKVAVPVENEDGTTGVEWDDQIVITGSFDHKVVDGAVGAEWMKELKTVVENPLQLLL

SEQ ID NO: 23544 - protein, 382 aa, Guillardia theta
MSKNDFQITRMNDLVCIEFNSNGISRLRKISRKKIITESRTFPKNYFQKLFDLYFEYSYAKEFKKFPINLINEKDKRQIKKFLDDSIQLRDIRQVDPYFESKPTFWIRNNAILLSLEQIRAIVLFNKLFLFDPDNPKVQRAGKIISEKLEKFQEDSVEDRKTPFEFKALEGIFVNICMNLEKDFSYLEPTILENLDDLPTKLTSRMLEELRSFKQRLSQFSIRSQEVQRILQETLENENNLPNHYLSINNNNKKIKLKTTSDYYAIEIISEGFLQVVEHLTHRAELLDNAIDDTEDLVNIRLDTIRNKILFVELSLNIVSLTLSAGGLVAGLMGMNLGIPIFKEENSSTTFFILVSFLIIFSSLTLYLWLLNWCRIKGLYSI

SEQ ID NO: 23545 - protein, 483 aa, Triticum aestivum
  misc_feature (369)..(369): Xaa can be any naturally occurring amino acid
  misc_feature (421)..(421): Xaa can be any naturally occurring amino acid
  misc_feature (429)..(429): Xaa can be any naturally occurring amino acid
MLRAVLLRSASGLRRSPMAAPLSTAAASWLAEGTSPSPPRVRLLIGGDFVESKATEHVDVTNPATQEVVSRIPLTTADEFRAAVDAARTAFPGWRSTPVTARQRIMFKYQELIRANMDKLAENITTEQGKTLKDAWGDVFRGLEVVEHACGMGSLQMGEYVSNVSHGIDTFSIREPLGVCAGICPFNFPAMIPLWMFPIAVTCGNTFVLKPSEKDPGAAMMLAELAMEAGLPKGVLNIVHGTHDVVNNICDDEAIRAVSFVGSNTAGMHIYSRASASGKRVQCNMGAKNHAIILPDADRDATLNALIAAGFGAAGQRCMALSTAVFVGGSEPWEDELVKRASSLVVNSGTANDADLGPVISRQAKDLLXNMTRVHVEVLSGIGTEAPEPERRVHSHNAGFYRAKAMEEDVHRGLSSAIGDXNVPIAEPXAFFSFTGSKASLAGDSNLYGKAGGQFFTQIKTIRYQWKDSSPQSDSLSMHTWQK

SEQ ID NO: 23546 - protein, 575 aa, Aspergillus nidulans FGSC A4
MADALKAEGNKAFAAKDYPTAVEKFTQAIELDSNNHVLYSNRSAVYAAQQEYEKALADAEKAVEIKPDWSKGHQRKGAAYRGIGDLLAAHDAYEEALKLEPGNTQAQSGLDAVKRAINAEAQADGVTGDPMGGLSNIFNDPQLFQKLASNPKTSALLADGDFMNKLKKLQQNPNSIGEEIKDPRFLQVMSVLLGIDMNFGAPPQGGPSGAAAEAEEDVPMPDARPSPPKKEPEPEPEPEDEETIAKKKAQEAGDAEKKIGNDFYKKKQFDEAIEHYTKAWELNKDVTYLNNIGAAKFEKGDLQGAIETCKNAIEEGREHRADFKLIAKAFTRIGTAYEKLGDLDKAIENYNKSLTEHRTPDALTKLRNAEKARDKAKKEAYIDPVEAEKARELGQKKFQEADWPGAVDAFTEMTKRAPDDPRGYSNRAAALIKLMAFPQAVQDCDEAIRCDPKFFRAYIRKSQALAAMKEYSRAIDACSDAAEHDDGSHAREIEQQQQKVLEAQYSSRAGETEQETMERIQKDPEIMSILQDPVMQSILQQAKGDPAALQEHMKNAQVRLKIQKLMAAGVIRLGR

SEQ ID NO: 23547 - protein, 164 aa, Bacteroides fragilis NCTC 9343
MAAQNKSFYDFTVKTIDGKEYPLSGLKGKKVLVVNVASKCGLTPQYAELQELYDQYKDQNFVIIGFPANNFMGQEPGTNEEIAKFCSVNYDVTFPIMAKISVKGKDMAPLYHWLTEKKLNGKQDAPVQWNFQKFMIDENGNWVGFVAPKESPFSETIISWIEKK

SEQ ID NO: 23548 - protein, 348 aa, Ipomoea alba
ETLAGSGIERIPKEYIRPEEERRSIGDIFEEEKMGGGPQVPTVDLKGINSDDLEVREKCREELRKAAVDWGVMHLVNHGIPEELTGRVKAAGEGFFAQPIEEKEKYANDQAAGNVQGYGSKLANNASGQLEWEDYFFHCIFPQDKTDLSIWPKTPSDYIAATREYAKQLRALATKVLAVLSLGLGLDEGRLEKEVGGMEELLLQMKINYYPKCPQPELALGVEAHTDVSALTFILHNMVPGLQLFYGGKWVTAKCVPNSIIMHVGDTVEILSNGKYKSILHRGVVNKEKVRVSWAVFCEPPKDKILLQPLPETVSEAEPPRFPPRTFAQHIKHKLFRQSDQGADTPKT

SEQ ID NO: 23549 - protein, 308 aa, Helianthus annuus
MAILSRYSSSNTLFCIEEQVHEDEDELTHQDSSAIHPLDLQDLCWEHEELVSLFTKEEEQQKQTPWPSSCTLSFRKEAVDWILKVKGCHGFTPLTAILAINYLDRFLSSLHFQKANTPWMIHLVAVTCLSLAAKIQETHVPLLLDLQLEESKFLFEAKNIQKTELLVMSTLKWRMNLVTPISFLDHIVRRLGLSNHLHWDFFKKCEAMILYLVADSRFVCYKPSVLATATMLCVVEEIDPTNSIGYKSQLLDLLKTTKDHINECYKLVMDLSYDNHNKGKRDENERTIYPVSPAGFIGFMCHESSNDS

SEQ ID NO: 23550 - protein, 162 aa, Crypthecodinium cohnii
MSDEDHTFESTDAGASATYPQQAGEIRKGSYLMIKGRPCKCIEVSTSKTGKHGHAKAHIVALDIFSGKKYEDLCPTSHNLDVPFVKRTEYLLTADGTLARACDGHKDDLNLPTVVKVGEPTDRDKKVTAEILESVEKGTTIFVIVQAASGEEKIIQTKTTSG

SEQ ID NO: 23551 - protein, 433 aa, Lactococcus lactis subsp. lactis Il1403
MRKLSPTFIYFFGALGGLLFGYDTGVISGALLFIEKESWQVSSWAWMEGWITAAVLMGAVIGAVVIGPMSDRFGRKRLLLLSAVIFFVGALGSGLSNSAELLIISRVILGMAVGSASALVPTYLSELSPAKIRGGVSTMFQLMIMTGILLAYISNYALKGVSGNWHWMLGLATVPAALLFIGGLFLPESPRFLVRHDNEAGAREILGMINDDPNSIEAEISDIQLMAKEEKQGGLQELFGQMSRPVLIMAIGLAIFQQVMGCNTVLYFAPSIFVAVGFGASAALLAHIGIGIFNVIVTYIAMRVMDKVNRRWMLNFGAWGMGISLVLMSVGMILAENAHIGFGKYLAVIALTVYIAFFSATWGPVMWVMIGESFPLKIRGLGNSFGAAVNWAANWVVSLTFLPLLSFFGTGKIFLIYAACCFLSIWFTSKKSY

SEQ ID NO: 23552 - protein, 412 aa, Helicosporidium sp. ex Simulium jonesii
NESVSIPKGLSEDVVRAISAKKEEPEWMLDFRLKAYRRWLTMEEPCWSDVRYPPIDYQSYTYYSAPKHIPKKASLDEVDPALLATFDKLGIPLVEQKRLANVAVDAVFDSVSIATTFREELAKAGVLFCSISEAVRDCPELVRRYLGSVVPPGDNYFAALNSAVFSDGSFVYVPAGVTCPMELSTYFRINTANSGQFERTLIVVEEGASVSYLEGCTAPAFDTNQLHAAVVELTAASDATIKYSTVQNWYAGDEQGRGGIYNFVTKRGLAGDRAKISWTQVETGSAITWKYPSVVLKGEASVGEFYSVALTNGQQQADTGTKMVHLGRNSRSRIVSKGICAGTSTNAYRGLVSVTPAARNARSHSQCDSMLIGDRAHAHTYPYIAVRNASATVEHEASTSKIGEDQLFYFQQ

SEQ ID NO: 23553 - protein, 573 aa, Chenopodium rubrum
MASYKLPKQVILLLVSLLFFCYGVVELQAAQSPPSNQPYRTAYHFQPRKNWINDPNGPMLFKGIYHLFYQYNPNGVKLRGPPVWGHSTSKDLVNWMPQPLTMEPEMAANINGSWSGSATILPGNKPAILFTGLDPNYEQVQVLAYPKDLNDPYLKEWFLAPKNPVMFPTPQNQINATSYRDPTTAWMLPDGNWRVLIGKSKRRQRGLSLLYRSRDFVHWVKAKHPLYSYERSGMWECPDFFPVYKNGNTMGIDTSVIGPNIKHVLKVSLDVSKHDVYTIGGYDTKKDAYTPDVGFMNDSSLRYDYGKYYASKTFYDGAKKERILLGWANESSSEEDDAKKGWSGIHTIPRTIWLDKSGNQLIQWPISNIEKLRQKSPVFKLYGKLIKGGSLNEVSGITAAQADVEISFKIKDLENVEKFDASWTNPQLLCSQKGGSVKGGLGPFGLMTFQASKGLEEYTAVFFRIFKAYDNKYVVLMCSDQSRSSLNPTNDKTTYGSFVDVNPVREDLSLRVLIDHSVVESFGAKRKECVTARVYPTLAINEKACNLYVFNNGKSDVEITGLTAWSMKKASIA

SEQ ID NO: 23554 - protein, 480 aa, Candidatus Pelagibacter ubique HTCC1002
MDAREKEIEKLKDYKYGFSTDIENTRAPKGLNEEVIKFISNIKKEPQWMLDWRLKAFERLKQLKEPNWQKPKYPKIDYQDLYYYSAPKSMDDKPKSLDELDPKLLETYNKLGIPLQEQARLNGIAVDAVFDSVSVATTFKGELNKKGIIFCSMSEAIQDHPELVKKYLGSVIPISDHYFATLNSAVFTDGSFVYIPEGVRCPMELSTYFRINATETGQFERTLIIADKGSYVSYLEGCTAPMRDENQLHAANVELVALDDAEIKYSTVQNWYPGDKDGKGGIYNFVTKRGLCKGKNSKISWTQVETGSAITWKYPSCILMGDNSVGEFYSIAITNNHQKADTGTKMIHLGKNTKSKIISKGISAGFADNTYRGLVDIAKNADNARNFTQCDSLLMGNKCGAHTVPYIKNKNSSSNIEHEATTSKISDEQLFYCNQRGLNQEEAVSLIVNGFCKEVLQQLPMEFAVEAQKLVGISLEGSVG

SEQ ID NO: 23555 - protein, 601 aa, Solibacter usitatus Ellin6076
MCLTVQSRLAPAVYDRGMALTGGDVLVERIIDWGVEVVFGLPGDGINGIMEALRTRQEKIRFIQVRHEESAAFMACAYAKYTGRLGVCLATSGPGGIHLLNGLYDAKMDSQPVLAITGMHFHDLIGTLAQQDVELDKLFQDVAAFNQRVMSPDHVEGLADLACRTAIDYRQVAHITFPTDLQDKEVSKKERSKRNLPHHSSDVRAEGGHFPREADLRAAAEILNQGKKTVILAGAGALRATDELESAAELLGAPIVKALLGKAAVPDNSPYTTGGIGLLGTKPSQEAMESCDTLLMAGTSFPYIEFYPKPGSARAVQIELDPKRIGLRYPVEVGLVGDCKRTLQALMPMLRRREDRSFLEKAQEGMRDWWKLMEQRGTRTDKPMKPQVVAWELGKRLSENAIVSSDSGTNTTWWARQIPAKRGQMHSCSGNLATMAPGLPYTIAAQIAWPQRQCVAFVGDGGMSMLMADFATAVKYQLPIKVVVVKNNTLGQIKWEQMVFLGNPEYGVELQPIDFAMFARACGARGFTIEDPADCGRILDEALAVDGPVIIEALVDPNEPPLPANITAEQAAKFAESLLRGEPNRKKIALTLLEDRVKELV

SEQ ID NO: 23556 - protein, 519 aa, Candida apicola
MIIGLSDAFALGGIALSFLVAYQFIYFYFIYSPRAKKLGCAPPVIVFSFPLGLPALYKFATAMLHDNLLEYISIRIADMKVRTGFQTLAGQRWLVTLEPENIKTVLATSFKDYSLGFRYDIMYGLLGNGIFTLSGDGWKHSRALLRPQFSREQVSHLESMRTHINLMINNHFKGGQVVDAQALYHNLTIDTATEFLFGESTNTLDPDLAQQGLPGPKGLVTGEQFAEAFTSALEILSVRVIVGAAWFLIWTPKFWRSCKVCHNFIDYFVYKALATPMEKDQEADRYVFIRELTKETSDPRVIRDQALNILLAGRDTTAGLLSFITYYLGAYPEVYAELREAVLSEFGSTDVETPTFEQLKQCKVLQNVIREVLRLHPNVPLNFRQAIVDTKLPTGGGPNGDQPVFVPKGQNVFYSTYSMQRRTDIWGPDATTFRPDRWNEPREALASGWDYIPFNGGPRICLGQQFALTEASYTIVRICQEFSRIEVLHPDVITSKNSMKQRMRLTQTASGGVITRFIR

SEQ ID NO: 23557 - protein, 662 aa, Oryza sativa
METRDDVADASALPYSYSPLPAGDAASADLAAARRSRRRPLCVALFLASAAVILAVAVLSGVRLAGRPATTTMVVPGVVEMEMASRGPESGVSEKTSGAEEMVRLMGGAAGGEAFPWSNAMLQWQRTGFHFQPERNWMNDPNGPVYYKGWYHLFYQYNPDGAVWGNKIAWGHAVSRDLVHWRHLPLAMVPDQWYDVNGVWTGSATTLPDGRLAMLYTGSTNASVQVQCLAVPSDPDDPLLTNWTKYHANPVLYPPRTIGDRDFRDPTTAWRDPSDGDWRIVIGSKDEHHAGIAVVYRTADFVTYDLLPGLLHRVEATGMWECIDFYPVAGGEGVDMTEAMYARNKGVVHVMKASMDDDRHDYYALGRYDPARNAWTPLDAAADVGIGLRYDWGKFYASKTFYDPAKRRRVLWGWVGETDSERADVAKGWASLQSIPRTVELDTKTGSNLLQWPVEEVETLRTNSTDFGGITVDYASVFPLNLHRATQLDILAEFQLDPLAVDAVLEADVGYNCSTSGGAAGRGALGPFGLLVLADKRHRGDGEQTAVYFYVAKGSDGGVTTHFCQDESRSSHADDIVKRVVGNVVPVLDGETFSLRVLVDHSIVESFAQGGRSTATSRVYPTEAIYANAGVFLFNNATSARVTAKKLVVHEMDSSYNQAYMA

SEQ ID NO: 23558 - protein, 303 aa, Streptococcus pneumoniae TIGR4
MYDTIIIGAGPAGMTAALYAARSNLKVALIEGGLPGGQMNNTSDIENYPGYANISGPELAEKMFEPLENLGVEHIYGYVENVEDHGDFKKVMTDDQTYETRTVIVATGSKHRPLGVPGEEELNSRGVSYCAVCDGAFFRDQDLLVVGGGDSAVEEALFLTRFAKTVTIVHRRDQLRAQKVLQDRAFANEKISFIWDSVVREIKGENRVESVVFENVKTGQVTEQAFGGVFIYVGLDPLSDFVKELNIQDQAGWIVTDNHMKTAVDGIFAVGDVRLKDLRQVTTAVGDGAIAGQEAYKFITEHS

SEQ ID NO: 23559 - protein, 414 aa, Zea mays
MYLHVLTFSYPIRCHPDTVELAVQALGCASHNFPIYLGLPLSTKRLTTGCLKPWIEKIAHKLPGWKAGLLNLAGRCTLVKSVLSAIPVYLLIALNVPKWCIKAIDKIRRSFLWKGKRETRGGLGVPDLLTMSWALQLRWLWLGVLWEILEDFHLQDRADKHVWRFTSSGLFKSAYRAFFIGAVVFEPWKRIWKSWAAPKCKFFIWLGINNKCWTADMLKRRGLDFPECCVLCDQEEETVQHLISSCVFARQFWRCVLSPIGFLAVVLKRSNTCFVEWWRGALSLIPKGKKKGFNSVAILGAWSLWKHRNKCVFDGASPCLANLVEGFREEQQNWSLAGAKNLKTLFDPGFFSRTRRRAAHHYIKRGKVQSGPKYNTQRAEKKKEKNRPRPNPQASSPAPQQGETKTEGKPDRPY

SEQ ID NO: 23560 - protein, 848 aa, Oceanobacter sp. RED65
MSNKQDLIVIGNGMVGQKFLQTLADKGKHESFNITVLCEEPRPAYDRVYLSSYFSGKTADDLSLVEKDFFNDNQIEIKLNCKAESIDRENQLVKTSHGENLHYDKLILATGSYPFVPPVEGHDREHCLVYRTIEDLENIEASAKESKVGVVVGGGLLGLEAAKALKDLGLKTHVVEFAPRLMAVQVDDAGGALLKRKIEELGVQVHTSKNTQLITDGDTLRHKMEFADGESLETDLILFSAGIRPQDAIAKQAELELGPRGGIIINNHCQTSDENIYAIGECALWGGMIYGLVAPGYAMASVAVDHITQTGDSEFAGADMSTKLKLMGVDVASIGDCHGRTEGSLSYAYNDEVNQVYKKLVVSADKKQLLGAIMVGEAEDYGNLLQMMLNNIELPEKPELLILPSTDGMEKPALGPDALPETAQICSCYDVSKGQICCSVQDGAQTIGDVKASTSAATGCGGCTALVTQVMNSELEKLGVEVNTDICEHFAYTRQDLYNIIRVEGIESFQELLEKHGKGHGCEICKPAVGSILASVYNDYVLDEKHISLQDTNDIYLGNMQKDGTYSVVPRMPGGEVTPEGLLVIGQIAKDFGLYTKITGGQRIDLFGAQLHELPQIWKRLVDAGFETGHAYGKALRTVKSCVGSTWCRYGVDDSMSLSIEVENRYKGLRAPHKIKFAVSGCTRECAEAQSKDVGIIATENGWNLYVCGNGGMKPRHAELLAQDLDKETLIKYIDRFLMFYIKTADRLQRTSVWRDNLEGGLDYLKSVVVDDSLGLAEELEQQMQHVVGTYQCEWKSTIENPERLKRFKHFINADDTDKNLQFVKERGQIRPANEDERLKKDNLITVG

SEQ ID NO: 23561 - protein, 112 aa, Oceanicola granulosus HTCC2516
MKLIIATIKPFKLEEVREALTGIGVRGMMVTEIKGFGSQSGHTEIYRGAEYAVNFVPKVKLEIVVPANMADQVVATIATTAKTDKIGDGKIFVLDVESALRVRTGETNSDAL

SEQ ID NO: 23562 - protein, 423 aa, Oceanobacter sp. RED65
MLTSSNGRQKLAVIGNGMAAAKLLQELVLSSLDQYDITVFGNEPYAAYNRIMLSPLLAGEKQLNDIITLPRDWYTENNIDLYTGSEYHISKIERGRKRLTCSNGEIFQYDKLVIATGSHPFILPIQGIELDGVLSFRDIADVNKMLKATESYKRAVVIGAGLLGLEAAMGLMQRGMDVTVVHNSDIPLNRQLDEQAGRLLKDSLIDRGLHFKMDANSHHIEGCGNRVQRIVFDDDSFIETDLVVMAIGIRPNIELAQQSGLQCGRGILVSDTLQTYDPSIYALGECIEHRGETFGLIAPLYEQAKVLANHLSEHGVAHFQTLPTATKLKVTGISLFSMGQFIEQQHHEVQTYFDPQSQVYKKLVIENEQLIGAVLYGDVTDGSFYSELIEQERDISEFRDYIMFGQALCHQSLQENAPEEAVA

SEQ ID NO: 23563 - protein, 482 aa, Oceanicola granulosus HTCC2516
MTFMKTWLAAFFIALIAMTAAPEAAWAQDDTVAVETAEDPAGDVATIAETETEAAPVAEMTPPNEEIGYILTTFMFLVTGILVMWMAAGFTMLEAGLVRQKNTTMQLMKNISLFSIAAIMYYVVGYNLMYPGDGWVMSGYVGAFGVSVLEAVGLMDGDVAVETDLTYASVGSDFFFQLMFCATTASIVSGALAERIKLWPFLIFVVVLTGFIYPIQASWKWGGGFLAPGVDGVTDFLDFAGSTVVHSTGGWAALAGALILGPRLGKYRDGRVNPMPGANLPLATLGTFILWMGWFGFNGGSQLYMDTAGNVADISRIMANTNTAAAGGAIAALILTQMLYKKSDLTMVLNGALAGLVSITAEPLTPSLGAATLIGAVGGVIVVFAVPFLDKLKIDDVVGAIPVHLFAGIWGTLAVVLTNPDATLGKQLYSIVVVGVFVFVVSAVVWLILRAVMGIRVSEEDEINGLDTAELGMEAYPEFAKG

SEQ ID NO: 23564 - protein, 421 aa, Clostridium difficile
MSGKDVNVFEMAQSQVKNACDKLGMEPAVYELLKEPMRVIEVSIPVKMDDGSIKTFKGFRSQHNDAVGPTKGGIRFHQNVSRDEVKALSIWMTFKCSVTGIPYGGGKGGIIVDPSTLSQGELERLSRGYIDGIYKLIGEKVDVPAPDVNTNGQIMSWMVDEYNKLTGQSSIGVITGKPVEFGGSLGRTAATGFGVAVTAREAAAKLGIDMKKAKIAVQGIGNVGSYTVLNCEKLGGTVVAMAEWCKSEGSYAIYNENGLDGQAMLDYMKEHGNLLNFPGAKRISLEEFWASDVDIVIPAALENSITKEVAESIKAKLVCEAANGPTTPEADEVFAERGIVLTPDILTNAGGVTVSYFEWVQNLYGYYWSEEEVEQKEEIAMVKAFESIWKIKEEYNVTMREAAYMHSIKKVAEAMKLRGWY

SEQ ID NO: 23565 - protein, 368 aa, Saccharomyces cerevisiae
MARTITFDIPSQYKLVDLIGEGAYGTVCSAIHKPSGIKVAIKKIQPFSKKLFVTRTIREIKLLRYFHEHENIISILDKVRPVSIDKLNAVYLVEELMETDLQKVINNQNSGFSTLSDDHVQYFTYQILRALKSIHSAQVIHRDIKPSNLLLNSNCDLKVCDFGLARCLASSSDSRETLVGFMTEYVATRWYRAPEIMLTFQEYTTAMDIWSCGCILAEMVSGKPLFPGRDYHHQLWLILEVLGTPSFEDFNQIKSKRAKEYIANLPMRPPLPWETVWSKTDLNPDMIDLLDKMLQFNPDKRISAAEALRHPYLAMYHDPSDEPEYPPLNLDDEFWKLDNKIMRPEEEEEVPIEMLKDMLYDELMKTME

SEQ ID NO: 23566 - protein, 394 aa, Ipomoea batatas
MVDANHPKVVCVTGAAGFIGSWLVMTLLQRGYHVHATVRDPGNTKKVKHLLELPKADTNLTVWKGVMEEEGSFDEAIAGCEGVFHVATPMDFDSKDPENEVIKPAINGVLNIINSCVKAKTVKRLVFTSSAGTLNVQPQQKPVYDESCWSDLDFIYAKKMTGWMYFASKILAEKEAWKATKEKKIDFISIIPPLVVGPFITPTFPPSLITALSLITGNQAHYSIIKQGQYVHLDDLCEAHIFLYEHPKAEGRFICSSHHTTIHGLAEMIKQNWPEYYIPSEFKGIEKDLPVVYFSSKKLQDMGFQFKYSLEDMYRGAIETLRKKGLLPYSTKEPAAIEEEQETAPLKVQEPTKQEATTVPLKPAAIEQKQETVPLKFEEPTAIEQKQEVVPLKA

SEQ ID NO: 23567 - protein, 497 aa, Methanosarcina acetivorans C2A
MCGIAGVFGTPDSNLKVKKMLAALGHRGPDACGIHTAGDLSIGNTLLKITGDMPQPLTGKGALVLNGEIFNFRELAAEIGIKIDSDTELLFSLIETGVKEGSTPIDAVCSALSKVNGDYALAYACGGELVLARDPSGVKPLFYCSGTEGEKPEIAFASEKKALAFISRKAKPFPQGGILGFNTESGKITEKIPEGYLEIKSPEKRIYTEHEALSQLKETLEKAVELRLTPTTGIAFSGGIDSTFLAALAKRIDPGVSLYAVGLPDSHDITQAERAAEAIGMRKNLKVHFLSPEEIEAAVPRVVYATESTDPMTVAIGIPLYIVAKTAKEDGKRVLLTGQGADELFGGYRRHEEFLKKGAEVLDREIYSDLATISKINLERDDMVTMANSVELRVPFLDKEVIKTGLAIRPELKVLKKDGYYEDGYYERKYILRKAAKGLIPPEILWKEKKAMQYGTGVQKVLDRLARDSGFSKKQESHIEKYLMQIASEKGFEFVNN

SEQ ID NO: 23568 - protein, 354 aa, Triticum aestivum
  misc_feature (326)..(326): Xaa can be any naturally occurring amino acid
AIFWSEVHFLECVTQDGNDHIHTAKLVLIVATIVSAIAIPKFFFVLCRFLLAPLAVWIFLAYKYMKTRIIIDAVEKFLRIQQMIGPARYSYTDIVAVTSHFRDKLGQGGYGTVYKGVLLPGDVHVAVKMLEGNSNCNGEDFISEVSTIGRIHHVNVVRLVGFCSEEMRRALVYEYMPNGSLDKYIFSAEKSFSWDKLNEIARGIARGINYLHQGCEMQILHFDIKPHNILLDNNFIPKVADFGLAKLYPRDKSFVPSNALRGTVGYIAPEMISRSFGSISSKSDVYSFGMLLLEMAGGRRNADSNAANSSQSYYPSWVYDRLTAKXVDEISPVADMHDWRGCLDVHPDESNDPT

SEQ ID NO: 23569 - protein, 168 aa, Zea mays
MEYGQQGQRGHGATGHVDQYGNPVGGVEHGTGGMRHGTGTTGGMGQLGEHGGAGMGGGQFQPAREEHKTGGILHRSGSSSSSSSEDDGMGGRRKKGIKEKIKEKLPGGHKDDQHATATTGGAYGQQGHTGSAYGQQGHTGGAYATGTEGTGEKKGIMDKIKEKLPGQH

SEQ ID NO: 23570 - protein, 648 aa, Zea mays
  misc_feature (288)..(288): Xaa can be any naturally occurring amino acid
  misc_feature (304)..(304): Xaa can be any naturally occurring amino acid
MIHPLLLSLPSPAIISRPRRPRHHTTTPSLPSHSRSLHHYRLLRVTPLVASCGYRRRIVRGASATMGLFTVTKKATTPFEGQKPGTSGLRKKVTVFQQPHYLQNFVQSTFNALPADQVKGATIVVSGDGRYFSKDAVQIITKMAAANGVRRVWVGQNSLMSTPAVSAVIRERIGADGSKATGAFILTASHNPGGPTEDFGIKYNMGNGGPAPESVTDKIFSNTTTISEYLISEDLPDVDISVVGVTSFSGPEGSFDVDVFDSSLNYIKLMKTIFDFEAIKKLLTSPKXTFCYDALHGVAGAYAXHIFVEELGADESSLLNCVPKEDFGGGHPDPNLTYAKELVERMGLGKSSSNVEPPEFGAAADGDADRNMILGKRFFVTPSDSVAIIAANAVQSIPYFASGLKGVARSMPTSAALDVVAKNLNLKFFEVPTGWKFFGNLMDAGMCSICGEESFGTGSDHIREKDGIWAVLAWLSIIAFKNKDNLGGDKLATVEDIVRQHWATYGRHYYTRYDYENVDAGAAKELMANLVSMQSSLSDVNKLIKEIRSDVSEVVAADEFEYKDPVDGSVSKHQGIRYLFGDGSRLVFRLSGTGSVGATIRVYIEQYEKDSSKTGRDSQEALAPLVDVALKLSKMQEYTGRSAPTVIT

SEQ ID NO: 23571 - protein, 212 aa, Medicago truncatula
MEVHSSVVAKRLWNVLRITFFMMRKSLVSKRKMIMDMNLMMKKGKVLRKSLSNLMSSHNRHHHHSSKNGGGFMVHDYEFSCSNSPNPAFFNMSKRKHHFSFPCINAPNVIDEEPLPCQYQLSPIEFDIENVSKDGKAMVPKTPEYAFNFKFDSSEERKSPLLSPFSVRVSNYSALGDNDEIGNCQVDDEAEDFIRRFYEQLRTQGRMQLPGF

SEQ ID NO: 23572 - protein, 764 aa, Xanthomonas campestris pv. campestris str. 8004
MILATDLDGTFLAGSAEHRHQLYRLVDQHPEIRLIFITGRGLEAVMPLLTDPTIPRPDYVVCDVGATVVDGHTLQPLQPLQSMIDAHWPGEQVVAQAMRAFPQLQRQDMPQERRCSYFCDPHTLAPLRAQIEQTARALGCDVLYSADRYLDILPPDTDKGRTLGALARQLELPRERILVAGDTLNDLSMYLAGFRGVCVGDSEAALTQATAQLDATYHASAPGCGGILEAIAHFGLLADDDPHVPAVQAPRKGGAELVMVYHRLPYDEVVEHGELVRRAPRSPNGIIPSLLSFFEGGQRGSWVAWSVDDPKRGPFQTHTEVDAQRYPTLTAARVPLSKSEVDIFYKRFSKEAFWPMLHVFWERARFREDDWQVFLAVNRKFAQATSAEAAHGATVWIHDYNLWMVPAYLRELRPDLKIAFFHHTYFPSADVFNVVPWRREIIGSLMCCDYVGFHIPRQVENFVDVVRGVMPVERLAQESCAPRFLTYGCAVGLDTMTTCLRVADRDVALGAHPVGTDLRRIRAALSKPDVRNDIFKLRREIGARKLVLSVERLDYTKGTLAKLEAFERLLDSQRQLLGKVTLLMVCVPAAREMTIYRTLQTQIEQAVGRINGRFSRLDWTPVRFFAQALPFEQVVAHYAAAQVMWITPLRDGLNLVAKEFVAVQGIEGGSGVLVLSEFAGAAAELKGAVLTNPHDPADLAAGLLQALAMPDDEAAGRLRQLYDSVEYYNIDHWGRDFLDAVARSRGAHARVPLAAASTVAEPVA

SEQ ID NO: 23573 - protein, 261 aa, Salmonella enterica subsp. enterica serovar Paratyphi A str.
MSESLHLTRNGPILEITLDRPKANAIDAKTSFAMGEAFLNFRDDPELRVAIITGGGEKFFSAGWDLKAAAEGEAPDADFGPGGFAGLTEIFDLDKPVIAAVNGYAFGGGFELALAADFIVCAENASFALPEAKLGIVPDSGGVLRLPKLLPPAIVNEMVMTGRRMSAEEALRWGIVNRVVSQSELMDSARELAQQLVNSAPLAIAALKEIYRATSEMPVEEGYRYIRSGVLKHYPSVLHSEDALEGPQAFAEKRDPVWKGR

SEQ ID NO: 23574 - protein, 384 aa, Exiguobacterium sibiricum 255-15
MLTPSAITIIKSTVPVLAEHGHSITRVFYQRLFENHPEMKHIFNQSNQKNDRQSQALATAVYAAAAYIDQLETLKPTLLPVLHKHRSLQIKPYMYDIVGTELIGAIQDVLKDAATPDIIDAWTAGYGEIAKLFISLEAELYQQDEQATDFEGYQPFVIETMTTESSDIKAFTLRPADGRPLAPYQTGQYVTVRLQAPDGLWQNRQYSLTTVANGTSYTIGVKQDGSVSRQLHGLSVGEKVLLSAPAGSFTLTDASTPFVGLAGGIGLTPLLAMTEAALAVGRKTTLYVAVQDDLDRPFAEQLARFEEQGATIIRYAERNALPGTTPGRLSVADVTNIDPAADTYVCGPEAMIQFVRRYFSGQADKLHFEVFGPSLALEAPTAVS

SEQ ID NO: 23575 - protein, 104 aa, Bacteroides thetaiotaomicron VPI-5482
MALEITDSNYKEILAEGKPVVVDFWAPWCGPCKMVAPIIEELAAEFEGQVIIGKCDVDDNSDVAAEYGIRNIPTVLFFKNGEIVDKQVGAVAKPVFVEKVKNLL

SEQ ID NO: 23576 - protein, 259 aa, Flavobacteria bacterium BBFL7
MSTILLQVDNGVATITLNRPQVFNSFNREMAFAMQDALDQCASNDEVRAVLIVGEGKAFCAGQDIQEITDPELNPGFKAILDDHYNPIVLKIRNLEKPVVAAVNGVAAGAGANIALCCDIVIATESAAFIQAFSKIGLIPDSAGTFFLPRLIGFGKASAAMMLADKITAQEADQMGMIYKAVPDAEFLVTAQKTAHKLAALPTVALANTKKALNQSFYNTVEEQLTLESKLQIESASTEDYAEGVASFMEKRKPNFKGK

SEQ ID NO: 23577 - protein, 220 aa, Medicago truncatula
MKTTYLFVTAFLALASCAFAFDPSPLQDFCVAINDTKNGVFVNGKVCKDPKLATPNDFFFSVKEGNTSNPLGSKVTPVTVNDILGLNTLGISLARIDFASRGLNPPHTHPRATEILIVLEGTLYVGFVTSNPENRLITKVLNKGDVFVFPIGLIHFQLNVGYGNAVAIAGLSSQNPGVITIANAVFGSNPKISSEVLTKAFQVDNNIVDNLQKQFWVDNN

SEQ ID NO: 23578 - protein, 219 aa, Medicago truncatula
MKSICLFFTTFLAMTSFAFTFDPNPLEDFCVIINDIKTWVLVNGKCYKEPKLVTPDDFFFSIKEENISSQLGSQVTLPTVSEILGLNTLGISFARIDFAPKGLNPPHAHPRAAEILIVLEGTLNVGFVTSNPENRLITKVLNKGDVFVFPIGLIHFQHNMGDGNAVVISGLNSHNSRVITIIKEVFGSNQISSELLTKALQVDNNIVDNLQKQFWLDNN

SEQ ID NO: 23579 - protein, 1006 aa, Ralstonia eutropha JMP134
MTQHAARPGRRSANREAPSQASGQSDANGASTRKTASKTPGIKPISKANLMVVPANGALNASPARRSATDKDVPLREDIRFLGRLLGECLREQEGDATFEVVETIRQTAVRFRRENDRAAGTELDRLLKRLSRDQTNQVVRAFSYFSHLANIAEDQHHNRRRRIHALAGSPPQDGSLQHALEKIDAAGVTGKQLRKFLDEALIVPVLTAHPTEVQRKSILDAEREIARLLAERDLPMTARERDRNTAQLRAKVTTLWQTRMLRDSRLTVADEIDNALSYYRTTFLHGIPQLMSELEEDIAAIFPASRKTKGAAAEAAPLAPFMQMGSWIGGDRDGNPNVTAETLDHAATQQSRMILGWYLDEVHALGAELSMSTLMVDASPELLALAEASPDHSAHRADEPYRRALIGIYARLAATSKMLTGQGAPRHPVADAEPYSSAEAFAADVQIVIDSLRAHHGRALTSTRIDALVRAIAVFGFHLASVDMRQVSDVHEAVVAELFAAAGVEKDYAALPESRKLELLLAELRQPRLLTLPYHEYSEQTRNELAILATARELRARYGQRVARNYIISHTETLSDLVEVMLLQKEAGMLKGTLGSKTDPARMELMVIPLFETIEDLQNAAGIMQSLLDLPGFDSVIEHHGVEQEVMLGYSDSNKDGGFLTSNWELYKAELALVQLFEQRKVKLRLFHGRGGTVGRGGGPTYQAILSQPPGTVNGQIRLTEQGEIINSKFANAEIGRRNLETVIAATLEASLLPQQNAPKELSTFEGIMQQLSDRAFGAYRNLVYETPGFKDYFFATTPITEIADLNLGSRPASRKLMDKKNRRIEDLRAIPWGFSWGQCRLLLPGWYGFGSAVKSLLDTAPDEKARKAAVATLRKMVKTWPFFSTLLSNMDMVLAKTDLAVASRYAQLCDDAALRKNVFARISKEWHLTCEMLALVTGHQERLADNPLLARSIKNRFAYLDPLNHLQVELLKRYRSGKDGDDIRVRRGIHLTINGVAAGLRNTG

SEQ ID NO: 23580 - protein, 334 aa, Ralstonia eutropha JMP134
MHASAFPTSSTAVSSSLPHKLVIASRESRLAMWQAEYVRAALQQYYPACDVSILGMTTRGDQILDRTLSKVGGKGLFVKELEFAMAEGRADLAVHSLKDVPMELPDGFALTAVMEREDPRDALVSSTFASLEEMPAGTVVGTSSLRREAALRARYPHLVIKPLRGNLDTRLGKLDRGEYGAIILAAAGLKRLGLGDRIRALIAPEASLPAAGQGALGIEILSTRPDVAAWLSPLNHQPTALAVTAERAVSRMLGGSCQVPLAAHARWVGDQLRLDAFVAMPDGSRQTRASAAGLVVDAAAAEALGASAARDLLSQGAAEILAALADTPAPQDPA

SEQ ID NO: 23581 - protein, 459 aa, Streptococcus pneumoniae TIGR4
MSKIVVVGANHAGTACINTMLDNFGNENEIVVFDQNSNISFLGCGMALWIGEQIDGAEGLFYSDKEKLEAKGAKVYMNSPVLSIDYDNKVVTAEVEGKEHKESYEKLIFATGSTPILPPIEGVEIVKGNREFKATLENVQFVKLYQNAEEVINKLSDKSQHLDRIAVVGGGYIGVELAEAFERLGKEVVLVDIVDTVLNGYYDKDFTQMMAKNLEDHNIRLALGQTVKAIEGDGKVERLITDKESFDVDMVILAVGFRPNTALAGGKIELFRNGAFLVDKKQETSIPDVYAVGDCATVYDNARKDTSYIALASNAVRTGIVGAYNACGHELEGIGVQGSNGISIYGLHMVSTGLTLEKAKAAGYNATETGFNDLQKPEFMKHDNHEVAIKIVFDKDSREILGAQMVSHDIAISMGIHMFSLAIQEHVTIDKLALTDLFFLPHFNKPYNYITMAALTAEK

SEQ ID NO: 23582 - protein, 476 aa, Silicibacter pomeroyi DSS-3
MAPKNEPSFRQSVDMMFNRAVALMDLPPGLEEKIRVCNATYTVRFGVRLRGQIQTFVGYRSVHSEHMEPVKGGIRYAMSVNQDEVEALAALMTYKCALVEAPFGGSKGGLCIDPRQYEEHELEQITRRFAYELAKRDLINPSQNVPAPDMGTGEREMAWIADQYARMNTTDINARACVTGKPLNAGGIHGRVEATGRGVQYALQEFFRDRVGVGKSGLDGKLDGKRVIVQGLGNVGYHAAKFLSEEDGCVITGIIERDGALVSDEGLDVEAVHNWIVKHGGVTGFPDGTFVAEGAKVLEEPCDILIPAAMEGVINLANADRIKAPLIIEAANGPVTAGADEILRKKGCVIIPDMYANAGGVTVSYFEWVKNLSHIRFGRMQRRQEEARHQLVIDELERLDRYLGDAWSMTPQFKEKYLRGADELELVRSGLDDTMRIAYQAMRDVWHERGDVEDLRTAAYLVSIDRVAKSYRAKGL

SEQ ID NO: 23583 - protein, 358 aa, Flavobacteria bacterium BBFL7
MSNFHNITLSHVYKETDDTTVIAFDVPQELKEEFKYRPGQFLTLRAIINGEDLRRSYSLCSSPLDNEWKVAVKEIFEGKFSTYVNRELKSGDVLQVAAPSGDFGIESYGENKAKNYIAFAAGSGITPMLSIIKTHLAQEPNAKFKLFYLNRTVKSIIFKEEIEALKNKYLSRFEVFYFLSREHRDIPLFNGRFDQEKLQTLTQTLINAPHTDHAFICGPEEMIFLIRDELVAAGMKKENVHFELFVSGLSEEDKARAAAALEQKVDGVDVTIIDGSKEFHFVLGDDFDNVLDGAIGAGADLPYACKGGVCSTCKCKVVEGSVAMKVNYALTDEEVEKGFVLSCVSVPTSKKLVVDYDV

SEQ ID NO: 23584 - protein, 305 aa, Synechococcus sp. WH 8102
MVWTVDDIPSQEERVALVTGANSGLGLATARAMSARGATVIMACRCRRKAETARTQLLEAGLTGLDLLDLDLADLNSVRRAAAEVSDRYGHLDLLFNNAGVMAPPRQLTVQGHELQLGVNHLGHMALTLQLLPLMQGRNDARVVTVTSGAQYFGRIRWDDPSWAQGYDRYGAYSQSKLANVMFALELEARQQEQGGGIRSLAAHPGLARTDLQPTAIASGGNRLEAVAYRLMDPLFQSAAMGALPQLHAATAATAQGGEHYGPDQLGGMRGHPTRCRIAPAALDREQRQRLWQLSEELAGGLLMP

SEQ ID NO: 23585 - protein, 486 aa, Candidatus Kuenenia stuttgartiensis
MNTPEPLIFEKSVPNRRCFSLPACDVPESPITQLIPQKMQRSRNPNFPEVSEIDIVRHFTKLSQMNYCVDTHFYPLGSCTMKYNPKINEDAANLEGFTRLHPYQPQEQCQGILKILYDLEQMLADISGMPCFTLQPAAGAHGELTGMLIIQAYMKKQREIRNTIIVPDSAHGTNPASAALCGYRIASVQSDANGLIDVKKLKQMLSNDTAALMVTNPNTLGLFEKDILEISKISHDAGALVYCDGANMNALLGIARPGDMGVDILHLNLHKTFSTPHGGGGPGAGPIGVSRALEVFLPIPRTVKNEDDSYALTYDFPDSIGRVRAFYGHVGIMIRAYTYLLSLGKEGIIKTGENAVLNANYLRNILSEYYEIPYGKTCMHEFVISAKKQKAQGVSALDIAKKLLDYGFHAPTIYFPLIVEEALMVEPTETESRETLDAFAGAMIEIAGAIAQAPETVRNAPQKTRIGRPDEVIAARNPKLRWKGTG

SEQ ID NO: 23586 - protein, 552 aa, Cryptococcus neoformans var. neoformans JEC21
MLPLIRRPLQLRAYTSAAFASTPSSSKLSPLALKAAEDVSSKWKGTTANGGKTKIYIGGEFLDSKTDKWLEVRDPASQTLVNTVPETTPDEFRAAVDAASQAFKTWSKTSIMRRQRAMFELQHLIRQHAPEIANSIVLEQGKTYADALGDVGRGLQVVENATAITSTLLGDKLEVANDMDTYVRRLPLGVAAAISPFNFPAMIVLWSAALATVTGNTLIVKPSERDPGATMIIAELCERAGLPPGVINVVHGTVPTVNRICDDPAIKAISFVGSDKAGEHIYNRAIVQGKRVQANLGAKNHAIIMPDANKNLALNSVAGAAFGAAGQRCMALSVAIFVGTAREMIPELIERAKGLKVTGGFEEGADLGPVISPQAKKRIEDYIGSVEEEGGKILLDGRGYNVSEYPDGSFVGPTIVEAVTTMKVYRNEVFGPVLTIVEADTLDDAIAIINANKYGNGASIFTNSGSTARKFEIEAEPGQIGINVAVPVPLPMFGWSGNKASAKGDIPFYGKSGLDFYTYKKTTTSLWPAADAVGNRVSVTFSNDLFLTFSML

SEQ ID NO: 23587 - protein, 146 aa, Idiomarina loihiensis L2TR
MQYLHTMVRVHDLEQSLNFYCDLLGLKEVSRKDVEKGRFTLVFLAAPDDIERAKKDQAPMLELTYNWDPQTYRGGRNFGHLAFRVENIYELCQKLMDNGVIINRPPRDGHMAFVRSPDNISIELLQKGDSLPPEEPWTSMENIGEW

SEQ ID NO: 23588 - protein, 310 aa, Rickettsia prowazekii
MKITTKVLIIGSGPAGLSAAIYTARSALKPILINGMQPGGQLTMTTDVENYPGFAETIQGPWLMEQMSMQAKNVGTEIISDYVERVDLSKRPFKIFTGTGNEYEADSIIICTGAESKWLGIASEQEFRGFGVSSCAICDGFFFKNQEIVVVGGGNSALEEALYLTNHANKVTVVHRRNSFRAEKILQDRLFKNPKISVIWDHIIDEIVGSNKPKAVTGVKIQNVYTNEINLVNCSGVFIAIGHAPNTALFKGQIAIDDDNYIVTQSGSTRTNVEGVFAAGDVQDKIYRQAVTAAASGCMAALEVAKFLNK

SEQ ID NO: 23589 - protein, 468 aa, Escherichia coli
MKKVNHWINGKNVAGNDYFLTTNPATGEVLADVASGGEAEINQAVATAKEAFPKWANLPMKERARLMRRLGDLIDQNVPEIAAMETADTGLPIHQTKNVLIPRASHNFEFFAEVCQQMNGKTYPVDDKMLNYTLVQPVGVCALVSPWNVPFMTATWKVAPCLALGITAVLKMSELSPLTADRLGELALEAGIPAGVLNVVQGYGATAGDALVRHHDVRAVSFTGGTATGRNIMKNAGLKKYSMELGGKSPVLIFEDADIERALDAALFTIFSINGERCTAGSRIFIQQSIYPEFVKFAERANRVRVGDPTDPNTQVGALISQQHWEKVSGYIRLGIEEGATLLAGGPDKPSDLPAHLKGGNFLRPTVLADVDNRMRVAQEEIFGPVACLLPFKDEAEALRLANDVEYGLASYIWTQDVSKVLRLARGIEAGMVFVNTQFVRDLRHAFGGVKPRTGREGGGYSSKCSRK

SEQ ID NO: 23590 - protein, 491 aa, Bacillus clausii KSM-K16
MTQAKDVALIFELSKQGRVGHSLPNLDIEEQPLESLLPEAYVREEEPELPEVSELQIMRHYTALSKRNHGVDSGFYPLGSCTMKYNPKINEDIARLPGLVHVHPYQPEEQVQGSLKMLYSLQTALAEITGMDEVTLQPAAGAHGEWTGLMMIRAYHEANGDKKRTKVVVPDSAHGTNPASATVAGFESVTVRTNEAGLVDLDHLREVVNEETAALMLTNPNTLGLFEADIQEMADIIHRAGGKLYYDGANSNAILGIARPGDMGFDVVHLNLHKTFTGPHGGGGPGSGPVGVKKELVPFLPKPVLVNDDGFFRFDSDRPQSIGRVKPYYGNYGINLRAYTYIRTMGPDGLRQVSENAVLNANYMMRRLESYYDLPYAQHCKHEFVLSGKRQKKLGVRTLDIAKRLLDFGYHPPTIYFPLNVEECMMIEPTETESKETLDEFIEAMIQIAKEAEESPELVQEAPHHTVIKRLDETLAARKPILRYEMKKETV

SEQ ID NO: 23591 - protein, 359 aa, Cryptococcus neoformans var. neoformans JEC21
MPSNSRQHNIAVIPGDGIGIEVTASTLKVLRAVQKKVGGFELSFDELDYGSARYKAQGSYTPAGWLDHLRKSDAIFFGAVGDPDVPDHISLWELILPMRQTFQQYVNIRPSSILPGIPSRIVGTKPGDLDWIIVRENTEGEYAGQGGRTHVGTEWEVATELAVFTRKGVERVMRFAFETAQSRPKKFLTVVSKSNAQRYGLLLWDEVAEIVSKDFPDVKWDKMLVDAMTVRMVAKPTSLDTIVTTNLHGDILSDLAAGLSGSIGIAHSASLDPTRTSPSLFEPVHGAAFDIMGKDLANPIAAIMSAAEMLRWLGENEAADLVEKACKQSIADGQTTGDLGGKLKTSQVTEAVCKILETL

SEQ ID NO: 23592 - protein, 448 aa, Bacillus clausii KSM-K16
MNTHRYLPMTEEDKKEMLATIGVDSIEALFADIPESTRFKSQLAIEAALKEPELIAHFQKLADENQSIKTYTSFLGAGVYEHYIPSIVDHVISRSEFYTAYTPYQPEISQGELQAIFEFQTMICELTGMDIANSSMYDGPTALAEAAMLSCGHTKKKTILVSKAVHPEARAVLKTNAYGQRLNVIEIDANANVTDIESLKAAYNDEVACVIVQHPNFYGSLEPLAEIEEIVHQGKAQFVVSSNPLALGVLKPPGDFGADIVVGDAQPFGIPVQFGGPHCGYFATTKKLMRKIPGRLVGQTVDEEGRRGFVLTLQAREQHIRREKATSNICSNQALNALAASVAMTALGKQGVKEMAKQNVQKSAYLKKQLSLAGIDVVGDGPTFNEFVINCGQPVKDVNRQLLEKGMIGGFDLGSVEPERNGQMLVCVTELRTKEELDLFANEMGALV

SEQ ID NO: 23593 - protein, 661 aa, Triticum aestivum
  misc_feature (20)..(20): Xaa can be any naturally occurring amino acid
  misc_feature (194)..(194): Xaa can be any naturally occurring amino acid
  misc_feature (197)..(197): Xaa can be any naturally occurring amino acid
  misc_feature (204)..(204): Xaa can be any naturally occurring amino acid
  misc_feature (282)..(282): Xaa can be any naturally occurring amino acid
  misc_feature (357)..(357): Xaa can be any naturally occurring amino acid
  misc_feature (368)..(368): Xaa can be any naturally occurring amino acid
  misc_feature (477)..(477): Xaa can be any naturally occurring amino acid
DTFSCGHLHNISHPFRQQGXYPQRPVLQSYELVCTDSPAIIRINTATYFVTEINYTDSSFWVVDANLDMNSSCPLPHWDQLPYFIGIQRSDKDQSWELLPNTQTVGSFVNCARAVPVSNEFYQYSYTPVPCLSNNHSFVYIVTSTVSIEYLAPSCGYLAMFLLSDPGPGNYYNFSHYADFVKHLRLGFSVRFPXWIXFAYEQLXAQFNRCLDRSFRVRYRDTGDNIESWTMDILLIDFNFWSCIFGFNLDSNNILDYMRAMIHDQSGHQILPPVFALVIATXIVVLCRFLLAPLAVLIFLAHKYWKTRITIDAVEKFLQMPQMIGPTRYAYTDIVAVTSHLRDKLGQGGYGSVFKGXVLLPGKVNIAXKMLEGGPNCNGEDFISEVSTIGRIHHVNVVRLVGFCSEEMRRALVYEYMPGGSLDKYIFSADKSISWDKLNEIALGIARGINYLHQGCEMQILHFDIKPHNILLDSNFXVPKVADFGLAKLYPRDNSFVPSNALRGTVGYIAPEMISRSFGTISSKSDVYSFGMLLLEMAGGRRNADPNAANSSQSYYPSWVYDKLTAQEADAISLVADMHELERKLCIVGLWCIQMKSHDRPTMSEVIEMLEGGFDGLQMPSRPFFCDDEHTAVPDSYPLLSELTEISAEDEISDSYVSRVL

SEQ ID NO: 23594 - protein, 344 aa, Nocardia farcinica IFM 10152
MRIGVLTGGGDCPGLNAVIRAVVRTANGRYGDAIVGFQDGWRGLLEDRKINILNDDRTDRLLNKGGTMLGTARTNPDVLRAGLGKIKQTLDDNGIEALIPIGGEGTLTAASWLSDEGVPVVGVPKTIDNDIDCTDVTFGHDTALSIATEAIDRLHTTAESHQRVMLVEVMGRHAGWIAVNSGMAAGAHLTLVPEEPFDVDEVCTMIKRRFQRGDKHFICVVAEGSHPAPDSGFTLREGGVDEFGHERFTGVAQQLGTEIERRIGKEVRTTVLGHVQRGGSPTPYDRVLATRFGLHAAEAVHAGHFGQMVALHGTAIELVPLAEATKQLKRVPTERYREAQAFFG

SEQ ID NO: 23595 - protein, 236 aa, Pantoea agglomerans
MRGNVYLLWGATTTGKTAFSVSVAKERGWSVIALDRFQGYHEISTGSGAPTNNELEKTERIYITPQRGLADGIITAKDYNYWLKSRVLSLPEGKSDFIIEGGSVSLLKEMVSDEFWADFLWEIKIFRAPSKDVFIKRAKRRITDMLHPEDGRPSIMDEVSSFFMNHKTIHPLEDIDGYRTIIDYCRCKKIGFDKLKIMTTDQEKIIISGIAEEYYAHALWQEQETPCFPHSWSRRW

SEQ ID NO: 23596 - protein, 446 aa, Idiomarina loihiensis L2TR
MTFTVAKFGGTSVADYASMLRCAEIIQSNSSIRLVVVSACAGVTNRLVAIADLQGRQIEKLLNEIYEIHFAIQKRLKNASQVQKSLEQLHHKLALHCQKTTEDQASWRDELLSFGERCSSLLFSSLLVEQGLCSSTLDARQLLKTNSDFGRAQPDEVTTKSHCLEQKQKLESGCVRVTQGFIGSDENNQTTTLGRGGSDYSAALLAAGFNATDLQIWTDVAGIYTTDPRICPSARAIAEMSFSEAAELATFGAKILHPSSLAPAIKNDIRVFIGNSQDALSGGTYISASPTSRPDVRAIALRRDQTLVTVHSLNMLHASGFLARLFEILARYNVSVDLVTTSEVSIALTLDEGGSAANGQALLPAAALEELEQFCRVEVETGLSLVAIIGNGIGRDAHISQLTFNTVNDYAVRLICQGASEHNLCFLVADNEGENVIRTLHDRILR

SEQ ID NO: 23597 - protein, 333 aa, Nostoc sp. PCC 7120
MAATDFKDYYAILGVSKTATPEEIKQAFRKLARKYHPDVNPGNKQAEASFKEVNEAYEVLSDADKRKKYDQFGQYWRQVGEGFPGGGAGVDMGGVDFSQYGNFDEFINELLGRFGGAAPRGGRQSYSYRTPGGRPGGGFGGFNDFGFQDVGAAGGGQDAEATISLTFAEAFAGVQKRFNLGNETIDVRIPAGTKPGTRLRVRGKGQFNPMTQQRGDLYLKVEFQPHSFFQIEGDNLACEIPITPDEAALGASIDVPTPDGSVNVKLPAGVRSGQSLRLRGKGWPIAKGGRGDQFVKVAIVPPKDMSQQEREYYEKIRAIRSYNPRSHLQQVKL

SEQ ID NO: 23598 - protein, 1028 aa, Kluyveromyces lactis NRRL Y-1140
MLKYRSSVTVVRQFARTRVPLGLTPALGYRFVSTKCNVSSNQYGKIYEAKKNGPDAYEPLDTFQRRHLGPSPSNVDQMLKQLGYTDLDQFINGVVPENILVKRPLELNSPENGFTEQQMLKHLEELANKNNHKVRNFIGKGYYGTVLPPVIQRNLLECPEWYTSYTPYQPEISQGRLESLLNYQTVVSDLTGLPVANASLLDEGTAAGEAMLLSFNVAKKKKLTYVIDKRLHKQTKSVLKTRTEPFGIKLVEVDPLDESTWSVLSSDKDVSGCLVQYPDTEGNIIPGETLAKLADIVHQSKGLFAVASDLLALTLLKPPAQFGADIVLGSSQRFGVPFGYGGPHAAFFSVIEKLNRKIPGRIVGVSKDRLGKPALRLALQTREQHIKRDKATSNICTAQALLANIAANYCVYHGPQGLKEIAGRVYGFTTVLANGLSSSNHTLLNKSWFDTLTVELNGISAQDFIKTAVDKYQINLYQVNNETVSLSLDETVTKDDLIALLELFGCNANELPVALPEFPQELTRQDEILSNEVFNTHHSETAMLRYLHRLQSRDLSLANSMIPLGSCTMKLNATVEMIPITWPQFANIHPFQPRDQVEGYEVLIKNLEKDLASITGFDEVSLQPNSGAQGEYAGLRVIRRYFEDRGETHRNICLIPVSAHGTNPASAAMCGLKVIPVNCLKNGSLDLVDLKAKAEKHKDNLAAIMITYPSTYGLFEPGVRTAIDLVHENGGQVYLDGANMNAQVGLTSPGDLNADVCHLNLHKTFSIPHGGGGPGMGPICVQSHLAPYLPAHDVVPMITGVGSDKSIASVSSAPYGSASILPISYAYIKMMGSKGLPFSSVIAMLNANYMMSRLRPHYNILFVGEKGSTTETEDLTHCGHEFIIDLRAYKDQGVEAIDVAKRLQDYGFHAPTLAFPVPGTLMVEPTESENLEELERFIDAMISIKKEIDLFIKGDPQGQVLKNSPHSLEDVVSSDDWSSRGYTREQAVYPLPYLKYNKFWPPVARLDDTYGDTHLMCTCPSVEEVASE

SEQ ID NO: 23599 - protein, 101 aa, Chlorobium tepidum TLS
MAQTLDDLIRTSELPVFIDFWADWCGPCKMVAPSVKQLASEFKGRLIVVKVNVDQQPDAAARFQVQGIPALMLFVGGQLKWRTAGAIPYQQMRQEVLKAIG

SEQ ID NO: 23600 - protein, 216 aa, Bacteroides fragilis NCTC 9343
MKPIISPSILSADFAYLAKDIEMINRSEADWVHIDIMDGVFVPNISFGFPVLKYVAKLTSKPLDVHLMIVNPEKFIPEVKALGAHIMNVHYEACPHLHRVVQLIREAGMQPAVTINPATPITLLQDIIRDVYMVLVMSVNPGFGGQKFIEHSVEKVKELRELIERTGSKALIEVDGGVNLETGARLIAAGADALVAGNAIFAAENPEGMIHAMKGL

SEQ ID NO: 23601 - protein, 409 aa, Desulfovibrio vulgaris subsp. vulgaris str. Hildenborough
MSICKAEEAIDAIRKGEMIILVDDEDRENEGDLTIAAQHVTPEVINFMATHGRGLICLALSPEWVDKLQLPLMARRNESKFGTNFTVSIEARRGVTTGISAADRATTILTAVADDVKAEDIVTPGHIFPLRAQKGGVMVRAGQTEGSVDLAKLANLKPAAVICEIMREDGEMARMPDLIEFAEKHNMKIATIKDLIRYRMQSGLLSVKRVGEAKMPTRYGDFQIIAYENELHDETHIALVKGDISPSEPVLVRVHSECLTGDVLGSLRCDCGGQLAAALCQIAAKGSGVLLYMRQEGRGIGLGNKIKAYGLQDQGYDTVEANHKLGFKADLRDYGIGAQILVDLGVRKMRMMTNNPKKIVGLEGYGIEVVERVPIELESCAFNEEYLRTKKEKMGHLLELKHHENGGDA

SEQ ID NO: 23602 - protein, 105 aa, Neisseria meningitidis
VKPFKLDDVREALTEIGITGMTVSEVKGFGRQKGHTEIYRGAEYAVDFLPKIKIELVLADDAVERAIDVIVEVARSGKIGDGKIFVLPVEEAIRIRTGERSDAAV

SEQ ID NO: 23603 - protein, 1182 aa, Xanthomonas campestris pv. campestris str. 8004
MQMRKHASWVLAAVLLLMGASALAAEQIETPRMRRFGPGDGLPSRMVLALAQDRQGYVWAATSDGLARYDGIGLQVWQHDPLSARSIPGNEVETLLVDDRDRVWLGINGSPLAMFDAEREGFVSFPAVSNACAGQVWALAQAQGALWIGTSNGGLCRREEDGRLTVFRATPDAPDGLPSDTIMSMLTDARGRLWIGTGSGLVMRDGERFVRIAPERLSATVFKLSKDPDGTLWVGSSKGQYRVTPAGVLEPAPWKGAENVRAGTVVHDVHGGYWVAAADGFFRVAPGETALRVMDGDRGSGFLTAESGVLDLLQDRQGGLWLGLISQGLAYLPPDWQRFSTILQTQGKPLESLYLVNAAADGDSFLVTTGDGVYRLGAQGDVVPVVHSAALGGDTVQSVLPNADGSLWIALRDDVTHYVPATGKKRRLGLQVDQDKSQRPELMARGIDGEFWLSIVGGGVQRRAADGRLLAEFRFGTDLSEPGGMVQQLTIRPDGSAWVAAGDDPWVWQGERFRRVIDDAEHEVYALAFVSPREFWTGRPGALERYGWDGHKATLLERVGHAQGMPATEIRGLALGGTDTVWATTSRGLFAYRRGQPQVRMFGQRDGLPDSEFSMRPPVTGPSGQVLALTTSGIVLFDPTRPFAPVPQAQLVIQSVQVRRNDAERPQQVPHKRPIVLQARDRDLRISARLLSFVDPGLARYRYRVDGYDERWVEQGATGERVISRLPPGDYQVQVQARAGTGDWVAAPALTLQVQPPWWMSPAAQMVAVAVCLLLFGLGVWAWRRRVRRQQEWVLARQRQQLAEQASIAKSNFLATLGHEVRTPMTGVLGMSELLLATPLDAKQRGHVDAIRKAGAHLLRLVNDALDLARIEAGKLELVQQPFEPSQLTQELADFMHPIVEARGLRFHYRNQLPAALVVVGDATRVRQILINLLGNAIKFAERGEVGLTVSQHGDCLRFKVRDSGPGIGPEQQKRLFQRFEQGEGARTNARYGGSGLGLAISQELTVAMKGKIRVRSRLGVGTQFTVDLPLPIDRSPLRPVAGEARIPAGAPLRILLVEDDPTVAEVISGLLAGRGHRVVHAAHGLAALSEAVDGEFDVALLDLDLPGLDGFALAAQLRRLGHAFPLLAVTARADGDAQTQAQAAGFDGFLRKPVTADMLVEAIAAVQAVARERDRATPLLG

SEQ ID NO: 23604 - protein, 220 aa, Medicago truncatula
MKTSILFVTAFLALASCAFAFDPSPLQDFCVAINDTKNGVFVNGKFCKDPKLATPNDFFFSVKEGNISNPLGSKVTPVTVNDILGLNTLGISLARIDFASRGLNPPHTHPRATEILIVLEGTLYVGFVTSNPENRLITKVLNKGDVFVFPIGLIHFQLNVGYGNAVAIAGLSSQNPGVITIANAVFGSNPKISSEVLTKAFQVDNNIVDNLQKQFWVDNN

SEQ ID NO: 23605 - protein, 220 aa, Medicago truncatula
MKSIYLFFTAFLALASCAFAFDPSPLQDFCVAINDTKTGVFVNGKFCKNPKLATPNDFFFSVKEGNTSNPLGSKVTPVTVNDILGLNTLGISLARIDFASRGLNPPHTHPRATEILIVLEGTLYVGFVTSNPENRLITKVLNKGDVFVFPIGLIHFQLNVGYGNAVAIAGLSSQNPGVITIANAVFGSNPKISSEVLTKAFQVDNNIVDNLQKQFWVDNN

SEQ ID NO: 23606 - protein, 544 aa, Arabidopsis thaliana
  misc_feature (214)..(214): Xaa can be any naturally occurring amino acid
  misc_feature (244)..(244): Xaa can be any naturally occurring amino acid
  misc_feature (259)..(259): Xaa can be any naturally occurring amino acid
MSSINLSSSSPSTISLSRSRLSQSSTTLLHGLHRVTLPSNHPLSTFSIKTNTGKVKAAVISREDDLLSFTNGNTPLSNGSLIDDRTEEPLEADSVSLGTLAADSAPAPANGFVAEDDDGELDLPTPGFSSIPEAIEDIRQGKLVVVVDDEDRENEGDLVMAAQLATPEAMAFIVRHGTGIVCVSMKEDDLERLHLPLMVNQKENEEKLSTAFTXVTVGAKHGTNPGVSARDRATTILSLASRDXKPEAFNLSGHMTPLXYHRGGVLQRAGHTESCDEFPVLAGLDPVGVLCEIVDDDGSMARLPKLREFAAENNLKVVSIADLIRYRRKRDKLVERASAARIPTMWGPFTAYCYRSILDGIEHIAMVKGEIGDGQDILVRVHSECLTGDIFGSARCDCGNQLALSMQQIEATGRGVLVYLRGHEGRGIGLGHKLRAYNLQDAGRDTVEANEELGLPVDSREYGIGAQIIRDLGVRTMKLMTNNPAKYVGLKGYGLAIVGRVPLLSLITKENKRYLETKRTKMGHMYGLKFKGDVVEKIESESES

SEQ ID NO: 23607 - protein, 256 aa, Guillardia theta
MIVKELIENKSIEQEFDRKIHDILTISEIFVNQNFFNFLNSIKKKKVIFNVFYWTFGGNGVYITGDWDSWNKRIPLCKSGNEFFTIIPLTYGKFQYKFTVDGEWKFAPSTKIQEDKNGNLNNFIDIHDNFGSESIEQSFSDLEIENFNLGESILEKEFKNDPPSIPSHLISFVETKKKKISVNSHRNEFLNLYQNIRVFLNHLIFFDFKCKHNHRIKLPLIKIRIKNKFFTLIINEIKLIFNKICNKAKIILKNLL

SEQ ID NO: 23608 - protein, 220 aa, Medicago truncatula
MKTSILFVTAFLALASCAFAFDPSPLQDFCVAINDTKNGVFVNGKFCKDPKLATPNDFFFSVKEGNTSNPLGSKVTPVTVNDILGLNTLGISLARIDFASRGLNPPHTHPRATEILIVLEGTLYVGFVTSNPENRLITKVLNKGDVFVFPIGLIHFQLNVGYGNAVAIAGLSSQNPGVITIANAVFGSNPKISSEVLTKAFQVDNNIVDNLQKQFWVDNY

SEQ ID NO: 23609 - protein, 525 aa, Ralstonia eutropha JMP134
MLGYRPANLHQGTMQGADTPAHARPPYRIDHQFDRGLVWFRRDLRSTDHAALHYALKHCREVWCVFVFDRDILDPLLARGLKGDRRVDFIRASLIELDATLRAAGGGLIVMNDSAASAIPALARELGVQAVFANHDYEPDAVARDAAVRDSLAGDARVLFTFKDQVIFERDEILTSQGKPFAVFTPYKNAWLKTIQPFDLRPYPIEPYLHALAPLPSKRLVPLPSLEDLGFAPSNLAEVAMPTGSSGGQALFEEFTSRMGDYGRRRDYPALRGPSYLSVHLRFGTVSIRTLARAAHGAVLRGGADSAGAATWLSELVWRDFYFMILHHHPRVAAGEAFHPAYDIIRWRDGETGDRYFESWRDAATGYPLVDAAMLQIRQSGYMHNRLRMVTASFLVKDLGVDWRRGEHYFADQLNDFDFAANNGGWQWAASTGCDAQPWFRIFNPVTQSEKFDPQGRFIRKYLPQLAALPDKYVHAPWTAPQDVLLAAGVRLGENYPRPLVQHDVARKETLERYAVVKEWRRPEG

SEQ ID NO: 23610 - protein, 237 aa, Flaveria bidentis
MEFDEHDEQEEEVGIQLTPGSFDAVGNSGRRKSGGGGGGGGYRYKECLKNHAVGIGGQAVDGCGEFMAAGDEGTLDALKCAACNCHRNFHRKEVEGQQRQHQHQQQAALQHQYITATPYYHHHHRPTGYLHMKPPPSSLHQRQLALPSTSRDDLDEISNPSSSGGGGVGGSGSKKRFRTKFTQDQKDRMLAFSEALGWRIQKHDEAAVQQFCNETGVKRHVLKVWMHNNKHTIGKKP

SEQ ID NO: 23611 - protein, 660 aa, Silicibacter pomeroyi DSS-3
MAAKDTAEDQKPEDQEDEVSLDMSQAQVKKMIAEAREKGYITYDQLNQVLPPDQVSSEQIEDVMSMLSEMGINIIEDEEAEEEEQKGSTDLITTESNREVALAGAQAEKLDRTDDPVRMYLREMGSVELLSREGEIAIAKRIEAGRNTMIAGLCESPLTFQAITIWHDELLSEDILLRDVIDLEATFGNQLDDEDDEPVVATSAVQAVKPQREETPEYDADGNPIVTEDDEDEDDQANMSLAAMEAALKDKVLITLERISSDYAQLSEMQDSRISATLNEDGSFSAHDEATYQSLRSEIVLLVNELHLHNNRIEALIDQLYGINKRVMSIDSSMVKLADQARINRREFIDAYRGRELDPNWLAEMAEKPGRGWQMFIERSSDKVEELRADMAQVGQYVGLDISEFRRIVQQVQKGEKEARQAKKEMVEANLRLVISIAKKYTNRGLQFLDLIQEGNIGLMKAVDKFEYRRGYKFSTYATWWIRQAITRSIADQARTIRIPVHMIETINKLVRTGRQMLHEIGREPTPEELAEKLQMPLEKVRKVMKIAKEPISLETPIGDEEDSQLGDFIEDKNAVLPLDSAIQENLKETTTRVLASLTPREERVLRMRFGIGMNTDHTLEEVGQQFSVTRERIRQIEAKALRKLKHPSRSRKLRSFLDQ

SEQ ID NO: 23612 - protein, 631 aa, Bordetella bronchiseptica RB50
MIHLDGAAVDPAVLQGMTDAIAHRGPDGEGHWIDGNVGLGHRRLAIIDLSPAGHQPMISADSRYVLSYNGEIYNFRELRAELQGEGCQFRSQTDSEVLLHALIVWGVERTLSRLNGMFAFAWWDTRERKLLLARDRYGVKPLYFSMQGTTLAFGSEQKAILASAAFRRNLNKAALLEYFTFQNIFTDQTLLEDVHLLPAGHYAYLDCAKERPQLRLTQYWDFNFHEPAVPGTDTEYREELSRLFRQAVQRQLVSDVELGSYLSGGMDSGSITAVAAASHPYIKTFTCGFDLNSASGIELAFDERSKAEYMSYFFKTEHYEMVLKSGDMERVLPALAWHLEEPRVGQSYPNYYAAKLASKFVRVVLSGAGGDELFGGYPWRYYRAVVNNDFEHYVDKYYLFWQRLIPNSTLKQVFRPVWSDVSHVWTRNIFRDVFNSHADQLYSPEDYINHSLYFEAKTFMHGLLVVEDKLSMAHGLESRVPFLDNDLVDFATRCPVRLKLNNLADVIKLNENEPGHKTNKYFEKTRDGKQILRDVMRDYIPSDIAQAEKQGFSAPDASWFKGESMDFVKRTLFSKHARIYEIMDADTVRSLVAEHLSGERNRRLLIWSLLNVESWLAQYLDHGGVAGKGLA

SEQ ID NO: 23613 - protein, 140 aa, Desulfitobacterium hafniense DCB-2
MTKILVPVDGSPNSDKAIHYALTLARCKDDLLIFLNVQPNYNTPNIKRFATQEQIKVMQEETSKEVLDHSLEIAKDSIAPIRTLLRTGDPGREICKEAQESVVDSIVMGYRGLGAVKRAILGSVATHVLHETSCPVTIVP

SEQ ID NO: 23614 - protein, 443 aa, Lactococcus lactis subsp. lactis Il1403
MKIVIVGSSHAGICAGLRALEEYPEAEITLYDKRNQVSFVSQGIISYLAGQKSVLNQSSYSSVEELKAAGLNMQMETVVEEIDTKNKRLFYRRVNSKKTKLALYDKLIFATGSYPAMTSVPFDKKSKLYFLKSMDDAIKTDEFLKTAKNIAVIGGGMTGVEVARIAQERGIQTTLIHRNKNLLNDYLDEPASHLLESWMNAEGTRLLLNTEVTEIGFDEENTIIQTANGQKIPVDGVIFTIGFRPNSYLLNQQVELGDSGAVIVDEYMQTSCPDVFAVGDVSTTYVNLLEKSYYLPHASDAVRDGEIAAINLLAPRQKINSSQGTYHVPMNNLVMAMTGITIRQAVDAGYDADAVHLLNEHLDGYSPSNIWMIYERRTHQILGLQCIGKTSDMAEYVNIFSLAIQQKLKIEDIEFTDFYFEHGYKDPRGLNRILARLVRENER

SEQ ID NO: 23615 - protein, 120 aa, Triticum aestivum
MAAPRGAALVLAMVLAAMLVAPPATVHAISCSTVYSTLMPCLQYVQQGGSPARGCCTGIQNLLVEANNSPDRRTICGCLENVANGASGGPYITRAAALPSKCNVALPYKISPSVDCNSIH

SEQ ID NO: 23616 - protein, 407 aa, Oceanobacter sp. RED65
MAKGSFERSKPHVNVGTIGHVDHGKTTLTAALTRVCAEVFGGEAVAFDGIDNAPEERDRGITIATSHVEYESTDRHYAHVDCPGHADYVKNMITGAAQMDGAILVCGATDGPMPQTREHILLSRQVGVPYIVVFLNKADLLAEDCGGFGTEEYEEMLELVDMELRDLLSEYDFPGDDTPIVPGSALMALNGQDDNELGTTAVKKLVETLDSYIPEPERAVDGAFIMPIEDVFSIQGRGTVVTGRVERGIVKTGEEVEIVGIKETTKTTVTGVEMFRKMLDEGRAGENCGVLLRGTKRDEVQRGQVLAQPGSITPHTKFEAEVYVLGKDEGGRHTPFFKGYRPQFYFRTTDVTGECILPEGVEMVMPGDNVQLTAELIAPIAMDEGLRFAIREGGRTVGAGVVAKIVE

SEQ ID NO: 23617 - protein, 343 aa, Kineococcus radiotolerans SRS30216
MRVGILTGGGDCPGLNAVIRAAVLAGTQRHGMEFVGFLDGWRGVLEGDTVPLDEAAVRPLLTTGGTILGSSRTNPLADGVEEGVARVRERLGALGVDALLVIGGEDTLGVATALHAAGVPVVGAPKTIDDDLSATDATFGFDTAVQTAVDACDRLATTGASHHRVMIVEVMGRHAGWIALHTGMAAGAHVTLLPEEAVDLDAVAGTVRAVLARGGAPLVVVSEGADVHGGPAGEDAPRDAFGHVRLRGAGEALEQELLARVPGVSTRVTVLGHLLRGGTPSAADRILATRFGLSAVEALASGDLGTMASLHGVEVSQVPLSEATGVLRTVPGARRAETAGIRW

SEQ ID NO: 23618 - protein, 584 aa, Cryptococcus neoformans var. neoformans JEC21
MPSATLIRLSKSLSMSSSNSTVRVALRGGAILNNPRFNKGSAFTHQERSEFALRGRLPYAVDSLEIQVKRAYEQYKSRETNILKNSFLQSMKAQNWTLFYALLQAHLVEMFPIVYTPTEADAIADYSHLFRRSEGLYLTPPGEKNMEEDFLDACEGRELELIVVSDGEAILGIGDQGSGGIGISGAKAVIYSLIAGVDPAKCLAITLDVGTNNQDLLNDPLYIGYREKRLRDDRYDQFVDKFVGLVKKHQPECLLHFEDLVSPMLNDSSEDIGARFNDDIQGTGAVTLAAVQAAISVTKSSLKDQRIVIYGSGSAGLGIARQLRDAIALDSSGSPSEAAKQFWLIDKHGLIKKSLGKDKIRSEIEDEFIRDEGDWGEGETGLKEVVKKIKPTILVGTSTQAGAFTEEVVKEMSKHVDRPIIFPLSNPTRLCEAQPKDVSEWSKGKALMSTGSPFDPVDISDSGEKYIVAECNNALIYPGLGLGSILAKSSKMTDKMIIAGAQRLGQLAPALVKKNANKSLLPDFGDAQKVNFEVALAVLEQAMEDGVARAKDIPEDKDERRKWAENNRWSPGYPNFKYDPEGLK

SEQ ID NO: 23619 - protein, 168 aa, Aspergillus oryzae
MASFQISTELSSIRLMAKSSAFLPAIVKHWHKYLLSQLDDAGACWGVVTSGTRALVDGWLGVMNLTHPKMLVVAEDVELGKPDPRCYLLGRKRLGLEHSSSLVVLEDAPSGIRAGKAAGFKVIALTTTHSLEQLQEAGADWIVEDLRSLSVKGVVDGRILLEIRDAYQ

SEQ ID NO: 23620 - protein, 511 aa, Oceanobacter sp. RED65
MSELIIFDTTMRDGEQSPGASMTLDEKVRIGKALEKMRVDVIEAGFAAASIGDFESIAAVAKAVKESTICSLARAVDNDIDRAAEALKQAERARIHTFIATSPIHMEHKLRMSPDQVVERAVYAVKRARSHVADVEFSCEDAGRSDMDFLCRVIEAAIDAGASTINIPDTVGYAIPEEFGYKIKTLLERIPNADKAIFSVHCHNDLGLAVANSLAAVSNGARQVECTINGLGERAGNAALEEIVMGVKTRPDLFDVQTNIDPQFIVPTSRMVSTITGFPVQPNKAIVGANAFAHESGIHQDGVLKHRETYEIMKAEDVGWGANRMVMGKHSGRAAFRSRLEELGVTFESDQDLNKAFAQFKELADKKHEIFDEDLQALVSAARNMDDKYQLVTLEAHSQTGESPTAKLTITVDGKEVKTSAQGSGPVDATFKAIEEVVKSNTTVQLYSVNAITSGTDSQGEVTVRLEKAGRIVNGLGSDTDIVIASAKAYINALNLLESKTERAHPQSEGV

SEQ ID NO: 23621 - protein, 483 aa, Idiomarina baltica OS145
MAINVVWFKRDLRLSDHEPLKAAISTGRPTLLWFNFEPWLVNDPHYDERHWRFIVESIRDINRKLKAYNTQIYVTYGDTVEQLQIWHQQFSIESLYSHQEVGLLNTFDRDKQVASWCRQHHVNWFESPTGAVQRGLNSRQQWQKHWYETMKAPLATPDLARIQPVKAVSVDYRTLPKSWFERRPSFQYGGPAAAWATLNSFLEQRGRAYHYSISQPIRAQHHCSRLSPYLAWGNLSLRECYQATVDKRRETGWKRPLNAFLSRLHWHCHFIQKFESETAMQHAPLNRAYENYPYRSDTQVEQHLKAWQQGKTGYPMVDAAMRCLLQTGYINFRMRALLVSFLCHYLHIHWQYATTHLAALFLDFEPGIHYPQIQMQAGIIGTNTIRMYNPEKQAIEKDPTGAYIDQWVPELAELPLEIKHAPYRITPMEAQMYGFKLGEDYPSPIVDVDDYRPIARDTLYRIKKSVAGTKEAQRILKRHVVSR

SEQ ID NO: 23622 - protein, 644 aa, Idiomarina loihiensis L2TR
MPTRISNENLAALLNVGSHLSLFIWEDAPGWPVRFVSDNIQDLLGYKKTRLESHEIQYRDLINQDDLPRVMEEVNSLLSKESGSSLTHQDYRVKHAKGHDVWVSDTTVLLRYEDGKNHLYGYLIDVTERKQLQIALEMERNRLQLILDATRLGTWEWNPQTGVTIFNQRWASMFGWDVCELETNVESWSSRLHPEDYDDVWQAIKNHLDGVTPFYESLHRIRHRDGHWVYVLDRGKIIERDNQGRAIRYTGTVTDVTEQKKAELNALKAAHAKNVFLANMSHEIRTPLHGILGIASVLESTDLNPYQQQLLGTIKNSGDYLLTTLNDVLDLTQAEEGQLKVKRGVHSPAKVLGHVIQLFEQPVKDKGLEFIIDIDADIPERTLMDRARIAQVISNLVSNALKFTERGSIAIKASWEVDSEKQSEGDLIVKVQDTGVGIYDTQRIWQLFEQEQDGLNRPEGGSGLGLAIVRNLVQLLSGTIQVDSEPEQGSCFTLCIPMSVQSESAHQPEQNVLPKLTKKQVLVVDDNKINQLIIKEMLLSLNQYVDLVSDAHNALKMMQARDYDVLFMDLHMPHMDGMEATRALRDMHIHQPYVIALTADAYPETRTQALRSGMDDYVTKPFVKADIARVLERFDMLLSRKPTD

SEQ ID NO: 23623 - protein, 86 aa, Medicago truncatula
MSIFSPATRDRADGQVQYGFGLQSESLREASYQRADPNFVMLTPSKEHLAEGIVWETGKRPMLQSDIDAGHFDGLPRELRPLDKIL

SEQ ID NO: 23624 - protein, 415 aa, Desulfovibrio vulgaris subsp. vulgaris str. Hildenborough
MTGKRVVVTGLAALTPLGNDIETSWDNLVAGKSGIGPITRFDATEYASRIAGEVKDFDPEKFMPAKQARRMDRFVQFAVATGKMLVEHSGLVIDESNADRVGVLLGVGLGGLETIEVFHTKLMEAGPNKVSPFMIPMLISNMAPGQVSIFTGARGPNVVMTSACASATHAIGYAFSEIKLGRIDAAITGGVESTITPMGVSGFTALKALSTAHNDSPEKASRPFDKERDGFVLGEGSGMLMLESLDSALARGATIYAEVVGFGASGDAYHMTAPHESGDGMALAMRNAVREAGIPVEAVDHINAHATSTHLNDLCETRAIKQVFGQHAYNIAITANKSMTGHLLGAAGGLESVFTVLTLHRGIIPGTINHETPDPECDLNYMTEGSKEMQAHYALCNSFGFGGTNASLLFKRYED

SEQ ID NO: 23625 - protein, 361 aa, Medicago truncatula
MLIWKWIVSWYRNEVESPPPVVLVPPLFDFPPIAARNRMLESSYDVVFGKLALRCLFNDYFQQPKHFVTRIMLKPIDDPHVDLIATVSGPLDQKPDENINGNALFRWQRVLQMRSCAYYPRYGFGAFGVFPLLLKNRETSQDSGVMGLRYGSGNLSCGVTLMPFAKKDELPKSVWLVSKIGRVTAGVQYEPHHENAKLSNLMNWSCAMAYGVGSQSPLSPSFNFSLELVKSSQFVASFYQHMVVQRRVKNPLEENTVVGITNYIDFGFELQTSVDDAIAANNISDSTFQIAASWQANKNFLVKAKAGPKSSTMALAFKSWWKPSFTFSISGTSSRNFLFNLVSVIIFLSFTSRFLVEIWPW

SEQ ID NO: 23626 - protein, 227 aa, Aspergillus oryzae
MAASTGTGWAQLRQQARSLETQTESLFHSYSQYASMTKLPPDPSEEEIRLESQLKELLEKRQSLVSQLARLLDSEATLTSSALKQNNLARHREVLQDHRRELQRLTSAIAESRDRANLLTNVRSDIDAYRASNPAAAEADYMLEERGRIDQSHNVIDGVLSQAYAINENFGLQRETLASINRRIVGAASQVPGMNALIGKIGSKRRRDALILGAFIGFCFLMLLFFR

SEQ ID NO: 23627 - protein, 156 aa, Halobacterium salinarum
MGISYSVDVDSEASAKAMLRERSISLKHSKAIAREISGETVADAKEYLQAVIDEERSVPFKQHNSGVGHRNDIDGWDAGRYPEKASKDFLKLLSNVSNNADQQGFDADEMVIEHVAPHKVGESQGRKPRAMGRATTWNATLCDVEIVVTETEEVTA

SEQ ID NO: 23628 - protein, 357 aa, Clostridium pasteurianum
MKEFKIAVIPGDGIGPDIVREAVKIMTKVGEKYDTKFNFVEVKAGGDAIDAYGEPLPKETIDVCKSSAAVLLGAVGGPKWDNLEGSKRPERALLGLRGALGLYANLRPAKVYNVLKSASPLKNEIIDEGVDLLVVRELIGGIYFGDRGTKEVNGVETAFDTEKYNVDEVKRIAHSAFKAAMKRRKKVTSVDKANVLDASRLWRKTVNEVSKEYPEVELSHLYVDNTAMQLVRKPSQFDVILTNNIFGDILSDEASMITGSIGMLASSSIREDSFGMYEPIHGSAPDIAGLDIANPLAQILSAAMLMEYSLDMSEAARDVEAAVEKVLNEGYRTADIYIEGTKKVGTSEMGNLVLERL

SEQ ID NO: 23629 - protein, 553 aa, Triticum aestivum
  misc_feature (523)..(523): Xaa can be any naturally occurring amino acid
MAPSIAPPSSPSCLRGKLFPRFTGTNSQPMNSVPTRPPTRPPTLASNSLRRTSSVHLANNNRIKSFHVCHAGVDPSERIVVNGQASPSKTVQADAAALGTISADMAPVVDGFSADDDELDLDLPTEGFSSIPEAIEDIRQGKYVIVVDDEDRENEEDLIMAAFTVTPEQVCSKKQAGTGPEFPGLRRPARPRLQLPLMVVAKENEEKLRTPFTVSVDAKEGTTTGVSAKDRANTVLALASPYSKPEDFNRPGHIFPLKYREGGVLKRAGHTEASVDLAMLAGLPPAAVLCEIVDDDDGSMALLPKLKEFAERENLKIVSIADLIRYRRKRDRLVERLCVTPLQLQWGSFESYCYRSLIDGMEHIAMIKGDVGDGQDILVRVHSECLTGDIFGSARCDCGGQLALAMTMIEKAGRGVVVYLRGHEGRGIGLGHKLRAYNLQDAGRDTVEANEDLGLPADSREYGIGAQILRDLGVRTMRLMTNNPAKYTGLKGYGLSVLGRVPLLTPITNENRRYMETKRLKMXGHIYEDPPNGHTSGMSDEEQYQEDSGSEQD

SEQ ID NO: 23630 - protein, 320 aa, Gentiana lutea
METQFLVSGRNSNIHCRIDSISSSSLTPKSSPVSTSTPTLVVFPPFKLVSKSLRTRSKPRLTVCFVLEEKELKGKLVVASDDDDGAGEVRKQREKEISASAEKLAQKLARKKSERFTYLVAAVMSSFGITSMAVLSVYYRFSWQMEGGEIPLSEMFGTFALSVGAAVGMEFWARWAHEALWHASLWHMHESHHKPREGPFELNDIFAIINAVPAIALLSYGFFHKGLIPGLCFGAGLGITVFGMAYMFVHDGLVHKRFPVGPIADVPYFRRVAAAHTLHHSDKFNGVPYGLFLGPKELEEVGGLQVLEMEINRRTKNNQS

SEQ ID NO: 23631 - protein, 156 aa, Oryza sativa
HEAHLTSPPDKARGDYLLPLLLLSPPTTPPSYISAVLIAWSRGEERRPTLRGEESGGGEGSEPYLTRSAEAYGLGVGHADRAGMEEVDMDEEVRPEFACPYCYEDHDVVSLCAHLEEEHPFEPHAAPCPICSDKIAKDMLNHITVQHGYLFKNRRR

SEQ ID NO: 23632 - protein, 98 aa, Neisseria meningitidis
DVREALTEIGITGMTVSEVKGFGRQKGHTEIYRGAEYAVDFLPKVKIELVLADDAVERAIDVIVEVARSGKIGDGKIFVLPVEEAIRIRTGERADAAV

SEQ ID NO: 23633 - protein, 366 aa, uncultured archaeon GZfos26D6
MMDKVLGYCSEGLSMGEEMEEWFGVPRLAIVGVGGAGNNSMGRLEDLGGLGGVDRIAINTDKLHLDSIECQRKILIGKSLTHGLGSGGAPDVGRKAAELDREVLGELFEGKNFVFLTAGMGGGTGTGAAPVIAEVAKEAGAIVVAMVSFPFEVERRRRDKAAEGIKKLRESTDTVIVLENDKLIKYAGNLPVNEAFKTMDTLIADTIQGIAETITQPSLINLDFADLKSVMEAGGVAVMLVGETSKAENKSESVVEDAFSHPLLDADYKGAKGALIHVTGGSDLTMKETNDIVELLTYELDQDANVIWGARINEGCNGTAKVSAIMTGVEPKWTFGGDYAKRENVINQKERPVHKGAISDIIPVIR

SEQ ID NO: 23634 - protein, 480 aa, Idiomarina loihiensis L2TR
MSSLTKKDCFIEGHWVPTDKRFSVTNPATGEVIAEVADADEDLTQRAINVAETALKSWRKKTARERAMLLRKWYEAMMDNKQALGELMSAEQGKPVAEAVGEVEYGASFVDWFAGEAERIDGDILPNADSSKRVMVTKEPVGVCAAITPWNFPNAMITRKIAPALAAGCTIVVKPPQLTPLSSLALAQLASEVGIPDGVINIIPTSDAKSVGKRLATSPQVRKLSFTGSTGVGKILMQQCSEHVTKLSLELGGNAPFLVFDDADIEQAAEQLIACKFRNAGQTCVSANRILVQQSVAEKFTDAVVSKVKALKVGPGTEENVDLGPLIDQDAVDKVQRLVLAAKSDGATIETGGSVMTELGDLFYAPTVITGVTEEMDISEEEIFGPVVAINTFETEEEGIEKANNTPFGLASYFAAKDTARIFRVSDALEYGMVGVNTGGISHAYNPFGGIKESGVGREGSKYGIDEYLELKTVTLGGLG

SEQ ID NO: 23635 - protein, 326 aa, Rickettsia conorii str. Malish 7
MQITVREALRDAMQEEMIRDDKVFVIGEEVAEYQGAYKVTQGLLEQFGPKRVIDTPITEYGFAGLAVGAAFAGLRPIVEFMTFNFAMQAFDHIVNSAAKTHYMSGGQVKCPIVFRGPNGAASRVAAQHSQNYTACYSHIPGLKVVAPYSAEDHKGLMLTAIRDDNPVVFLENEILYGHSFDVPKTIEPIPFGQAKILREGSSVTIVTFSIQVKLALDAANFVQNDNIDCEVIDLRTIKPLDTETIIESVKKTNRLVVVEEGWFFAGVGASIASIVMKEAFDYLDAPIEIVSGKDLPLPYAVNLETLALPSESDVIEAVKKVCYYSI

SEQ ID NO: 23636 - protein, 99 aa, Neisseria meningitidis
DDVREALTEIGITGMTVSEVKGFGRQKGHTEIYRGAEYAVDFLPKVKIELVLADDAVERAIDVIVEVARSGKIGDGKIFVLPVEEAIRIRTGERSDAAV

SEQ ID NO: 23637 - protein, 398 aa, Cucumis sativus
MALQAASLVSPALSIPKEGKSSVCLKDSSLFGISFSDHLKSEFSSSTLRCKRELNQQIGAIRAQTTATESPAVNKATPDGKKTLRKGSVVITGASSGLGLATAKALAETGKWHVIMACRDFLKAERAAKSAGITKENYTVMHLDLASLDSVRQFVDNFRQSGRPLDVLVCNAAVYLPTAKEPTFTAEGFELSVGTNHLGHFLLSRLLLEDLNKSSYPSKRLIIVGSITGNTNTLAGNVPPKANLGDLRGLAGGLNGLKSSMIDGGEFDGAKAYKDSKVCNMLTMQEFHKRYHEETGITFASLYPGCIATTGLFREHIPLFRILFPPFQKFITQGYVSEDEAGKRLAQVVSEPSLTKSGVYWSWNKNSASFENQLSQEASDAEKARKVWELSEKLVGLA

SEQ ID NO: 23638 - protein, 384 aa, uncultured archaeon GZfos26D6
MRIFVIGYGQAGGRVADSFLEFAKRTGQNFVARALAINTATSDLMGLKNIPMEDRLLIGESLTKGHGIGADNELGAKVATEELYTIQSEIDERGSYQVDAFLLIAGLGGGTGSGGAPVLARRLKKLYEEPVYGLGILPSKDEGSLYSLNAARSLVTLVNEVDNLFLFDNDAWKKGGESVKEAFADINNEIVRRFGLLFGAGEANEVGQMVVDAAEIINTLKGGGISTIGYAAEEIASEGILKKFFGNKKGTVEKLDSVTRITSLVRRAIAGRLTIPCDVSTAEKALIIAAGPPKELSRKGIERSKVRVEDMIRGKEVRGGDFPLVKGQHVATVVLFSGVSDIPRIKELQDTGAEAQEVIKEVTTEKEKDYKELMDTNDNIKPLF

SEQ ID NO: 23639 - protein, 467 aa, Lactobacillus sakei subsp. sakei 23K
MTEETTMPQFENYDYGFSDDVEPVFSTGRGLTEDVVRAISHEKKEPQWMLDFRLKSFHAYEKIPMPDFGPDLSGLDLEHMLYYQKATDKQYRDWEDVPDKIKDTFDRLGVPEAERKYLAGSSAQYESEVVYHNMRDEFEKLGIIFTDMDTALREYPDIVKEYFSTLVKPTDNKFSALNSAVWSGGTFIYVPKGVRTDIPIQSYFRINAENSGQFERTLIVVDEGASVNYVEGCTAPSYSSDSLHAAVVEVFVKRDAYCRYTTIQNWSKNVYSLETKRAQAMENATMEWVDGNLGSKMTMKYPSVYLDGEGARGTMLSIAVAGEGVDQDSGARMIHAAPNTSSSIVSKSIAKDGGAVDYRGTVRFERDSDGSFAHVECDTIIMDDKSSSDTIPYNTILNGNVSMEHEAKVSKISEEQLYYLMSRGISEAKATEMIIMGFVEPFTKELPMEYAVELNRLISYEMEGSVG

SEQ ID NO: 23640 - protein, 147 aa, Glycine max
MLVPLAPYPPPPPPAPYTPPPNGAQSQLVCSGCRNLLLYPVGATSVCCAVCNAVTTVPPPGTEMAQLVCGGCHTFLMYIRGATSVQCSCCHTVNLALEANLVAHVNCGNCKMLLRYQYGARSVKCAVCSFVTSVGASTSTTEQKFST

SEQ ID NO: 23641 - protein, 232 aa, Brassica oleracea var. botrytis
MASSSYAPFSAVFSGFAATKPNPPPTCSAFLVPKRRSNSRNLKNGVSLKSWNKHGFQFKSRNLSVYARATEEKTVHDFTVKDISGKDVSLDKFKGKPLLIVNVASKCGLTSSNYTELSQLYDKYRNQGFEILAFPCNQFGGQEPESNPDIKRFVCTRFKAEFPIFDKVDVNGPSTAPIYQFLKSKSGRFLGDLIKWNFEKFLVDKKGNVVQRYPPTTPPLQIEKDIQKLLVA

SEQ ID NO: 23642 - protein, 470 aa, Arabidopsis thaliana
MTMSENSRNLEAGLLLRKNQNDINECRITAVVLFSTFVSVCGSFCFGCAAGYSSVAQTGIINDLGLSVAQYSMFGSIMTFGGMIGAIFSGKVADLMGRKGTMWFAQIFCIFGWVAVALAKDSMWLDIGRLSTGFAVGLLSYVIPVYIAEITPKHVRGAFVFANQLMQSCGLSLFYVIGNFVHWRNLALIGLIPCALQVVTLFFIPESPRLLGKWGHEKECRASLQSLRGDDADISEEANTIKETMILFDEGPKSRVMDLFQRRYAPSVVIGVGLMLLQQLSGSSGLMYYVGSVFDKGGFPSSIGSMILAVIMIPKALLGLILVEKMGRRPLLLASTGGMCFFSLLLSFSFCFRSYGMLDELTPIFTCIGVVGFISSFAVGMGGLPWIIMSEIFPMNVKVSAGTLVTLANWSFGWIVAFAYNFMLEWNASGTFLIFFTICGAGIVFIYAMVPETKGRTLEDIQASLTDFLQ

SEQ ID NO: 23643 - protein, 483 aa, Rickettsia conorii str. Malish 7
MAEFTPITIAYGDGIGPEIMEAVLYILRKAEARIRLETIEVGEKLYKKHYTSGISEESWESIQRTGIILKAPITTPQGGGYKSLNVTIRKTLQLFANIRPAVSLHPFTRTLHPNLNLTIIRENEEDLYAGIEYRQTHNMYESMKLISHTGCEKIIRYAFEYAVKNNRKKVMCLSKDNIMKFSDGVLHKVFNEIAKEYPQINNAHYIIDIGTARLATKPEIFDVIVTSNLYGDIISDVAAEISGSVGLAGSANIGQHYAMFEAVHGSAPDIAGKDIANPSGLLNAAIMMLVHIGQGDIATLIENAWKKTIEDGVHTADIYNEQSSSKKVGTKEFAEEVTKRLGQLPTKLPKADYPLIAEKQESNIDYKIDTKEVKKLVGTDIFVNMNVSSAHDIADKINKLDLGNFELKTISSKGLKLWPRDTRFETVSDHWCCRFMNKDGTEIKHLDITRLLEALSTANIDFIKVENLFEFDGVAGYSLAQGE

SEQ ID NO: 23644 - protein, 509 aa, Arabidopsis thaliana
MSGSVSGCGSGGCSIVWFRRDLRVEDNPALAAAVRAGPVIALFVWAPEEEGHYHPGRVSRWWLKNSLAQLDSSLRSLGTCLITKRSTDSVASLLDVVKSTGASQIFFNHLYDPLSLVRDHRAKDVLTAQGIAVRSFNADLLYEPWEVTDELGRPFSMFAAFWERCLSMPYDPESPLLPPKKIISGDVSKCVADPLVFEDDSEKGSNALLARAWSPGWSNGDKALTTFINGPLLEYSKNRRKADSATTSFLSPHLHFGEVSVRKVFHLVRIKQVAWANEGNEAGEESVNLFLKSIGLREYSRYISFNHPYSHERPLLGHLKFFPWAVDENYFKAWRQGRTGYPLVDAGMRELWATGWLHDRIRVVVSSFFVKVLQLPWRWGMKYFWDTLLDADLESDALGWQYITGTLPDSREFDRIDNPQFEGYKFDPNGEYVRRWLPELSRLPTDWIHHPWNAPESVLQAAGIELGSNYPLPIVGLDEAKARLHEALSQMWQLEAASRAAIENGSEEG

SEQ ID NO: 23645 - protein, 104 aa, Triticum aestivum
MFRGGTLMRLPSRHLGSHGFSTEIFVSRLSFYTTEEEFKKVFSPFGAIEEVRLVRDNPTGRPKGFGFVRYSSQEEAQKAIKAMDGRILRGRLIFAEMAKEHGTG

SEQ ID NO: 23646 - protein, 342 aa, Rickettsia typhi
MKKRIAIVLFNLGGPEDIEYVKPFLFNLFYDKAIINLPNPLRYVIAKIISIVRERKSQKIYSLIGRKSYLIQETEKQKLAITKKLKEILKEDFIIFISMRYSTPFAKEVICQIKEYNPSEIILLPLYPQFSSTTTGSSVKNFLQNIDIDIPIKTICCYPIEEDFIKAHVSIIKEKLYDKNFRILFSAHGLPKRIIKAGDPYSFQIKETVNKIVKELNIKDLDYKITYQSRVGPIEWLKPSTEYEIELAGKLKKDIIIVPISFVSEHVETLVELDIEYKFIADKYNIQYTRIPTLGTNKIFINSLTNILIRFINKTDTNLVMSSSSKRICPNKFTKCLCNLIN

SEQ ID NO: 23647 - protein, 649 aa, Ralstonia eutropha JMP134
MLDFVRNNRRLMLLLLLVLVFPSFVFFGVESYSRFMDSSHDVAKVDGRAITVQEVDNVVREQSERMRQMLGASYDPRQFEGPMLRKNVTDQLILQRVVANEVAREHLTVSNARLYEAINSIPAIAQLPRKQDGSVDDKAYVQLLAAQGMTPEQFDARMRFDLATQQLGTSIAGTAFVPKSLLDRLIAVRDQQRDVQALLFKPADYASKVQPDAAALKAYYESHQSAFSVPEQAKVEYVVLSGDALAASQAVSPEELKSYYDSNIARFRTEEQRRASHILIAAPKDGPAAARQAAKDKAGKLLEELRKHPDTFADVARKQSQDPGSAEKGGDLGFMGHGALVKPFEDAMYALKDGQISDVVETDYGYHIIKLTGIKPSETKPLDAVRPELEAELRKQFAAKKYAEDADAFGNMVYEQADSLKPAADKFKLTIQTADNVTRQPNPALGQNNPLNNEKVLKALFSDDAIKNKRNTEAVQVGPTTLVAARIVDYRPATVRKFEEVEAKVREGYIAQQAAELARKDGEARVEALKKSDSAQGFGAVTMVSRAKAEGMEPKAVEAIMRADTSKLPAVVGVDLGANGYAVYRITKISQPQQANEGQRQAEAQQLSQLAGQTELGAYYESLKARSKVKILKPVATADTGAGSEAAAQ

SEQ ID NO: 23648 - protein, 112 aa, Rhodobacter sphaeroides 2.4.1
MKKIEAIIKPFKLDEVKEALQAAGVQGLSVTEVKGFGRQKGHTELYRGAEYVVDFLPKVKIEVVLADDMVEAAVEAIVSAARTDKIGDGKIFISPVEQAIRIRTGETGEDAV

SEQ ID NO: 23649 - protein, 121 aa, Triticum aestivum
MARLNSKAVVSAVVLAAVVLMMAGREATALSCGQVDSKLAPCVSYVTGKAPSISKECCSGVQGLNGLARSSPDRKIACRCLKSLATSIKSINMDKVSGVPGKCGVSVPFPISMSTNCNNVN

SEQ ID NO: 23650 - protein, 545 aa, Ralstonia eutropha JMP134
MPTNLHAWNALQQHHDAIRDHQMADWFAENGADRVRQFSLEAAGLYLDYSKNRITPQTMQLLLQLADEAGVPARRDAMFAGEHINATEDRAALHVALRATAGAGFKVDGVPVVPAIQNVLVRMRAFSEAVRSGAWTGTTGERITDVVNIGIGGSDLGPKMVCRALSHLAHDDGHSGPRMHFVSNVDGTELAEALERLDPRRTLMIVCSKTFTTLETMANAHSARQWYLDNGVAEDQLARHFVAVSTNVDAVRAFGIDPANMFEFWDWIGGRFSLWSSVGLSTALAVGFNAFADLLAGGRAMDEHFRTAPLERNMPVVLGMLGIWYRNFFNLPTSCMAPYSTSLELFPAFLQQLEMESNGKTVQLNGRRVRTHTSPVVWGTAGTNGQHAYFQMIHQGSQIVPVDFVAPLVPPRELPGHHAKLLANCFAQAEALMRGRSAEELRAAGMTDELRIAHMVFEGNRPSNTLLMEDLTPHVLGALIALYEHRTFVQGVVWNINSFDQWGVELGKILARPIESELNGAQAGSHDASTAALIARARGVLARNG

SEQ ID NO: 23651 - protein, 334 aa, Xanthomonas campestris pv. vesicatoria str. 85-10
MSIEQLAETAQAMVAPGKGIIAIDESTSTIAKRFASVGIENIEENRRAYRELLLTTPKLSDYISGAILFDETIRQKTKDGVPFAEYMTAHGIIPGIKVDKGAQPLAGMPGELVTEGLDGLRTRLEEYYTLGARFAKWRAVINIGEDIPSGTCIEANSHALARYAALCQEQGLVPMVEPEVIMDGSHDIETCYEVTEATLRSLFGALYEQNVVLEGTILKASMVISGKSCEEQASIEEVAESTVMCLKSTVPAILPGIVFLSGGQTDEQSTAHLNEMHQLGNLPWPLSFSYGRAMQQAALKLWAKDMTGNFAKAQQVIYERAKENGLAALGKWKG

SEQ ID NO: 23652 - protein, 373 aa, Zea mays
  misc_feature (161)..(161): Xaa can be any naturally occurring amino acid
  misc_feature (177)..(177): Xaa can be any naturally occurring amino acid
  misc_feature (191)..(191): Xaa can be any naturally occurring amino acid
MCGILAVLGCSDWSQAKRARILACSRRLKHRGPDWSGLYQHEGNFLAQQRLAVVSPLSGDQPLFNEDRTVVVVANGEIYNHKNVRKQFTGTHNFSTGSDCEVIIPLYEKYGENFVDMLDGVFAFVLYDTRDRTYVAARDAIGVNPLYIGWGSDGSVWIASXEMKALNEDCVRFEIFXPPGHLYSSAGGGFXRWYTPHWFQEQVPRTPYQPLVLREAFEKAVIKRLMTDVPFGVLLSGGLDSSLVASVTKRHLVETEAAEKFGTELHSFVVGLEGSPDLKAAREVADYLGTIHHEFHFTVQDGIDAIEEVIYHDETYDVTTIRASTPMFLMARKIKSLGVKMVLSGEGSDELLGGYLYFHFAPNKEEFHRETCR

SEQ ID NO: 23653 - protein, 175 aa, Pantoea sp. C1B1Y
MLWIWNALIVLVTVIGMEITAALAHRYIMHGWGWGWHLSHHEPHKGWFEVNDLYAAVFAALSILLIYLGSTGVWPLQWIGAGMTLYGLLYFIVHDGLVHQRWPFRYVPRRGYLRRLYMAHRMHHAVRGKEGCVSFGFLYAPPLSKLQATLRERHGVKRGAARDQRSVERDAPPGK

SEQ ID NO: 23654 - protein, 307 aa, Zea mays
  misc_feature (114)..(114): Xaa can be any naturally occurring amino acid
  misc_feature (132)..(132): Xaa can be any naturally occurring amino acid
  misc_feature (149)..(149): Xaa can be any naturally occurring amino acid
  misc_feature (172)..(172): Xaa can be any naturally occurring amino acid
  misc_feature (214)..(214): Xaa can be any naturally occurring amino acid
  misc_feature (236)..(236): Xaa can be any naturally occurring amino acid
MGSWEEHVRRFLLEEEEDDDELFFVILLAIIPYLSEEKRPIHTTSLTGAKKVKEILEGHESWCKSGFRMEKEIFKATSNFLRRENLLCDTRGVSIEEQLGMFMYMISHNASNQXLQKAFQHSGDTIHQNIRXVFEIVPILTQRFVKLSXSVQTHARIATGSRFMPFFRIALXAIDGTYVPITIAEDRAPPYRNRKGTLSHNVMVVYDFDLNFTXVSCGWEGSASDAGVLRSAISKXFIVPEGKFYFVDGGYANTTSYIAPYKGVRYHLSQLRRRRSSQSGYANYKELFIIAMQFFVHVVLLFFSFHS

SEQ ID NO: 23655 - protein, 373 aa, Silicibacter pomeroyi DSS-3
MSFETPGPVEARLRDAISPIEEIIDEARKGRMYILVDHEDRENEGDLCIAAEFADAAAINFMATHGRGLICLPMTADRIDRLGLPMMAVNNSSRHETAFTVSIEAREGVSTGISAADRALTVATAINEQNTMASLATPGHIFPLRAKRGGVLVRAGHTEAAVDISRLAGLNPSGVICEIMKEDGTMARLPDLVDFAERHGMKIGTISDLISYRARNDNLVDETARSTVTSEYGGDWEMRIFTDQTHGIEHVVLVKGDISTPEPVLTRTHALHEASDVLGLGPKPTQELPRAMEKIAAEGRGVVCLFRQPRNALYASDEDGVRTIKQTGLGAQILSKMGLHELILLTDSPQTRYLGLDAYGLTIVGTRPILKDA

SEQ ID NO: 23656 - protein, 874 aa, Ralstonia metallidurans CH34
MTFPPPDPAVAPPAEPASRAPHGRPATSGQSASATTVGSGAPLPASSALASTPSQAGPTGRKRPGQSTVTARTGAPNLPDPLGDNVVGERAVVPPIQQGKSRTALTNELNAEPVAGTVPAAPGGDLFIDAVLAQSYRHFFGPTSQPAVPPRQQVISITRLMEKLAYLKPADQALVREAFQFSDEAHLGQYRQSGEPYITHPVAVAELCADWKLDVQSIMAALLHDVMEDQGITKSELAEKFGPKVSELVDGLTKLDKLEFQSREQAQAESFRKMLLAMARDVRVILVKLADRTHNMRTLDFVPPEKRRRIALETMEIYAPIAHRLGLNTIYRELQELSFKVGSPFRYATLEKAVKAARGNRREVVKRILEAAQSALAGAGIVAELSGREKTLYSIYRKMHDKQLSFSQVLDVYGFRVVVETQMHCYMAMGALHGLYKPMPGKFKDYIAIPKINGYQSLHTTLVGPFGTPVEFQIRTRGMHQIAEAGVAAHWMYKHQADHANDIQQQAHQWLQSLLDIQSQTGDSQEFLEHVKIDLFPDAVYVFTPKGHIRALPRGATALDFAYAVHSDLGNQCVAVKINNELLPLRTELKSGDIVEVVTAPYSKPNPSWLAFVRTGKARAAIRHYLKTTKLDEAIQLGERLLEQSTRQLGIELKAVPQSVWDRMIQWTGNKLKEDIFADLALGRRVPAVVARRMEILLQELSGDVDSALLAAVQTFAGEDAPAVPITGDEGMSMIFSACCRPIPGDSIVGYLGKGEGLQIHVQDCKVAKRLHSKDPEHWIEVMWAKKTTRAFDVSIKIMVRNVKGIVARVAADLTSADANVAHVAMEPQQGGHQEATYMQFVIQVQNRLHLANVMRALRRNPDVIRIFRDRNDG

SEQ ID NO: 23657 - protein, 636 aa, Bordetella bronchiseptica RB50
MCGIFGALWHQGKSVSAIEQQLQVGIARQQHRGPDGHGTWIDPQGRLGLAHVRLSIIDLVSGAQPMRGNSGNVITYNGEIYNYIELRRELGEDSFETTSDTEVILRAYEKWGERCVDRLEGMFAFAIWDAKRGEMFVARDRFGIKPFYYACVQGGFYFGSEVKALTPFLNRVETDANALHDYFAFQFCLGEKTLFAGVRQLKPAHCGYVGRDLELKQRQYWEVQYDLDWDHTEKYFVEQVREKLQHSVDMHMRSDVEVGAYISGGVDSSLVAAMARHGRRSSRFQGFTGKFALGDAFDESRYAQALADEHDILLHQVDITEDDFVNDIAKVIYHLDQPVAGPGSFPQYAVSRLAKDHVKVVLGGQGSDEMFGGYARYLIAYWEQCIKGALDGTMHDGNYIVTYESIIPNLRTLRNYKPLIQEFMAEGIFDSRDKRYYRLINRSNTFGNVVNWGMFEGIASSFDDFKQIFWGKNVGKESYFDSITHFDFKTLLPALLQVEDRMSMAHGIESRVPFLDHKLIELVATVPANVKFQNGELKRLLRVAFQDMLPQAIRERKDKMGFPVPLQVWMRKGGKAREFILDTFRSQNARSRAYLAPGFDIEKMMEQEGLFSRNIWAFLSLELWQQQFHDVHRQTI

SEQ ID NO: 23658 - protein, 317 aa, Flavobacteria bacterium BBFL7
MSLKIRIGTRDSQLAMWQATTVQSQLNALGFQTELAPVKSQGDLNLDEPLYEMGITGIFTKTLDVALVKGDIDIAVHSLKDVPTQLPKGMVQAAVLERASQKDILVYKSSFNPDEAMTIATGSLRRKAQWLNMYAQHHVVDLRGNVNTRLSKLHSNKDWNAAIFAKAGLDRIGLLSQLRGNYGFEYSDLDSFVPAPAQGAIMIAAMGHNTAVLEAVSQLNHAQTQRCVDIERRFLRELEGGCTAPIGAIAQVHDNKIDFTGCLLSIDGTERIDVKDQINLTETDVDLGLAFAKAQSEKVFAKGGKAMMETIKASLTS

SEQ ID NO: 23659 - protein, 142 aa, Oryza sativa
  misc_feature (74)..(74): Xaa can be any naturally occurring amino acid
MATSMITSPLVAPARAKGLPSISRRGSSFAIVCSGGKKIKTDKPYGIGGGMSVDIDASGRKSTVRTCPQLLNFXNGKGVYQFVDKYGANVDGYSPIYSPEEWSPTGDTYVGGTTGLLIWAVTLAGLLGGGALLVYNTSALAG

SEQ ID NO: 23660 - protein, 652 aa, Mycobacterium tuberculosis
MVESGTGIPLPASCWSRTRSRRCMPKDSSPHWIWHSSAARAALYVRGKRRPDGQGRRSCALRNRGRTPATGPGPGQSPSPVGARQPALPSRRPLNPARSRTEVVMSDARVPRIPAALSAPSLNRGVGFTHAQRRRLGLTGRLPSAVLTLDQQAERVWHQLQSLATELGRNLLLEQLHYRHEVLYFKVLADHLPELMPVVYTPTVGEAIQRFSDEYRGQRGLFLSIDEPDEIEEAFNTLGLGPEDVDLIVCTDAEAILGIGDWGVGGIQIAVGKLALYTAGGGVDPRRCLAVSLDVGTDNEQLLADPFYLGNRHARRRGREYDEFVSRYIETAQRLFPRAILHFEDFGPANARKILDTYGTDYCVFNDDMQGTGAVVLAAVYSGLKVTGIPLRDQTIVVFGAGTAGMGIADQIRDAMVADGATLEQAVSQIWPIDRPGLLFDDMDDLRDFQVPYAKNRHQLGVAVGDRVGLSDAIKIASPTILLGCSTVYGAFTKEVVEAMTASCKHPMIFPLSNPTSRMEAIPADVLAWSNGRALLATGSPVAPVEFDETTYVIGQANNVLAFPGIGLGVIVAGARLITRRMLHAAAKAIAHQANPTNPGDSLLPDVQNLRAISTTVAEAVYRAAVQDGVASRTHDDVRQAIVDTMWLPAYD

SEQ ID NO: 23661 - protein, 299 aa, Rickettsia prowazekii
MINSIRIGTRNSTLALIQTNLVIEQIKQIFPDINCEIVPIITSGDLIQNKPLYDIGGKALFLKEIEQALLDKKIDLAVHSLKDIPGKIPVELVIAAVLEREDPRDVLVCLNYQSIETLPQNAVIGSSAVRRKAFIKKIRPDLNIKVFRGNVDSRIKKLMTGEVDAIILSYAGLKRLNVFNQKYCHLIEYSKMLPCIGQGVIAVEIRKDDNAMFNICSQINHLPTFELIKPERAFLEYLDANCSTPIAAYAQYLDAYNIQIDFMLGNLDCTKIIFQTEITNIKTSKICGIKAAKMMLAQQ

SEQ ID NO: 23662 - protein, 486 aa, Burkholderia pseudomallei K96243
MSSSISIAPAVVWFRDDLRVSDHPALMRAAESGRPVIGVYVFDERAGGRPLGGAARWWLHGSLRALGAALAALGGTLALLRGDEHDTIVSFAAALGAGAVYWSRRYALAARAVDNAVQTALDAQGIAVETFNASLLFEPGDLVNADGRPYQVFSAYWRAAMRRGVPAPPLGAPRRLNGGALPAALARQCVALDALGLEPTGPDWAGGLRDAWRFGEDAAHRRLRAFVDSRLGGYAAERDRPGIASTSRLSPYVRFGNLSARQLWHAAADAYAHGAATQADLDKFLSELGWREFGWTQLHHFPDLPRRNLRHTLDGMPWRDDPAALAAWRRGATGYPFVDAGMRELWATGWMHNRVRMVCASFLVKHLLIDWRAGEAWFWDTLVDADAASNAANWQWVAGCGADAAPYFRIFNPVAQGRKFDPDGAYVRRWVPELAGLPPATIHEPWAAPGAQLAAAGVRLGETYPLPIVAHDAARRRALDAFGAIR

SEQ ID NO: 23663 - protein, 376 aa, Azospirillum brasilense
MAGSTIINDTHARDGEQTAGVAFTLDEKIAIAQALDEAGVAELEIGIPAMGREERERIRAVASLGLKARLMVWCRMHDTDLKARSTAVAPSLSVPVSDIHITKKLNGSRAWALREIERKVKTARDHGLEVSLGGEDSSRADMDFLIAAATVAQRPRFRFADTLGVLDPFQHARLHLTAAATDPEIGYHAHTPRLANATAWVTLAAVLGGATHVNTTVNGLGERAGNAPLEEVVVSLKVLYGQDCGVDTRALGAISDLVERASNRPVAVNKSIVRDAVFTHEAGIHVDGLLTDRAPTRISTPPRWGASTASCWASIPARGGEDGLRQLGIACDDATAQACCRGSGRATRAKPPDGGGAARPFHDDACWQAFPAAGGV

SEQ ID NO: 23664 - protein, 282 aa, Burkholderia xenovorans LB400
MDTTLATFEQDVITASTLAPVLVDFWAPWCGPCKTLGPMLEKLEAEAAGKWKLVKVNVDENQELAAHFQVRSIPHVMAFADGRPVDQFVGVLPEGQLREFIERLVPQGADAARLEAQAALAEGRREDAYEALQAALAYDPGFDEARMDRIEMLLEDNRIDEARGEVDLLSPKTTQGIDARFNAIKTRLDALDAAAALPPTDALEAKVAADPADLEARFDLASAFIARLKYAEALEQLLAIVQRDRTFRDDIGRKTMLSVFDLAAHQPELVSQWRRKLSASLF

SEQ ID NO: 23665 - protein, 434 aa, Lactobacillus sakei subsp. sakei 23K
MKKKLAITPEQVAAFSIAHQEPDWFAALRQTALGQIEKLDLPIFEKINYKHWPIMAASAPTLTTSVTDTLPEMVADLTADQPYVIQVGQKIAKLNLPSELAEQGVIFTDIFTALQDYPELVHEYYMQVTVKPDEDRLTAFHTALMNSGMFLYVPKNVVIKQPITAYYVQDSTQATDFIHHVLIVAEQNSEFSYLENLQTMGDHKNLANMVVEVIAKDNSHVHFSAVDAFGKSVTTYLNRRGHLMRDARIDWALGFMNDGNIIGDFDSDLVGDGSHAETKVVAISTGKQIQGIDTRVTNIGPRSIGHILQHGVILEDATLTFNGIGHIIKGAKGADAQQENRVLMLSRTARGDANPLLLIDENDVQAGHAASVGRVNEQQMYYLMSRGLSKEVAQRLVIRGFLGAVLTEIPDKNVRQQLTDTIERKLIDGQKSEH

SEQ ID NO: 23666 - protein, 376 aa, Crypthecodinium cohnii
MADDEVAAIVCDNGSGMVKCGFAGDDAPRAVFPSIVGRPKMPGIMVGMDQKDSYVGDEAQSKRGVLTLKYPIEHGIVTNWDDMEKIWHHTFYNELRVAPEEHPVLLTEAPLNPKANRERMTQIMFETFNVPAMYVAIQAVLSLYASGRTTGIVMDSGDGVSHTVPIYEGYALPHAILRLDLAGRDLTEYMMKILTERGYSFTTTAEREIVRDIKEKLSYIALDYDSEMKVATESSDKEKTYELPDGNIITVGSERFRCPEVLFNPSLLGKESSGIHDTTFQSIMKCDVDIRKDLYANVVLSGGTTMFSGIGERMTKELTALAPSTMKIKVVAPPERKYSVWIGGSILSSLSTFQQMWISKGEYDESGPTIVHRKCF

SEQ ID NO: 23667 - protein, 109 aa, Chloroflexus aurantiacus
AKPIEVHDSDFAEKVLQSKTPVVVDFWAPWCGPCRVIAPILDKLAGEYAGRLTIAKVNTDDNVQYASQLGLKGLPTLVIFKDGREVGRLVGARPEAMYREIFDKVLAMA

SEQ ID NO: 23668 - protein, 390 aa, Brucella melitensis biovar Abortus
MATIRVPTLGESVSIAVDEPLVELETDKVTVEVPAPAAGVLAEITAKEGDTVEVGALLGQISSDGAAVAAAPAQKKEEAKPAAAAPAAAPVASASSGPAMQPAPAAAKLLAESGLSADQVEGSGKRGQVAQRGHSSRPSRKAVSAAPAAPVAARPASSADDASREERVKMTRLRQTIAARLKDAQNTAAMLTTFNEVDMSAVMELRNKYKDRLEKKHGVKLGFMGFFTKAVTHALKEIPAVNAEIDGTDIVYKNFCHVGMAVGTDKGLVVPVIRDADQMSIAEVEKELARLARAARDGSLSMADMQGGTFTITNGGVYSLMSRDLCASRTLGMYKIQECPMVVGGQIVVRPMMYLALSYDHRIVDGKEAVTFLVRAKESLEDPEHLVLDL

SEQ ID NO: 23669 - protein, 396 aa, uncultured archaeon GZfos17C7
MNEEKYDVVVVGAGPAGSITAKTAAERGLDVLLIERNPEIGVPVKCGECVSKEIERFVDIDRRWVCAGIRGTITYGPDGTKVILSVEGAEEVGYVLERKIFDKCLAQEAARAGAEVRVKTQVYGVVNDGGYAKGVYARTAEAEGDIRISADVVVGADGVESRVGKWGGIDTTLHLADVATCAQFLMCDIEVNNEYCEIFFGDDVAPKGYGWIFPKGDHCANVGLGIGGDVSNENHCARDYLNAFVGGKFPNGKIIAEMYGAVPLSGPVYETVANGLILVGDAARHVNPITGGGILEAMQGGEIAGDVIAKAVQENDFSKRRLREYEKRWRKEFGKVLKAGLKTKNIVLGLSSQDLNRFFHALEGEMITKEFSERALLKEIIKRNPRILFKLVRMMF

SEQ ID NO: 23670 - protein, 970 aa, Zea mays
MASTKAPGPGEKHHSIDAQLRQLVPGKVSEDDKLIEYDALLVDRFLNILQDLHGPSLREFVQECYEVSADYEGKGDTTKLGELGAKLTGLAPADAILVASSILHMLNLANLAEEVQIAHRRRNSKLKKGGFADEGSATTESDIEETLKRLVSEVGKSPEEVFEALKNQTVDLVFTAHPTQSARRSLLQKNARIRNCLTQLNAKDITDDDKQELDEALQREIQAAFRTDEIRRAQPTPQDEMRYGMSYIHETVWKGVPKFLRRVDTALKNIGINERLPYNVSLIRFSSWMGGDRDGNPRVTPEVTRDVCLLARMMAANLYIDQIEELMFELSMWRCNDELRVRAEELHSSSGSKVTKYYIEFWKQIPPNEPYRVILGHVRDKLYNTRERARHLLASGVSEISAESSFTSIEEFLEPLELCYKSLCDCGDKAIADGSLLDLLRQVFTFGLSLVKLDIRQESERHTDVIDAITTHLGIGSYREWPEDKRQEWLLSELRGKRPLLPPDLPQTDEIADVIGAFHVLAELPPDSFGPYIISMATAPSDVLAVELLQRECGVRQPLPVVPLFERLADLQSAPASVERLFSVDWYMDRIKGKQQVMVGYSDSGKDAGRLSAAWQLYRAQEEMAQVAKRYGVKLTLFHGRGGTVGRGGGPTHLAILSQPPDTINGSIRVTVQGEVIEFCFGEEHLCFQTLQRFTAATLEHGMHPPVSPKPEWRKLMDEMAVVATEEYRSVVVKEPRFVEYFRSATPETEYGRMNIGSRPAKRRPGGGITTLRAIPWIFSWTQTRFHLPVWLGVGAAFKFAIDKDVRNFQVLKEMYNEWPFFRVTLDLLEMVFAKGDPGIAGLYDELLVAEELKPFGKQLRDKYVETQQLLLQIAGHKDILEGDPFLKQGLVLRNPYITTLNVFQAYTLKRIRDPNFKVTPQPPLSKEFADENKPAGLVKLNPASEYPPGLEDTLILTMKGIAAGMQNTG

SEQ ID NO: 23671 - protein, 98 aa, Bacteroides fragilis NCTC 9343
MEKFEDLIQSQSPVLVDFFAEWCGPCKAMKPILEDLKQQVGEKARIVKIDVDTHEELAVKYRIQAVPTFILFKKGEAVWRHSGMIQASELKGVIEQYT

SEQ ID NO: 23672 - protein, 671 aa, Gibberella zeae PH-1
MCGISAFITHPGHSRSPVLNGDAKQVVEELETSLDLIAHRGPDARGRWFSDNHHVGLGHVRLSIIDLSPSGNQPFHDEQGGIHAVVNGELYDYERYKAQLADEFKFVGNSDCEIVIALYKHYGLSFISHLRGEFAFVLWDENRQQLIAARDRYGIKSLYYTVHQNKLLVATEIKSFLAFGLEPEWCVRSLRDQSWRVDSTTFFEGVYKVRPGHYLICRPNEREEQHPYWDLEYPDKFAKDLRSEDEITEGVRERLLEAVRIRLKADVPVAVYLSGGIDSSSVAGMVSHLIKQGTKLGNETSLLPSSMKCYTVQFDEGSGADESAIARRTADFLGVDIHLVKMDEEALVSRFEDTTWYSEVPLPDLNGMGRLALAEAVHAQGIKAVITGEGSDEHFGGYDAFRADSLSEPDHSWPAMMTDTERQEAHALASKEAQYGIFGDFTPKVPISTKRMFYSNHVASSIARVGSLPFSDWTKVYGNSIPETTMIEGFDGRVRDNILKRWHPVHTAQYMFVKTFMPHFILRYNGDNIDMVHQVESRCPFLDHHLTEYVNNVPPSLKMRYNAKDKSWREKHILREAVKPFVTDEVYNMSKKAYMGPRKFWPGGPLHKKISELVTKANVENLGFVDWQATQDAMDGAFNKQEGLALRRIITVAQFVVLGQRFGVKRASGRR

SEQ ID NO: 23673 - protein, 278 aa, Pseudomonas sp. Y2-1-1
HTRGVWANNLIYNIHLLTGKISEPGNSPFSLTGQPSACGTAREVGTFSHRLPADMLVANPKHRETAEKIWKLPAGTIQEKPGFHAVEQSRKLKDGVLKVYWTQVSNNMQAGPNIMQEVLQGWRNPQAFVVVSDVYPTVSAQAADLILPSAMWVEKEGAYGNAERRTQFWHQLVKAPGEARSDLWQLVEFSKRFTTDEVWPAELLDKAPTYRGKTLYQVLFANGQVDQFPSEQIETGYLNDEAAAFGFYLQKGLFEEYAQFGRGHAHDLAPFDSYHAAR

SEQ ID NO: 23674 - protein, 241 aa, Ustilago maydis 521
MFDSIEDAVADIRAGKFVVVLDDEDRENEGDLIISASLCTTQQMAWFIQHTSGFICIALTPDRIAQLEIPMMVPNNTEKNKTAYTVTVDYKHGTTTGISAHDRALTSRQLADESLSAQADDFTRPGHMNPLRYTQGGVRVRMGHTEASVDLCKLAGLPPAGLLCELVDPDDEDGGIASRDACLKFAKKWGLKVTTIEMLKKYREQKEGELAHDDRQRLADDQVRGVKIDVQKVVPPTTTAA

SEQ ID NO: 23675 - protein, 553 aa, Oceanospirillum sp. MED92
MFDHRKYRRFETVRLKDRTWPDNEINKAPDWCSVDLRDGNQALINPMSVEQKTRMFTLLVKLGFKEIEVGFPSASKPDYDFVRKLVDENLIPDDVSIQVLTQAREELIKKTFDALGGVKKANVHVYNSTSVVQREQVFGMDKDEIKGIAVQGAKWVRDYAKQHPDTQWEFQYSPESYTGTEMDFAVEVCDAVIAEWQPENGQKVVINLPSTVEMSTPNVFADQVEYFCRKLKQRDQVRISLHTHNDRGCAVAAAELGVMAGADRVEGTLMGNGERTGNMDIVTMGMNLYSQGIDPELDFSDIKEIIEVVESCNEIPVSVRHPWAGELVYTAFSGSHQDAIRKSVNYHKEHNQEHWDVAYLPIDPRDISREYEAVVRINSQSGKGGVALVLERDYGIELPKWMHVPLSKVVQSAAEQQGVEVSPEVIYTLYQKHFVEVADAWTMTRYDLHTDEQQVSARFQIGDAEFSGQGAGALEALKDALSNHYQCQFEVTQFDEHAIGSGTDAKAQATVAVEVDGATEYAVAISEDTSSAALQAMLTAFGRHAVAEQRISA

SEQ ID NO: 23676 - protein, 851 aa, Bradyrhizobium sp. BTAi1
MMDKKKRVLGAPAAIALILICIIAGSNLFFLTNLRENALLHAEEDLSRHSLTLAENADRSVKSVDLVLSSVRDYLVRGGAIDAATYGKVAADYQTHLLLKEKIAGLPQIDAVTLIDAQGRLLNFSRYWPIPDVNISDRDYFKALKGDSALRSYVSTPVQNRGDGTWNIYFARRLDDGKGEFMGLLLGAMSVPYLENFFGSTALGLDASVSLIREDGILLAHFPPTSEIGKSTSGFGQRALAAGGVLRELSGRTGEMRLRAAKMLPSYPAMIVVSVPEQHVLKAWRAMATLLVIMSLVSATAVLAAAVLISRLWERHEHLIDAAEAANAAKSTFVAMMSHEIRTPMNAVLGLATTLLETNLDPEQRRSVVAIHNAGDNLLEILNDILDFSKLESGQLSLEDIAFSAEALVHNTLSIIGPRASAKDLKLRSVNDPAVPPALVGDAGRIRQILLNLVSNAVKFTAAGEVVITTRCLAKDDAKATVEWTVTDTGIGIAADKIGSLFANFVQADNSISRRFGGSGLGLAICKRLTEQMGGEIDVTSTLGRGSTFSFRLTLPIAEAVAVPEQNDDSIYAALQSRIAAYGRPLRVLVVDDNPTNRLVATKMLKDFDIQTDTACDGAEAVTAASRFNYDLILMDVRMPEMDGFQATRTIRARGERRSNVPIIAFTANAFMEDIRACREAGMNDFVVKPARKKALVEAILRVLPARTLAIETIASDAPPLAPVEQDDMPAEFSAEAEIPAEPALDREAFAELVGEIGDDAAQEIRNVFFSETDARLKLFRKLSLDSERIKIGREAHSLKSAAGTFGYRRLATYALALEKSAPRLSPREYSELLDNIDAAYEAARAQELQY

SEQ ID NO: 23677 - protein, 112 aa, Bradyrhizobium sp. BTAi1
MKKIEAIIKPFKLDEVKEALQEVGLQGITVTEAKGFGRQKGHAELYRGAEYIVDFLPKVKIEIVIGDDLVERAIEAIRRAAQTGRIGDGKIFVSNIEEAIRIRTGESGLDAI

SEQ ID NO: 23678 - protein, 1011 aa, Thermosynechococcus elongatus BP-1
MTSVLDVTNRDRLIESESLAARTLQERLRLVEEVLVDVLAAESGQELVDLLRRLGALSSPEGHVLHAPEGELLKVIESLELNEAIRAARAFNLYFQIINIVEQHYEQQYNRERAAQEGLRRRSVMSEPISGVSGEGFPLPHTAANATDVRSGPSERLEHSLYEAIPATQQYGSFAWLFPRLQMLNVPPRHIQKLLDQLDIKLVFTAHPTEIVRQTIRDKQRRVARLLEQLDVLEGASPHLTDWNAQTLRAQLMEEIRLWWRTDELHQFKPEVLDEVEYTLHYFKEVIFAVIPKLYRRLEQSLHETFPALQPPRHRFCRFGSWVGGDRDGNPYVKPEVTWQTACYQRNLVLEEYIKSVERLINLLSLSLHWCDVLPDLLDSLEQDQRQLPSIYEQYAVRYRQEPYRLKLAYVLKRLQNTRDRNRALQTYCIRRNEAEELNNGQFYRHGEEFLAELLLIQRNLKETGLACRELDDLICQVEVFGFNLAALDIRQESTCHAEALNEITAYLGILPCPYTELSEAERTRWLLSELSTRRPLIPGELPFSDRTNEIIETFRMVRQLQQEFGTDLCNTYIISMSHEVSDLLEVLLFAKEAGLFDPATGASTLQAIPLFETVEDLKHAPAVLTQLFSLPFCRSYLGSNSTPFLQEVMLGYSDSNKDSGFLSSNWEIYKAQQQLQKIAESFGFQLRIFHGRGGSVGRGGGPAYAAILAQPAQTIKGRIKITEQGEVLASKYSLPELALFNLETVATAVIQASLLRSSIDEIEPWHEIMEELATRSRQCYRHLIYEQPEFIEFFNEVTPIQEISQLQISSRPTRRGGKKTLESLRAIPWVFSWTQTRFLLPAWYGVGTALKEFLEEKPAEHLSLLRYFYYKWPFFRMVISKVEMTLAKVDLEIARYYVQELSQPQNREAFCRLYDQIAQEYRLTTELVLTITGHERLLDGDPALQRSVQLRNRTIVPLGFLQVSLLKRLRQHNSQTTSGAILRSRYGRGELLRGALLTINGIAAGMRNTG

SEQ ID NO: 23679 - protein, 427 aa, Exiguobacterium sibiricum 255-15
MKTETLTMPQLGESVTEGTISLWLVKPGDTVKKYDPIAEVITDKVTAEVPSSFDGVIDKLLAEEGDTLQVGEAIVTLQVSGGSTEVAATEEAVPAIEETPVSSDQSMKKRYSPAVLKLSAEHGIDLEQVSGTGAGGRITRKDLLKIVETGQIKQPDTVEAPTIESVPAAKPAEQRESAQPSRPQAAKSTASTTEDGDIEIPTAGVRQAIATNMVRSKHEAPHAWLMIEVDVTNLVEARNRHKDAFFKQEGVKLTFLPFFMKATVEGLKKHPIMNSTWAGDKIIQKKAINLSLAVATQEALFVPVVKNADELSIKGLARSIDDFGKRAQAGRLSSSEMQGGTFTVNNTGSFGSIQSAPILNFPQAAILSVESIVKRPVWINGMFAARDMVNLCMSIDHRVLDGLVAGQFLQTVKQSLESIDPNQLSLY

SEQ ID NO: 23680 - protein, 168 aa, Avena agadiriana
VMASSATSVAPFQGLKSTAGLPVSRRSNAGLGSVSNGGRIRCMQVWPIEGIKKFETLSYLPPLSEEALLKQIDFLIRSKWVPCLEFSKVGFIFREYGSTPGYYDGRYWTMWKLPMFGCTDASQVIKEVEEVKKEYPDAYVRIIGFDNIRQVQCVSFIAFKPPGCEESG

SEQ ID NO: 23681 - protein, 333 aa, Xanthomonas campestris pv. vesicatoria str. 85-10
MAIKVGINGFGRIGRNVLRSAAQNFANDIEIVAINDLLEPDYLAYMLQYDSVHGRFKADVSVDGNTLIVNGKKIRLTQERDPANLKWDAVGADVVIESTGLFLTKETAQKHIDAGAKKVILSAPSKDDTPMFVYGVNDKTYKGEAIISNASCTTNCLAPLAKVINDKWGIKRGLMTTVHAATATQKTVDSPSNKDWRGGRGILENIIPSSTGAAKAVGVVIPELNKKLTGMSFRVPTSDVSVVDLTVELEKPATYAEICAEVKAQSEGALKGVLGYTEDKVVATDFRGETCTSVFDADAGIALDSTFVKLVSWYDNEWGYSNKCLEMVRVVAK

SEQ ID NO: 23682 - protein, 432 aa, uncultured Acidobacteria bacterium
MAEFQRTNTVSQPLIVREVLPSGLRLITEQMPHVRSVSIGVWLARGARHEPPEHGGIAHFVEHMLFKGTESRSAEDIAQAIDSIGGQMDAFTAKEYAGYYLKVLDEHLPFAVEVLSDIVMNPAFSDDDIEKEKKVILEEIKMVEDTPDDLVHELFTENFWADHPLGRPILGTRETVESLAQENLRRYFGGAYSAPHLIVSAVGNIEHARVLQLIANAFERLPTTAIAIDGQPPRKTTSVLVRNKELEQSHVCLGTHGYQQDHEDRFASYVLNTVLGGSMSSRLFQNVREKRGLAYAVFSGLVAYRDTGSLTIYAGCANEAVGELIDVVVAELRRMRIEPLSDAELTRARDHLKGSLMLGLESTSSRMSNLARQEIYFERQFGLDETLAGIGRVTRDDVQRVAADLLANDALSATVLGAVNGLEIPRERISLG

SEQ ID NO: 23683 - protein, 293 aa, Bacteroides thetaiotaomicron VPI-5482
MTLIDGKAISEQVKQEIAAEVAEIVARGGKRPHLAAILVGHDGGSETYVAAKVKACEVCGFKSSLIRYESDVTEEELLAKVRELNNDDDVDGFIVQLPLPKHISEQKVIETIDYRKDVDGFHPINVGRMSIGLPCYVSATPNGILELLKRYEIETSGKKCVVLGRSNIVGKPMASLMMQKAYPGDATVTVCHSRSKDLVKECQEADIIIAALGQPNFVKEEMVKEGAVVIDVGTTRVPDASKKSGFKLTGDVKFDEVAPKCSFITPVPGGVGPMTIVSLMKNTLLAGKKAIYK

SEQ ID NO: 23684 - protein, 123 aa, Brassica napus
TRQRGLVIAALDEVAWLYNIRGTDVAYCPVVHAFAIITTDSAFLYVDKKKVSNEMSEYFKGLGVEVKEYTHVISDVALLASKQLFSSFSSKIEDMEIDSDQTDRLWVDPASCCYALYSELDAD

SEQ ID NO: 23685 - protein, 1503 aa, Bacillus circulans
MREVKRGKKSGFAALAIWSLFFQLIAPGISAAAEPGADIEDALISEAESEIPVTDAVYQIENPGFETGDLTGWSVAEGGAFGPDSVSDETVWWAERIPYDQEGAYHLNGWKYPESETGVLRSSTFELGGSGWISFKLGGAKDPDKAFINIVEADTGQVVARYGNSAFTDVGFPDPAQGMRLANMEQYKADLSGHIGKKLYIEIVDHATSDWGLIFADAFFMYHESEPAEGIVATDIKPDFERYQIENPSFETGDLTGWTVIEGDAFGPNSVSDETVWWAERIPYDQEGAYHLNGWKYPESETGVLRSSTFELGGSGWITFKLGGGKHTDQVYVSVIEAETGNLIARYGNSAFTDVGFPDPAQGMRLANMEQYKADLSKHIGKKLYLEIVDHGVSDWGLVFADAFRTFHEIVPEDGVVAENIIPAEIANRGFETGNLDGWTVEGDAFHVTDEAHAAKEGNFYALSSTEGQGSITSNTFTLQGAGIINFTVLDILNPEGAYVALYDASSNTVIKITGNIGANEQISWKVQEHYNKKLYVKVVDQSGDAGIAVDGFQARTEGTVVHLGLDEGAGKKALEEVRNVEHDVNYVFNDARYMAPKDPRWTPRGVKGGALLFDGYSNYIEIDADETVPVSDALTIEAWVAPRSYEWGDGNKLSAIVNQSDQDKAEGFALGMYRHGTWSLQAGIGGRWIQAWVNDHPLEKYKWNYVAATFDKEDGMMRLYLNGEEVASQATPAGVPISPSGESLIVGKNNKPVELAGLFSFNMFSGLIDEVKVHNRALTNGEILAEYESAKALHGGVVPEIPNADIDEDPSVFDGDQHRPQYHAIPPQNWMNEAHAPIYYNGKYHLFYQHNPQGPYWHQIHWGHWVSDDMVHWENVRPALAPEAGSLDPDGAWSGSAAYDRNGNPVLFYTAGNDSESPNQRTGLATPADLSDPYLEQWVKYPEPVTEQNGIGIHNEFRDPFVWYDEETDKWYQLVTSGLPDFSSGTALVYVSDDMYNWEYKGPLYVSDRSLYPELGTVWELPVLLPLGTDSTGKKKHIFIINPHEKPEHVPPAKDVQRDVEVYYWIGTWDRDNFRFIPDREAPSKMDVGDGYLTAESGLVTPDGRTVVFSMVQNVRTPQAEYQSGWAHNLALPVALSLDEHDELRIEPIQELQSLRGNKLADISDKNLESANQLIKDIKGDMLEIVMEIDPGEAQKFGLKVRRSENGQEETLIYYDKSDSTFNVDRTKSSIDPDVRVDGIQGGYVNLDGENLKLHIFLDRSVVEAFANYKKKLTTRVYVGRYDSLGLQIWADGDITVKSMEVWAMNALTGEPAAPVYVPENWDNSVYKDITELPNHDFAMGDLTGWIAEGDAFQNIHVTDAKFFWDTIYFNPSQKIPGGYHLWGFNEQAGGDSLTGTLRSQNFVLGGNGRIDFLMSGGRDIDRLYVALVRASDGKELFKETATNYEEYQRKIWDASDYIGEELYIKVVDQSTGGFGHLNVDDFNVPVQVMRTDRSNRSNNRS

SEQ ID NO: 23686 - protein, 628 aa, Bordetella bronchiseptica RB50
MCGVLGAWWRHHDEHEDARFAAGLRKLAHRGPDDRGSEHFAAPHGRLSLGHTRLAVIDLSAAGHQPMHADADRLAVVFNGEIYNYRELRSELRQIGAIFRGDSDTEVLLAAWQHWGVAALRRFKGMFAFALYDRRQQTLTLARDAFGIKPMYYHAAPERLLFGSELPAVQALLPHPPRLNWQRAYDYLAYGQYDQPPDTFIAGIRQLPAGHLLTLDLRTGRAGEPMAWDDPASQECRPIGFQEAAEELRARFLDNVRLHLRSDVPIGAALSGGIDSSAIVCAMRWLEPDLPIQTFSFISDDTHRSEERWVDLVNQHCGATGHKIHIAPHELLDDLDDLIRVQGEPVGSTSIYAQYRVFKLAREHGVVVTLDGQGADELLGGYGGYPTERLASLLETGRLGAAARLLRQQGRGAPARLLQAAALAAGGRHLANLRHATGRQHAPAWLDAQVLRDQGVTMREPAHAWAAATPLRGRRLVNELAHALYHRGLGALLRHGDRNSMRFSVESRVPFLTQDLAEFALSLPERYLVSDAGQTKHIFRKAMRGIVPDSILDRDDKIGFATPEQQWMQATAPQMRQWLVDAADIPFLRNAEVTAQFDAMIAGATPFSWQAWRWVNFQRWMQHATVLP

SEQ ID NO: 23687 - protein, 425 aa, Arabidopsis thaliana
MVVEEENRSMEEGLLQHQNDRDDRRITACVILSTFVAVCSAFSYGCAAGYTSGAETAIMKELDLSMAQFSAFGSFLNVGGAVGALFSGQLAVILGRRRVPVYIAEITPKHVRGAFTASNQLLQNSGVSLIYFFGTVINWRVMAVIGAIPCILQTIGIFFIPESPRWLAKIRLSKEVESSLHRLRGKDTDVSGEAAEIQVMTKMLEEDSKSSFSDMFQKKYRRTLVVGIGLMLIQQLSGASGITYYSNAIFRKAGFSERLGSMIFGVFVIPKALVGLILVDRWGRRPLLLASAVGMSIGSLLIGVSFTLQQMNVLPELIPIFVFVNILVYFGCFAFGIGGLPWVIMSEIFPINIKVSAGTIVALTSWTSGWFVSYAFNFMFEWSAQGTFYIFAAVGGMSFIFIWMLVPETKGQSLEELQASLTGTS

SEQ ID NO: 23688 - protein, 563 aa, Xylella fastidiosa Ann-1
MCSIFGIFNLQPSDNLQILRHQALECSQRQRHRGPDWSGVYVDVGAILVHERLAIVDPAGGAQPLFSEDGTLALAVNGEIYNHAVLKGTLQQPYAFQTHSDCEVINALYREETPTSFLNRLNGIFAFALWDKTTGRGLIARDPMGVVPLYWGHDQDGRLRVASEMKALVEHCPDVAQFPPGHWYDTTTGTLVKYYERPWKNYSAVEGVQVSLQELREAFERAVHRQLMTDVPYGVLLSGGLDSSLVAAVAARYARHRIETNDQSEAWWPRLHSFAIGLKDSPDLSAANVAAEALNTVHHRFEYTFQEGLDVLPEVIRHIETYDVTTIRASTPMFLLARRIKAMGVKMVLSGEGSDEIFGGYLYFHKAPNAREFHEELVRKLNALYYYDCLRANKAMMAWGVEPRVPFLDREFLDVAMRMDAQHKMVDKTSNGPQRMEKGILRAAFDGYLPPSILWRQKEQFSDGVGYGWIDGLKAHAETQVSDHALATAETRFQVNPPQTKEAYYYRSIFERFFPSPAAAETVPGGKSIACSSPAAIAWDASFATMADPSGRAVSGVHQQALL

SEQ ID NO: 23689 - protein, 334 aa, delta proteobacterium MLMS-1
MGIKVAINGFGRIGRSIFRAIELDPAFKEIEIVAINDLTPPATLAHLLKYDSVMGIYPHEVKAGDGEIRVDDHPVRVYNQRDPKELPWGELGVEYVIEATGLFTDSDKAQAHLDAGAKKVVISAPAKGQVKTIVMGVNEEDYDPATDHIVSNASCTTNCLAPVAKVIVERFGIKSGLMTTVHAYTGDQRLLDFPHNDLRRARAAAMSMIPTKTGAAAAVALVLPELKGKFDGLAVRVPTPNVSLVDVVMELEQETTVTEVNEALKQATNRYLGYSEEPLVSIDYQGDPRSSVVDAISTKVLGSTVKILSWYDNEWGYSNRVLDLILHMEENRTL

SEQ ID NO: 23690 - protein, 282 aa, Campylobacter jejuni subsp. jejuni NCTC 11168
MTLLDGKALSAKIKEELKEKNQFLKSKGIESCLAVILVGDNPASQTYVKSKAKACEECGIKSLVYHLNENITQNELLALINTLNHDDSVHGILVQLPLPDHICKDLILESIISSKDVDGFHPINVGYLNLGLESGFLPCTPLGVMKLLKAYEIDLEGKDAVIIGASNIVGRPMATMLLNAGATVSVCHIKTKDLSLYTRQADLIIVAAGCVNLLRSDMVKEGVIVVDVGINRLESGKIVGDVDFEEVSKKSSYITPVPGGVGPMTIAMLLENTVKSAKNRLN

SEQ ID NO: 23691 - protein, 394 aa, Chlamydia trachomatis
MSKETFQRNKPHINIGTIGHVDHGKTTLTAAITRALSGDGLADFRDYSSIDNTPEEKARGITINASHVEYETANRHYAHVDCPGHADYVKNMITGAAQMDGAILVVSATDGAMPQTKEHILLARQVGVPYIVVFLNKIDMISEEDAELVDLVEMELAELLEEKGYKGCPIIRGSALKALEGDAAYIEKVRELMQAVDDNIPTPEREIDKPFLMPIEDVFSISGRGTVVTGRIERGIVKVSDKVQLVGLRDTKETIVTGVEMFRKELPEGRAGENVGLLLRGIGKNDVERGMVVCLPNSVKPHTQFKCAVYVLQKEEGGRHKPFFTGYRPQFFFRTTDVTGVVTLPEGVEMVMPGDNVEFEVQLISPVALEEGMRFAIREGGRTIGAGTISKIIA

SEQ ID NO: 23692 - protein, 344 aa, Saccharomyces cerevisiae
MSAGIGESRTELLTWLNGLLNLNYKKIEECGTGAAYCQIMDSIYGDLPMNRVKFNATAEYEFQTNYKILQSCFSRHGIEKTVYVDKLIRCKFQDNLEFLQWLKKHWIRHKDESVYDPDARRKYRPIITNNSATKPRTVSNPTTAKRSSSTGTGSAMSGGLATRHSSLGINGSRKTSVTQGQLVAIQAELTKSQETIGSLNEEIEQYKGTVSTLEIEREFYFNKLRDIEILVHTTQDLINEGVYKFNDETITGHGNGNGGALLRFVKKVESILYATAEGFEMNDGEDELNDKNLGEHGTVPNQGGYANSNGEVNGNEGSNHDVIMQNDEGEVGVSNNLIIDEETF

SEQ ID NO: 23693 - protein, 480 aa, Picrophilus torridus DSM 9790
MVEEYSKDELIERLTEELKNNDKSAYEFRDNIKPVYSTGRGLTRKTVEEISEIKKEPDWMRRARLKALEIFLSKPMPTWGPDLSGIDFDNITYYTRPDEIKARSWDEVPDQIKQTFQKLGIPEMEQKYLAGSVAQYDSEGVYSNLRREWEEKGVIFTDLDTAVQKYPDLVKEYYCRAIPPSDNKFAALNGAVWSGGSFLYVPKGVKIDMPLQTYFRLNGEQSGQFEHTIVIADEGAKVHYIEGCTAPKYETNSLHTAIVEIYAHKNSEVKYTSVQNWSDSVYNLPVKRAWVDENAKMEWITGELGSKVTMIYPSSYLRGKNASTSNLQITLATHNTVKDAGGKALHLAPNTTSKIVSKSISLDDGLTVYRGLVRINDGARNSKSFVQCDALLINDESKNYTYPYDEIYDPTAVFSHEATVGRIGTDELTYLRSRGLSEDEASSMIVLGFMDDVMKEIPMEFAVEMNRLVKLEMSKMGAVG

SEQ ID NO: 23694 - protein, 323 aa, Streptomyces coelicolor A3(2)
MTHTEQQPLNSPFSAATTAEDVMAGHDLSGVTAVVTGGYSGLGLASTRALTAAGARVLVPARRPDIARAALRDVKGSEVVPMDLTDLDGVRSAAAHIGDRIDRIDLLMAAAGVMATPERRVGPGWEFQLAANHFGHFTLACELYPLLAAAGGARVVAYSSAGHAMTDIRRHDPHFRTGYDRWLAYGQAKTANALFAVHLDALGKDDGIRAFALHPGKIITGLQREMPLQEQIDAGWVDEHGNVVAADFKTASQGAATGLWAATSPLLDGRGGLYLADCDVARVFPPDTPMDDNGVRPYAVEPANAARLWEMSLAATGATPPTR

SEQ ID NO: 23695 - protein, 122 aa, Zea mays
MGSVGTGLLKGLRRVLEQQRKSVDLCRTSRAWSSTVSFSDIDEKDDMGDDGDLKDSRRELEPQSVDPKKGWGFRGVHRAIICGKVGQAPVQKILRNGRTITIFTIGTGGMFDQRVIGSADTP

SEQ ID NO: 23696 - protein, 139 aa, Bacteroides fragilis NCTC 9343
MFAVNDGVKADQNKKEAKSGEVIVMNKEMFINDVFDYQNSKEWKYKGDKPAIIDLYADWCGPCRMTAPIMKSLAKEYDGKIVIYKVNVDKEKELAALFNATSIPLFVFIPMEGEPQLFRGAADKATYKKAIDEFLLKQK

SEQ ID NO: 23697 - protein, 400 aa, Picrophilus torridus DSM 9790
MITEYLEILNRKFRDFDSEYRKQAYIYYLKTPRPDYKESPTRKTYVDVPDDSIENMVYGNIEGYDFEYKSDADIFIKDLEIKRKTDNVLISDMKTAFKTNELYKKYLSDKYGNARLEYLINAAWLNGYFIYVPENSSISISIESLNPSSSFTAKNVIIAGKNSSVEITDIYRSYGSEMATHGRNVYIIAEENASVKYNYIQDESNKINVISFIRSYEMPYSSVSVYNVNTGGSKVIYFSEPVMYDNTYYKSYGVNISKGDQALDVQDNSLQIGKNTAADISTRGVILNNGTILHHGNIDIEEKSFKSTGFYDSSIILMSEKGYANSKPALLIKNNDTRSKHGSYISTIDEEKITYIRSRGISYSDARRLFINGFLSYIEEKGCSKKTAEFLDEFINRLSF

SEQ ID NO: 23698 - protein, 421 aa, Moorella thermoacetica ATCC 39073
MYQKEILENGIRIVSEEIPFVNSVALGVWVRTGSRNEDEDNQGVSHFLEHLLFKGTTRRTARQIAEELEAVGGVINAFTTKEYTCFYSRVLAEHLDLAIDVLSDMFFNSLLAPEDIEKEKRVILEEIKMYEDSPDELIHDLFARTIWPGHPLGRAILGTYETVAALNRDLIYRYYQEQYNCANIVLAAAGKFNTSELIVKLEASFGRQRRPGKAAQFHPPVNRAATSMQVKDTEQVQICLGVPGLAQDDPAIYAVQALNNILGGGLSSRLFQLIREERALAYSVYSYHAGFGDSGLFTVYAGTSPDNYRQVVQLVLEELASLKNNGVTEEELKRTKDQIRGNLLLGQESVSQRMSRLGKTEVSFGRVITAEEVIERLNQVTRDDVQALAQRLFRPEYLSLTALGPEVEPLDLAAIASSAGL

SEQ ID NO: 23699 - protein, 593 aa, Schizosaccharomyces pombe
MVKRHKNTIGVWRLGKTLGTGSTSCVRLAKHAKTGDLAAIKIIPIRYASIGMEILMMRLLRHPNILRLYDVWTDHQHMYLALEYVPDGELFHYIRKHGPLSEREAAHYLSQILDAVAHCHRFRFRHRDLKLENILIKVNEQQIKIADFGMATVEPNDSCLENYCGSLHYLAPEIVSHKPYRGAPADVWSCGVILYSLLSNKLPFGGQNTDVIYNKIRHGAYDLPSSISSAAQDLLHRMLDVNPSTRITIPEFFSHPFLMGCTSLSSMDSTTPPTPSLSIDEIDPLVVDCMCVLWKKSSSKKVVRRLQQRDDNDEKYVYKVLSEILRDDMLKKQRFDENKYLSLYDLIHDNNLFTKASISTTSLVKSNVSTNSRKSSNFEDELARRVSSPLSALNQMSQSPIPIRVSSDKDYDSYACHEVVSNPSTLDDDYNYMFVCPPEEYTYSTDNVRTDSLDLQSLPTPTLEQLESVPFNRYGYVRIFPSTTLSSTASGYYTPDSLSTPEPSIDGLTNLDDVQVGGFVQGSGNQNRRPISFPVISNMQPNITNVRSASAPLCSSPVPSRRYSQYATNIRYTPRKVSSGSVLRKISSFFRKD

SEQ ID NO: 23700 - protein, 369 aa, Oryza sativa (japonica cultivar-group)
MSSGGELALRQEYVIGDEIGRGRFGTVRRCYAVATGEAFAVKSTPKAPLREAEAADALDLALAEQEPKVHLVASAPGPGASPHVVALHAAFEDDAAVHLVVDLCAGGDLLSLVSSRGRLPEHEAADLVAQLASALASCHRRGVAHRDVKPDNLLFDGGGVLKLGDFGSAGWFGDGRPMTGLVGTPYYVAPEVVAGREYGEKVDVWSAGVVLYMMLSGTLPFYGATAAEVFQCVLRGNLRFPPRAFASVSPEAKDLMRRMLCKDVSRRKCEVFLLTIGSFGVRVAGHPWILEGSTSEDPVACRTGDRCPFLPVKPGESKAKPNRSLWLQSRSAPCSQSNRSPPLLRPARLAAPCSSRAASRKSSGRFASP

SEQ ID NO: 23701 - protein, 336 aa, Gibberella zeae PH-1
MSESLQHQAAGDATPFAFIWRQLFQTVSSIPNAVDLHGQVALVTGSNVGLGFESARQLLALNLSHMILAVRSERRGDEAAKKLRKEFPSAKIEVSIVDMSCYDSIMTFAKRCKTLPRLDIAILNAGLSQPTFERTEGTGHEVTFQINYLSTVLLALVLIPILREKHGASSPARLSVVGSDTSYYANWNGSESESVLEIMDNPKYFDSWEAYKATKLLLLMFTRELSKRVPSSDVIINVSNPGACRGTQFGQTERSMLQEAFLYAASLILGRTPNVGARQYVDAVTVKGAESHGSFISEGRIKAFPPIMYEQRGLALQDQLWNETMKEFARFNIERV

SEQ ID NO: 23702 - protein, 108 aa, Neisseria meningitidis
EADVKPFKLDDVREALTEIGITGMTVSEVKGFGRQKGHTEIYRGAEYAVDFLPKIKIELVLADDAVERAIDVIVEVARSGKIGDGKIFVLPVEEAIRIRTGERSDAAV

SEQ ID NO: 23703 - protein, 124 aa, Legionella pneumophila subsp. pneumophila str. Philadelphia 1
MGGSAFNVMEKNMKMITAIIKPFKLDDVHEALMEIGVPGITISETRGFGRQKGHTELYRGAEYVVDFLPKIKIELALPDNMVEAAIEAICKSAYTGKIGDGKIFVYALEQVVRVRTGEVGTDAL

SEQ ID NO: 23704 - protein, 157 aa, Rosa chinensis
MSDEEHQFESKADAGASKTYPQQAGTIRKNGYIVIKARPCKVVEVSTSKTGKHGHAKCHFVAIDIFNGKKLEDIVPSSHNCDVPHVNRTDYQLIDISEDGFVSLLTENGNTKDDLRLPTDDALLTQLKDGFAEGKDLVVTVMSAMGEEPNCALKDIG

SEQ ID NO: 23705 - protein, 591 aa, Rickettsia prowazekii
MRHDRINLLRKLFIEYNIEGYIIPSNDKYMNEYVPEYAKRLEYITGFTGSSGIAIICKDAAFFFTDGRYLEQANKELDLAFYKIYDLKEIYKTLDKNIKIGYDPQLFTYQVLANLNINFHKINENLVDKIWYNKPLEPNSKVYLHDIKFAGVSHNDKIRKCRETILSSSSVTVGCNKNNDDILVILDSASICWLLNLRASDVNYTPLMFAKVILTSTKLYLFINPIRIDTEIINARPEITILPEKEFENILRDSKNRYLIDDSITSVHIMDLIANKKVKKIVEPCLLAKACKNDIEIKHAIDFHIKDAVALCEFFAEFFLYHSSENVNSCFHSHEIITEHSLCLKLTAQRAKQEGYVSDSFHAICGFQENSAIIHYRANPKTAKKIEGHGILLIDSGAQYKGATTDITRTIIVGIPTCEQKKRYTQVLKGHIALTRAKFPKNIVTGANLDILARQYLWQDMIDYPHGTGHGVGSFLSVHEGPQSINLSNKIILKAGMILSNEPGFYIPGKYGIRIENLIYVKENNGWLEFETLSLVPYASKLIDVALLNIDEINYIKEYYNKIRAKIYNLLSTQAKYWLNYEINLFLQSLL

SEQ ID NO: 23706 - protein, 301 aa, Thermus thermophilus HB27
MRVVVVGTRGSALALAQTRFVVERLKETWPETEFKIRTIKTRGDQGASPREEAIFVKEIQEALLSREIDIAVHSLKDLPTESPRGLKIASVPRRQDPRDVFLGKAAKRLKDLPPGAVVGTSSVRRKAQILALRPDLVVRDLRGNVDTRLAALGNGEYDGIVLAAAGLIRLDLRNRIDEFLDPGEVLPAPGQGALALEVREGDDLAEELCYALHHPPSYHRVRAERAFLRGLGAGCLAPVGALAHVEEDGTLRLEGVLLTPDGKSFIRAEIEGDVSEAEELGLDLARDVLEQGGREILAQIR

SEQ ID NO: 23707 - protein, 624 aa, Aspergillus oryzae
MSDKLTRIAIVNSDKCKPKVHDTHLFSIFIYRVILIYSQKCRQECKKSCPVVRTGKLCIEVTPESKIAFISERLCIGCGICPKKCPFGAIHIINLPTNLETQVTHRYSANSFKLHRLPMPRPGQVLGLVGTNGIGKSTALKILSGKLKPNLGRYDNPPDWEEILKYFRGSELQNYFTKVLEDDLKAVVKPQYVDQIPRAVKGPVQNVGDLIKARAQMDNMEHILDVLELRQVRGRDIGHLSGGELQRFAIGLVCVQKADVYMFDEPSSYLDVKQRLAAARTIRELLRPDDYVIVVEHDLAVLDYLSDFVCVLYGRPAVYGVVTLPSSVREGINIFLDGHIPTENLRFREESLTFRLAEAGDEFLVNRDRAFTYPSMEKTLGNFHLKIDAGNFTDSEIVVMMGENGTGKTTFCKMLAGAEKPDNGVTVPKLNISMKPQKITPKFQGTVRQLFFKRIKAAFLSPQFQTDVYKPLKIDDFIDQEVQNLSGGELQRVAIVLALGIPADIYLIDEPSAYLDSEQRIVAARVIKRFIMHTKKTAFIVEHDFIMSTYLADRVIVFDGKPSIDAHANAPESLVTGCNSFLQSLDVTFRRDPNSYRPRINKYQSQMDQEQKLSGNYFFLEEES

SEQ ID NO: 23708 - protein, 616 aa, Burkholderia thailandensis E264
MIDRLKYSFTDLARYDASVVDTHAGLSHLIDALQLDALVVTSQDEYISEWLPRCNNPRYALSGFDGSVGSGVFLSAAAAKRIGVPQFVLFVDGRYHLQAEKQCDPVRVHVEKLGLNVAMWPAIGDWLATHAADIKRVGYDAPRLSVAQRACLFAQTRSAGLQWTSLADSEIDQAISLPGWRVERPIFELPRSVTGVSIAENVATLNKRIGEHLGDPCAKAAFLSCAADDLSYLLNSRGYHLPYVSSHVGFLFVVGDAVALFLPEGFDRCPVQVDSYPALHVIRNDAAALERFLAQFDIEYVCYGFEAVNCALPDAVRRVWPVARHVDHNPVEAMRAAKTPEVLGQFRDAFARSSDAIAEAMRWAKKGEPGKRHSEFDLARVISDAYAARSAVALSFTTVAANGANSASAHYTAVSPDVELTEGELVLLDSGAYFDGGFATDCTRVVLRRTRADTQPQPWQREIYTVALKACIKGLVTRFPQTATGADVDAVVRGVCREHGYDYNHGTGHGIGIHVHEGGVRFNVGSQYGLVPNAVISVEPGIYLPGKGGVRIENIVVIHPSEREPGKMEFENLVTVGYDWDLIDVDLLTDDERAYLRDYERLCVERGTNVTDCPLL

SEQ ID NO: 23709 - protein, 545 aa, Idiomarina loihiensis L2TR
MADHERAGQLAQASDLTNIAQLTSAYYVYEPDPRKAAEKVSFGTSGHRGSSLKRSFNEAHILAIAQAICAYREEQGITGPIMVAKDTHALSESAYISALDVFIGNGVEVQVQTEHDYTPTPVLSRAIIEWNRENTAKADGVVITPSHNPPEDGGFKYNPSHGGPADSDVTRTIEKYANALLSSGLVGVNTCESEDVLQHPKLTFVDWRTQYISQLDDCIDMSAIQDAKLRLAVDAMGGSGAKYWTQIAEHYNLSIEVRNAVVDPTFSFMPLDKDGKIRMDCSSPFAMASLLELKDNYDLAFGNDPDYDRHGIVTPTHGLLNPNHYLSVAIDYLCKNRDWDSSIAIGKTLVSSAMIDRVVGANERPLMEVPVGFKWFAKGLFERSIAFAGEESAGATLLDRKGNTWTTDKDGIVMALLAAEILTKTGKNPGQYYDDLCQQHGTAYYRRVDTASSVQKNARFKDIRAYKVKLPELAGDSVSDISTKAAGNDAQFGGIKVTTDNGWFAARPSGTEPVYKIYAESFVSEQHLDDILEQATTWVNDLLSD

SEQ ID NO: 23710 - protein, 453 aa, Xylella fastidiosa 9a5c
MAYVLSWPRHLRKRRVFELLIVIALIFLNGFFAMSEMSLMTSRKSRLKQMANSSKHAAKALTLAQSPESFLSTVQIGITLIGILTGLFGGDAIGAAIGQWLTTLTPQLGEYTSIIGKTLSVALITFLTLIFGELVPKRLALTHSENIASTIAVPMSLLARIAAPGVWVLAKSTQLVLRVLGFGKIPSSAVTEEEIRMLVAESHEAGVIDDYERNMMNRVMRLGDRTADSLMTPRNRIAWLDNSADLGHNLEIMREHQFSRYPVYRSSDQDIVGILEVKSVITRLDSQTTLSLFQELCEPVFVSESTHALKLLEIFREEQQSMALVVDEYGEILGLVTISDLMGAVIGRLQNVENTDEDALMVTREDGSFLIDGTLPIEELREVLGAELPDAEENNYHTLAGMCISYFGRIPHVGEYFDWAGWRIEIVDLDGARIDKLLLQRLNKEKNHVVPHK

SEQ ID NO: 23711 - protein, 429 aa, Shigella flexneri 2a str. 2457T
MSDDKFDAIVVGAGVAGSVAALVMARAGLDVLVIERGDSAGCKNMTGGRLYAHTLEAIIPGFAVSAPVERKVTREKISFLTEESAVTLDFHRGQPDVPQHASYTVLRNRLDPWLMEQAEQAGAQFIPGVRVDALVREGNKVTGVQAGDDILEANVVILADGVNSMLGRSLGMVPASDPHHYAVGVKEVIGLTPEQINDRFNITGEEGAAWLFAGSPSDGLMAGGFLYTNKDSISLGLVCGLGDIAHAQKSVPQMLEDFKQHPAIRPLISGGKLLEYSAHMVPEGGLAMVPQLVNEGVMIVGDAAGFCLNLGFTVRGMDLAIASAQAAATTVIAAKERADFSANSLAQYKRELEQSCVMRDMQHFRKIPALMENPRLFSQYPRMVADIMNEMFTIDGKPNQPVRKMIMGHAKKIGLINLLKDGIKGATAL

SEQ ID NO: 23712 - protein, 168 aa, Avena strigosa
VMASSATSVAPFQGLKSTAGLPVSRRSNAGLGSVSNGGRIRCMQVWPIEGIKKFETLSYLPPLSEEALLKQIDFLIRSKWVPCLEFSKVGFIFREHGSTPGYYDGRYWTMWKLPMFGCTDASQVIKEVEEVKKKYPDAYVRIIGFVNIRQVQCVSFIAFKPPGCEESG

SEQ ID NO: 23713 - protein, 556 aa, Legionella pneumophila str. Paris
MATKVTKRGMDLLRDPILNKGTAFSLQERDEFALHGLIPTTVETLEQQVIRCLDAYSAKEEPLEKHIYLRALQDRNEVLFYRFIIDNLVDILPIIYTPVVGQACEMFSHIYRQPRGVFLSYPERDKLDSIIQNIASTRSIKVIVVTDGERILGLGDQGAGGLGIPIGKLSLYTSCGGIHPSNTLPIILDVGTNNKERLDDPEYIGWRHARISGKDYDDFVDQFVQSIKRHMPHVLLQFEDFAQQHAYPLLERYKDQLCTFNDDIQGTASVAVAAILAATRVTNTPLKEHRVALLGAGSAGCGISEQLVHAMMNQGLSEEEARSRFYLVDRYGLLHDEMTDLLPFQKGFVRSSTSLQNWKLEKQGEITLTDVINNAQPTILLGVSGQPNQFKEAMIKTMLSYCERPIIFPLSNPTSRAEAIPQDLLNWTAGKALIATGSPFEPVAINGHKIEIAQCNNSYIFPGVGLGVVAGQAKRVTDLMMMAAAVALSELAPAIRTGEGRLLPELNSIREVSQHIARAVILQGIKEGHIGPMNDNEIDDSIKRTMWTPQYEPYVL

SEQ ID NO: 23714 - protein, 553 aa, Exiguobacterium sibiricum 255-15
MKLLIIGSVAAGTSVGAKARRNSEDLQITIYDRDQDISYSGCGIPYFVGGEIADIDELTPRDAAFFKKRYNIDIHTRHEVESIDHATKTATIVNLATGDRLTDTYDTLVLATGASSIVPPLQGVDHDNVFTVRNVRNADAIRSYIDAHNPKTATIVGGGFIGLEMAEQLSYRGIQVTLVERLPQVMPPLDRDMAERVADHLRDKGVSLLLGESVTALNGTERVTDIALESGKSIATELVILSVGVKPNTELAKQIGVGLGQTGAIAVNRKMQTNVADIYAVGDVAESFSVITGEAIYRPLGSTANKMGRIAGMVITGEEAEHRGILGTGIFKAFDLTVAQTGLTEKEAREAGYDIEVLHNIKPDRPEYMGGKEMTIKAIADRATGRVLGAQIVGPQGVDKRIDVLATAITFKAKAEDLFHLDLAYAPPFATTKDPVLYTGMALDNAIKKTARLMTPNELIEQVAGGKSFQIIDTRSKAQFEKNHVDGAIHIPLGELRTRAKELDPTLPTIVYCNKGVTGNAAQNVLKNLGFTDVCNLSGGNKNYQHCKKCLTE

SEQ ID NO: 23715 - protein, 313 aa, Burkholderia mallei ATCC 23344
MPEIVTLTPNPAIDVATCVERVTDTRKLRCGPARRDPGGGGINVARVLTRLGADCSAVYLAGGGTGLALRGLLADEGVRAHGIDIAGETRENFSVLETSTGREFRFVLPGPALAAHEWPRCVEALGRLADASRYLVMSGSLPPGMPDDCYARLARRASARGVRTVVDTSGPALAAALDAGVYLVKPSLGELRALTGLPLEDDGARLAAARAIVAGGRAQIVALTLGDAGALVVSRDDAVRLPGVKVAVRSAIGAGDSFVAGLVAALNRGANVADAARHALAAASASLLSTGPALGTKEDIARIYRELPGTIDA

SEQ ID NO: 23716 - protein, 317 aa, Arabidopsis thaliana; identical to SEQ ID NO: 423

SEQ ID NO: 23717 - protein, 112 aa, Desulfovibrio vulgaris subsp. vulgaris str. Hildenborough
MKKLEIIIRPFKLDEVKEVLASMDVKGMTVTEVKGFGRQRGHKEVYRGAEYQVDFMPKVKIEVVLEDAQVKAVVDAVCKAARTGKVGDGKIFVLPVDDAIRIRTGESGAEAI

SEQ ID NO: 23718 - protein, 482 aa, Legionella pneumophila subsp. pneumophila str. Philadelphia 1
MAKSSEQLNSLLDREYQHGFITDIEVETFPPGLDEDVIRRLSAIKGEPEFLLEWRLKAFRHWLTMPHPEWSSVHYLPIDYQSISYYSAPKSKKDAPKSLDEVDPELLKTYEKLGIPLREQEMLAGVAVDAVFDSVSVATTFKAKLAEKGVIFCPLSEAVHQYPDLVKKYLGSVVPYRDNFYAALNSAVFSDGSFVYVPNGVRCPMELSTYFRINAASTGQFERTLIVADVDSYVSYLEGCTAPMRDENQLHAAVVELIALDGAQIKYSTVQNWYPGDKEGKGGIYNFVTKRGACRGKKSKISWTQIETGSAITWKYPSVILQGDDSVGEFYSVALTNNFQQADTGTKMIHLGKNTRSTIISKGISAGHAHNAYRGLVRIAPTATNARNYTQCDSMLMGSQCSAHTFPYIEVKNPTAQVEHEATTSKISEEQLFYCQQRGIDTEDAVSMIVNGFCKQVLKELPMEFAVEATKLLGISLEGAVG

SEQ ID NO: 23719 - protein, 153 aa, Guillardia theta
MKNYKNEISCMLKNQKVHLKNTREVGCCIIGMTLGRAENFLKNVILKKEIVPFKVYRYGIGRKSQVNQSKNISGRWPKKSAKIILSLIKNLNSIVSKNKSEDNPFYIKNININQAVRGRRRTFRAHGRVNSFESNPCHIRISLTNNSTNIPKY

SEQ ID NO: 23720 - protein, 668 aa, Shewanella sp. ANA-3
MAELKEVFVPDIGGDEVQVIEICASVGDTLAAEESILTVESDKATMDIPAPFAGVLAELKVAVGDKVSEGTLIAMMQAAGTANVQAAPVAQAAAPAPAPAAPAPVQAAPAPVAAAPATGATQVVEVTVPDIGGDTDVSVIEVLVAAGDKIEVDAGLITLETDKATMDVPSPFAGVVKEVKVAVGDKVSQGSLVIMLEVGGAAPAAAAPQASASAPVAQAAPAAAVAPVAAAPVVAVKEIQVPDIGDASNVDVIEVLVSVGDMITADQGLITLETDKATMEVPAPFAGKLLSLTVKVGDKVSQGSVIATIETVTAGAAPAPQAAAPAPVAQEAAPAPVAAAPSRPPVPHHPSAGAPVATGVVHASPAVRRLAREFGVDLTQVTGSGRKGRIMKEDVQAYVKYELSRPKATAATSVAAGNGGGLQVIAAPKVDFSKFGEVEEIPLSRIQKISGPNLHRNWVTIPHVTQFDEADITEMEEFRKQQNDAAAKKKADYKITPLVFMMKAVAKTLQQFPVFNSSLSSDGESLIQKKYYHIGVAVDTPNGLVVPVVRDVDKKGIIELSRELADISIRARDGKLKSADMQGSCFTISSLGGIGGTAFTPIVNYPDVAILGVSKSEIKPKWNGKEFEPKLMLPLSLSYDHRVIDGAMAARFSVTLSGILSDIRTLIL

SEQ ID NO: 23721 - protein, 168 aa, Avena clauda
VMASSATTVAPFQGLKSTAGLPVSRRSASSLGNVSNGGRIRCMQVWPIEGIKKFETLSYLPPLSEEALLKQIDFLIRSKWVPCLEFSKVGFIFREHGSTPGYYDGRYWTMWKLPMFGCTDASQVIKEVEEVKKEYPDAYVRIIGFDNIRQVQCVSFIAFKPPGCEESG

SEQ ID NO: 23722 - protein, 413 aa, Zea mays
MSLPHPVPRETVASAVASLTMWMKKRTAQTRPNLLADERDDLVVLQLSLRRIPASSSARPRLLPLPHPVIGHDGASVCVISDDRPKSRSASASDLLHASKSLHRLPVSDVIPLSTLRTDYRPYESRRRLAASHDLFIADRAILPLLPRVLGKAFYATKKAPIGVDFSRVGWPEQVRKVLGSAFLYLRSGTCSGIKVGRLDMEEEVIVDNVMVAVEEAVEKVPKKWANVRALHLKAVDSVALPIYQVVPELGMKIEVPEIIGSGEVIDAAEAETCGKKIDKKGDAGARGREVFANVSAKRKRNKKGQVEDDVAMQEEVQVEIEKKKRKSIVISANDSQMAGKKGEKKGKRGLENKVNEASFDNKKVKMGKTEQRKKKSMNGDGEVGTEEMQGDKKIKVEKSDVKIKKLRTRIRV

SEQ ID NO: 23723 - protein, 223 aa, Lolium perenne
MCQIKKEMSGESGSPCNGEYCSPSTSSEQKQQTVWTKRPAGRTKFRETRHPVYRGVRRRGNAGRWVCEVRVPGRRGSRLWVGTFDTAEIAARAHDAAMLALAAGDVCLNFADSAELLDMPASSYRSLDEVRHAVTEAVEEFERRQALGEEDALSGTESSTLTDDEESSTPFELDVLSDMGWDLYYASLAQGMLMSSPFLAASAALGDYGEANLADVPLWSYLS

SEQ ID NO: 23724 - protein, 315 aa, Wolbachia sp. wMel
MKKAVILFNLGGPDSLNAVRPFLFNLFYDRRIINLPNPFRFLLAKFISAKRENTARKIYEEIGGKSPILENTKMQANASELKLNENRNHVHKVFICMRYWRPFADEVIESVKQFDPDEVILLPLYPQYSTTTTLSSIENWQKNAKRYGLKCNTKMIHRYYDNQDFIEAHTNLIAKYYKLARKIGKPRVLFSAHSLPLSIIKKGDPYASQVERSVELIVEKLAINNLDWSICYQSKIGPVKWLEPSTESELLRAKADGVPVVLSPISFVSEHSETLVELDIEYKAIIKDGYYFRVPTLSTDPLFIKCLADLCINLP

SEQ ID NO: 23725 - protein, 168 aa, Avena sterilis subsp. ludoviciana
VMASSATSVAPFQGLKSTAGLPVSRRSNAGLGSVSNGGRIRCMQVWPIEGIKKFETLSYLPPLTEEALLKQIDFLIRSKWVPCLEFSKVGFIFREHGSTPGYYDGRYWTMWKLPMFGCTDASQVIKEVEEVKKEYPDAYVRIIGFDNIRQVQCVSFIAFKPPGCEESG

SEQ ID NO: 23726 - protein, 336 aa, Mycobacterium avium subsp. paratuberculosis
MDFDAVLLLSFGGPEGPEQVRPFLENVTRGRGVPPERLDHVAEHYLHFGGVSPINGINRALIEQLRAAQDLPVYFGNRNWEPYVEDTVKVMRDNGIRRAAVFTTSAWSGYSSCTQYVEDIARARTAAGTGAPELVKLRPYFDHPLFVEMFAGAIADAAAKVPAGARLVFTAHSVPVAADERLGPRLYSRQVAYAARLVAAAAGYAEHDLVWQSRSGPPQVRWLEPDVADHLRALAESGTRAVIVCPIGFVADHIEVVWDLDEELRAQAESAGMLMARASTPNAQPRFARLAADLIDELRCGRTPARVTGPDPVPGCLASVNGAPCRPPHCAAQATG

SEQ ID NO: 23727 - protein, 177 aa, Rickettsia conorii str. Malish 7
MTFMEDLSSWKEKFETCVYAQKLLDNIEYLNAKVKNPVDIEEVKKGIYYARKYHDLQIRQLGDPYYSHPIEVAIMLAEFVAEDAPKLYNAIMLQAVLLHETIEDIALTEEVITIGPEVAKHVEGLTRIKPYGKISSEKGLNLLVRQKRYDTVLIKFFDRMYNLQTLGAKSPEKMRRV

SEQ ID NO: 23728 - protein, 374 aa, Triticum monococcum
MDGSKGPVVVTGASGFVGSWLVMKLLQAGYTVRATVRDPANVEKNKPLLELPGAKERLSIWKADLSDQGSFDDAIAGCTGVFHVATPNGLRLPRPRGKYQYPGTLKQSITTEILLLNEVIKPTVEGMLSIMRACKEAGTVKRIVFTSSAGSVNIEERQRPAYDQDNWSDIDFCRRVKMTGWMYFVSKALAEKAAMEYASENGLDFISIIPTLVVGPFLSAGMPPSLVTALALITGNEAHYSILKQVQLVHLDDLCDAMTFLFEHPEANGRYICSSHDATIHGLATMLRDRFPEYSIPHKFPGVDDDLQPIHFSSKKLLDHGFSFRYTAEDMFDAAIRTCREKGLIPLGDAPPPAAAGKLGALAAGEGQAIGAET

SEQ ID NO: 23729 - protein, 573 aa, Pseudomonas syringae pv. tomato str. DC3000
MRRRKRRLEKMTTTSRPLYISYAGPSLLEMPLLNKGSAFTPQERIEFNLIGLLPQNVETIEEQVTRVYSQYKQCASDLDKHIYLRSIQDNNETLFFRLLDSHLDEMLPIIYTPTVGQACQEFSKIYRTHRGLFISYPERDRIDDILRSATKDRIKIIVVTDSERILGLGDQGIGGMGIPIGKLSLYTACGGISPAYTLPIVLDVGTNNRELLDDPMYMGWRHERVSGKEYEDFIALFIDAVQRRWPDVLLQFEDFAQSNAMPLLEKYRDELCCFNDDIQGTASVAVGTLLAACKAKNETLGQQKVVFVGAGSAGCGIAEHIIAAMRIEGLSESEARKRIFMVDRFGLLTEGMGNLLDFQLRLAQKSADVAGWTAGTETFPQLLDVVTHAGATVLIGVSGQRGLFTEQVVRELYKHCAKPLVMPLSNPTSKVEATPEEILRWTDGNALVATGSPFAPVEINGRTVHIAQCNNSYIFPGIGLGVVACKASRITDRMLMAASNALAECSPMVTGQGDAVLPPLKEIQQVSRKIALAVAKEAQAEGLALETSEEALLAAIERNFWLPGYRAYRRRSV

SEQ ID NO: 23730 - protein, 445 aa, Brassica oleracea
KFTAIALVTLLVLLASSSLSGVTAKADHRNPEEVKMFERWLVENHKNYNGLGEKDKRFEIFMDNLKFVQEHNSVPNQSYELGLTRFADLTNEEFRAIYLRSKMERTRDSVKSERYLHNVGDKLPDEVDWRAKGAVVPVKDQGSCGSCWAFSAIGAVEGINQIKTGELVSLSEQELVDCDTSYNNGCGGGLMDYAFQFIISNGGIDTEEDYPYTATDDNICNTDKKNTRVVTIDGYEDVPENENSLKKALANQPISVAIEAGGRGFQLYKSGVFTGTCGTALDHGVVAVGYGTSEGQDYWIIRNSWGSNWGESGYIKLQRNIKDSSGKCGVAMMASYPTKSSGSNPPKPPPPAPVVCDKSYTCPAKSTCCCLYEYKGKCYSWGCCPLESATCCEDGSSCCPQAYPVCDLKAGTCRMKADSPLSVKALTRGPATATTKATNVLVSSA

SEQ ID NO: 23731 - protein, 247 aa, Glycine max
  misc_feature (30)..(30): Xaa can be any naturally occurring amino acid
  misc_feature (240)..(240): Xaa can be any naturally occurring amino acid
MAAYKLVLIRHGESAWNLENRFSGWYDADXSAGHEEAKRGGQALRDAGYEFDICFTSVQKRAIRTLWTVLDAIDQMWLPVVRTWRLNERHYGGLTGLNKAETAAKHGEAQVKIWRRSYDVPPPPMEPDHPFYSNISKDRRYADLTEDQLPSCESLKDTIARALPFWNEEIVPQIKEGKRVLIAAHGNSLRGIVKHLEGLSEEAIMELNLPTGIPIVYELDKNLKPIKPMQFLGDEETVRXAMGAVAA

SEQ ID NO: 23732 - protein, 460 aa, Brassica oleracea
MGSVKVTILLLAMMIGVSYAADMSIISYDEKHHITAENERSDAEVARIYEAWMEKHGKKAQSNGLVGEEKDQRFEIFKDNLRFIDEHNNKNLSYKLGLTRFADLTNEEYRSIYLGAKSKKRVLKTSDRYQPRVGDAIPDSVDWRKEGAVAAVKDQGSCGSCWAFSTIGAVEGINKIVTGDLISLSEQELVDCDTSYNQGCNGGLMDYAFEFIIKNGGIDTEEDYPYKAADGRCDQTRKNAKVVTIDAYEDVPENNEAALKKTLANQPISVAIEAGGRAFQLYSSGVFDGICGTELDHGVVAVGYGTENGKDYWIVRNSWGGSWGESGYIKMARNIAEPTGKCGIAMEASYPIKKGQNPPNPGPSPPSPIKPPTQCDKYYSCPESNTCCCLFKYGKYCFGWGCCPLEAATCCDDNTSCCPHEYPVCNGDTCLMSKNSPFSVKALKRTPAKPFWAHSRKNIA

SEQ ID NO: 23733 - protein, 865 aa, uncultured bacterium
MAGLVAPLAAPCGRWPGPATALRPGHRRALQVDVGRSGHQRRGRPVGRLRRPEMRCAGAARQALRPAGQRDRAKHGSARPQGTPGRVRRRGPRAHPGRPGPDRRDQGLPVGMKTGLLEPQHAAIVDLVDLDLPAADGGSAAHALARARVFAEPLLAGQLFDTGENALAHADGVSQILLGIGAPPSLRAAAYLVYASEYLTTPDDVIGRAFGADAAALVAHTRKLVQIQRNARDALGDEAYGPLRADQVERIRKMLLAFSRDLRVVLMRLASRLQTLRHYAETKLPCPKALARESMQVFAPLASRLGIGQIKWEMEDLSFRFLMPEAYHSIARALDEKRLERERSVEQVRQALATALTQAGLNAQVQGRPKHLYSIWKKMQGKNLSIDRVFDVRALRVIVDDIPSCYAALSRAHELWRPMPDEFSDYIARPKPNGYQSLHTVVLGDDDKPIEIQIRSQAMHEHADSGVAAHWAYKEAGAKGYAGVQTVGESEARAAAARKTVLRQLLAWERDLAAADETEGGGPTGHGYFDDRIYVFTPDGKIIDLVHGATPVDFAYSLHTDLGHRCRGAKVDGVMVPLNTALHSGQTIEIVSAREGGPSLDWLNQDLGYVRSPRARAKVRAWFNALAQQATIAKGRDLVEKLLQREGKTAVKLEELASNLGFRSADALFDVVGKDEFSLRNIEHLLRPAVPEQDPDQVVAQRIARSEAELDRSGHGQGGVLVVGMDSLLTQLARCCKPAPPDAIGGYVTRGKGVAVHRSDCSNFRQMVGKHGERVIPVAWGRDAGHQSAHYAVDVLVEAHDRPGLLRDVCDALAQGKTHVVAMNSQTQRDHTTITLTVQTSDTAKLGPVLGRVAQVNGVLRARRK

SEQ ID NO: 23734 - protein, 485 aa, Brassica oleracea
MKLLNSATVILFLTMIVVSSAMDMSIISYDKNHHTVSSRSDAEVSRLYEEWLVKHGKAQNSLTEKDRRFEIFKDNLRFIDEHNGKNLSYRLGLTKFADLTNDEYRSMYLGSRLKRKATKSSLRYEVRVGDAIPESVDWRKEGAVAEVKDQGSCGSCWAFSTIGAVEGINKIVTGDLITLSEQELVDCDTSYNEGCNGGLMDYAFEFIINNGGIDTEEDYPYKGVDGRCDQTRKNAKVVTIDLYEDVPANSEESLKKALSHQPISVAIEGGGRAFQLYDSGIFDGICGTDLDHGVVAVGYGTENGKDYWIVKNSWGTSWGESGYIRMERNIASSAGKCGIAVEPSYPIKNGQNPPNPGPSPPSPVKPPTQCDSYYTCPESNTCCCLFDYGKYCLAWGCCPLEAATCCDDNYSCCPHEYPVCDLDQGTCLIGKFCFSHFSRKQPINGNFLNLLGIFHLQSKNSPFSIKAIKRKPATPFWSQSRKNIA

SEQ ID NO: 23735 - protein, 362 aa, Bordetella pertussis
MFLRLFKYLWPERYLPETPAQDPFDENPPPCGPGRVGVLLVNLGTPDEPTRGAIRRYLGEFLSDPRVIEIPRYLWMPILHGLVLTMRPKKLAPRYAGIWMEEGSPLLVYSQRQAAGVRQGLAARGVHAEVELAMRYGKPSIPAAITALRERGCDHILAVPLYPQYAASTTATVVDAVTRHAGRLRDQPALRFVKRFHNDPAYVEAQAGRIAEFWQAHGRPQKLVMSFHGLPRYSIELGDPYYRDCLDTARLLRERLGLREDEVEVTFQSRFGSARWLEPYTEPTLAELARQGVTEVDVVCPGFVADCLETLEEISQECRDAFVAAGGRQFRYIPALNDCPPWIEGLTDLVERQLRGWPTGNP

SEQ ID NO: 23736 - protein, 94 aa, Schizosaccharomyces pombe
MTKRTKKVGVTGKYGVRYGASLRRDVRKIEVQQHSRYQCPFCGRLTVKRTAAGIWKCSGKGCSKTLAGGAWTVTTAAATSARSTIRRLREMVEV

SEQ ID NO: 23737 - protein, 337 aa, Anabaena variabilis ATCC 29413
MIRVAINGFGRIGRNFARCWLGRENSNIELVAVNDTSDPRTNAHLLKYDSMLGKLKNVDITADDNSITVNGKTIKCVSDRNPENLPWKEWEIDLIIESTGVFTSKEGALKHVNAGAKKVLITAPGKNEDGTFVIGVNHHDYDHNVHHIISNASCTTNCLAPIAKVLNDKFGIIKGSMTTTHSYTGDQRLLDASHRDLRRARAAAINIVPTSTGAAKAVALVIPELKGKLNGVALRVPTPNVSMVDFVVQVEKRTITEEVNQALKDASEGPLKGILDYSELQLVSSDYQGTDASSIVDASLTLVMGNDLVKVMAWYDNEWGYSQRVLDLAELVAEKWV

SEQ ID NO: 23738 - protein, 523 aa, Bacteroides thetaiotaomicron VPI-5482
MKGEREMLEPALKEQLKGIFAGLEADFTFDISVSASHESRAELLELLSDVAECSDHITCMVNEGSGLKFTIGKNGKPTEITFRAIPNGHEFTSLLLAILNLDGKGKNFPDEAVCNRVKALKGPIHLVTYVSLTCTNCPDVVQALNAMTTLNPSITHEMVDGALYQDEVDALKIQGVPSVFADGKLLHVGRGEFGELLAKLEAQYGIDETKVETEVKEYDVIVAGGGPAGVSAAIYSARKGLRVAIVAERVGGQVKETVGIENLISVPETTGSELADNLKTHLLRYPVDLLEQRKIEKVELAGKDKLVTTSVGEKFIAPALIIATGASWRKLNVPGENDYIGRGVAFCPHCDGPFYKGKQVAVVGGGNSGIEAAIDLAGICSKVTVFEFMDELKADNVLQERLKSLPNVEVFVSSQTTEVIGNGDKLTALRIKDRKTEEERLVELDGVFVQIGLSANSSVFRDIVETNRPGEIVIDAHCRTNVTGIYAAGDVSTVPYKQIIISMGEGAKAALSAFDDRVRGLIV

SEQ ID NO: 23739 - protein, 266 aa, Carboxydothermus hydrogenoformans Z-2901
MSAQEILLEKKEGIATITLNRPEKMNAFTLEMIDRWVNFLQECQQDDAVKVIVLTGSGKAFCTGGDLELLEKTAKSTPLASKNFIWKHIQKIPLLLWEVIDKPVIAAINGTAVGAGLDMALMCDLRFAAESARFSEGYIRLGLVPGDGGAYFLPRLIGIAKALELLWTGDFIDAREAHQLGLVNRVYPDDKLLEETYKFAERLVKGPEVAIRMIKRAVYQGLRMDLRAALDLISSHFAIAQFTDDHREGLKAIKERRPPVFMTEDK

SEQ ID NO: 23740 - protein, 283 aa, Lactobacillus delbrueckii subsp. bulgaricus
MGEILDGKKLAWELGEKLGSEVDSLKEHGVSPKLCVINIGDDPASKVYVASKKRKAEKLGIKQVVYQLPADESEEDVLKLIDSLNADPEVSSLMVQLPVPPQINADRVIERIDPEKDVDCLTPANIGRLWQGKHFVEPATAAGIIALLDHYQIDLTGKNAVIVGRSNIVGKPLAALMLERNASVSILHSRSRNLADLTKQADILVCAVGKAEMIKADMVKEGAVVIDVGINRVDGHLVGDVDFAPVKEKASWITPVPGGVGPLTVEFLMEEVIKLTRRQHGLD

SEQ ID NO: 23741 - protein, 553 aa, Debaryomyces hansenii CBS767
MSQPEFKLSTELPAWKKLEATFKSKGEKFQVKEAFDKDPKRFEKLSKTFQNFDNSKILFDFSKNLIDDEILEQLVQLAKEAKVEELRDAMFNGDKINTTEDRAVYHVALRNRSKREMKVDNVDTFPEVDEVLQHMKEFSNQIRSGEWTGYTNKAITDVVNIGIGGSDLGPVMVTEALKAYGKPGLNVHFVSNIDGTHIAETVKKCDPETTLFLIASKTFTTAETCTNANSAKKWFLAKALDTKHIAKHFAALSTNAEEVSKFGIDTKNMFGFESWVGGRYSVWSAIGLSVAIYIGFDNFESFLKGAEAVDKHFVETPLEENIPVLGGLLSVWYNNFFGAQTHLVAPFDQYLHRFPAYLQQLSMESNGKSVTRANAFTNYETGTILFGEPATNAQHSFFQLVHQGTKLIPSDFILAAQSHNPIENNLHQKMLASNFFAQAEALMVGKNEDEVKKEGATGGLVPHKVFSGNRPTTSILAQKITPAALGSLIAYYEHLTFVEGAIWNINSFDQWGVELGKVLAKVIGKELENNNEKVDTHDPSTKGLINQFKDWAE

SEQ ID NO: 23742 - protein, 413 aa, Moorella thermoacetica ATCC 39073
MKVLVQKFGGTSVASPEQRLVVTGHIERACRVGYQVVVVVSAMGRRGAPYATDTLLELLGDNEVEPRERDLLLACGEVISGVVLTGLLKSKDLPAVFLTGGQAGIITDAQFGDARILRVEPRRIQSYLDQGRVVVVAGFQGVTESGEVTTLGRGGSDTTAVALGVALGAEAVEIFTDVDGVKTADPHIVSDARTLSTITYNEVCQMAYEGAKVIHPRAVEIARQKNIPLRIKSTFNDGPGTLVVAWQPGVTGVHISRDRVITGITHMDGLTQLRVSLPSGEGAGEVFPLLAQNNISVDFINIFPGELVFTVKSEVARQARELIEGLGLKVTARPGCAKVATVGAGMRGVPGVMATIVTALEREGIKILQSADSYTSIWCLVDRKDMERAVQTLHREFKLNDGKTGEVKVYAVG

SEQ ID NO: 23743 - protein, 166 aa, Cryptococcus neoformans var. neoformans JEC21
MSTAASNPATYKFNHTMIRIKDPKVSLPFYEKVLGMKVFYESPGGDFTNYFLAFANGFDDADLNKENIRDKLFDREGVLELCHNWGTENDASFKGYASGNEEPGRGFGHICITVDNLEAACKRFDELGVKFKKRPEDGRMRHIAFIYDPDGYWVEIVARSLNASNI

SEQ ID NO: 23744 - protein, 138 aa, Neisseria meningitidis
MRLLHTMLRVGNLEKSLDFYQNVLGMKLLRRKDYPEGRFTLAFVGYGDETDSTVLELTHNWDTERYDLGNAYGHIAVEVDDAYEACERVKRQGGNVVREAGPMKHGTTVIAFVEDPDGYKIEFIQKKSGDDSVAYQTA

SEQ ID NO: 23745 - protein, 484 aa, Burkholderia pseudomallei K96243
MLNVDQPTPLARALEQTYRHGFVTDIESDSLPPGLDEGVVREISRRKREPAFLLKWRLAAFERWLAMSPPDWGKLRIAPIDFQAQSYYSAPKSLKDQPKSLDEVDPKLLETYEKLNVPLHERARLAGVAVDAVFDSVSVGTTFREQLAEAGVIFCSFSHAVEHHPELIERYLGTVVPPADNFYAALNSAVFSDGSFVYVPQGVRCPMELSSYFRINAQNTGQFERTLIIAEPGSHVGYLEGCTAPQRDEHQLHAAVVELVAHDDAHIKYSTVQNWYPGDADGVGGIYNFVTKRGLCAGARSRIAWTQIETGSAITWKYPSVVLRGDESSGEFHSIAVSNHCQQADTGTKMIHLGRNTRSRIVSKGISAGRAQNSYRGLVRVARTAEGARNHTQCDSLLIGPQCGAHTFPYVESARGDAVVEHEATTTRISEDLLFYCQQRGIDPQEATALIVGGFCQAVLEALPMEFALEAKALLAVSLEGAVG

SEQ ID NO: 23746 - protein, 378 aa, Ashbya gossypii ATCC 10895
MSGEKADKTVESAAEEAVAATPVLATKGGRETSDRILYVGNLDKTINEATLKQYFQVGGPIANVKVLVDKNNEEANYAFVEYRQPRDANVAFQTLDGKQIENNVIKINWAFQSQQVSSDDTFNLFVGDLNVDVDDETLSSTFKEFPTFIQAHVMWDMQSGRSRGYGFVSFGEQEEAQKAMDAKQGFNLNGRAIRVNWAAKRESQHAARPRSNRGGFRGGSGHQPFRGMPQGPHLGGAAPAGPMQLQGPPVPSPVNPQAVEAMIRRAPQRVTTAYIGNIPHFAQEPDLIPLLQNFGFIIDFKHYAEKGCCFIKYDTHDQAALCIVALANFPFQGRTLRTGWGKEKPSFVPNGAVPHAAAPAPVQPASDAVPAQDQEHQQ

SEQ ID NO: 23747 - protein, 100 aa, Neisseria meningitidis
LDDVREALTEIGITGMTVSEVKGFGRQKGHTEIYRGAEYAVDFLPKIKIELVLADDAVERAIDVIVEVARSGKIGDGKIFVLPVEEAIRIRTGERSDAAV

SEQ ID NO: 23748 - protein, 450 aa, Prosthecochloris aestuarii DSM 271
MQKNVDILVIGGSAAGIVAATTARAFYPDKAVMIVRKEQKAVVPCGIPYIYGTLKSIEQNIIPAGHITDAGVEMMIDEVVSIDSEKKTATTVSGTVISWDKLVIATGSVPKVPGWLKGTDLDNVFTIPKDCQYLDHVQHAMEGSRKVVIIGGGFIGVEIADELSKKGLDITLVELLPHVLQMAFDEEMSVRAEEILTTSGVKLKLGCKVEEIEGDGKVTGVRLDGGEVLEADLVILSTGYLPNTTLAADAGIKLNELGAIRVDEYMRTENKDIFAVGDCAEKFSFFTRIVKGLMLASTACSEARIAGMNLYKLSRLRTFGGTLSIFSTAIGGTTFAAAGVTEQMAIERGFDIVSASAEGIDKHPKTLPGVHAQRVKLIVNRESGLVLGGSVIGGVSAGELINVIGVIIESMMTIHQVLTLQLGTHPLLTGPPTGYPLLKAAENVAKKMRQ

SEQ ID NO: 23749 - protein, 101 aa, Neisseria meningitidis
KLDDVREALTEIGITGMTVSEVKGFGRQKGHTEIYRGAEYAVDFLPKIKIELVLADDAVERAIDVIVEVARSGKIGDGKIFVLPVEEAIRIRTGERSDAAV

SEQ ID NO: 23750 - protein, 453 aa, Thermosynechococcus elongatus BP-1
MTPPRIENVVIIGSGPAGYTAAIYAARANLKPLMFEGYQIGGLPGGQLMTTTEVENFPGFPEGIQGPQLMARMKAQAERWGTEMVTEDVIQVDFSQRPFLISSAERQVYAHSVIICTGATAKRLHLPGEEQYWTKGVSACAICDGATPIFKDVELAVIGGGDSAAEEAVYLTKYGSHVHLLVRSDKMRASKAMQDRVFANPKITVHWQTEAREILGDGNLMTGLRIINKATGEESLLPVRGLFYAIGHTPNTQLFKDFLELDSVGYIVTRHGTQTNVEGVFAAGDVQDHEYRQAVTAAGSGCMAALDAERWLSARGLIQEFHQRATETQPAATAKPTASPQQEFDPNAIKHRGSYALRKLFHESDRLLLVKYVSPTCGPCHTLKPILDRLVEEFDGKVQLIEIDITEDSAIAEQAGVTSTPTIQLFKNKELLEVIVGMKPKSQYRETLQRYLS

SEQ ID NO: 23751 - protein, 168 aa, Avena maroccana
VMASSATSVAPFQELKSTAGLPVSRRSNAGLGSVSNGGRIRCMQVWPIEGIKKFETLSYLPPLSEEALLKQIDFLIRSKWVPCLEFSKVGFIFREHGSTPGYYDGRYWTMWKLPMFGCTDASQVIKEVEEVKKEYPDAYVRIIGFDNIRQVQCVSFIAFKPPGCEESG

SEQ ID NO: 23752 - protein, 491 aa, Escherichia coli
MTEPHVAVLSQVQQFLDRQHGLYIDGRPGPAQSEKRLAIFDPATGQEIASTADANEADVDNAVMSAWRAFVSRRWAGRLPAERERILLRFADLVEQHSEELAQLETLEQGKSIAISRAFEVGCTLNWMRYTAGLTTKIAGKTLDLSIPLPQGARYQAWTRKEPVGVVAGIVPWNFPLMIGMWKVMPALAAGCSIVIKPSETTPLTMLRVAELASEAGIPDGVFNVVTGSGAVCGAALTSHPHVAKISFTGSTATGKGIARTAADHLTRVTLELGGKNPAIVLKDADPQWVIEGLMTGSFLNQGQVCAASSRIYIEAPLFDTLVSGFEQAVKSLQVGPGMSPVAQINPLVSRAHCDKVCSFLDDAQAQQAELIRGSNGPAGEGYYVAPTLVVNPDAKLRLTREEVFGPVVNLVRVADGEEALQLANDTEYGLTASVWTQNLSQALEYSDRLQAGTVWVNSHTLIDANLPFGGMKQSGTGRDFGPPLAGRAGC

SEQ ID NO: 23753 - protein, 505 aa, Medicago truncatula
MGLTEPKVVTGPAGYVLEDVPHLSDYIPDLPTYPNPLQDNPAYSVVKQYFVHVDDTVPQKVVVHKDSPRGVHFRRAGPRQKVYFESDEIQAAIVTCGGLCPGLNTVIRELVCSLHHMYGVTRVLGIEGGYRGFYARNTITLTPSSVNNIHKRGGTILGTSRGGHDTNKIVDSIQDRGINQVYIIGGDGTQRGASVIFEEVRRRGLKCAVVGIPKTIDNDIPIIDKSFGFDTAVEEAQRAINAAHVEAESFENGIGVVKLMGRYSGFIAMYATLASRDVDCCLIPESPFYLEGPGGLYEYIDRRLKENGHMVIVIAEGAGQELLTESLQSGKKQDASGNKLLQDVGLWISQSIKDHFAREKTLPITLKYIDPTYMIRAVPSNASDNVYCTLLAQSAVHGAMAGYTGYTSGLVNGRQTYIPFYRITERQNNVVITDRMWARLLSSTNQPSFMEVKVSDEDTKGENSLDELPDGHCSEDTSVDEITHNLGCLAPLAVPVLRTGGISGV

SEQ ID NO: 23754 - protein, 168 aa, Avena maroccana
VMASSATSVAPFQGLKSTAGLPVSRRSNAGLGSVSNGGRIRCMQVWPIEGIKKFETLSYLPPLSEEALLKQIDFLIRSKWVPCLEFSKVGFIFREHGSTPGYYDGRYWTMWKLPMFGCTDASQVIREVEEVKKEYPDAYVRIIGFDNIRQVQCVSFIAFKPPGCEESG

SEQ ID NO: 23755 - protein, 710 aa, Arabidopsis thaliana
MVVATTIALYASPPSSVCSTPHQISCDLDLTSRSSSTSSSMASSPQKPIVGGLSSLFSSASVKSSSSSSCSYSTAVDEFSSLRYDRSDDLKDLSFSSSFGYSPAKFVNSFRRDHQSPISVLHGPVSCSCSPPMRMSRDRNLDGSFRLGASRLFNGFVRKALGSCVDYELGSDSGLVDELTFPMEVDTIKPYARDLLRRAQLRHKIFNDESVIKAFYEAEKAHRGQMRASRDPYLQHCVETAMLLANIGANSTVVVAGLLHDTVDDSFMSYDYILRNFGAGVADLVEGVSKLSQLSKLARENNTACKTVEADRLHPMFLAMADARAVLIKLADRLHNMKTLYALSPVKQQRFAKETLEIFAPLANCLGISTWKVQLENLCFKHLYPNQHNEMSTMLEDSFDEAMITSAIEKLDQALKKAGISYHVLCGRHKSLYSIYSKMLKKKLTVDEIHDIHGLRLIVDNEGDCYKALGVVHSLWSEVPGKLKDYITHPKFNGYQSLHTVVMDNGTVPLEVQIRTQEMHLQAEFGFAAHWRYKEGGCKYSSFVLQMVEWARWVVTWHCEAMSKDRSSISSSDSIKPPLQVFRLTLEDCPASYKPNSSQDGPVYVIVIENDKMSVQEFPASSTVSDLLSRAGPGSSRWSMYGIPAKEELRPRLNQIPVSDLKWKLKMGDVVELTPKIPDESLTEYREEIQRMYDRGLAFSRPGTMVGWGS

SEQ ID NO: 23756 - protein, 630 aa, Escherichia coli K12
MAIEIKVPDIGADEVEITEILVKVGDKVEAEQSLITVEGDKASMEVPSPQAGIVKEIKVSVGDKTQTGALIMIFDSADGAADAAPAQAEEKKEAAPAAAPAAAAAKDVNVPDIGSDEVEVTEILVKVGDKVEAEQSLITVEGDKASMEVPAPFAGTVKEIKVNVGDKVSTGSLIMVFEVAGEAGAAAPAAKQEAAPAAAPAPAAGVKEVNVPDIGGDEVEVTEVMVKVGDKVAAEQSLITVEGDKASMEVPAPFAGVVKELKVNVGDKVKTGSLIMIFEVEGAAPAAAPAKQEAAAPAPAAKAEAPAAAPAAKAEGKSEFAENDAYVHATPLIRRLAREFGVNLAKVKGTGRKGRILREDVQAYVKEAIKRAEAAPAATGGGIPGMLPWPKVDFSKFGEIEEVELGRIQKISGANLSRNWVMIPHVTHFDKTDITELEAFRKQQNEEAAKRKLDVKITPVVFIMKAVAAALEQMPRFNSSLSEDGQRLTLKKYINIGVAVDTPNGLVVPVFKDVNKKGIIELSRELMTISKKARDGKLTAGEMQGGCFTISSIGGLGTTHFAPIVNAPEVAILGVSKSAMEPVWNGKEFVPRLMLPISLSFDHRVIDGADGARFITIINNTLSDIRRLVM

SEQ ID NO: 23757 - protein, 162 aa, Oryza sativa
MSASDDEQHNATFESADAGSSLTFPMQCSALRKNGHVVIKGRPCKIIDMSTSKTGKHGHAKVHLVATDIFTSKKYEDISPSTHNMDVPNVSRNEFQLVNIDDGYLNLMTNDGDTKDDVRVPDGELGEQIQAAFDDGKDLMVTIVSAMGEEHCLSFKDAPQGK

SEQ ID NO: 23758 - protein, 119 aa, Guillardia theta
MLKLNKTKKNFKRHEAKKYKRINAGWRKPKGIDSCVRRRFKGKTKMPNIGYGSSKKSRYLGKTGRYIFKVKSPKELDFLIMSNLFYDIEISKKLGKEKKKKIIEKAIIYDMKVTNFKTN

SEQ ID NO: 23759 - protein, 163 aa, Rubrivivax gelatinosus PM1
MITTTIYDFEARSIDGRTVSLADYRGKVLLIVNTASACGFTPQFAGLQSLWQAYGERGLAVLGFPSNEFGGQDPGSNDEIASFCQLNYGVSFPMMAKVEVNGAGAHPLYRWLTGEVKGLLGTRAIKWNFTKFLVGRDGRVLGRYAPTDKPESLTRDIEAALAA

SEQ ID NO: 23760 - protein, 292 aa, Glycine max
MEGNSGGGGGGGGGNDVELLCKTLQVEHKLFYFDLKENPRGRYLKISEKTSATRSTIIVPFSGISWFLDLFNYYVNSDDQDLFSKELQLDTKVFYFDIGENRRGRFLKVSEASVSRNRSTIIVPAGSSRDEGWAAFRNILAEINEASRLFILPNQQNSESSEHLVGLSDDVGAGFISGHSTQPATSSELNVDRSVDLPPQDEIGNLGVSKVIRADQKRFFFDLGSNNRGHFLRISEVAGSDRSSIILPLSGLKQFHEIVGHFVEITKDRIEGMAVANVRTIDPPSKMNANLG

SEQ ID NO: 23761 - protein, 307 aa, Salinibacter ruber DSM 13855
MLWALGVRNSRGGRKHFPALLVKSTGLCILLHSRLPPMSYEVNDFETDVLDASADTPVLVDFWAPWCGPCQQLSPVLESLAEATDDWTLVKVNVDDHPSAAQEYGVRGIPAVKLFVEGDIEAEFAGVKPKPQLESWLDEHLPSEEKSRIEEAKEALEAGSHQEAEHLLWPVLEDNPDHDEAQVLMARALAFKDPNRAQVLAQEAEVADPTLRQMRDGVETIARLLELAEDPSALPENGVKDTYVAALDALADQDFDAALDQFIDVVRTDRNYDDDGARKACVALFTLLGEQHPVTQEHRRTFDMALY

SEQ ID NO: 23762 - protein, 257 aa, Triticum aestivum
TDELSWIPSSDAIYSSDVALQAGFDTSYSDYGMLDDLSAFPCAQDKSLPTADEQFNDNYPFNEQKNVNVYGEQSYHGGAMELLSTDQICNGDGNIDMIGERYSSENALQQLEGRKFSVSSGSQLSSSQNLLKQKHHSDKTSPIQKQVANLQPGQLINDEGQLGQQTLTRRASYPCENYEVEKKGFGKQSKDTLGTSVVVDGSFVSSLSSDNSGEEASSPPPQDAVSQLDVKPKLALEMVVRPGKKRAKSTSFPKWDQ

SEQ ID NO: 23763 - protein, 579 aa, Desulfovibrio vulgaris
MSGLFKKKETAAQAADTQTQTPTPEAHEWLIPEEGRDQLQKVFAGLPGDVTIEVYTGGDPKNLFDDYARRFVADLALLAPRIKPAFHGLDSDMARKRGVTLSPTLLFNPEEYRIRFTGAPLGEEARAFIEAIFLVSARTSGLSQAAKTILAQLDGARSPRVFSSPGCPYCPAQCANAIKCAIERPDLVSAECVNADEFPDLSARYGVGSVPHTQFDESYKGIGLMPEERFVVELVALKDAERWLNEHAAKGGAHGAGTGQGAGSDAGVEVTETDLLVLGAGPAGLSAAIYAERSGLATVVLDKGIVGGQVTVTPVVENYPGFADIAGIKLVEVLSSHARQYATIRENEGVDDIKLGRRIEVHTPRNVFLARAVLFATGAQWRKLDVPGEDRFYGKGVSYCASCDGFVYRGRKVAVVGGGNTALTDALHLRNLGVEVTVIHRRDTFRAEKALQDSLTREGIPVIWNAVVEEVMGDTEVRGVRLRDTKTGETRDVPFDGVFVAIGHVPNSEQAADLGVDLEPDGSIKVDRHMRTNIPRVYAAGDVIGGVRQIVTAVGSGATAALSAFEDLQQPRWKKDKSA

SEQ ID NO: 23764 - protein, 922 aa, Candidatus Pelagibacter ubique HTCC1002
MSSEKRKIAYIDGKPYEIGPNHTSVLNFVKSYLGEKKVPTLCDDPNLAPYGACRVCSVEVALVKDGPTKVVASCHTPVGENQYIFTNNENLTALRKNIVELVLTDHPMECGTCEVNNNCELQDVANDLGISDHRYNSPKQHKGITKDTSHDYMRMNLDNCINCGRCVRACDEIQGSFVLTMSGRGFESKITTDNDALFGDSSCVSCGACAHTCPTDAISDVYQSKSVAVDKKVRTTCSYCGVGCNLEASIKDNKVVAISTPKESEVNAGHTCIKGRYAFGFYDHPDRLKTPLIKRNGKFEEASWDEAYDFIKKELNRITKESGPDAVAGISSARCTNEENYVFQKMIRAAIGTNNIDCCARICHSPTAWGMQQTFGTGAATNSTEDIYHADLFMVIGANPTNAHPVTGAKIKQQVMKGKKLIVLDPITTELAKLADYHIKLRPGTNVAVLNMMLHFILKANLYDKDFVRDRTEGFANFIKEIERQDMDHLAKVAGVDKQLVKEAAIAYATAKNSMEFHGLGVTEQEQGSKTVMLIADLAMITGNIGRKGVGVNPLRGQNNVQGAADMGCQPHQGAGYFEVADEKVQNFYTEKYGVVHPTKAGLKIPEMFDGAINKEVKAVWIIGEDIVQTDPNSAHVVQAMNSLELLVVQEIFMSETAKLATVVLPGTTFLEKNGTFTNTERRIQRVNRAVPPLPGTKTDGTIVTDMMQKLGFDQPEYDADQVLAEIADVVPFFKGVTRERLGKMGLQWPVQEDGTDTQILHQETFKLGKGRLKNFDWKESTEIETNKKEYPLILTTSRVLQHYNAATMTRRTSNINIVSEDLLLVHPNDANKRELNTGDIGRLYSGRGEVALKVEVTDKVKEGIVFTTFHFPEHMVNMVTGHGKDEETMCAEYKVSAVEVQKISNQFKTEIKPKENQAEVN

SEQ ID NO: 23765 - protein, 496 aa, Triticum aestivum
  misc_feature (66)..(66): Xaa can be any naturally occurring amino acid
  misc_feature (68)..(68): Xaa can be any naturally occurring amino acid
  misc_feature (138)..(138): Xaa can be any naturally occurring amino acid
  misc_feature (262)..(262): Xaa can be any naturally occurring amino acid
  misc_feature (264)..(264): Xaa can be any naturally occurring amino acid
  misc_feature (266)..(266): Xaa can be any naturally occurring amino acid
  misc_feature (274)..(274): Xaa can be any naturally occurring amino acid
  misc_feature (276)..(276): Xaa can be any naturally occurring amino acid
  misc_feature (283)..(283): Xaa can be any naturally occurring amino acid
  misc_feature (299)..(299): Xaa can be any naturally occurring amino acid
  misc_feature (309)..(310): Xaa can be any naturally occurring amino acid
  misc_feature (313)..(313): Xaa can be any naturally occurring amino acid
  misc_feature (332)..(334): Xaa can be any naturally occurring amino acid
  misc_feature (338)..(338): Xaa can be any naturally occurring amino acid
  misc_feature (349)..(349): Xaa can be any naturally occurring amino acid
  misc_feature (354)..(354): Xaa can be any naturally occurring amino acid
  misc_feature (356)..(356): Xaa can be any naturally occurring amino acid
  misc_feature (360)..(360): Xaa can be any naturally occurring amino acid
  misc_feature (365)..(365): Xaa can be any naturally occurring amino acid
  misc_feature (371)..(371): Xaa can be any naturally occurring amino acid
  misc_feature (385)..(386): Xaa can be any naturally occurring amino acid
  misc_feature (390)..(390): Xaa can be any naturally occurring amino acid
MAGTGVFADVLDGEVYKYYADGEWRASASGKTVAIVNPTTRQTQYRVQACTQEEVNKVMDAAKVAXKXWARTPLWKRAELLHKAAAILKEHKTPIAECLVKEIAKPAKDAVSEVVRSGDLVSYTAEEGVRILGEGKLXVSBSFPGNERNKYCLSSKIPLGVVLAIPPFNYPANLAGSKIGPALIAGNALVLKPPTQGAVAALHMVHCFHLAGFPKGLISCVTGKGSEIGDFLTMHPGVNCISFTGGDTGIAISKKAGMVPLXMXLXGKDACIVXEXADLDLVXANIVKGGFSYSGQRCXAVKVVLIMEXXADXVVZKVNAKLAKLKVGPPEXXXDITXVVTESSANFIXGSGBXCXGERXNFLPXVQEKGXLIWPLLLDHVRPDXXIAWXEPFGPVLPVIRINSVEEGIHHCNASNFGLQGCVFTRDINKAIMISDAMESGTVQINSAPARGPDHFPFQGLKDSGIGSQGITNSINMMTKVKSTVINLPSPSYTMG

SEQ ID NO: 23766 - protein, 115 aa, Triticum aestivum
  misc_feature (72)..(72): Xaa can be any naturally occurring amino acid
  misc_feature (84)..(84): Xaa can be any naturally occurring amino acid
MARVALVAVFAVLAALAVAEMASGAVTCGDVTSAVAPCMSYARGQASAPSGACCSGVRTLNAKASTPADREXACNCLKNLAGSXISMGNAANIPGKCGVSVSFPINTKTNCNNLH

SEQ ID NO: 23767 - protein, 410 aa, Pseudomonas sp.
MATHVAIIGNGVAGFTTAQALRAEGFEGRISLIGNEPHLPYDRPSLSKAVLGGSLEHPPVLAEADWYGEARIDMLSGRSVTNLNVDARTISLDDGSTFAADAIVIATGSRARTLALPGSQLTGVVTLRTYDDVRPLCRGWTPATRLVIAGGGLIGCEVATTARKLGLAVTILESADELLVRVLGRRIGAWLRGLLTELGVRFELGTGVAGFSGDDRLEEVLASDGRRFAADNALVCIGAEPEDQLARQAGLSCDRGVIVDDHGATHAEGVFAVGDAASWPLRDGGRRSLETYMNAQRQAAAVAAAILGKHGSAPQVPVSWTEIAGHRMQMAGDIEGPGEFVLRGTLGDGAALLFRLRDGRIQAVVAVDAPRDFAMAPRLVEARAAIEPARLADFSNSMRDLVRAQQGDSA

SEQ ID NO: 23768 - protein, 348 aa, Zea mays
  misc_feature (225)..(225): Xaa can be any naturally occurring amino acid
  misc_feature (237)..(237): Xaa can be any naturally occurring amino acid
MSASRFLLAVLVVGSVLCTAAAPRALAAAARELAGDDEAAAAMASRHEKWMAEHGRAYKDEAEKARRLEVFRANAELIDSFNAAGTHSHRLATNRFADLTVEEFRAARTGLRQRPAPSAGAGRFRYENFSLADAAQSVDWRAMGAVTGVKDQGACGCCWAFSAVAAVEGLNKIRTGRLVSLSEQELVDCDVSGVDQGCDGGLMDNAFQFVARRGGLASESGYPYXAGDGPCRSSAAXAASIRGHEDVPRNNEAALAAAVANQPVSVAINGEDMAFRFYDSGVLGGACGTDLNHAITAVGYGTANDGTRYWLMKNSWGASWGEGGYVRIRRGVRGEGVCGLAKLPSYPV

SEQ ID NO: 23769 - protein, 478 aa, Parvularcula bermudensis HTCC2503
MTDPVILWLREDLRFDDNPAMREAAASGAPVLCLYVLDDATAGDFAMGAAQRWWLHHSLCAFKEDLETRGGALILRRGKETEIVPALAKEIKASHVFWNRRYMKWQTDPDTEIKSALQDMGIKGISCNGRLLYEPWEIETKSGDPYKVYTPYWKSLQQKEGPRAALPRTDKLNAPPSLPSTDRLDDWNLLPRSPNWAEGFEPVWTPGEKGARARLRAWLDTDAASYDDCRNRPDQDRTSRLSPHLHFGEISPVVLWHSVSDAMEAGDIPKDQGTSFLSEIAWREFSYQLLYYHPTMRDQPLMEKFTDFEWDTDKKALNAWQRGRTGYPIVDAGMRQLWTEGWMHNRVRMIVGSFLVKDLLLDWRDGMRWFWDCLVDADPANNTASWQWIAGCGADAAPFFRIFNPTTQSEKFDPDGAYIRRYVPELRDLPTRFIHEPRKASTAILKDAGIVLGETYPDPIVDHSDRRKQALSRYEAIK

SEQ ID NO: 23770 - protein, 114 aa, Arabidopsis thaliana
  misc_feature (37)..(37): Xaa can be any naturally occurring amino acid
  misc_feature (53)..(53): Xaa can be any naturally occurring amino acid
  misc_feature (68)..(68): Xaa can be any naturally occurring amino acid
  misc_feature (73)..(73): Xaa can be any naturally occurring amino acid
  misc_feature (75)..(75): Xaa can be any naturally occurring amino acid
  misc_feature (78)..(78): Xaa can be any naturally occurring amino acid
  misc_feature (80)..(80): Xaa can be any naturally occurring amino acid
  misc_feature (86)..(87): Xaa can be any naturally occurring amino acid
  misc_feature (89)..(89): Xaa can be any naturally occurring amino acid
  misc_feature (94)..(94): Xaa can be any naturally occurring amino acid
  misc_feature (100)..(100): Xaa can be any naturally occurring amino acid
  misc_feature (102)..(103): Xaa can be any naturally occurring amino acid
  misc_feature (108)..(109): Xaa can be any naturally occurring amino acid
MASSMLSSTAVVTSPAQATMVAPFTGLKSSASFPVNXKGNNGITSITSNGGRXSCMKVWPPIGKKEFXTLSYXPXPSXVXFAKEVXXLXGTSGXPCVEFXLXXGFFFXXHGKHF

SEQ ID NO: 23771 - protein, 127 aa, Aspergillus oryzae
MSKLFIGGLAWHTTDESLRSGFEKYGAVEEAIVVKDRDTGRSRGFGFVRFSSEADAEAAAHEMNNQEFDGRTIRVDKASERAPRNDGGFQCRGGYNQRGGNGGGYGGYGGGSRGGYGDGDWRRSDGN

SEQ ID NO: 23772 - protein, 434 aa, Schizosaccharomyces pombe
MVYIKCRYVCFCCAFISNTTSKSIFNELRCPVTLTFLQFGFVAFFSAVCLLFRKQFLGGTGIQKPSKYVLYTTLPLSIFQIGGHVFGSLATTKIPVSTVHTVKALSPLFTVLAYRFMFRHVYSAMTYFSLVPLTFGVTLACSFELSADIVGLLYALISTCIFVSQNIFGSKIFMEAKSHSTHTKKHYNKLNLLLYSSGVAFIVMIPVWLYQEGFAYLPEVGSPVFLNLIYNGLSHFFQNILAFTLLSIISPVAYSIASLIKRIFVIVVSIIWFQQATNFTQGSGIFLTAIGLWLYDRSKKGNLYESCKVKEFEKDALELEEQTMEDEKSYPSSGTQSPFYGKNFLPQITPRLDSVVPLISDSPMTPNSVYSNEGVTSSVSGNATPASVRQSTQNDFSNSNIHDRRSSYTFQLNNFKAPQPSRLWATETVPTLKI

SEQ ID NO: 23773 - protein, 132 aa, Burkholderia xenovorans LB400
MAKLIHTMIRVHDLPRSLQFYQKAFNLDVSHRLDFPDFTLVYLRNGEADAEIELTWNKGRTEPYSHGDGYGHVAFCVDDAKRERQRLLDLGMTPNDLREFHNDDGELLARYFFIQDPDGYKIEVLERYGHYQ

SEQ ID NO: 23774 - protein, 532 aa, Arabidopsis lyrata subsp. petraea
KTTLVELGRTLALEECALWMPTRTGLELQLSYTLRHQHPVEYTVPIQLPVINQVFGTSRAVKISPNSPVARLRPVSGKYMLGEVVAVRVPLLHLSNFQINDWPELSTKRYALMVLMLPSDSARQWHVHELELVEVVADQVAVALSHAAILEESMRARNLLMEQNVALDLARREAETAIRARNDFLAVMNHEMRTPMHAIIALSSLLQETELTPEQRLMVETILKSSNLLATLMNDVLDLSRLEDGSLQLELGTFNLHTLFREVLNLIKPIAVVKKLPITLNLAPDLPEFVVGDEKRLMQIILNIVGNAVKFSKQGSISVTALVTKSDTRDADFFVVPTGSHFYLRVKVKDSGAGINPQDIPKLFTKFAQTQSLATRSSGGSGLGLAISKRFVNLMEGNIWIESDGLGKGCTAIFDVKLGISERSNESKQSGIPKVPAIPRHSSFTGLKVLVMDENGVSRMVTKGLLVHLGCEVTTVSSNEECLRVVSHEHKVVFMDVCLPGVENYQIALRIHEKFTKQRHQRPLLVALTGNT

SEQ ID NO: 23775 - protein, 385 aa, Oryza sativa (japonica cultivar-group)
MAWEGGSGGSGGGGARDMDALQGVRSIVLKPSESLDEGRFTRIAGADFNDAGLGLSGMLASLATTGFQASNLGDAVDVVNQMLEWRLSHEKPREDCDEPELDPTYRESVKCKIFLGFTSNLVSSGIRDVVRFLVQHHMVDVIVTTAGGIEEDLIKCLAPTYRGDFSLPGTLLRSKGLNRIGNLLVPNDNYCKFENWIMPIFLPGAISFTYLQNVWTPSKVIGRLGKEINDESSYLYWAYKNNIPVYCPALTDGSLGDMLFCHAVRNPGLIIDIVQGKLDIRLMNGEAIHATPRKTGIIVLGGGLPKHHICNANMFRNGADFAVYINTAQEFDGSDSGAQPDEAVSWGKIKGSAKPVKVHCDATIAFPLLVAATFARKLHDTKQTY

SEQ ID NO: 23776 - protein, 674 aa, Synechococcus sp. WH 8102
MCGIGGVFLADRHQTLDRQLLVNMAAIQSHRGPDGFGVECLDAAGVGFCHARLSIIDLNESRARQPFLSNDRQVLMAHNGEFYDFQRIRADLTAQGVRFSSKSDSEILLRLYQRQGLESTLPLLRGEFAFALFDAADDCLYLVRDRFGIKPQYWTMTPEGLVFGSELKVLFAHQAVERRFTSEGLFHQLMQTMVPGTTAFAGVHQVQPGHVLKVQRRSDRLEVSESTYWDVDFPRLDQRDSTLTEADHIANVRAALLEAVEMRMVADVPVGCYLSGGIDSCSILGLASAVSQGPVKAFTIGFDDARYDETPIAAEMAEATGAEQDVMRLSGRELYGHMEQTLWHTERTIYNTLAVAKYLMSRHVNSVDYKVVMTGEGSDELFGGYPAFRRDMFLHGLEDLPQSDRQDWESLLQTNNSLVQGAMLAADQVDDPDLDAVVGFTPSCLQPWLACAPLVPDLLADEHRQALVEYSPGKAIAEQLNPQQLDGRHALDKAQYVWIKTMLEGQILTWGGDRVDMANSMEARPAFLDHHLAAAAVQVPPELRIKGKTEKYVLREAMAGLLPEVLYKREKFAFMAPPAHTEPEKWAQMKQLADDYLSDEAIDAAGLLSKEGVRALFARHDDPATTDAERVQMDAVINHLLGVQMLHRMFVAADVPAQAREQADRLGWRVLMPV

SEQ ID NO: 23777 - protein, 126 aa, Candidatus Kuenenia stuttgartiensis
MNIYAGNLARQTTEEELKQVFEEFGQVTSVTIIKDKFSGESRGFGFVEMPSRAEAQAALDSLNGKDLNGRVLNVNEALPRTDDRKQGGGGGRGRSGGGRSGGGGGRSGGGRSGGSGGGRSGGGRPW

SEQ ID NO: 23778 - protein, 387 aa, Schizosaccharomyces pombe
MKLLLGDEIGQLKFIEIKKGTDTSNPESEAPVIQKFGELDREKGVLFMLKHEMNVFVARKNGTIECWNVNQEPPILSSLWQLDSSLLETASIVSMKYSNGWLMLALSDGNLLFRHIESSKLRKLQLHGPLSAVELHPRIPGIIAAGGKENDVCLYSCNPTCKSNIDELELWRTENVVKVFQGKNVKNDSLNLRVRVWITGIVFTEDIINVIDGKSEDDESLCFHFATITHYGQLRFYDTKHGRRPVSTFDVSTSPLSHVGLLPSIKLLYFADKRAQISIFDHSKKKVIGRFQGVKGAPSSIHCLGNVVAITGLDRNVRIFDADRKPLANAYIKALPTSIIVINERDAEIIKKEEELEAAKEEEEEIWRNMEQLEDTEDKKPSKRIKL

SEQ ID NO: 23779 - protein, 281 aa, uncultured bacterium
MTAQLIDGNALSKQLRAEVAVRAAKLSERGITPGLAVILVGDNPASQVYVRNKVKACEDAGLHSVLEKYPATMTEAELLARVEALNSDPSIHGILVQLPLPKHIDDHKVIESISPLKDVDGFHVASAGALLVGEPGFKACTPYGCMKMLESIGYDLRGKHAVVIGRSNIVGKPMALMLLQSSATVTICHSATPDLAYHTRQADVVVAAVGKRNVLTADMVKPGAVVIDVGMNRDDEGKLCGDVDFAGVKEVASWITPVPGGVGPMTITMLLVNTIEAAERL

SEQ ID NO: 23780 - protein, 956 aa, Vanilla planifolia
MASSIDAQLRLLAPAKVSEDDKLVEYVRLLLDRFLDILQDLHGEVVRETVQELYELSAEYESKHDPKKLDELGNLLISLDPGNSIVIASSFSHMLNLANLAEEVQIAHRRRIKLKKGDFVDENSATTESDIEETLKRLVHDLKKSPEEVFDALKNQTVDLVLTAHPTQSVRRSLLQKHARIRNCLAQLYAKDITPDDKQELDEALKGGSAAFRTDEIRRTPPTPQDEMRAGMSYFHETIWKGVPKFLRRVDTALKNIGINERVPYNAPLIQFSSWMGGDRDGNPRVTPEVTRDVCLLARMMAANLYFSQIEDLMFELSMWRCSDELRIRADELHRSSKRDAKHFIEFWKQVPPNEPYRVVLADVRDKLYNTRERSRHLLSSGISDVPEESSMTNVEQLLEPLELCYRSLCSCGDRPIADGSLLDFMRQVSTFGLALVKLDIRQESDRHTDVIDAITTHLGIGSYREWSEDRQEWLLSELASGKGDLQIGSDLPATCSVDVIDTFLVIAELPPDNFGAYIISMATAPSDVLAVELLQRECHVRQPLRVVPLFEKLADLEAAPAALARLFSIEWYRNRIDGKQEVMIGYSDSGKDAGRLSAAWQLYKGQEDLIKVAKKYGVKLTMFHGRGGTVGRGGGPTHLAILSQPPDTIHGSLRVTVQGEVIEQSFGEEHLCFRTLQRFTAATLEHGMHPPISPKPEWRTLLDEMAVVATEEYRSIVFQEPRFVEYGRLATPELEYGRMNIGSRPSKRKPSGGIESLRAIPWIFAWTQTRFHLPVWLGFGTAFKHVSPKDIKNLRILQEMYNEWPFFRVTIDLVEMVFAKGNPGIASLYGKLLVSSELWSFGERLRANYQETKDLLLQVAGHKVFLKESLSEAEVGLRDSYITTLNVCQAYTLKRIRDPNFHVKVRPHISKEISDASKPAAELVKLNPTSEYAPGLEDTLILTMKGIAAGMQNTG

SEQ ID NO: 23781 - protein, 336 aa, Mycobacterium avium subsp. paratuberculosis
MTADTVHDVIIIGSGPAGYTAALYTARAQLAPVVFEGTSFGGALMTTTEVENYPGFRDGITGPELMDQMREQALRFGADLRMEDVESVSLAGPVKSVTTAEGETVRARAVILAMGAAARYLGVPGEQDLLGRGVSSCATCDGFFFKDQDIAVIGGGDSAMEEATFLTRFARSVTLVHRREEFRASRIMLERARANDKITIVTNKAVEAVEGSETVTGLRLRDTVTGETSTLAVTGVFVAIGHDPRSELVRDVLDTDPDGYVLVQGRTTATSIPGVFAAGDLVDRTYRQAVTAAGSGCAAAIDAERWLAEHAESSAAAQGDATEFPGSTDTLIGAPQ

SEQ ID NO: 23782 - protein, 117 aa, Mycobacterium avium subsp. paratuberculosis
MTDAEKASATIEVSDASFSTDVLASNKPVLVDFWATWCGPCKMVAPVLEEIASERGDHLTVAKLDVDANPETAQNFQVVSIPTLILFKDGQPVKRIVGAKGKAALLRELSDAVPNLG

SEQ ID NO: 23783 - protein, 100 aa, Neisseria meningitidis
LDDVREALTEIGITGMTVSEVKGFGRQKGHTEIYRGAEYAVDFLPKVKIELVLADDAVERAIDVIVEVARSGKIGDGKIFVLPVEEAIRIRTGERADAAV

SEQ ID NO: 23784 - protein, 69 aa, Arabidopsis thaliana
MADWGPVLIAVILFVVLSPGLLFQIPAGGRVVEFGNMQTSGASILVHAIIFFGLITIFTIAINVHIYSG

SEQ ID NO: 23785 - protein, 337 aa, Bifidobacterium breve
MAENEWLSKDFYKVLGVSKDASDDDIKKAYRKLARKYHPDVNKTKEAEEKFKDISEAYDVLSKKEDRQKYDAIRQFGMGGARFAGGSGAGGFDASGFSDIFGSMFGQGAGGNGSRIRFSTSGGGNPNLNDIFSMFGGAAGQGAGGYGQQAYGNAGGYGYEEAPRPENGEDRNSKISLTLRQAVKGATVSLSVDGKKFKAHVPAGVKDGQKIKLAGKGKPGINGGKAGDLYLHVTVNPDSTFSMRGRDIVMNLPVTVGQAVAGGKVDAKDIDGNLVTFKVPAGSSSGAEVKLAGLGVKRGNQPGDLIGRVQIMVPAKPGLAVKHAAKEFDEKAGDYLN

SEQ ID NO: 23786 - protein, 311 aa, Prosthecochloris vibrioformis
MKKEIIIGTRSSPLALWQAEFTKAELSKRFPDMNISLKLVKTTGDVLLDSPLSKIGDMGLFTKDIEKHLLAGEIDLAVHSLKDVPTVRRKAWLSPRSPSVKTPRRHHFQVRQGVDGPSAEAKMATSSLRRMSQLLSLRPDLEIMDIRGNLNTRFKKFDEGDFDAMMLAYAGVYRLEFSDRITEILPHETMLPAVGQGALGIETRTDDAETREIVRVLNDDNTEMCCRAERALLRHLQGGCQIPIGSFGSYIDGTLKLLAFVGSVDGKTGLRNEVTKAVKTPEEAEAVGIELAEILLSMGAEKILADIRKTC

SEQ ID NO: 23787 - protein, 413 aa, Bacillus clausii KSM-K16
MEKRRVVVTGLGAVTPLGLDAKTSWEQAKAGKSGIGYLTRIDAAAFPMKVAAEIADFDPTAAIDRKEVRKMDRFTQFAVVSAQEALADAGLEITPENADRVGVWIGSGIGGMETYENQFRIFLEKGQRRVSPFFVPMMIPDMASGQVSIFTGAKGPNSCSVTACASGTNSIGDAFKVIQRGNADVMITGGSEAPITNMAVAGFSSAKAITTSDDPATASRPFDANRSGFVMGEGAGILILESLESAKARGAHIYAEIVGYGSTGDAFHVTSPAPEGEGGARSMQAAIDDAGLAPEEVSYINAHGTSTELNDPYETKAIKTVFGEHAYKLAISSTKSMTGHLLGAAGAVEAIFSVKAIDEDIIPPTINLETPDPECDLDYVPNEARQAPVHVALSNSLGFGGHNASLVFKKWVE

SEQ ID NO: 23788 - protein, 385 aa, Guillardia theta
MNHNIKVFKRAETFEEMELKRELLKGIYGYGFERPSFIQQRGILPIINKEDVVAQSQSGTGKTATFVIGTLQNLSNIENKIKNLVLVPTRELATQVEQVFKSIGFFMKIKTQLLTGGDRIQITNKEQYKKPQIVIGTPGKVLDSLSKKTYYIENLEYLVVDEADEMFSRGFKIQVLKIIKYLPLEAKIALFSATMPIETLEIVELFMTNPVKILVKKDELTLEGIKQFYIAIEKEEWKLDSVIEIYSKIKITQSIIYVNTRRKTEWLANIMKKYGFDVGYLHGEMLQIDRSSVMKDFRSGLFRILISTDLVSRGIDIQQVCLVINYDLPKLKEVYIHRIGRSGRFGRKGVAINFLSRSDVSILRSIEGYYNTNIEEMPNDISEFL

SEQ ID NO: 23789 - protein, 494 aa, Arabidopsis thaliana
MVLTKTATNDESVCTMFGSRYVRTTLPKYEIGENSIPKDAAYQIIKDELMLDGNPRLNLASFVTTWMEPECDKLIMDSINKNYVDMDEYPVTTELQNRCVNIIARLFNAPLEESETAVGVGTVGSSEAIMLAGLAFKRKWQNKRKAEGKPYDKPNIVTGANVQVCWEKFARYFEVELKEVNLSEGYYVMDPDKAAEMVDENTICVAAILGSTLNGEFEDVKRLNDLLVKKNEETGWNTPIHVDAASGGFIAPFIYPELEWDFRLPLVKSINVSGHKYGLVYAGIGWVVWRAAEDLPEELIFHINYLGADQPTFTLNFSKGSSQIIAQYYQLIRLGFEGYKNVMENCIENMVVLKEGIEKTERFNIVSKDQGVPVVAFSLKDHSFHNEFEISEMLRRFGWIVPAYTMPADAQHITVLRVVIREDFSRTLAERLVADISKVLHELDTLPSKISKKMGIEGIAENVKEKKMEKEILMEVIVGWRKFVKERKKMNGVC

SEQ ID NO: 23790 - protein, 233 aa, Candida glabrata CBS 138
MSQDIVVELGLLSEVDGSAKLLMNSTNVLCAVTGPVEPKARQELPTEMALEVIVRPAKGVPTPREKYLEDKIRAIFTPLITRHKYPRQLCQITCQIMEAGENEQLHNQKELSACVNSALLALVNAGVALNDLAAAVTIAVIDDQSQENKAQYIIGPSDEELEKSSSVHTIAMEVGDNGKKVKRVLLIESNGIFNDKVIFDILELSESACLNLCSNWRGVLTKHIQKELDLQSS

SEQ ID NO: 23791 - protein, 139 aa, Triticum aestivum
RGSRPRFRVVRARGCFLTWTLRGSSCVKSSWEALTKSIPWRVAGAEAAQSLHQENMMLKEQMTAVLSQNAVLKRAVAIQHERQKEFDERSHEVQGLKQLVLQYQEQLRTLEINNYALQMHLKQAQQSSSMPGRPLPDVF

SEQ ID NO: 23792 - protein, 101 aa, Neisseria meningitidis
KLDDVREALTEIGITGMTVSEVKGFGRQKGHTEIYRGAEYAVDFLPKVKIELVLADDAVERAIDVIVEVARSGKIGDGKIFVLPVEEAIRIRTGERSDAAV

SEQ ID NO: 23793 - protein, 411 aa, Oryza sativa
MNALAATSRNFRQAARLLGLDSKLQKSLLIPLREIKVECTIPKDDGTLATFVGFRVQHDNSRGPMKGGIRYHPEVDPDEVNALAQLMTWKTAVAAVPYGGAKGGIGCTPGELSRSELERLTRVFTQKIHDLIGINTDVPAPDMGTNAQTMAWILDEYSKFHGHSPAVVTGKPIDLGGSLGRDAATGRGVMYATEALLTEYSESISGSTFVIQGLGNVGSWAAKLIHQKGGKIVAVGDVTGAIRNKSGIDIPALLKHRSEGGSLEDFYGAEVMDAAELLVHECDVLVPCALGGVLNRENAAEVKARFIIEGANHPTDTEADEILAKKGVIVLPDIYANSGGVVVSYFEWVQNIQGFMWDEEKVNRELQKYMKNAFQNIKDMCKSQNCNLRMGAFTLGVNRVAKATLLRGWEA

SEQ ID NO: 23794 - protein, 377 aa, Thermoplasma acidophilum
MGDITDLLSKVSIDDVYDEWEDQASGSLPEDAEIENVYKTLNVKIKVIGCGGGGSNTVNRLYDDALKNADLIAINTDASHLRSIKVKHKLLIGQKTTKGLGTGADPKVGEEAAIEEIVAIKKIVQNTDITFVTAGLGGGTGTGCAPVIARAAKEAGSIVISVVTLPFESEGPLRMDNAVIGLEKLAQFSDTLVAIPNQRLLSEVPNAEMKVAFAYADKVLADTIRSIVEIITKTGIINIDYSDIKTVMQSGGVALIGMGQSKKGGDRIMTALEEALKPRLIDVDVSTAKDCVFKIIAPPDITVSEVGKAMDEIKKKINPRSRIIWGLTIDKDLDKDVKVLIFMTGVSSAYLVKDVESARKLASMFTGSYAAEIDTVN

SEQ ID NO: 23795 - protein, 889 aa, Shewanella sp. ANA-3
MAGNVADNVTDMYASLRSNVSMLGQILGDTMRTHLGDSFLEKVEQIRKLAKDSRRGDEAAREQMLELLTALPDEELVPFAKAFNQFLNLANLSEQFHTISRNCDELVCVPDPVEQLLGRMLNSRIDQTKMLDCLKTLDIDLVLTAHPTEISRRTLIQKYAAIVDCLAEQENNQLSDRERRQINLRLRQLIAQIWHTNEIRRERPTPVDEARWGLSTIEESLWHAVPDFLRQLNDQVQDRTGQQLPIDIAPVRFSSWMGGDRDGNPFVTAKVTQEVLDRNRHAAARLFLKDIVLLVGELSMEEANSELMAYTNNSCEPYRFVLRSLRQKLRDTIDYLNARIEGHNPEVDKSTLIWQESDLKAPLEMLYKSLCDCGMRLIANGLLLDILRRLACFGIHMLRLDIRQDAGRHCDVLAELTRYLGMGDFNHWDETEKQAFLLRELSNRRPLIPSNWQPSADVAEVLNTCRLIAKHPAKALGSYVISMASKPSDVLTVLLLLKETGCTHPMRVVPLFETLSDLNNAAECITALLDIDWYRGYTKGMQEVMIGYSDSAKDAGVMAAAWAQYRAQEQLVAVCKQAGVKLTLFHGRGGSIGRGGGPAHKAILSQPPGSVDGRIRVTEQGEMIRFKFGLPKLAVQSLALYTSAVLEATLLPPPEPKQEWRNCMERIAEESVSAYRGIVREEPDFVPYFRAATPEVELGKLPLGSRPAKRRVDGGIESLRAIPWIFAWSQNRLMLPAWLGAGEALQAACQRGEMGLLQDMEREWPFFSTRISMLEMVYAKAEPNLARYYETCLVPTNLHHLGETLRQRLDLGIKVVLELTKSDTLMAHTPWNRESVKLRNPYIDPLNFLQTELLARTRKETTEAPASEHVQLALMLTIAGVAAGMRNTG

SEQ ID NO: 23796 - protein, 498 aa, Oryza sativa
  misc_feature (93)..(93): Xaa can be any naturally occurring amino acid
MATCLDSLGPLLGGAANSTDAANYICNRFTDTSSAVDATYLLFSAYLVFAMQLGFAMLCAGSVRAKNSMNIMLTNVFDAAAGALFYYLFGFAXRVGTPSKGFIGKQFFGLKHMPQTGYDYDFFLFQWAFAIAAAGITSGSIAERTRFSAYLIYSAFLTGFVYPVVSHWFWSTDGWASAGRLTGPLLFKSGVIDFAGSGVVHLVGGIAGLWGAFIEGPRIGRFDAAGRTVAMKGHSASLVVLGTFLLWFGWFGFNPGSFTTISKIYGESGTIDGQWSAVGRTAVTTSLAGSVAALNHAVRQEMADGALERDRRLQRSPRRVRAITAGCSVVDPWASVICGFVSAWVLIGCNKLALMLKFDDPLEATQLHGGCGAWGIIFTALFARREYVELIYGVPGRPYGLFMGGGGRLLAAHIVQILVIVGWVSATMGTLFYVLHRFGLLRVSPATEMEGMDPTCHGGFGYVDEDEGERRVRAKSAAETARVEPRKSPEQAAAGQFV

SEQ ID NO: 23797 - protein, 465 aa, Bacillus cereus ATCC 14579
MAKQLPDIGDYKYGFKDKDVSIFRAGRGLTKEIVEEISRMKEEPQWMLDFRLKSLDKFYEMPMPQWGGDLNDLDFDEITYYVKPSEKSEKSWDEVPDEIKATFDKLGIPEAEQKYLAGVSAQYESEVVYHNMKEDLEALGIVFKDTDSALKENEDIFREHFGKVIPPTDNKFSALNSAVWSGGSFIYVPKGVKVDTPLQAYFRINSENMGQFERTLIIVDEGAHVHYVEGCTAPVYTTNSLHSAVVEIIIKKDAYCRYTTIQNWANNVYNLVTKRAVCEENATMEWIDGDIGSKLTMKYPAVILKGEGARGLTSSIAIAGKGQHQDAGAKMIQLAPNTSSTIVSKSIAKHGGKVTYRGIVHFGPKAKNSRSNIECDTLIMDNQSTSDTIPYNEIKNDYVSLEHEAKVSKVSEEQLFYLMSRGISEQEATEMIVMGFIEPFTRELPMEYAVEMNRLIKFEMEGSIG

SEQ ID NO: 23798 - protein, 360 aa, Synechococcus elongatus PCC 7942
MAVRKLGVLTSGGDCPGLNAVIRAIARHAVGNYGWELWGIAYATQGLLKRQAIALSPHHFDRQSLDPLLCSGGTILGSINRGDTLAHQAEILAGYQELGLDALIGIGGDGSLAILRQLAEAGRWQFIGIPKTIDNDVALTERAIGFDTAIHTVAEALLSLGSTAASHDRIMIAEVMGRQSGHLALQGGIAGGADVILLPEIPYRLLELCHYLQQLRDRWQRRYAVIAIAEGTHHPPEVTQGPGSLGEQLVQAITAQDPTLDARVTVLGHVQRGGNPVASDRLLATQMGYAAVERLAAGASGEMMAWQGGRVVSVPLEAVCLQSPTLVDPHSPLVDTAAGLGIFLGDRSLTPWRGSACPTH

SEQ ID NO: 23799 - protein, 780 aa, Salinibacter ruber DSM 13855
MAQDDLRRELGFWDALTIGAGTMIGAGIFLLAGVALELTGPAAIFSYLAAGIVCMITAASAAELATGMPTSGGDYFFVSRSLGPALGAISGVGIWLSLTFAISFYLFGLGEYLSQFLPLTPFWGAFAGGLLLTAINVYGAKESGQMQVIVVLTLMGILGAFCGIGAFYIEWSNFTPFFPFGGAPVASTTALVFVSFLGFVKIAAVAEEIKNPAKNLPRTLIGSVALVTLLYVVILLVIGGIFEQETIGEVRDPLTQAARTLAGPIGAGAIIFAGLLATVSSANASIMASSRINLAMARDRMVPNWLSAIHETLLTPHRAILLTGVLALAFLFIESLEQLAKIASVLQLYSYAALNVGCVALRVAQPDWYEPSYRTPGFPFVQGLAALACIGIILYSGPFAQIAIVVLILASLGWYYVWGRSRVEIEHAVPEFREQWAAQGWSALAAPAPEFAVQVPEVLSAAERAVDADGPRRVSVALANPEHEHDLLQLGRYIATGRTEGGHVAGIHLVDVPLQTPLRSARAQFTERPSLERAIADLPQEAAARPSTNDLDHTPLEATDIESVIDVAHDVFGGLIDETQAQTSDMLLMGWQGGFNVGRIYNSPIQRIVSDLPADLGVLKDRGFDSVDQILLPWGGGLHAQLGLEIAVRVARITDATVHLLRVVREDVDVEDEKAALDDTVQGLVDTDRVEYLVRQSDSVTGGIDATLTEADYDFAIIGASREWSLRQVLFGSIPDVVADRADCSVLMVRRYVPNTLSVRAVEGVKRLKETVGLTTSPEE

SEQ ID NO: 23800 - protein, 314 aa, Lactococcus lactis subsp. lactis Il1403
MDKKKGILLVALGTPRSCEADDVRDYLKEFLGDPLVIQKPRWLWLPILNGIILKVRPQKSAEMYKKIWTDEGSPLMIYTVAQAKQLQDMREDFDVRFAMTYGEPRIDKVIAEMKESGVEEITVLPLYPQYSLTTVEPVIQQVKKIDDKIKVIRDFHKVESYSDLLAESIREKWQANDYDKLVLSYHGIPLSYVTKKKDAYEEQCKETTRLVVSKLGLREEEYEHTYQSKFGPEKWLEPATIDRVAELPKENAKKVLICSPAFVADCLETLFELEIENKEVFVENGGETFDFVHPFNDSLDFTRVLSEVVDQNRL

SEQ ID NO: 23801 - protein, 227 aa, Haemophilus influenzae R2866
MELVFIRHGFSEWNAKNLFTGWRDVNLTERGVEEAKAAGKKLLDKGYEFDIAFTSVLTRAIKTCNIVLEESHQLWIPQVKNWRLNERHYGALQGLDKKATAEQYGDEQVHIWRRSYDISPPDLDPQDPNSAHNDRRYANIPSDVVPNAENLKLTLERALPFWEDQIAPAMLSGKRVLVVAHGNSLRALAKHIIGISDSEIMDFEIPTGQPLVLKLDDKLNYVEHYYL

SEQ ID NO: 23802 - protein, 269 aa, Bordetella bronchiseptica RB50
MSKFLRHDRDGAIWTVTLDQPETRNALTGNTAVQEIVDLCEEVARDDSVRVIILTGADPVFSSGGNVKDMRRFFDDSISAADIRQEYRHGIQRLTRALYNIDVPTIAAVNGAAIGAGCDLACMCDIRIASEQASFAESFIKVGIVPGDGGAWLLPRVVGMSRALEMSFTGDAMAAAEALACGLVSRVVPHDQLLAQARQLAERIAANPGATLRLTKRLLREGQELGLDSLLEQSASAQAIAHKTPEHREAVTAFIEKRRPDFSRAARRG

SEQ ID NO: 23803 - protein, 334 aa, Xylella fastidiosa Ann-1
MAIKVGINGFGRIGRNILRSAVQNFGSNIDIVAINDLLEPDYLAYMLQYDSVHGRFKGEIAIEGTALILNGKKIRLTAERDPGNLQWADAGAEIVIESTGLFLTQESAGKHLVAGAKKVIISAPSKDETPMFVYGVNHNSYNGEPIVSNASCTTNCLAPLAKVINDKWGITRGLMTTVHAATATQKTVDGPSNKDWRGGRGILENIIPSSTGAAKAVGKVIPSLNGKLTGMSFRVPTSDVSVVDLTVQLNTPATYKEICTEVKQQSEGPLRGILDYIEDKVVATDFRGETCTCVFDADAGIALDPTFIKLIAWYDNEWGYSNKCLEIAKVIAAK

SEQ ID NO: 23804 - protein, 290 aa, Debaryomyces hansenii CBS767
MRLLGSSQSDRRRLLGPVNAKLPNVGISSDLNNKPTTENKKRNDEVRKMFLKSGLVTNANGSAYLEVGDTIIEVSVFGPRPIRGSFIDRASFSVECKFLPYVTQPNEITFNGKATNFNNNGRPSLTNIEQKISSYLETSLLPCILLEKYPKSTIDIFVSVISTNSNPNSNSSLLNLINWIINCSSLALVDSGIELKDIVTSGQVNLNQKSNELTLDPIYPVDTIDKEDSIDCLVSFMNLRNDEIVGFWVEGKQEELNETIVTQLIDGCNEMSKQIRSNINGYLLSLMDSN

SEQ ID NO: 23805 - protein, 244 aa, Frankia sp. EAN1pec
MTGSRTLLLLRHGESAWNAADRFAGWVDVPLSARGRVQAGRCGDLLRDTGLLPDVVHTSLLRRAVSTADLALDAADRHWIPVRRSWRLNERHYGALQGRNRMQVRAEYGADLLRFWRRSFHGTPPPIDPGSVFGQDDDARYRELGVHVPRTESIADVLDRLRPYYESEIANDLDAGRTVLVVAHGNVLRALIRHLGAQAGDPADDDLSEVRLPTGALLRYDLTDVGLPVRPGGVLLSASGATQK

SEQ ID NO: 23806 - protein, 958 aa, Vanilla planifolia
MLASIDAQLRLLAPAKVSEDDKLLEYVSLLLDRFLDILQDLHGEVLRETVQELYELSSEYESKHDPKKFGMNLGILLITLDPGNSIVIASSFSHMLNLANLAEEVQIAFRRRIKLKKGDFADEASATTESDFEETLKRLVGKLKKTPQEIFDALKSQTVDLVLTAHPTQSVRRSLLQKHGRIRNCLTQLYAKDITPDDKQELDEALHREIQAAFRTDEIRRIPPTPQDEMRAGMSYFHETIWKGVPQFLRRVDTALKNLGINERLPYNAPLIQFSPWMGGDRDGNPRVTPEVTRDVCLLARMMAANLYFSQIEDLMFELSMWPCSDELRLRADELNVSSKKDAKHYIEFWKKVPPNEPYRVILGDVRDKLYHTRERARQILSHGVSDIPEATFTNVEQFLEPLELCYRSLCACAHRPIADGSLLDFLRQVSTFGLSLVKLDIRQESERHTDVMDAITRHIEIGSYREWSEEQRQQWLLSELAEKRPLFGPDLPRTEEIADVLDTFQVIAELPSDGFGAYIISMATSSSDVLAVELLQREFRVPKPLRVVPLFEKLADLEAAPAAVSRLFSIDWYRDRINGKQEVMIGYSDSGKDAGRTFCCLAVYKTQEELVQVAKQFGVKLTMFHGRGGTVGRGGGPTHLAILSQPPDTINGSLRVTVQGEVIEQCFGEERLCFRTLQRYTAATLEHGMNPYFSKPEWRSLLDEMAVIATNEYRWIVFQEPRFVEYFRLATPELEYGRMNIGSRPSKRKPSGGIESLRAIPWIFAWTQTRFHLPVWLGFGAAFKHVISKDNKNLHTLREMYNGWPFFRVTIDLIEMVFTKGNPGIASLYDKLLVSSELLPFGAQLRENYGETKRLLLLVAGHKDLLEGDPYLKDQRLRLRDPYITTLNVCQAYTLKRIREPGYHVTARPHLLKETDESIKSAAELVKLNPTSEYGPGLEDTLIITMKGIAAGLQNTG

SEQ ID NO: 23807 - protein, 220 aa, Magnetospirillum magnetotacticum MS-1
EGEYSNAGGRMFPGTEREFAVQESVFTRHGVDRVLTFAFDLARSRPKRHLTSATKSNGISITMPFWDERVRAVAESYPDVRWDQYHIDILTAHFVLNPDRFDVVVASNLFGDILSDLGPACTGTIGIAPSGNINPERRYPSVFEPVHGSAPDIAGQGVANPIGQIWSGAMMLEHLGEREAAAEIVAGIERVLTEKALRTRDLGGTADTQTCGRAVEQALG

SEQ ID NO: 23808 - protein, 257 aa, Mycobacterium sp. KMS
MTSLVQVADVDHVRLLTMNRPEARNALSRDLIRALYASLSEADDDASVHVVVLTGADPAFCAGVDLKEAAREGTEYFAEFQSQSCITRVAEMRTPVIGAVNGAVFTGGLEMALGCDFLIASHRAVFADTHARVGILPGGGMTARLPQVVGAAMARRLSMTGEVVDAERAERIGLVTEVVPHERLLDRAIELAAQIAEVPAATMAGLKEIYTRGADAVISPALAAEQDIAGSQARDFAGLSTRFDDVTARNRAQIATD

SEQ ID NO: 23809 - protein, 141 aa, Brassica napus
KRQDAAQVIALLIWEGLGLGGGEAVGNWNSETGKRTVLLGIGGGHYAPRHVDVVLKDDIWVGHLLSGYSLPMEEAKPGENHIGGTWRQSIQAAFEATKASFPGGEILAHLDQKSFKGWQKKAITEFLAEHNINVGRPNDFT

SEQ ID NO: 23810 - protein, 391 aa, Xylella fastidiosa Dixon
MSTEVKVPVLPESVSDATIASWHKKAGEIVKRDENIVDLETDKVVLEVPSPVDGVLKEIKFDTGSTVTSNQVLAIIEEESIVAAPSPAPSQVIDQKPVAVSAPAAKSNVDSLPPGARFTATTEGIDPAQIEGSGRRGAVTKEDIINFAKQNGAARASGTRLEERVPMTRIRQRIAERLMQSKNSTAMLTTFNEINLAKVSNIRKELQEEFQKAHGIKLGFMSFFVKAVANALQRFPLVNASIDGTDIIYHGYSDISIAVSTDKGLVTPVLRNVERMSFADIEHRIADYAKKARDGKLSLEELQGGTFTVTNGGTFGSLLSTPIVNPPQSAILGMHTIKERPIAENGHIVIAPMMYVALSYDHRIIDGKDSVQFLVDIKNQLEAPGRMLFGL

SEQ ID NO: 23811 - protein, 400 aa, Candida albicans SC5314
MPIDINTKAKCYFDTRPLTKGERKIIKDSIPILEYLDIQFGEKFFKRLIKQFPQYKPYFNETHLKLLRQPRSFHHCLLEFARNIDDLRPMKDFIMRIASKHVARQVSPDQYRVFGQVLVEVMMDQFPKEFVDQEFVEAWTMAFRILANILINIEVREYQDKPWYGFKAFRVTRLQPECVGTKSFFITPVDGTPVPIPKRGQYLCMRWKFPGEKQERLREYTISEFPKNNEYRITVRYIPGGKVTTYIHEKLAVGDIVQVSPPCGDCYYRSSKRNMVMLAGGNGVVALAPMIEKGLAEGRKVKFLYSNRSTETRSFGQFFRDLKQKYGDQLEVVEYLSRRRVIDPIDKYYRRSLTVEDLDFIVPEDDVYLIGPRTYMKMIEDYLKGRGVNVTLDYFGPQEV

SEQ ID NO: 23812 - protein, 291 aa, Clostridium josui
MKKIRIGSRDSKLAIIQSELIMSAIRKYDPDIELELITMKTTGDKILDKTLDKIEGKGLFVKELDNALYNNEVDITVHSYKDMPLEENPELPVVALSKREDPRDAFILPQNGENGEPIGSSSLRRQLQLKELFPGCKTAPIRGNVQTRLKKLDSGEFSAIVLAAAGIKRLGLESRIGRYFSVDEILPAASQGIIAVQGRVGENFDFLKLFHSEESLCISLAERTFVREMNGGCSTPIAAYATIQGSEIILKGLYCNETTGELRKECVSGNRNNPVELGYELVKKMKSSKSI

SEQ ID NO: 23813 - protein, 132 aa, Schizosaccharomyces pombe
MSGGKSGGKAAVAKSAQSRSAKAGLAFPVGRVHRLLRKGNYAQRVGAGAPVYLAAVLEYLAAEILELAGNAARDNKKTRIIPRHLQLAIRNDEELNKLLGHVTIAQGGVVPNINAHLLPKTSGRTGKPSQEL

SEQ ID NO: 23814 - protein, 99 aa, Neisseria meningitidis
DDVREALTEIGITGMTVSEVKGFGRQKGHTEIYRGAEYAVDFLPKIKIELVLADDAVERAIDVIVEVARSGKIGDGKIFVLPVEEAIRIRTGERSDAAV

SEQ ID NO: 23815 - protein, 117 aa, Arabidopsis thaliana
  misc_feature (80)..(80): Xaa can be any naturally occurring amino acid
MASSMLSSATMVASPAQVTMVAPFSGFKESVAFSVTRKVNNDITSIISNGGIVNCMQVGPPIGKKKFETLSYLPDLNDSXLAKEVDYFIREKRVPLGGTCRGGMEFEHREARVLTPE

SEQ ID NO: 23816 - protein, 292 aa, Wolbachia endosymbiont of Drosophila ananassae
MTIIIDGKKIANDLCERLSQKIDILKREYNIFPCLKVILVGSNPASQVYVRNKQKKAESIGISSETIVLPDNISEDELIEKINELNEDPSVHGILVQLPLPNHISASRVINTVSVEKDVDGFHDENVGKLVKGEKNCLIPCTPKGSLHLIKSIEENLSGKNAVVIGRSNIVGKPMFYLLLQENCTVTILHSQSKDLAEYCSKADIVVAAVGKPNFVQADWIKKGAIVIDVGINSVNVGKLVGDVDFEGIKGKAKAMTPVPGGVGPMTIAFLMMNTVIAACLQKGVDASNFIS

SEQ ID NO: 23817 - protein, 502 aa, Delphinium grandiflorum
MSISLFLAGAAILFFVTHLLLSPTRTRKLPPGPKGWPVVGALPMLGNMPHVALANLSRRYGPIVYLKLGSRGMVVASTPDSARAFLKTQDLNFSNRPTDAGATHIAYNSQDMVFADYGPRWKLLRKLSSLHMLGGKAIEDWAVVRRDEVGYMVKAIYESSCAGEAVHVPDMLVFAMANMLGQVILSRRVFVTKGVESNEFKEMVIELMTSAGLFNVGDFIPSIAWMDLQGIVRGMKRLHNKFDALLDKILREHTATRSERKGKPDLVDVLMDNRDNKSEQERLTDTNIKALLLNLFSAGTDTSSSTIEWALTEMIKNPSIFRRAHAEMDQVIGRNRRLEESDIPKLPYLQAVCKETFRKHPSTPLNLPRVAIEPCEVEGYHIPKGTRLSVNIWAIGRDPNVWENPLEFNPDRFLTGKMAKIDPRGNNSELIPFGAGRRICAGTRMGIVLVEYILGTLVHAFEWKLRDGEMLNMEETFGIALQKAVPLAAVVTPRLPPSAYVV

SEQ ID NO: 23818 - protein, 659 aa, Halobacterium sp. NRC-1
MDVDDIHSIAVLGAGNMGHGIAEVAAMAGYTVRLRDISAELVQDGYDQIEWSLGKLAESDQLTEAAADAALDRISTHVEVSDAVDDVDVVIEAVPEKMEIKTDVYTEVEAHAPADAVFATNTSSLSITDLSEVTERPARFCGMHFFNPPVRMELVEVISGAHTDDAVLECIESLAADFGKTPVRVRKDSPGFVVNRILVPLLNEAAWLVHDDEATIAEVDSTTKYDMGLPMGAFELADQVGIDVSHDVLDYMQDVLGTAYEPCPVLVDHVEAGDLGRKSGAGFYDYGDDAAGADVPTDAIRADIADRLTAVMANEVAKLVGGGVADPAEIDEAVMLGAGYPEGPAKMADAAGITYLHETLVAAHEATGQARYEPADTLAEMAAAGESFHGRGDEDADGRREFDAVSVSVDGNVGHIELDRPHRMNTISGELLADLSDAIDVLGDDDDVRAVLLTGAGEKAFSAGADVTSMAGNADPVEAVELSRMGQQTFGKLEAADEPVVAAIDGYCLGGGMELATCADMRLASERSELGQPEHDLGLLPGWGGTQRLKHIVGEGRAKEIIFTADRFAPETLADYGFINEVVTTEAFEERAWELARDLAAGPPIAMKYTKRAMRAGRDDTDAGLEIEAQSFGQLMNTQDLMEGVSAFSADREPEFNGE

SEQ ID NO: 23819 - protein, 310 aa, Rickettsia prowazekii
MSIIYYLPEYRGQATVLQTQKDNNMVNNIIDGKALANEILADLKLEIQGFKEKTKTSPKLAIVLVGDNPASMIYVKNKIKNAHQVGIDTLLVNLSTNIYTDDLILKINELNLDKGISGIIVQLPLPSSIDENKILSAVLPSKDSDGFHPLNVGYLHSGINQGFIPCTALGCLAVIKKYAPNLNGKDAVIVGRSNIVGKPLSALLLQENCSVTICHSKTCNLSSITSKADIVVVAIGSPLKLTAEYFNPEAIVIDVGINRISHNKIAGDVDFENVKSKVKYITPVPGGIGPMTIAFLLKNTVKAFKNAIAL

SEQ ID NO: 23820 - protein, 656 aa, Oryza sativa (japonica cultivar-group)
MDFTNLLITVLLLLAPLKYKSDVATASDDEDFFKTCSSHRCSKHGPEIRYPFRLSTQPPSCGAPGMQLSCSGQDTILDHPVLGSCKVTMIYYRHVIMNAIPLVDSSPHCLLHKFISVNQSTAVYRPHTLKAASLVGCSRDSIDTNQYNSIVGPTSCLSLANNASQFWYLAYPYEYMSILPLGCTIVSKDIPMPYSYDKNGPNFDISIFTETAKRVISTGETVFTWYSSNVTSICQQCEHEGRRCGFSSQRDQAFCQHHTLTSSHSFNRVETRTYPSYTTLIRKLCTCIFPAMLCKIIELVTSSVGTFIVLSLIVATALYISLKSRYNEEIHLKVEMFLKTYGTSKPTRYTFSEVKKIARRFKDKLGHGAFGTVYKGELLNGVPVAVKMLENSVGEGQEFINEVATIGRIHHANIVRLLGFCSEGTRQALIYEFMPNESLEKYIFPHGSNISRELLVPDKMLDIALGIARGMEYLHQGCNQRILHFDIKPHNILLDYSFNPKISDFGLAKLCARDQSIVTLTAARGTMGYIAPELYSRNFGAISYKSDVYSFGMLVLEMVSGRRNTEPTVENQNEFYFPEWIYERVMNGQDLVLTMETTQGEKEMVRQLAIVALWCIQWNPKNRPSMTKVVNMLTGRLQNLQVPPKPFTSSQNQLVI

SEQ ID NO: 23821 - protein, 98 aa, Neisseria meningitidis
DVREALTEIGITGMTVSEVKGFGRQKGHTEIYRGAEYAVDFLPKIKIELVLADDAVERAIDVIVEVARSGKIGDGKIFVLPVEEAIRIRTGERSDAAV

SEQ ID NO: 23822 - protein, 629 aa, Mycobacterium tuberculosis H37Rv
MKPYPFSAIVGHDRLRLALLLCAVRPEIGGALIRGEKGTAKSTAVRGLAALLSVATGSTETGLVELPLGATEDRVVGSLDLQRVMRDGEHAFSPGLLARAHGGVLYVDEVNLLHDHLVDILLDAAAMGRVHVERDGISHSHEARFVLIGTMNPEEGELRPQLLDRFGLTVDVQASRDIDVRVQVIRRRMAYEADPDAFVARYADADAELAHRIAAARATVDDVVLGDNELRRIAALCAAFDVDGMRADLVVARTAAAHAAWRGVRTVEEQDIRAAAELALPHRRRRDPFDDHGIDRDQLDEALALASVDPEPEPDPPGGGQSANEPASQPNSRSKSTEPGAPSSMGDDPPRPASPRLRSSPRPSAPPSKIFRTRALRVPGVGTGAPGRRSRARNASGSVVAAAEVSDPDAHGLHLFATLLAAGERAFGAGPLRPWPDDVRRAIREGREGNLVIFVVDASGSMAARDRMAAVSGATLSLLRDAYQRRDKVAVITFRQHEATLLLSPTSSAHIAGRRLARFSTGGKTPLAEGLLAARALIIREKVRDRARRPLVVVLTDGRATAGPDPLGRSRTAAAGLVAEGAAAVVVDCETSYVRLGLAAQLARQLGAPVVRLEQLHADYLVHAVRGVA

SEQ ID NO: 23823 - protein, 397 aa, marine gamma proteobacterium HTCC2207
MLILYGLGTTIGGGIYALVGKVAARAGMLAPLSFVAAALLSAFTALAFAELSSRYPKSAGEAVYVQQAFNKKSLTVVIGMLVILNGCISAAALANGFVGYLQVFVSIPDWIAIVTVTAALGLLAIWGIGQSVITAAVITVIEIIGLILIVWVTRSDLATFPVRLNEFNPGLNSAMWLGILSGSFLAFYAFIGFEDIVNVAEEVVDVENNLPKAIIITLILTTLIYCLVTLAAVLTVPPEQLGQQSAPLTYIYAAKTGSDATLISLISILAIVNGALIQMIMASRVLYGMSRQSMIPAQLNFMAEINPRTQTPIKATLLVMLLVSVLALSYAIESLAETTSLMILVIAVVVNTALVQIKLRAEEQPEKKGIRVPIAVPITGLIISFGFAIMIAIDLIK

SEQ ID NO: 23824 - protein, 430 aa, Bacillus cereus ATCC 14579
MTIGTLPFDQETIRQRASEVNEAAWLTEFRLQALAQATELPMPTPDKTKIDKWDFIGKGDAAKQEPVSSLTELPEAVKNLIDENNSVLVQRTGTTAFVSLADEAKEKGVIFTDIVTAATEHAELVQKYLMKDGVKVDEHRLTALHAALINGGAFVYVPKNVVLETPLQAVFLVDGEEANVYNHVLFVADANSTATYVENYVANENAKGIANIVAEVIVEQGAQVKFGAVDLLAKDVTTYVNRRGVVGRDGRIDWALGLMNDGNTISENVTNLMGDGSYADTKTVTIGRGNQTQNFTTKVVHFGKHSEGWILKHGVQKDSATSIFNGIGKIEHGASKSNAQQSSRVLMLDEKARGDANPILLIDEDDVMAGHAASVGRVDPVQLYYLMSRGIPKREAERLVIHGFLAPVVNELPIEGVKAQLVEVIERKVR

SEQ ID NO: 23825 - protein, 109 aa, Chlorobium tepidum TLS
MSGKYFEATDQNFQAEILNSDKVALVDFWAAWCGPCMMLGPVIEELAGDYEGKAIIAKLNVDENPNTAGQYGIRSIPTMLIIKGGKVVDQMVGALPKNMIAKKLDEHIG

SEQ ID NO: 23826 - protein, 674 aa, Oryza sativa (japonica cultivar-group)
  misc_feature (481)..(481): Xaa can be any naturally occurring amino acid
MAIHGVFHCSTTAILRVISVLCLLAVLVPDAGGRHHRHGCPPFTCGNLSSVSSPFRRRGDPSECGVLSYELNCADDKATIQIDNGTYYVTGINYTDSTFLIVDADISDSPSSCPLPRWNSLREPRFQVLWTRIASFVNCSQEIKNSSWIMYMPVACLSTSRSFVYVLTGQKSALIQSLEPSCGYLAMTPLGGRDSVAPVNESLSLSYADVVKSMRKGFRVQFPFRYRTGSFKQCPMDSIPTGKTNWFGTILSADTNFLLCIPVHQIPSRYRMPLGIMLYVIAYALQIWKMIAATCRFLLTPLAVLVFLAHKYWKTRVTIDAVEKFLRMQQMLGPTRYAYTDITAITGHFREKLGQGGYGSVYKGVLLPGDLHVAVKMLNGNSNCNGEEFISEVATIGMIHHVNVVRLVGFCSEEMRRALVYEHMPRGSLDKYIYLSERSFSWDKINEIALGIARGINYLHQGCDMWILHFDIKPHNILLDXNFVPKVADFGLAKLYPRDKSFVPDRALRGTVGYMAPEMVSRSFGVISSKSDVYSFGMLLLEMAGGRRNVDPNADSSKSKAYYPSWVYDQLIADQQFDEISNVANMHELERKLCLVGLWCIQMKSHDRPTMSEAIEMLEGGVDALQVPPRPFFCDGDGIGNGMPPPQVMDSYFHSSKLTAISEEGDGIAKLASS

SEQ ID NO: 23827 - protein, 162 aa, Pseudomonas putida KT2440
MAATMLNIPCVTLGGEHKTLGDFPGKVLLVVNTASQCGFTPQYKGLEQLWQAYRDRGLVVLGFPCNQFGKQEPGDAREIAQFCERNFGVSFPLFRKVEVNGPGAHPLFVELKQRAPGILGSQKIKWNFTKFLVDPASGQVKRYAPTTKPQALEADIERLLSR

SEQ ID NO: 23828 - protein, 99 aa, Neisseria meningitidis
DDVREALTEIGITGMTVSEVKGFGRQKGHTEIYRGAEYAVDFLPKVKIELVLADDAVERAIDVIVEVARSGKIGDGKIFVLPVEEAIRIRTGERADAAV

SEQ ID NO: 23829 - protein, 311 aa, Chlorobium tepidum TLS
MDKDIRDVVIIGTGPAGYTSAIYTGRANLKPLVIEGPQPGGQLMITTDIENFPGFPEGIPGPELMGRMREQAARFGVEFQFGSITEVDVSRSPFSLMLDNGQEILARTLIIATGANAKWLGIESEEKYRGRGVSACATCDGFFFRNCRVFVVGGGDTAMEEALYLTKFASEVVLVHRREEFRASKIMSLRASKNEKITTMLNQVVDEILGDDMKVTGIRLKNVKTGELTEHACDGVFIAIGHEPNAKLFKGQLDMDDYGYILTKDHSTETSVKGVFACGDVQDFTYRQAVTAVGTGCMAAIEAERFLESIR

SEQ ID NO: 23830 - protein, 669 aa, Oryza sativa (japonica cultivar-group)
MAIPGSFCHPTALQVFVSVQFVFAVLVPHAAGRHHRHGCAPFSCGHLSDVSPPFRRRGDPPECGVASYELTCTDDKPATIQIDNGTYLVMDIKYKDSTFWVIDANISDSRNNCPLPRWNRDFGYYDQMLYERHGEDSRRRSIQAELMPPYQSTTATFVTCSQEILKSNGKYRPVACMSTNSSFVYVLTGMNSDSIGSLEPSCGYLAMTPLGAGDRPLVLENASYADVVKLMRGGFAIRFPYTSRFYVYSSKIKQCIAQSFQIFYTVIFDYHFWGCLLPHPVVQLIVGVIPLAMWTLKWIAVFCRFILVPLVILTFLARNYWKIRITTDAVEKFLRMQLMNGPTRYAYTDLIAITGHFREKLGQGGYGSVYKGVLLPGNAHVAVKVLGNSNCNGEEFISEVSTIGRIHHINVVHLVGFCSEEIRRALVYEYMPRGSLDKYIFSSERSFSWDKLNEIALGIARGINYLHQGCDMQILHFDIKPHNILLDVNFVPKVADFGLAKLCPRDQSFVPLSALRGTIGYIAPEMISRSFGIISSKSDVYSFGMLLLEMAGGRRNSDMYAENSNQTYFPSWVYDQLTEQQVGVGEIPAGTVANMHELERKLCIIGLHCIQMKSHDRPTMSEVIEMLEGGVVGLQMPPRPFFCDDEPVSLAVNSHQFSSELSEILEEDE

SEQ ID NO: 23831 - protein, 204 aa, Zea mays
MHNTSTHTHAGCCWAFSAVAAVEGLNKIRTGRLVSLSEQELVDCDVSGVDQGCDGGLMDNAFQFVARRGGLASESGYPYQGRDGPCRSSAAAAAASIRGHEDVPRNNEAALAAAVAHQPVSVAINGEDMAFRFYDSGVLGGACGTDLNHAITAVGYGTAADGTRYWLMKNSWGASWGEGGYVRIRRGVRGEGVCGLAKLPSYPV

SEQ ID NO: 23832 - protein, 554 aa, Shewanella sp. ANA-3
MCSIFSILDIQSDAKELRQVALEMSKLMRHRGPDWSGIYASDKAILAHERLAIVDIEHGAQPLLTEDGSLILAVNGEIYNHKELKAQLGDKYSYQTNSDCEVILALYQEYGTEFLDKLNGIFAFVLYDKAKDAYLIGRDHMGIIPLYTGRDAAGNFYVASEMKALMPVCKTVAEFQPGQYLYSSIGEPVQYYTRDWQSFDAVKDNGASQEELRDALEAAVKRQLMSDVPYGVLLSGGLDSSVISAITQTFAKRRIEDDDQSGAWWPQLHSFAVGLKGAPDLAAAKKVADAIGTIHHEINFTFQEGLDAIKEVIYHLETYDVTTIRAATPMYLMARKIKAMGIKMVLSGEGADELFGGYLYFHKAPNAQAFHEELVRKLDKLHLFDCLRANKAMAAWGLEARVPFLDKEFMDVAMRINPEAKMSKDGRIEKHILRQAFEHKLPKEVAWRQKEQFSDGVGYSWIDGLKAHAAEQVDDLQLANAKFRFPYNTPETKEAYFYRCFFEEHYPLPSAAETVPGGKSVACSTPEALAWDESLRGIIDPSGRAVRSVHAASY

SEQ ID NO: 23833 - protein, 707 aa, Moorella thermoacetica ATCC 39073
MGEVVFSTWGGKVVDHRGGPSGGGPSWAGEFGGRQLKAFIGWDGLVVTDPAVDLLAALQAYYQAVQGESCGRCVPCRVGTRVIYNVLVRIAGGEGLPSDLDLLRRVAWIVRDGSLCELGQAGAKAVLDFLDYYSEALRPFLEDSGRVAGGQRRPGPGGRVQVLASGRVLVGNDRGKGAAAASPAAGLTYKPFVTAPCLKRCPAHLDIPAYIDAIKDGRYEESLAIIRQRTALAGVLGRVCVHPCEENCRRGNVDEPLAIRGLKRFVADYEVKRGRRPVAVCGGNLFTGPWRPAGQAGGEETTAVTSGKKVAIIGAGPAGLSAAYQLAGRGYKVTIFEALPVAGGMLAVGIPSYRLPRDILAGEIEAIKALGVTINLNTRVGVDVTMDQLQRDYDAVFIATGLHASSRMGVAGEDEGYGGFIPGVKFLRDLNLDRCPSLEGKVVAVVGGGNVAMDCARSALRRGAREVHLIYRRSRAEMPAHATEVRDAEAEGVIYHFLVNPTALVAEKGNIKGMQCVRMKLGEPDDSGRRRPVPVPGTEFFLPCDIVVPAIGQAADLSFLDGRIEVGKRGTISVDPVTLATSVPGVFAGGDIVLGARTVVEAVAQGNRAAVSIDQYLRQGTTSPTVEDELDAWLEKVGVYDPEEDVGIYGGRPRQAERVAPLAERVKDFREVEGGFDFYAGRAEAERCLRCYRVGMMVLAGEGESNG

SEQ ID NO: 23834 - protein, 215 aa, Haemophilus influenzae R2866
MNQSILSPFGNTAEERVLNAINAFKNGTGVLVLDDEDRENEGDLIFPAETITPEQMAKLIRYGSGIVCLCITDERCQQLNLPPMVEHNNSVNKTAFTVTIEAAKGVSTGVSAADRVTTIQTAIADNAVPTDLHRPGHVFPLRAANGGVLTRRGHTEASVDLARLAGFKEAGVICEITNDDGTMARTPEIVEFAKKFGYSVLTIEDLVEYRLAHNI

SEQ ID NO: 23835 - protein, 509 aa, Geobacter metallireducens GS-15
MELPLCDFPFTLQLDLQKTTKESSEMMILKNSSLLKQQCYLDGHWCCADGGATIDVTNPATGEILGVVPKMGTQETRRAIEAANGALDGWKARTAKERSAILRRWFELIMENLEDLAVIMTAEQGKPLAESRGEIAYAASFIEWFAEEGKRIYGDTIPSYARDKRIVVIKEPIGVCAAITPWNFPAAMITRKAGPALAAGCTMVVKPATATPFSALALALIGEQAGIPAGVFSVITGSSKEIGDEMTGNPIVRKLTFTGSTEVGKQLTAQCAGTMKKVSMELGGNAPFIVFDDADLDAAVEGAIASKYRNTGQTCVCTNRILVQESVYEAFSAKLVAAVSKMTVGDGLKGEVQQGPLIDMTALEKVEEHIADAVAKGARVVLGGKRHALGGTFFEPTIITDVTPGMLVAREETFGPLAPLFKFSTDEEAIRMANDTEFGLASYFYSRDIRRVWKVSEALEYGMVGINTGLISSEVAPFGGVKESGVGREGSKYGIEEFVEVKYLCMGGI

SEQ ID NO: 23836 - protein, 334 aa, Flavobacteria bacterium BBFL7
MIVKLILYCKFHCIKQTIMSKNQFGKNGWTPDIIGSLKGKTYVITGTTSGTGLEAAKILLAKDAKVVMLNRNNTKAQDTIAKFKSELGNHIEVSNIQMDLAQLASVRKAAKQVLSTIPHIDALICNAAIAQVPKQVLTVDGFESQLGVNHYGNFLLQGLLFPLIDKSNGRIVTVGSEGYKMGIKTIKFDDMNWDNDYNPNTVYSQSKLAQIMSVYELQDRLKNAGKSNVKVYACHPGASRTSLIKTSGSLMTRFIWQMMKLSPFVQSAEKGSYPALMCATEPELDQKRYYGPTSGNYWKGPVGECNLEPHAKDKATMVKLWEVSEDATGFQWNL

SEQ ID NO: 23837 - protein, 473 aa, Artemisia annua
  misc_feature (68)..(68): Xaa can be any naturally occurring amino acid
MELYTTSLLFIVSFSTIIFLLFRRNSAFWRSINTPPGSTGLPLIGETFQIISAYKTENPEPFIDARVXKYGSVFTTHVFGERTVFSADVEINKFILQNEGRLFESSYPGSIANLVGKHSLLLMRGGLHRRMHSLTMSFANSTIIKDHLLADIDRLVRLNLDSWTGRILLMDEAKKITFELTLKQLLSIEPCEWSENLRKEYMLVIEGFFCIPLPFFSLTYRRAIQARKRVTEALHLVVRERRIEREKGVKKNDMLAALFDSDGDEENFYDDEIVDFLVSLLVAGYDTTSTTMTLAVKYLTDTPSALAQLKEEHDAIRAKKGASVALEWDDYKSMPFTQCVVNETLRLSNIISGVFRRAITDVKIKDYTIPKGAKVFTSLRAVHLDQDNFEDARVFNPWRWQKTSDSASFMPFGGGPRRCPGHELARVALSVFLHHLITHFSWKPAEEDKVVFFPTTRTQKRYPIIVEQRNVVG

SEQ ID NO: 23838 - protein, 391 aa, Ralstonia eutropha JMP134
MFERPPDSWPPLAPICRPAAMTIARTEDIIADIRAGRMVILVDEEDRENEGDLVLAADFVTPDAINFMAKHGRGLICLTLTAERCRQLNLQPMVSRNGTQHGTNFTVSIEAAEGVTTGISAADRSRTVEAAVARDAKPSDLVQPGHIFPLTAQPGGVLIRAGHTEAGCDLGALAGLTPAAVICEIMKDDGTMARLPDLIEFAQEHNLKIGTIADLIHYRSRTESIVERVGERAMETPYGTFHSIAYRDKPTGHAHLALVKGTPSADKETLVRVHEPLSVLDLLEVSRTTHSWSMPAALEAIAKAESGVMVLLNCGDSADQLFTQFTALDEPQNRPRRKPDLRTYGMGAQILKDVGVGKMRVLAAAQRMPSMTGYDLEVTGYQPMNGQAKQN

SEQ ID NO: 23839 - protein, 499 aa, Shewanella sp. MR-4
MTTQVKHYIDGEFTTGTGTSQIVVTNPANNEPIALINSATADEVHAAIASAKAAFKTWKEVPVSERARVMLRYQHLLKEHHDELATILAKETGKTFEDAKGDVWRGIEVAEHACNIASLLMGETVENVARSIDTYSYTQPLGVCAGITPFNFPAMIPLWMFPLAIACGNTFILKPSEQDPMTPQRLVELFVEAGAPKGVLQLVHGDKTAVDILLADPAVKAISFVGSVAVGQYIYKTGTDNLKRVQAFAGAKNHCVIMPDANKQQVINNLVGASVGAAGQRCMAISVAVFVGAAKEWIPELKEALAKVRPGLWDDKEAGYGPLISPAAKARVLKLIAQGKEEGAECLLDGSDFSVAGFESGNWVGPTMFTKVTTDMSIYKEEIFGPVLCCMESDSLEDAIELVNASPYGNGTSIFTASGAAARKYQHEIEVGQVGINVPIPVPLPFFSFTGWKGSFYGDQHAYGKQAVRFYTETKTITSRWFESDIAVAAGPNMSINLR

SEQ ID NO: 23840 - protein, 260 aa, Bordetella bronchiseptica RB50
MSVQAPDAAEVLVDRADGILTITINRPQARNAINPAVARGIAAAVDELDASDELRIGILTGAGGSFCAGMDLKGFLRGELPSIEGRGFGGLTARPPRKPLIAAVEGYALAGGFELVLACDLVVAADNAQFGVPEVKRGLAATAGGLVRLPRQLPYRIALELALTGDMFPARRAHGYGLINQLTEPGQALDAARELARRIVANGPLAVAASKRVVVESQDWPADEVWERQAALTEHVFESADAREGSAAFAEKRQPVWQGK

SEQ ID NO: 23841 - protein, 340 aa, Brassica napus
RPRVREMEDEDSSAPTFTITVDAKSGTSTGVSASDRAMTVLTLASLEAKPDDFRRPGHVFPLKYREGGVLRRAGHTEASVDLMILAGLRPVSVLSAILDQEDGSMASLPYMKKLATEHDIPIVSLTDLIRYRRKRDKLVERITVSRLPTKWGLFQAYCYRSKLDGAENIALVKGNIGNGQDILVRVHSECLTGDIFGSARCDCGNQLELAMQLIEKEGRGVVVYLRGHEGRGIGLGHKLRAYNLQDEGHDTVQANLELGLAIDAREYGIGAQMLRDIGVRTMRLMTNNPAKFTGLKGYGLAVVGRVPVVTPITNENRRYMETKRKKMGHIYISDIDQPLV

SEQ ID NO: 23842 - protein, 230 aa, Triticum aestivum
  misc_feature (206)..(206): Xaa can be any naturally occurring amino acid
  misc_feature (210)..(210): Xaa can be any naturally occurring amino acid
MGAPKWVVAPLALLLLLQLAGASHDVRRSLEAEAASPSVPASILSPLLRTGYHFQPPMNWINDPNGPLYYKGWYHLFYQYNPKGAVWGNIIWAHSVSRDLINRIALDPAIKPSIPTDQFGVWSGSATILPNGTVAMLYTGIDRPGTNYQIQNIAFPKDPSDPLLREWVKPGYNPIAIPEAGMNATQFRDPTTAWHAGDGLWRMLVXRLKXARSAGMAILYRSRDFQHWVR

SEQ ID NO: 23843 - protein, 317 aa, Yarrowia lipolytica CLIB122
MEHIKNFWAAKPQYKEVEYADQRDKTFVVTGGLSGVGMECARLLLKKRARVVIVGRNKDFARDLLSELARDIPEGEAAFVELDLADLESVKKGGQEIARHYPVIHGVVLNAGTMAPPYAKTKQGHEIHWGTNVMGHHLLMKYLEPSVLRAAHDSPPGTVRIVWVAASSSTLIPGLEGSIRFNTNNEDEKKPPHVLYNMSKTGNAYEAYLWSKFHPHSGVSSVSMDPGNLSTNLTRHSGGLVHRFKDYVLYPAKFGAYTELAALLSPTIKDGDHLVPWGVPGTLRHDVDEARRGPKGEEMWIELERDTQAFFQPEEVH

SEQ ID NO: 23844 - protein, 374 aa, Arabidopsis thaliana
MTITAFLARRLIGNGSSQILGTSSSSSGPFISVSRAFFSSSTPIKATLFPGDGIGPEIAESVKQVFTAADVVIDWDEQFVGTEVDPRTNSFLTWDNLQSVLKNKVGLKGPMATPIGKGHRSLNLTLRKELNLYANVRPCYSLPGYKTRYDDVDLITIRENTEGEYSGLEHQVVKGVVESLKIITRKASMRVAEYAFLYAKTHGRKKVSAIHKANIMQKTDGLFLQCCDEVAAKYPEIYYEKVVIDNCCMMLVKNPALFDVLVMPNLYGDIISDLCAGLVGGLGLTPSMNIGEDGIALAEAVHGSAPDIAGMNLANPTALLLSGVMMLRHLKLNKQAEQIHSAIINTIAEGKYRTADLGGSSTTTDFTKAICDHL

SEQ ID NO: 23845 - protein, 567 aa, Vibrio cholerae O1 biovar eltor str. N16961
MTKIVIIGGVAGGASAAARARRLSEDAEIIMFERGPYVSFANCGLPYHIGGDIKERSNLLLQTPESFLARFNVDVRTMNEVLRINRAAKTITVRNLLDQSEYDENYDFLLLSPGAGPVIPPIPGIQNPLTHSLRNIPDMDKIIQTLQMNKPEHATVVGGGFIGLEMMEAFHHLGIKTTLIEMADQVMTPVDREMAGFAHAEIRAKGIDLRLGAALKSVEYRPAATLPSAESGESLEHKHVEGELDLLLSNGDTLTTDILIMAIGVRPETKLAAEAGLQLGELGGIWVNEQMQTSDPAIYAVGDAVEEKDFVTGKQTLVPLAGPANRQGRMAADNMLGRNESYQGTQGTAICKIFDLAVASTGKNEKQLKREGIAYEKVYVHTASHASYYPGAEVVSFKMLFDPQTGKIFGAQAVGKDGIDKRIDVMAVAQRAGMTVEQLQHLELTYAPPFGSAKDVINQAAFVATNLIKGDAKAIHFDEIDNLTDEQVLLDVRNPMELQNMGYLPGAINIPVDQLRQHMNELPKDKEIVIYCQVGLRGNVAYRQLVNNGFKARNLIGGYRTYKFAKA

SEQ ID NO: 23846 - protein, 605 aa, Brassica rapa subsp. pekinensis
MALTLTVLILACLLSLVSPDAQGDALFALRMSLRALPNQLSDWNQNQVNPCTWSQVICDDKNFVTSLTLSDMNFSGTLSSRIGILGTLKTLTLKGNGIAGGIPEEFGNLTSLTSLDLEDNELSGFIPSTLGNLKKLQFLTLSRNNLNGTIPVSLTGLPNLINLLLDSNRLSGQIPQTLFEIPKYNFTGNNLNCGVGQPHPCVSEVARSGDSSKPKTGIIAGVVAGVTVILFGILVFLFCRDRHKGYKRDVFVDVAGEVDRRIAFGQLKRFAWRELQLATDNFSEKNVLGQGGFGKVYKGVLPDNTKVAVKRLTDFESPGGDAAFQREVEMISVAVHKNLLRLIGFCTTQTERLLVYPFMQNLSLAHRLREIKAGDPVLDWETRKRIALGAARGFEYLHEHCNPKIIHRDVKAANVLLDEDFEAVVGDFGLAKLVDVRRTNVTTQVRGTMGHIAPEYLSTGKSSERTDVFGYGIMLLELVTGQRAIDFSRLEEEDDVLLLDHVKKLEREKRLGAIVDKNLDGDYVKEEVEMMIQVALLCTQGSPEDRPVMSEVVRMLEGEGLAERWEEWQNVEVTRRHEFERMQRRFDWGEDSMNNQDAIELSGGR

SEQ ID NO: 23847 - protein, 460 aa, Prosthecochloris aestuarii DSM 271
MQVKFGTDGWRAIIAEEFTFANLKRVTLAAAEYFLNQPDSLRGICLGYDTRFMSADFARYSAEIFSSKGLRVFLSDSFVPTPAVSLYTKEKKLAGGVVITASHNPPVYNGFKIKDSYGGSAHPQSIAIIEENLEHVDAEEPIVPNEHLIELTDIKEFYLQNLSRNIDLKSIHDTQMTIAHNAMFGAGQQIISGLFDESTVSNYHCSLNPGFMGINPEPVAQNVMDFVDFVKEVKTDVAIINDGDADRVGMLDENGSFIDSHKIFAIVLKYLVEDRGEKGEIAKTFALTDVIDSICRKHDLPLHILPVGFKHVSKLMTTSNILMGGEESGGIGITSYLPERDGIYIGLLVLEIMAKKKMTLGELVKELFDEYGYFYYERHDLHVSQEKKQAIMRRAAGGDITAIGPYPVTRFNDLDGYKYHFKGGWLLIRPSGTEPVLRIYCEADSREKAQKALAFAEKIA

SEQ ID NO: 23848 - protein, 368 aa, Brassica rapa subsp. pekinensis
MARTKQTARKSTGGKAPRKQLATKAARKSAPATGGVKKPHRFRPGTVALREIRKYQKSTELLIRKLPFQRLVREIAQDFKTDLRFQSSAVAALQEAAEAYLVGLFEDTNLCAIHAKRVTIMPKDIQLARRIREGKFNVANPTTGCQKKLEIDDDQKLRAFYDKRLSQEVSGDALGEEFKGYVFKIMGGCDKQGFPMKQGVLTPGRVRLLLHRGTPCFRGHGRRTGERRRKSVRGCIVSQDLSVLNLPRMRGPKRASKIRKLFNLGKDDDVRKYVRKYVNTYRRKFTNKKGKEVSKAPKIQRLVTPLTLQRKRARIADKKKRIAKANADAAEYQKLLASRLKEQRDRRSESLAKKRSRLSSAAAKPVAA

SEQ ID NO: 23849 - protein, 760 aa, Cryptococcus neoformans var. neoformans JEC21
MTSPSAQPMIPRSQPPRPSHTQSSPAINSTGIKPNGPPSVIRRAPSVPVNPSTAAASGSLSSLLKSENTAQAVSRSSPPTEPNDLPRPIEPTPMLPITGLPNSSSSSSNARHGSSSSISRGPSVTGTLTPATTALGAPIEPTPPQTGASKMAAAAKRGLDGSAGNNVKVYEEGHPLNEETLKQRGYQTLNILNHPFHLPDRWKLLRPLGQGAYGLVIQVQDAETEIPIAVKCVTRVFDKVILARRALREITLLRHFGEHDNLTGLVDMDNVWDGYNEIYLYMEPMEADLHQIIRSGQPLGNAHIQFFIYQLLRGMKYIHSANVIHRDLKPGNLLVNSGCELKICDFGLARGFNPVKGEEPQGEEGKLTEYVATRWYRAPEIMLSNRRYTTAIDVWSIGCILAELLGLKPVFKGKDYIEQMTLILETLGTPDEETMARVASEKALTFLKTLPTYEKKDLGSIFPDADPLAVDLTDKLLEFDPTRRIDVPSALTHAYVERYHDPEDEPSCDKIFDKWEEVESLSTIEELKEAITREIQGFREEVRMAAEEDDEDEEWAEGEYLDDENVFHDSPGPALASTLEKFTYPDHIAPTGSAPRTREHSPTTTFITSAEDYFTAQHGFGGPNGRASRRSSSHSTSGRRPASFLFSPFGAGMTQIVPTPNAYPRSHAQASPELTTAEKTPRDRRSSGLWRTRSRAQSQSGNLVLERLSSLEINDHKDGEKNRIDALHAVVGLGGDGEVPPMTVSPSDAPPSEVPKSFGY

SEQ ID NO: 23850 - protein, 527 aa, Saccharomyces cerevisiae
MPMDFQPTSSHSNWVVQKFGGTSVGKFPVQIVDDIVKHYSKPDGPNNNVAVVCSARSSYTKAEGTTSRLLKCCDLASQESEFQDIIEVIRQDHIDNADRFILNPALQAKLVDDTNKELELVKKYLNASKVLGEVSSRTVDLVMSCGEKLSCLFMTALCNDRGCKAKYVDLSHIVPSDFSASALDNSFYTFLVQALKEKLAPFVSAKERIVPVFTGFFGLVPTGLLNGVGRGYTDLCAALIAVAVNADELQVWKEVDGIFTADPRKVPEARLLDSVTPEEASELTYYGSEVIHPFTMEQVIRAKIPIRIKNVQNPLGNGTIIYPDNVAKKGESTPPHPPENLSSSFYEKRKRGATAITTKNDIFVINIHSNKKTLSHGFLAQIFTILDKYKLVVDLISTSEVHVSMALPIPDADSLKSLRQAEEKLRILGSVDITKKLSIVSLVGKHMKQYIGIAGTMFTTLAEEGINIEMISQGANEINISCVINESDSIKALQCIHAKLLSERTNTSNQFEHAIDERLEQLKRLGI

SEQ ID NO: 23851 - protein, 151 aa, Legionella pneumophila
MDLFRKKDIKGSPDNESHLAKCLSVFDLTFLGVGAIIGAGIFVLTGIVAATISGPAVIFSYVVAGFACAFAALSYAELAASIGGCGSAYGYAYAGFGELIAWIVGWDLLLEYSIGVSAVSIGWSGYANDFLMALKIFIPTHLLHGPVDGGI

SEQ ID NO: 23852 - protein, 647 aa, Zea mays
  misc_feature (159)..(159): Xaa can be any naturally occurring amino acid
MAFNAKPYCSTTAKPPTPAAHRSPSGPSPCISVRAAAVSPRARHSAYGLSAAGNASSSTVRLRALAQRTRAQPQPPRRRPEYVPNRIDDPNYVRIFDTTLRDGEQSPGATMTSAEKLVVARQLARLGVDVIEAGFPASSPDDLDAVRSIAIEVGNPPTXDDGGAHVPVICGLSRCNRRDIDAAWEAVRHARRPRIHTFIATSEIHMQHKLRKTPDQVVAVAREMVAYARSLGCADVEFSPEDAGRSNREFLYHILEEVIKAGATTLNIPDTVGYTLPYEFGKLISDIKENTPGIENAIISTHCQNDLGLATANTLAGAHAGARQLEVTINGIGERAGNASLEEVVMAIKCRGELLDGLYTGINSQHITLTSKMVQEHSGLHVQPHKAIVGANAFAHESGIHQDGMLKYKGTYEIISPDDIGLARANEFGIVLGKLSGRHAVRSKLVELGYEISDKEFEDFFKRYKEVAEKKKLVHHLQRVTDEDIEALLSDEIFQPKVIWSLADVQATCGTLGLSTATVKLIGPDGEERIACSVGTGPVDAAYKAVDQIIQIPTVLREYGMTSVTEGIDAIATTRVVVTGDVANNSKHALTGHSFNRSFSGSGAAMDIVVSSVRAYLSALNKMCSFAGAARASSTEVPGSASVQRAE

SEQ ID NO: 23853 - protein, 549 aa, Erwinia carotovora subsp. atroseptica SCRI1043
MKNINPSQTAAWQALQTHFDAMKDVKISELFAQDSDRFAHFSATFDDQMLVDYSKNRITAETMGKLHALARETDLPAAIHAMFAGEKINRTEDRAVLHVALRNRSNTPILVDGKDVMPEVNAVLAKMKDFSERVIGGEWKGYTGKTITDVVNIGIGGSDLGPFMVTEALKPYKNHLNMHFVSNVDGTHIAETLKPLNPETTLFLVASKTFTTQETMTNAHSARDWFLKTAQDEKHVAKHFAALSTNAKAVGEFGIDTNNMFEFWDWVGGRYSLWSAIGLSIILSLGFDNFEKLLSGAHAMDKHFASTPAEKNLPVLLALIGIWYNNFFGAETEAILPYDQYMHRFAAYFQQGNMESNGKSTDRNGNPVDYQTGPIIWGEPGTNGQHAFYQLIHQGTKLVPCDFIAPATSHNPLSDHHSKLLSNFFAQTEALAFGKSREVVEAEFTAAGKSAKEVEHVAPFKVFEGNRPTNSILLRDITPYSLGALIALYEHKIFTQGAILNIFTFDQWGVELGKQLANRILPELESDSTIDSHDSSTNGLINRFKAWRN

SEQ ID NO: 23854 - protein, 293 aa, Bacteroides fragilis NCTC 9343
MTLIDGKAISEQVKQEIAAEVAEIVAHGGKRPHLAAILVGHDGGSETYVAAKVKACEVCGFKSSLIRYESDVTEDELLAKVRELNEDDDVDGFIVQLPLPKHISEQKVIETIDYRKDVDGFHPINVGRMSIGLPCYVSATPNGILELLKRYRIETSGKKCVVLGRSNIVGKPMAALMMQKAYPGDATVTVCHSRSKDLVKECREADIIIAALGQPNFVKAEMVKEGAVVIDVGTTRVPDASKKSGFKLTGDVKFDEVSPKCSFITPVPGGVGPMTIVSLMKNTLLAGKKAIYQ

SEQ ID NO: 23855 - protein, 241 aa, Oryza sativa (japonica cultivar-group)
MASTTTTTAAAAARFTCLAPATRPASASASAGRFLLPARQWGAATTHGSAAVPVVAAPSRRWAPGVAYATAATGKSVHDFTVKVVAFRALDIDGKDVALSKFKGRALLIVNVASQCGLTTANYTELSHLYEKYKTQGFEILAFPCNQFGAQEPGSNPQIKQFACTRFKAEFPIFDKVDVNGPNTAPIYKFLKSSAGGFLGDLVKWNFEKFLVDKTGKVVERYPPTTSPFQIEKDIQKLLAA

SEQ ID NO: 23856 - protein, 747 aa, Burkholderia xenovorans LB400
MNTEIVTSTPKPLPSFEEAMAFVREHAGEVRLSSGEMLADHAAGTASIMRTLNVDPPAVLAAALFALTPHLQDPERVIADNFGEEVAQLVGDVRKLLRLGTVSLRAAQNAMPEAGRDAQAARRAQVEALRKMLLAFAQDIRVVLIRLASRLQSLRYYAAAKITPSPDVARETLDIYAPLANRLGIWQLKWELEDLALRFEEPVTYKRIAKLLDEKRVERESYVAQAIERLQKELAAAHIRAEVSGRPKHIYSIWRKMRGKELDFAELYDVRAFRVIVPDIKDCYTVLGIVHNLWQPVPKEFDDYISRPKPNGYKSLHTVVIGDDGRAFEVQIRTQEMHQFAEYGVAAHWRYKEAGTRGYAGQFAANGKYDEKIAWLRQLLAWKDEVSEGEHGEKRAAQPWEQLRQATLDDDHIYVLTPQARVIPLPHGATPVDFAYHLHSELGHRCRGARVDGAMVPLNTPLQNGQTVEIVAVKEGGPSRDWLNPQLGYLQSPRARQKVRAWFNAVEVQEHIASGRAMVEKTLQREGKTSVNLDQLAAKLGFKTTDDLFSVVGKEEFSLRLVEQALHDAPPPEPVVDAPEQFEKRSSGASVARGASTGVLVVGVDALLTQLARCCRPAPPDDICGFVTRGKGMSIHRSDCATFLRMAERAPERVLQTAWSAEVMSGRGQSVYPVDLSIEATDRQGLLRDISEVFAREKMNVIGVKTQTRRNAAFMQFTVEVSNAAQIQRACTLLGEVTGVMRASRKS

SEQ ID NO: 23857 - protein, 100 aa, Neisseria meningitidis
LDDVREALTEIGITGMTVSEVKGFGRQKGHTEIYRGAEYAVDFLPKVKIELVLADDAVERAIDVIVEVARSGKIGDGKIFVLPVEEAIRIRTGERSDAAV

SEQ ID NO: 23858 - protein, 166 aa, Brassica napus
MAFVTTAEVCDANQDLIRSGQLRALQPCFQIYGRRQIFSGPVVTVKVFEDNGLIRQFLEEKGNGRVLVVDGGGSLRCAILGGNPVVQAQNNGWAGIIVNGCIRDVDEINGCDIGVRALASHPIKASKKGLGEQRVPLNIAGTRICDGEWLYADTDGILVSHIELSV

SEQ ID NO: 23859 - protein, 458 aa, Erwinia carotovora subsp. atroseptica SCRI1043
MSATEVSANANATVIAKFGGTSVADFDAMNRSADVVLSNPNVRVVVLSASAGITNLLVALAEGQTQETRAEHLAKIRQIQYAIIDRLTNQSVIRDEIDRMLDSVTTLSEAAALATSNALTDELVSHGELMSTLLFVEILRQRDVIAEWFDVRKIMRTDDHFGRAQPDCDVLGELTRSLLQPRLEQGLVITQGFIGSEAKGRTTTLGRGGSDYTAALLGEALNVNRIDIWTDVPGIYTTDPRVVPTAKRIDQIMFEEAAEMATFGAKVLHPATLLPAVRSDIPVFVGSSKDPAAGGTLVCNKTENPPLFRALALRRKQTLLTLHSLNMLHTRGFLAEVFSILARHNISVDLITTSEVNVALTLDTTGSTSTGGSLLSSALLTELSSLCRVEVEENLSLVALIGNKLSQACGVGKEVFGVLEPFRIRLICYGASSNNLCFLVPGDDAERVVQTLHRSLFE

SEQ ID NO: 23860 - protein, 556 aa, Phytophthora infestans
MINDTPAWKALAEHAAEIKSTHLRELLNDDARNAAMRTEQQGIYLDFSRQNATSKTLDLLFELAETAELKKKLQAIASGEHVNAAEDRAVMHMALRAPKTEKIVVDGHDVVPDVHEVLDAIRALTSNVRDGKLVGATGKQLKNVISIGIGGSYLGPEFVFESLRYEPVAKAAAEGRNLRFLANVDPVDVARATSGLNPEETLVVVVSKTFTTAETMLNARTLRKWLVDDLTKKGSSEADAVAKHMVAASSAVPLVQQFGIDRANIFGFWDWVGGRYSVTSAVGILPLALQYGFDITEKFLAGAHAMDKHLLETPLRNNLPVIMGLRGVWNSSFLGHSSRALLPYSQALLRFAAHIQQVDMESNGKRVTVEGVDLPFQAGEVNFGEPGTNGQHSFYQLIHQGRVVPCDFLGFCESQNPVQLAGEPVSNHDELMSNFFAQPDALARGKSIEDLKAEGVPEKLQNHKLFPGNRPSISLLFKKLDAFSTGQLLALYEHRTVVQGAIWGINSFDQWGVELGKVLAKQARAQLSASRTENAPVKGFNSATTSMLEAYLAHKA

SEQ ID NO: 23861 - protein, 696 aa, Erythrobacter sp. NAP1
MLRQYELVERVKDYDPEADEAALNRAYVYTVQKHGSQKRASGDPYFSHPIEVAGLMTDLQLDQETIMTALLHDTVEDTLATIDDIEENFGPEVARLVDGVTKLSKIEAMPENERAAENLRKFLLAMSEDIRVLLVKLADRLHNMRTLHFIKKPEKRQRIARETMDIYAPLAERVGMYEYMREMQALAFKELEPEAFTTITKRLDELRGKDGGQVDAIALKIKQALAEAGLQVEVSGREKHPYSIWTKMSERHVSFEQVTDIMAFRVLTEDVADCYRAMGVLHTTWQFLPGKFKDYISTPKNNGYRSLHTSLMYENSMRVEVQIRTREMHQRNEFGLAAHWAYKQDDKADGQVGWLRDLIEIVDASHDAEELLEHTRLAIYQDRIFAFTPKGALFQLPKGSTAVDFAFAVHTDLGLATVGAKINGRHMPLRTQLTNGDVVEIIKGAGAEPQLSWLGFVVTGKARAAIRRAVRLKERDEIAEIGSKLFDAIAARVPARIGKKAIRKAVERLGMDEPDDLMFAVGAGKISDREVMEALVPGCTAEFEEDEEWSKHERQISIRGLTPGVAFELSECCHPLPGDRIVGLRRKGERVAVHTIDCLELASGVDTDWLDLNWGRRSHGAVGRLTVTIYDRPGTLAEMAGVFAQNKINVKSLIQTQLDHPFTTYEIDAEVNDLAHLTRILSALRASDAVAQADRI

SEQ ID NO: 23862 - protein, 402 aa, Burkholderia thailandensis E264
MTQMTAEQMARVKATAPVLAEHGATITKHFYQRMFGRHPELKNVFNQTHQKTGSQPETLAKAVYAYAANIDNLGALGGAVSRIAHKHASLNIRPEHYPIVGENLLASIVEVLGDAVDAHTLEAWRIAYGQLATILIGAEANLYENAAWSGFRPFKVAKKVRESDEITSFYLTPADGGAAPEFAPGQYISVKRFVGDMGVEQPRQYSLSDAPHGKWLRISVKREAGRSEEVPAGKVSTLMHDGVDVDSIVEVTAPMGDFTLNRDASTPVVLISGGVGITPMMSMASTLVASGSEREVRFLHACRSANVHAFRDWLNDTTDAHPNVKRTVFYEEVGPNDRVGVDHDYEGRITPAALERHALVPDADYYICGPIAFMKQQRDALVALGVAPERVQTEIFGSGALE

SEQ ID NO: 23863 - protein, 308 aa, Blastopirellula marina DSM 3645
MPAIRIGTRGSQLAQWQANWVADQLRAVGTDVEIIHIATQGDVTQGPLDLIGGRGVFTTEIQAALLDNRIDVAVHSLKDLPTEAVVGLRLAAVPARGADGDVLITSKASDVLGLPQESIIGTGSMRRKAQLLHLRRDFQIRDIRGNLDTRLRKLDDGLYDAIILAEAGLRRLELIERIRHVIPKAQMLPAVGQGALGLEIRERDSATAAMLAPLNHEDSHYSVLAERSMLRNLRGGCLAPVGAWGRIDPIKQLLFLDGVVVSGDGHHKVTASACGPPNRAEDIGRQVADQLAIQGAERLIAFARATGS

SEQ ID NO: 23864 - protein, 556 aa, Phytophthora infestans
MINDTPAWKALAEHAAEIKSTHLRELLNDDARNAAMRTEQQGIYLDFSRQNATSKTLDLLFELAETAELKKKLQAIASGEHVNATEDRAVMHMALRAPKTEKIVVDGHDVVPDVHEVLDAIRAFTSNVRDGKLVGATGKQLKNVISIGIGGSYLGPEFVFESLRYEPVAKAAAEGRNLRFLANVDPVDVARATSGLNPEETLVVVVSKTFTTAETMLNARTLRKWLVDDLTKKGSSEADAVAKHMVAASSAVPLVQQFGIDRANIFGFWDWVGGRYSVTSAVGILPLALQYGFDITEKFLAGAHAMDKHLLETPLRNNLPVIMGLLGVWNSSFLGHSSRALLPYSQALLRFAAHIQQVDMESNGKRVTVEGVDLPFQAGEVNFGEPGTNGQHSFYQLIHQGRVVPCDFLGFCESQNPVQLAGEPVSNHDELMSNFFAQPDALARGKSIEDLKAEGVPEKLQNHKLFPGNRPSISLLFKKLDAFSTGQLLALYEHRTVVQGAIWGINSFDQWGVELGKVLAKQVRAQLSAPRTENAPVEGFNSATTSMLEAYLAHKA

SEQ ID NO: 23865 - protein, 556 aa, Phytophthora infestans
MINDTPAWKALAEHAAEIKFTHLRELLNDDARNAAMRTEQQGIYLDFSRQNATSKTLDLLFELAETAELKKKLQAIASGEHVNATEDRAVMHMALRAPKTEKIVVDGHDVVPDVREVLDAIRAFTSNVRDGKLVGATGKQLKNVISIGIGGSYLGPEFVFESLRYEPVAEAAAEGRNLRFLANVDPVDVARATSGLNPEETLVVVVSKTFTTAETMLNARTLREWLVDDLTKKGSSEADAVAKHMVAASSAVPLVQQFGIDRANIFGFWDWVGGRYSVTSAVGILPLALRYGFDITEKFLAGAHAMDKHLLETPLRNNLPVIMGLLGVSNSSFLGHSSRALLPYSQALLRFAAHIQQVDMESNGKRVTVEGVDLPFQPGEVNFGEPGTNGQHSFYQLIHQGRVVPCDFLGFCESQNPVQLAGEPVSNHDELMSNFFAQPDALARGKSIEDLKAEGVPEKLQNHKLFPGNRPSISLLFKKLDAFSTGQLLALYEHRTVVQGAIWGINSFDQWGVELGKVLAKQVRAQLSASRTENAPVKGFNSTTTSMLEAYLAHKA

SEQ ID NO: 23866 - protein, 76 aa, Medicago truncatula
FACPFVPFLPAACILINTYLLIDLGVDTWLRVSVWLLIGVLIYLFYGRTHSSLLNAIYVPSARADEIHRSQANHLA

SEQ ID NO: 23867 - protein, 491 aa, Nocardioides sp. JS614
MSLMRTKSVEQSIADTEDPDHKLRKELGALDLMVFGVGVTIGAGIFVLTGTVAASNSGPALALSFLIAAVACALAALCYAEFASTVPVAGSAYTFSYATLGELVAWIIGWDLILEFTIGAAALSTSFSGYLQELLDGTPFEVPTQFGSAADGFIDLPAVVIALLVMLVLIRGTKLSSMVNQVVVAIKLAVVAAVIVVGVAYVDPSNWTPFIPDSQPVGDAEGGFRQLPLITTLLGIEPAVFGIGGVIAGAAVVFFAFIGFDVVATTAEEARNPQRDIPIGILGSLAIVTVLYMAVSLVVTGVQSYQDIDPDDPAPLATAFSAAGVSWVGDLISVGACIGLVVVAMILMLGQCRVAFAMGRDGLLPRSVAKVHPSFGTPYRITLITGFVVAAIAGFVDLSTLADLVNIGTLFAFILVSLGVVVLRRTRPELPRSFRTPFAPVVATLATLLCFYLMLNLKGETWERFLIWMALGFVVYFVYGRRHSRVGPRRA

SEQ ID NO: 23868 - protein, 577 aa, Lithospermum erythrorhizon
MESSNLKDVTGGVEDAYGEHRAIEEQLVTPWTVSVASGYSLLRDPHHNKGLAFTERERDSHYLRGLLPPAVVTQELQEKKLMENIREYQLPIHKYMAMMGLEERNERLFYKLLIDNVEELLPVVYTPTVGEACQKYGSIFRRPQGLYISLKEKGKILEVLKNWPERAIQVIVVTDGERILGLGDLGCQGMGIPVGKLALYTALGGVRPSACLPITIDVGTNNQQLLDDEFYIGLKQRRATGEEYYELLEEFMSAVKHCYGEKVLVQFEDFANHNAFELLSKYRNTHLVFNDDIQGTASVVLSGLIASLKPLGGTLGDHTFLFLGAGEAGTGIAELIALEISKQTKAPVEETRKKIWLVDSKGLVVSSRKEKLQHFKQPWAHEKEPIGNLLDAVKDIKPTVLIGTSGVGRQFTKEVVEAMASFNEKPLIMALSNPTSQAECTAEEAYTWSEGRAIFSSGSPFDPVEYNGKVFVPGQANNCYIFPGLGFGLLISGAIRVHDDMLLAASEALANQVTDEHYAKGLIYPPFSDIRKISANIAAKVAAKAYELGVATRLPRPENLVEYAERCMYSPIYRTYR

SEQ ID NO: 23869 - protein, 556 aa, Phytophthora mirabilis
MINDTPAWKALAEHAAEIKSTHLRELLNDDARNAAMRTEQQGIYLDFSRQNATSKTLDLLFELAETAELKKKLQAIASGKHVNATEDRAVMHMALRAPKTEKIVVDGHDVVPDVHEVLDAIRAFTSNVRDGKFVGATGKQLKNVISIGIGGSYLGPEFVFESLRYEPVAKAAAEGRNLRFLANVDPVDVARATNGLNPEETLVVVVSKTFTTAETMLNARTLRKWLVDDLTKKGSSEADAVAKHMVAASSAVPLVQQFGIDRANIFGFWDWVGGRYSVTSAVGILPLALQYGFDITEKFLAGAHAMDKHLLETPLRNNLPVIMGLLGVWNSSFLGHSSRALLPYSQALLRFAAHIQQVDMESNGKRVTVEGVDLPFQAGEVNFGEPGTNGQHSFYQLIHQGRVVPCDFLGFCESQNPVQLAGEPVSNHDELMSNFFAQPDALARGKSIEDLKAEGVPEKLQNHKLFPGNRPSISLLFKKLDAFSTGQLLALYEHRTVVQGAIWGINSFDQWGVELGKVLAKQVRAQLSASRTENAPVKGFNSATTSMLEAYLAHKA

SEQ ID NO: 23870 - protein, 471 aa, Exiguobacterium sibiricum 255-15
MIEQNVINGVWYDTEETIPVFNPATKELLGHVPSSTADDAQRAVDAASTAFVDWSERTADDRADKIDAWYRLIQEHRDELADIMTREQGKPFIEARGEIDYGNQYVRWYAEEARRIYGETIPASVPGKRLFVEKEPVGVVAAITPWNFPAAMITRKLAPALAAGCTVVLKPSEETPYTALRLVELAIEAGIPAGAINVLTGDAATISGVWQADSRVRKITFTGSTAVGKLIMRQAADTMKKLSLELGGHAPFIVTENADLDKAVQGAIRSKFRNGGQACVATNRFYVQASVLDTFTEKFVAEVKRLKVGNGLDADSTIGPLINAKAVAKVKAHIDDAVAKGATILTGGTIDDSVGYFVEPTVLGNVTEDMICMQEETFGPLAPISVFETLDEVIERANNTPYGLAAYAFSEKIDEALRLGKKLEYGIVGLNDGAPSAAQAPFGGYKESGLGREGGVYGIEDYLEVKYLSLG

SEQ ID NO: 23871 - protein, 277 aa, Glycine max
MQTKRILKSFSRVFGLLLVFVLIPVDENSIFGHKLSKYICKHICSYFPITLHVEEAKAFRPDQAYVFGYEPHSVFPIGIVALGDSTGFMPLAKTKFLASSAVFYIPFLRHIWTWLGFTPVTKQNFISSLEAGYSCILVPGGVRETFFMEPGCEIAFLKQRRGFVRIALQMGLPLVPVFCFGQTKAYKWWKPPGRLMQNLARFLKIIPLFFWGIYGSPIPFKNPLYIVVGRPIELEKNPEPTMEQVAKVHSQFVEALQDLFDRHKAHAGYTNLELKIF

SEQ ID NO: 23872 - protein, 578 aa, Kineococcus radiotolerans SRS30216
MVDPEVEPVVDERRASGRPVLLTVDDDPAVSRAVARDLRRRYGQEYRVLRAESGADALTALRELALRGEPVAAVLADYRMPQMDGVELLEQAMDLFPTARRVLLTAYADTSAAIRAINDVDLDHYLLKPWNPPEEKLYPVLDALLESWRAIPARPADEVAVIGDRWSARSFAVRDFLARNEVPYRWLLAGQPEADRLLSASGHDAATTRLPVVLAPGPGPGGPQVLVDPDDTALADHVGLSTRPQREFYDLAIVGGGPAGLGAAVYGASEGLRTVLVEEHATGGQAGQSSRIENYLGFPDGLSGAQLADRARRQVAKFGAETLAARSVTGLESAGGAHVVRFADGSSVAAHTVLLATGVSYRTLEGPGLEEFTGRGIYYGAALSEVGACADEDVFVVGAANSAGQSAVNLARSARSVTLLVRGPSIEASMSAYLVEQIRALGNVAVRTCTEVVSARGDEDGEGHLRSIVLRDRQSGQEHEVPATHVFVFIGAAPRTAWLEGTLQRDAHGFVVAGPDLHLEDGRPPGWALERAPYHLETSVPGVFVAGDARADSVKRVASAVGEGAMAVMLVHRYLAQS

SEQ ID NO: 23873 - protein, 489 aa, Halobacterium sp. NRC-1
MPAAQPPGMQLFWHRRDLRTTDNRGLAAAAPGVTAVDGGHDQGPVAAVFCFDDEVLAHAAPPRVAFMLDALAALRERYRDLGSDLIVRHGDPAAVLPAVANDLDATRVVWNHDYSGLATDRDAGVRDALDAAGVAHAQFHDAVHHRPGEIRTNAGDPYSVYTYFWRKWQDREKNPPAPEPEPADLAADTALADTSPLPSVQELGFAEPEAAVPDAGTAAARSLLDAFRESGDIYRYEDRRDYPHEEPTSRLSPHLKFGTIGIRTVYEAARAAKSDADTDDERENVAAFIGQLAWREFYAQVLYFNQNVVSENFKAYEHPIEWRDDPAALQAWKDGETGYPIVDAGMRQLRAEAYMHNRVRMIVAAFLTKDLLVDWRAGYDWFREKLADHDTANDNGGWQWAASTGTDAQPYFRVFNPMTQGERYDPDADYITEFVPELRDVPADAIHSWHELSLSERRRHAPEYPDPIVDHSQRREDAIAMFERARGDE

SEQ ID NO: 23874 - protein, 491 aa, Silicibacter pomeroyi DSS-3
MTETALSARADIADKALVRSFSYINGKWCAAANGETFAVTDPADGTELGHAASLSAEESSAAVDAAQAAFPAWAGRLPQERAALLRRWYELLLEHKEDLARIMVLEQGKPLSEARGEIDYGAAFVEFYAEEAKRPNIEGVTSHLPDAEVELWREPVGVAALITPWNFPSAMLTRKAAAALAAGCTVVAHPSRETPFSALALAELAERAGVPPGVFNVVTGTAATVVEPWTRDTRVRALSFTGSTEIGKLLYRQSADTVKRLVMELGGHAPVIVFKDCDLDKAVSETIKAKFATSGQDCLGANRILVERPVYADFCARFTLAAQALTLGPGMADCDLGPLMNEQAVQKQEDHVADALARGARLACGGRRHPRGPLFYEPTVLVDVPPDALIMSQETFGPVAAIAPFDTEEEAVARANDSEYGLVAYVHSNDPRRIYRLSRALQYGMVAVNRTKVTGAPIPFGGTKQSGLGREGARLGMEAFTEVKYICRDWA

SEQ ID NO: 23875 - protein, 310 aa, Bacillus subtilis subsp. subtilis str. 168
MSRKKMGLLVMAYGTPYKEEDIERYYTHIRRGRKPEPEMLQDLKDRYEAIGGISPLAQITEQQAHNLEQHLNEIQDEITFKAYIGLKHIEPFIEDAVAEMHKDGITEAVSIVLAPHFSTFSVQSYNKRAKEEAEKLGGLTITSVESWYDEPKFVTYWVDRVKETYASMPEDERENAMLIVSAHSLPEKIKEFGDPYPDQLHESAKLIAEGAGVSEYAVGWQSEGNTPDPWLGPDVQDLTRDLFEQKGYQAFVYVPVGFVADHLEVLYDNDYECKVVTDDIGASYYRPEMPNAKPEFIDALATVVLKKLGR

SEQ ID NO: 23876 - protein, 80 aa, Zea mays
MSDKGRPLPKFGEWDVNDPASAEGFTVIFNKARDEKKTGGKPGSPGKSTDGHAKSGGGGDTSKPQPKKWLCCMQSPAVDS

SEQ ID NO: 23877 - protein, 446 aa, Kineococcus radiotolerans SRS30216
MSTAGSTAPRSVESLVVALVVQKFGGSSVADADGIKRVAKRIAATKRAGHEVVVVVSAMGDTTDELIDLAEQVSPMPPARELDMLLTSGERISMAVLAMAISNLGLEARSFTGSQAGVITDSSHGRARIIDVTPGRIRSALDEGAIAIVAGFQGVSQDTKDITTLGRGGSDTTAVALAAALKADVCEIYTDVDGVFTADPRIVPTARKINRIATEEMLEMAANGAKILMLRCVEYARNYDLPIHVRSSFSPHEGTWVTDFPIPAALSSHSPEEPVEQPIISGVAHDRSEAKITVVGVPDNPGTAAAIFKAVAEAEINIDMIVQNVAAGASGRTDISFTLPKAEGATAIAALDKAQAAIGFERVEYDDQIGKVSLIGVGMRSHPGVSATFFDALGSKAINMEMISTSEIRISVVTRLDQLDDAVRAIHTAFGLDTEAEAVVYGGTGR

SEQ ID NO: 23878 - protein, 465 aa, Rickettsia conorii str. Malish 7
MSFLRKKSFESVKEIGSSSGLSKTLGAFDLILLGLGAMIGTGVFVVTGIIAAKYSGPAVMLSYAIAGITCIFVALVYTELAAMLPTSGSIYTYSYVAFGEVFAWMIGSVIILELGVAAGIVAAGWSGYVQGILAAGGINLPKELTTVPTNGGIINLPAFLISGFIGFILYLGTKDSKRLNAILVFIKMTAIFVFILAAAPHFDATNWSNFMPFGFSNVLVGASILFLAFTGFGTIATAAEECKNPKRDIMIGIIGSLVLTTIVYVTMAGLVTGIAPFDQLNNDQPLAYALTINNSKIGSAIVATGAVCGMMTVLMMNIYGTSRIFYAIARDGLLPKSFAKLHPKYDSPYITIIIFASLAAILGGFCSTELLTQLTSMGALIDYITVTIIVVLFRVTLPDAQRPFRCPLVFIIVPFILIACAYLLFIQIYDGEFNLLTAGRALIYWFITIFVLYIIRSFFMQKEQN

SEQ ID NO: 23879 - protein, 451 aa, Photobacterium profundum SS9
MQIMSSSKTPSSTLSASALKPLKLNSSGLGQSTKPSSPKLSTPKLSFSLGGDSQNTAKSDTTTKTTFAKSLFAKPKFAAFSIGEPTANVIKKPAPWSPSTTALILVKREVETHDSMSFTFAAADEALFDFKPGQFVTLAAKIDNKTHYRAYSISSVPQQKQLRLTIKRVPDGLVSNWLADNLNIGDSLSALNIAGQFNSSDCKHKSKLLLISAGCGITPVMSIAKTLLAHDSDTDIEFLHCARDKDNVIFHDEMKKLLAQHRNFNVQLLLENSDGFASFSADKNTDSCALSHQTGMVSSGVIQQLYPDLKERTIFLCGPVGFMKAVENIAQESDFDMANFFQESFTPAANNEQQDHISSDASTASVMLHVPDFSVEKEVVQGSSLLEVLENNGVPIIGACRAGVCGSCKCKVTKGSVKSTSTETLTAEEIEQGFVLACSSTVEEDVAVALS

SEQ ID NO: 23880 - protein, 374 aa, Triticum aestivum
NKFVQKSRLVPVRNSRDSAPPAPPGIGPEVVAVAKDVLSAAGSKEGVELRFREMLMGGAALDAAGVPLPDETLAAARASDAILLGAIGGYKWDNNEKHLKPETGLLNIRAGLGVFANLRPATVLPQLVDASTLKKEVAEGVDIMVVRELTGGIYFGKPRGFGTNDKGEETGFNTEIYSAAEIDRIARVAFEVARKRGGKLCSVDKANVLEASMLWRKRVTAIASEFPDVELSHMYVDNAAMQLVRNPKQFDTIVTNNIFGDILSDEASMITGSIGMLPSASVGESGPGLFEPIHGSAPDIAGQDKANPLATILSAAMLLKYGLGVESAAKRIEAAVTETLDNGFRTGDIYSPGTTLVGCKRMGEEVLKALESQK

SEQ ID NO: 23881 - protein, 248 aa, Bacteroides thetaiotaomicron VPI-5482
MKKIVLLRHGESAWNKENRFTGWTDVDLTEKGVAEAEKAGVTLREYGFNFDKAYTSYLKRAVKTLNCVLDKMNLDWIPVEKSWRLNEKHYGDLQGLNKAETAEKYGEEQVLIWRRSYDIAPNPLSESDLRNPRFDYRYHEVSDAELPRTESLKDTIDRIMPYWESDIFPALKDAHTLLVVAHGNSLRGIIKHLKHISDEDIIKLNLPTAVPYVFEFDENLNVANDYFLGNPEEIRKLMEAVANQGKKK

SEQ ID NO: 23882 - protein, 398 aa, Lactococcus lactis subsp. lactis Il1403
MFQYNKVEEALAALKAGEMIIVSDDENRENEGDLICAAEFISPEIINFMASEAKGLICAPLSETYAKNLQLEAMVEKNTDNHGTAFTVSVDHIETSTGISAFERALTIKKLVDAESLPSDFRRPGHVFPLIAKKNGLFERNGHTEATVDLLRLAGLKEVGVCVEIMDEDGTMMHKEKLKEKAQEWGLKYITIKAIQEYLKQNELQVEQVTRAKLPTKYGMFDILGFVNKINGEHHVALVKGDIGDGQAILCRVHSECLTSDAFGSLKCDCGGQLEEALKKINDEGRGVLLYLRQEGRGIGLINKLRAYSLQDEGLDTVEANLALGFEEDEREYSIGAQILKIIGVKSLKLMTNNPQKINDFQKYGLVVEERVALQIKDNPFDLDYLKVKQNKMGHLFD

SEQ ID NO: 23883 - protein, 113 aa, Lactococcus lactis subsp. lactis Il1403
MKKIEAIIRTDKLEDLKAALSDNGLVHGMTVSQVLGYGEQKGFTEYVRGQRIETTLLSKLKIEIVSIDEKVDDIVNVIIKAVQTGEVGDGKIFIQPVERVIRIRTSEEDAQAL

SEQ ID NO: 23884 - protein, 513 aa, Ralstonia metallidurans CH34
MSDKLIIFDTTLRDGEQSPGASMTREEKIRIARQLERLKVDVIEAGFAASSNGDFEAIRSIAQVVKDSTICSLARANDKDIARAAEALKPANSFRIHTFIATSALHMEKKLRMTPDQVYEQARLAVRFARQFTDDIEFSPEDGSRSDMDFLCRVLEGVIAEGATTINLPDTVGYAVPEGYAELIRSVRERIPNSDKAVWSVHCHNDLGMAVANSLAAVKLGGARQIECTINGLGERAGNTSLEEVVMAVKTRRDYFNMDVGIDTTQIVPASKLVSQITGFVVQPNKAVVGANAFAHASGIHQDGVLKARDTYEIMRAEDVGWTANKIVLGKLSGRNAFKQRLQELGVQLESEAEINAAFARFKELADQKAEIFDEDIMAIVSDEEQEHANEHYRFISLSQRSETGERPHARVVFNIDGSEQTGEAEGNGPVDATLHAIEGKVNSGAELVLYSVNAITAGTQAQGEVTVRLSKAGRIVNGVGTDPDIVAASAKAYLAALNKLHDKAVQKINPQI

SEQ ID NO: 23885 - protein, 255 aa, Escherichia coli CFT073
MRSKYMAVTKLVLVRHGESQWNKENRFTGWYDVDLSEKGVSEAKAAGKLLKEEGYSFDFAYTSVLKRAIHTLWNVLDELDQAWLPVEKSWKLNERHYGALQGLNKAETAEKYGDEQVKQWRRGFAVTPPELTKDDERYPGHDPRYAKLSEKELPLTESLALTIDRVIPYWNETILPRMKSGERVIIAAHGNSLRALVKYLDNMSEEEILELNIPTGVPLVYEFDENFKPLKRYYLGNADEIAAKAAAVANQGKAK

SEQ ID NO: 23886 - protein, 471 aa, Bacillus megaterium
TIKEMPQPKTFGELKNLPLLNTDKPVQALMKIADELGEIFKFEAPGRVTRYLSSQRLIKEACDESRFDKNLSQALKFVRDFAGDGLFTSWTHEKNWKKAHNILLPSFSQQAMKGYHAMMVDIAVQLVQKWERLNADEHIEVPEDMTRLTLDTIGLCGFNYRFNSFYRDQPHPFITSMVRALDEAMNKLQRANPDDPAYDENKRQFQEDIKVMNDLVDKIIADRKASGEQSDDLLTHMLNGKDPETGEPLDDENIRYQIITFLIAGHETTSGLLSFALYFLVKNPHVLQKAAEEAARVLVDPVPSYKQVKQLKYVGMVLNEALRLWPTAPAFSLYAKEDTVLGGEYPLEKGDELMVLIPQLHRDKTIWGDDVEEFRPERFENPSAIPQHAFKPFGNGQRACIGQQFALHEATLVLGMMLKHFDFEDHTNYELDIKETLTLKPEGFVVKAKSKKIPLGGIPSPSTEQSAKKVR

SEQ ID NO: 23887 - protein, 590 aa, Oryza sativa (japonica cultivar-group)
MVMAPIPQPWHQWPFLILFFLVLFSCESNLPCRNGVEATQRVFLYPQSPKVSSIVSKGYRTGYHFQPPKNWINDPNGPMYYNGIYHEFYQYNPNGSVWGNIVWGHSVSTDLINWIRLEPAIEGNTPSDINGCWTGSATILTGDQPVIIYTGADTEKRQVQNIVLPKNRSDPYLREWTKPKNNPLIEPVGPGLNSNQFRDPTTGWIGPDGLWRIAVGAELNGYSAAPLYKSKDFMQWTRVDHPLYSSNASNMWECPDFFAVLPGKNNGLDLSAAIPNGAKHVLKMSLDSCDKYMIGVYDLKHDMFVPDTVLDDRRLWLRIDYGNYYASKSFFDSKKGRRIIWGWTNETDSTSDDVAKGWAGIHAIPRTIWLDGDGKRLLQWPIEEVESLRRNEVSHQGLELKKGDLFEIKGTDTLQADVEIDFELTSIDAADPFDPSWLLDTEKHCREADASVHGGLGPFGLVVLASDNMDEHTTVHFRVYKSEQKYMVLLCSDLRRSSLRPGLYTPAYGGFFEYDLEKEKKISLRTLIDRSAVESFGGGGRACIMARVYPAAVVDGATHMYAFNNGSSTVKVSQLKAWSMTRAQVNVRKG

SEQ ID NO: 23888 - protein, 342 aa, Arabidopsis thaliana
  misc_feature (92)..(92): Xaa can be any naturally occurring amino acid
  misc_feature (105)..(105): Xaa can be any naturally occurring amino acid
  misc_feature (126)..(126): Xaa can be any naturally occurring amino acid
  misc_feature (258)..(258): Xaa can be any naturally occurring amino acid
  misc_feature (285)..(285): Xaa can be any naturally occurring amino acid
  misc_feature (321)..(321): Xaa can be any naturally occurring amino acid
MASLLANGISSFSPQPTSDSSKSPKGFHPKPESLRFPSPKSLNPTRPIFKLRADVGIDSRPIGASESSSSGTSTVSSTDKLQQYFQNLDYDXKYGFVEDIDSFTXIPKGLSEETIRLISKLREEPXDWMLEFRVRAYAKFLRLEEPNWSDNRYPSINFQDMCYYSAPKERPTLNSLDEVDPQLLEYFDKLGVPLTEQKRLANVAVDAVIDSVSIATTHRKTLEKSGVIFCSISEAIREYPDLIKKYLGRVVHSDDNYXDDLKYEVLRDGYLCYIKEKNRCKMNIXNYLRVKEMENGKLERDLIVDEEGSFVEYLGGCNDNXYDKNKINDDVVGKYCGGGGWV

SEQ ID NO: 23889 - protein, 88 aa, Brassica napus
MRVHDQRLRFDVTPKPMGLTGSSFITARSIAVLLFVSLSLLILPPFLPPLPPPPATFLLLPLILMILLIFLAFSPSNEPSLAVESLYP

SEQ ID NO: 23890 - protein, 164 aa, Tripsacum dactyloides
MEGGESAKGTVLVTGASGFVGSWLVMKLLQAGYTVRATVRDPANVGKTKPLMDLPGATERLSIWKADLAEEGSFDDAIRGCTGVFHVATPMDYQSKDPENEVIKPTVEGMISIMRACKEAGTVRRIVFTSSAGTVNLEERQRPVYDEDSWTDVDFCRRVKMTGW

SEQ ID NO: 23891 - protein, 362 aa, Cryptococcus neoformans var. neoformans JEC21
MAPQTVPCQYKTGKTLGSGTYAVVKECVHITTGEYYACKVLNKKFLMGREHMVRNEIAVLKRVSAGHKNIVQLHDFFETTHNLYLVFDLCTGGELFDRICAKGSYFEKDAANIVRTVTSAVKYLHDQGIVHRDLKPENILFKSKAEDADLMLADFGLSKVLDDDKFAILTTTCGTPGYMAPEIFKKAGHGKPVDIWAIGVITYFLLCGYTPFDRDSQYEEMQAICKGDYRFEPVEYWGGVSETARQFVRDCLTVDPTNRPTVDELLNHPWLRDVEASKDEPAEAKGVDLLPNVKAAFDAKKTFRKAVLGMMAVHRLQDHSATIHGQTEAEQEKLKKEVEAFKEEAAQEDVKDVIQPGAPASI

SEQ ID NO: 23892 - protein, 164 aa, Tripsacum dactyloides
MEGGESAEGTVLVTGASGFVGSWLVMKLLQAGYTVRATVRDPANVGRTKPLMDLPGATERLSIWKADLAEEGSFDDAIRGCTGVFHVATPMDFQSKDPENEVIKPTVEGMISIMRACKEAGTVRRIVFTSSAGTVNLEERQRPVYDEDSWTDVDFCRRVKMTGW

SEQ ID NO: 23893 - protein, 196 aa, Mycobacterium sp. KMS
MRDDMVVAEISCGRAAVILDGERGALLFFAAEAASAQLLNFAIRYSSGLIHAAMRSDRLDRLRIHDQPVLPSEDRALGFTVSVDAVGTGTGISGQARAQTLRALGSAQTTPEDLVRPGHVLPVRCPHVPRNAQDLVWDRMVRIVERAGCTPVAAACRLVHDSGDVLDDAAAEDFAATFGLALVSAPQRVRVLAAGA

SEQ ID NO: 23894 - protein, 330 aa, Kluyveromyces lactis NRRL Y-1140
MWEEFDITKLPYYDPKVDNKVALVTGGNSGIGYYTVLHLYLHGFKVYLGGRNSSRVNHAIKEIKKEAEIRLRKGQDEKPHDGLMIRKTGKLEYLHIDLTDLNSVEKAATKFTVQEDHLDVLINNAGVMAIPYELTKDNFEIQMQTNYVSHFLLTMRLLPLIKARKGRVITVSSLGHNLIFFNCNPGAQFNYWPSMFFMWCRYALAKTASIQFTKMLAIKNPDILCMSLHPGLVMNTNLFSYCTRLPFVGIFFWILFQFVGYFFGVSNEQGAISTLKCALSSDLSAETDNGAYFTTGGYPSKPSRVANSLDNAASTWIWTVHELRDRGHEI

SEQ ID NO: 23895 - protein, 556 aa, Phytophthora infestans
MINDTPAWKALAEHAAEIKSTHLRELLNDDARNAAMRTEQQGIYLDFSRQNATSKTLDLLFELAETAELKKKLQAIASGEHVNATEDRAVMHMALRAPKTEKIVVDGHDVVPDVHEVLDAIRAFTSNVRDGKFVGATGKQLKNVISIGIGGSHLGSEFVFESLRYEPVAKAAAEGRILRLLANVDPVDVARATSGLNPEETLVVVVSKTFTTAETMLNARTLRKWLVDDLTKKGSSEAGAVAKHMVAASSAVPLVQQFGIDRANIFGFWDWVGGRYSVTSAVGILPLALQYGFDITEKFLAGAHAMDKHLLETPLRNNLPVIMGLLGVWNSSFLGHSSRALLPYSQALLRFAAHIQQVDMESNGKRVTVEGVDLPFQAGEVNFGEPGTNGQHSFYQLIHQGRVVPCDFLGFCESQNPVQLAGEPVSNHDELMSNFFAQPDALARGKSIEDLKAEGVPEKLQNHKLFPGNRPSISLLFKKLDAFSTGQLLALYEHRTVVQGAIWGINSFDQWGVELGKVLAKQVRAQLSASRTENAPVKGFNSATTSMLEAYLAHKA

SEQ ID NO: 23896 - protein, 334 aa, Idiomarina loihiensis L2TR
MSRTITVIPGDGIGPDIVESATAILDKAGCDFEYEYVDAGLTALEKTGELLPQNTLDAIERNGVTLKGPLTTPVGEGFTSINVSLRKHFSLYANVRPVLSFTGTQARYENIDIITIRENTEGMYSGLGQKVSEDGNEAEAVSKITREGAERIVRFAYETARREGRKKVTAVHKANILKSTSGLFLKVAREIAEEYPDIESTEMIVDAACMRLVMNPEEFDVIVTTNLFGDILSDLCAGLVGGLGMAPGANIGKDCAIFEAVHGSAPDIAGKNLANPTSVILASIQMLEYLGMQEQAEKITKALEDVISSGDRTTRDLGGSHGTTDFTQAVIERL

SEQ ID NO: 23897 - protein, 643 aa, Mycobacterium avium subsp. paratuberculosis K-10
MCGLLAFVAARAGAVGADDAIARASHLMRHRGPDEPGTWAGADGSVVFGFNRLSIIDIAHSHQPLRWGPPETPDRYELVFNGEIYNYLELRDELAARHGAVFATDGDGEAIVAGFHHWGTDVLTRLRGMFAFALWDTVTRELFCARDPFGIKPLFVATGTGGTAVASEKKCLLELAELIGFDTAIDERAVQHYTVLQYVPEPETLHRGVRRLESGCYARIRPGAAPDVTRYFVPRFAAVPITRDTEQARYDEITAVLEDSVAKHMRADVTVGAFLSGGIDSTAIAALAIRHNPRLITFTTGFEREGFSEIDVAVASAEAIGARHIAKVVHPDEFVAALPEIVWYLDEPVADPALVPLFFVAREARKHVKVVLSGEGADELFGGYTIYREPLSLRPFDYLPRPVRRSMGKVSRPLPDGMRGKSLLHRGSLTLEERYYGNARSFSDTQLRDVLPGFRAEWTHTDVTAALYAQSIGWDPVARMQHIDLFTWLRGDILVKADKMTMANSLELRVPFLDPEVFAVASRLPVEAKITRTTTKYALRRALEPIVPAHVLHRPKLGFPVPIRHWLRAGELQDWAYSMVASSQAGHLVDLGAVRRMLDEHRNGVSDHSRRLWTVLIFMLWHAIFVEHSVVPQISEPVYPVQL

SEQ ID NO: 23898 - protein, 556 aa, Phytophthora infestans
MINDTPAWKAQAEHAAEIKSTHLRELLNDDARNAAMRTEQQGIYLDFSRQNATSKTLDLLFELAETAELKKKLQAIASGEHVNATEDRAVMHMALRAPKTEKIVVDGHDVVPDVHEVLDAIRAFTSNVRDGKFVGATGKQLKNVISIGIGGSYLGSEFVFESLRYEPVAKAAAEGRILRLLANVDPVDVARATSGLNPEETLVVVVSKTFTTAETMLNARTLRKWLVDDLTKKGSSEADAVAKHMVAASSAVPLVQQFGIDRANIFGFRDWVGGRYSVTSAVGILPLALQYGFDITEKFLAGAHAMDKHLLETPLRNNLPVIMGLLGVWNSSFLGHSSRALLPYSQALLRFAAHIQQVDMESNGKRVTVEGVDLPFQAGEVNFGEPGTNGQHSFYQLIHQGRVVPCDFLGFCESQNPVQLAGEPVSNHDELMSNFFAQPDALARGKSIEDLKAEGVPEKLQNHKLFPGNRPSISLLFKKLDAFSTGQLLALYEHRTVVQGAIWGINSFDQWGVELGKVLAKQVRAQLSASRTENAPVKGFNSATTSMLEAYLAHKA

SEQ ID NO: 23899 - protein, 269 aa, Saksenaea vasiformis
HTFYNELRVAPEEHPVLLTEAPLNPKSNREKMTQIMFETFNAPAFYVAIQAVLSLYASGRTTGIVLDSGDGVTHTVPIYEGYALPHAILRLDMAGRDLTDYLMRILAERGHSFTTTAEREIVRDIKEKLCYVALDFEQEMQTAAQSSALEKSYELPDGQVITVGNERFRAPEALFQPSLLGMESSGIHQTTYDSIMKCDVDIRKDLYSNIVMSGGTTMYPGIADRMQKEITALAPSSMKIKIVAPPERKYSVWIGGSILASLSTFQQMW

SEQ ID NO: 23900 - protein, 556 aa, Phytophthora infestans
MINDTPAWKALAEHAAEIKSTHLRELLNDDARNAAMRTEQQGIYLDFSRQNATSKTLDLLLELAETAELKKKLQAIASGEHVNATEDRAVMHMALRAPKTEKIVVDGHDVVPDVHEVLDAIRAFTSNVRDGKFVGATGKQLKNVISIGIGGSYLGSEFVFESLRYEPVAKAAAEGRILRLLANVDPVDVARATSGLNPEETLVVVVSKTFTTAETMLNARTLRKWLVDDLTKKGSSEADAVAKHVVAASSAVPLVQQFGIDRANIFGFWDWVGGRYSVTSAVGILPLALQYGFDITEKFLAGAHAMDKHLLETPLRNNLPVIMGLLGVWNSSFLGHSSRALLPYSQALLRFAAHIQQVDMESNGKRVTVEGVDLPFQAGEVNFGEPGTNGQHSFYQLVHQGRVVPCDFLGFCESQNPVQLAGEPVSNHDELMSNFFAQPDALARGKSIEDLKAEGVPEKLQNHKLFPGNRPSISLLFKKLDAFSTGQLLALYEHRTVVQGAIWGINSFDQWGVELGKVLAKQVRAQLSASRTENAPVKGFNSATTSMLEAYLAHKA

SEQ ID NO: 23901 - protein, 256 aa, Triticum aestivum
  misc_feature (135)..(135): Xaa can be any naturally occurring amino acid
  misc_feature (164)..(164): Xaa can be any naturally occurring amino acid
  misc_feature (176)..(176): Xaa can be any naturally occurring amino acid
SGSRGWQGHEQEKSQIAKNSKDYDIAIETFQKALTEHRNPDTLKRLNEAEKAKKDLEQQEYYDPKLADEEREKGNEMFKQQKYPEAIKHYNEAIRRNPKDARVYSNRAACYTKLGAMPEGLKDAEKCIELDPTLXKGYPRKGPVQFFMKGYEKAMGTYQAGVKXTPNNQELLDGIXRCVEQINKANRGDISQEDLQEKQSKAMQDPEIQDILPDPIMRQVLLDFQENPRAAQDHLKDPGVAQKIQKLINAGIVQTR

SEQ ID NO: 23902 - protein, 269 aa, Spinellus fusiger
HTFYNELRVAPEEHPVLLTEAPLNPKFNREKMTQIMFETFNAPAFYVAIQAVLSLYASGRTTGIVLDSGDGVSHTVPIYEGYALPHAILRLDMAGRDLTDYLMRILAERGHSFTTTAEREIARDIKEKLCYVALDFEQELQTATQSSALEKSYEAPDGQVITVGSERFRAPEALFQPSMLGLESVGIQDTTYNSIMKCDVDIRKDLYSNIVMSGGTTMYPGIADRMQKEITAHAPSSMKIKIVAPPERKYSVWIGGSILASLSTFQQMW

SEQ ID NO: 23903 - protein, 556 aa, Phytophthora infestans
MINDTPAWKALAEHAAEIKSTHLRELLNDDARNAAMRTEQQGIYLDFSRQNATSKTLDLLFELAETAELKKKLQAIASGEHVNATEDRAVMHMALRAPKTEKIVVDGHDVVPDVHEVLDAIRAFTSNVRDGKLVGATGKQLKNVISIGIGGSYLGPEFVFESLRYEPVAKAAAEGRNLRFLANVDPVDVARATSGLNPEETPVVVVSKTFTTAETMLNARTLRKWLVDGLTKKGSSEADAVAKHMVAASSAVPLVQQFGIDRANIFGFWDWVGGRYSVTSAVGILPLALQYGFDITEKFLAGAHAMDKHLLETPLRNNLPVIMGLLGVWNSSFLGHSSRALLPYSQALLRFAAHIQQVDMESNGKRVTVEGVDLPFQAGEVNFGEPGTNGQHSFYQLIHQGRVVPCDFLGFCESQNPVQLAGEPVSNHDELMSNFFAQPDALARGKSIEDLKAEGVPEKLQNHKLFPGNRPSISLLFKKLDAFSTGQLLALYEHRTVVQGAIWGINSFDQWGVELGKVLAKQVRAQLSASRTENAPVKGFNSATTSMLEAYLAHKA

SEQ ID NO: 23904 - protein, 634 aa, Bacillus clausii KSM-K16
MCGFVGDLLIRNGSHLPDHLWIQTLEAIHHRGPDSTGTYKDETVRFGFKRLSIIDLEHGDQPLAYSKGRYHIVFNGEIYNYIELRSQLIQRGYTFRTDSDTEVLLALYAADGKNAVKQLRGMYAFAIWDKHKKELFCARDRFGIKPFYYLKTDERFFFASEQKSIMPLLEQISIEQEALQHYATFQFVPEPNTLTKGIHKLLPGHTLTVNADFCVQIEAYAERTFQPRSGPTVTELANQTRKLLTDSVEKHMRSDVPVGAFLSSGIDSTSIAALAQQVHPNLLTFTVGFETEGYSEIAVAKETAKALGVKNIHKVISADEFIQELPNIVWHMDEPVADPAAVPLYFVAQEASKHVKVVLSGEGADELFGGYNIYREPLDLAWFKKLPPTFHAGLKRVVAHMPSKLKGRNYIIRGTTPLNERYIGNAFIFSEKEKTQLFRDYDRTKPYTNVTAPLYEQAKGMDESTIMQFVDMHTWLPGDILVKADRMTMAHSIELRVPFLDKDVFAFARMLGQDMKLSHKTTKFVLRQAMKDLIPANIVPRKKLGFPVPIRVWLKNELYDWAKQLIESSNTEDVFHKPFLLQMLQAHRDGHGDYSRRLWTVLTYMMWHDIHVAKRLISTHQQKDAERCKTLAHF

SEQ ID NO: 23905 - protein, 416 aa, Chlamydophila pneumoniae CWL029
MSKKRVVVTGFGVVSCLGNEVDTFYDNLLAGVSGVRPITSFPCEDYATRFAGWIPEFNPEPYVDKKQARRVDPFITYAMVAAKKAIAMSRWDKDHLPSDPVRCGVIVGSGMGGLSTLDQGMERLLVIHKKLSPFFIPYIITNMAPALIAMDFGLMGPNYSISTACATGNYCIDAAYQHLVSGRADMIICGGTEAAVNRIGLEGFIANRALSERNDAPDQASRPWDRDRDGFVLGEGAGILVLETLESALRRDAPIFAEMLGSYVTCDAFHITAPRDDGEGITACVLGALNSAGIPKERVNYVNAHGTSTPLGDLSEVLAVKKAFGSHVRNLRMNSTKSLIGHCLGAAGGVEAVVAIQAILTGKLHPTINLDNPIAEIEDFDVVANKAQDWDIDVAMSNSFGFGGHNSTILFSRYVP

SEQ ID NO: 23906 - protein, 269 aa, Sporodiniella umbellata
HTFYNELRVAPEEHPVLLTEAPLNPKSNREKMTQIMFETFNAPAFYVAIQAVLSLYASGRTTGIVLDSGDGVTHTVPIYEGYALPHAILRLDLAGRDLTDYLMRILAERGHSFTTTAEREIVRDIKEKLCYVALDFEQEMQTAAQSSALEKSYELPDGQVITVGNERFRAPEALFQPALLSLESSGIHETTYNCIMKCDVDIRKDLYAYIVMSGGTTMYPGIADRMQKEITALAPSSMKIKIVAPPERKYSVWIGGSILASLSTFQQMW

SEQ ID NO: 23907 - protein, 556 aa, Phytophthora infestans
MINDTPAWKALAEHAAEIKSTHLRELLNDDARNAAMRTEQQGIYLDFSRQNATSKTLDLLFELAETAELKKKLQAIASGEHVNTTEDRAVMHMALRAPKTEKIVVDGHDVVPDVHEVLDAIRAFTSNVRDGKLVGATGKQLKNVISIGIGGSYLGPEFVFESLRYEPVAKAAAEGRNLRFLANVDPVDVARATSGLNPEETLVVVVSKTFTTAETMLNARTLRKWLVDGLTKKGSSEADAVAKHMVAASSAVPLVQQFGIDRANIFGFWDWVGGRYSVTSAVGILPLALQYGFDITEKFLAGAHAMDKHLLETPLRNNLPVIMGLLGVWNSSFLGHSSRALLPYSQALLRFTAHIQQVDMESNGKRVTVEGVDLPFQAGEVNFGEPGTNGQHSFYQLIHQGRVVPCDFLGFCESQNPVQLAGEPVSNHDELMSNFFAQPDALARGKSIEDLKAEGVPEKLQNHKLFPGNRPSISLLFKKLDAFSTGQLLALYEHRTVVQGAIWGINSFDQWGVELGKVLAKQVRAQLSASRTENAPVKGFNSATTSMLEAYLAHKA

SEQ ID NO: 23908 - protein, 269 aa, Syncephalastrum monosporum var. pluriproliferum
HTFYNELRVAPEEHPVLLTEAPLNPKSNREKMTQIMFETFNAPAFYVAIQAVLSLYASGRTTGIVLDSGDGVTHTVPIYEGYALPHAILRLDMAGRDLTDYLMRILAERGHSFTTTAEREIVRDIKEKLCYVALDFEQEMQTAAQSSALEKSYELPDGQVITVGNERFRAPEALFQPSLLGMESSGIHETAYHSIMKCDVDIRKDLYSSIVMSGGTTMYPGIADRMQKEITALAPSSMKIKIVAPPERKYSVWIGGSILASLSTFQMMW

SEQ ID NO: 23909 - protein, 254 aa, Thermus thermophilus HB27
MILKERQDGVLVLTLNRPEKLNAITGELLDALYAALKEGEEDREVRALLLTGAGRAFSAGQDLTEFGDRKPDYEAHLRRYNRVVEALSGLEKPLVVAVNGVAAGAGMSLALWGDLRLAAVGASFTTAFVRIGLVPDSGLSFLLPRLVGLAKAQELLLLSPRLSAEEALALGLVHRVVPAEKLMEEALSLAKELAQGPTRAYALTKKLLLETYRLSLTEALALEAVLQGQAGQTQDHEEGVRAFREKRPPRFQGR

SEQ ID NO: 23910 - protein, 269 aa, Syncephalastrum racemosum
HTFYNELRVAPEEHPVLLTEAPLNPKSNREKMTQIMFETFNAPAFYVAIQAVLSLYASGRTTGIVLDSGDGVTHTVPIYEGYALPHAILRLDMAGRDLTDYLMRILAERGHSFTTTAEREIVRDIKEKLCYVALDFEQEMQTAAQSSALEKSYELPDGQVITVGNERFRAPEALFQPSLLGMESSGIHETAYHSIMKCDVDIRKDLYSNIVMSGGTTMYPGIADRMQKEITALAPSSMKIKIVAPPERKYSVWIGGSILASLSTFQMMW

SEQ ID NO: 23911 - protein, 456 aa, Triticum aestivum
  misc_feature (306)..(306): Xaa can be any naturally occurring amino acid
  misc_feature (382)..(382): Xaa can be any naturally occurring amino acid
  misc_feature (414)..(414): Xaa can be any naturally occurring amino acid
TNRSGMAGGDEGSLVPREVPGSYGMPFVSAIRDRLDFYYFQGQDKYFESRVDKYGSTVVRINVPPGPFMARDPRVVAVLDAKSFPVLFDVDKVEKKNLFTGTYMPSTSLTGGFRVCSYLDPSEPTHTKVMQLLFSLLASRKDAFIPAFRSHFSSLLATVESQLVLSKKSNFNTLNDATSFEFIGDAYFGVLPSASDLGTTGPTKAAKWLIFQLHPLVTLGLPMILEEPVLHTVHLPPILVSGDYKALYKYFFAAATKALDTAEGLGLKRDEACHNLLFATVFNSYGGLKVLLPGILARIAGAGEKXHQKLVAEIRAAVADAGGKVTIEALEKMELTKSAVWEALRLDPPVKFQYGRAKADMNIESHDAVFAVKKGEMLFGYXPCATRNPACSAHGEGVVGDRSSGRGKELLHTXYWSTGGDETPRGHSMPGRPGLSWQLCGECLRKTYRIGLLSPS

SEQ ID NO: 23912 - protein, 459 aa, Synechococcus elongatus PCC 7942
MTGVENVVIIGSGPAGLTAAIYAARANLKPLMFEGYQLGGLPGGQLMTTTEVENFPGFPEGITGPELMERMRAQAVRWGAELYTEDVISADLSQRPFRIRSQEREVLAHSVIIATGATARRLSLPGEDRLWNNGISACAICDGAAPIFRDGELVVIGGGDTAAEEAVYLTKYAKHVHLLVRSDRMRASKAMQDRVLAHPNVTVHWHTEAIEAVGNTLLEAVRVRNNQTGEEKAIAAQGLFYAIGHTPNTKLFEGQIELDGTGYIRTKPDSVETSLEGVFAAGDVQDHEYRQAITAAGTGCAAALLAERYLSAHNLLQEYKQEAAAAEPETKAAATPAASQPEASEFDPTSVYHEGSYALRKLYHESDRLLAVLYTAPTCGPCRTLKPILRKVAEEFSDRLHYVLIDIDADPEIAQSAGVVGTPTLQLFKDKAKVDEIRGVKMKSDYRARFEQHLQPVSR

SEQ ID NO: 23913 - protein, 225 aa, Triticum aestivum
SKFDLHESKVPNWRDTLYLRVEPHPPDAGDMPESCRRDVFFDYAEHVRNLRDTLFALLSEALGLHPNHLADMGCNQGQMILCHYYPPCPEPELAIGTTRHSDSGFLTVLLQDGVGGLQVLHENQWVDITPTPGAFIVNVGDLLQMISNDRFRSVEHRVIANNDAPRVSIACFPSNPSSERIYGPIKELLSGKNPPLYRETLARDYVAHYYSVGLGPKMAINDFRL

SEQ ID NO: 23914 - protein, 294 aa, Acetabularia acetabulum
MELIWHHTFYNELRIAPEEHPVLLTEAPMNPKANREKMTQIMFESFSTPAMYVAIQAVLSLYASGRTTGIVMDSGDGVSHTVPIYEGYALPHAILRLDLAGRDLTQYLAKILTERGYNFTTSAELEIVRDIKEKLCYIALDFEAELAAENESSELEQAYELPDGQVIKVASERFRCPEVLLTPSIIGMEAVGIHETTFNSIMKCDVDIRKDLYGNIVLSGGTTMFPGIAERMNKEVTALAPQSMKVKVVAPPERKFSVWIGGSILSSLSTFQQMWISKQEYDEQGPTIVHRKCF

SEQ ID NO: 23915 - protein, 548 aa, Vibrio cholerae O1 biovar eltor str. N16961
MLLDTLLELAGGINNVTRILAPQGQVVLALKHPPLVPHLPDDVSLQSVLGEWQLSVQRTAEVSDQQLAAIGKAIAERQKLETLPYQTALDCPYRPLWHISPPQGLLNDPNGFIYHQGEYHLFYQWHPFACEHKDKYWVHLKSLDLVDWQWQSVALTPSDWFDSHGVFSGHAVSHQQDLWLFYTGNTRLGVDRQRQTMQCAARMNANGEFEKLGPVIRCLPEGVTEHIRDPKVIYTQGKWQMLLGAQTLAHQGRLAVYHSDDLLHWHFDKLYGDELGDYGYMWECPDWFELQGEAFFVFGPQGIASANPHHTIEHQNRIFRATQNAQGEIALLQGWPLDEGFDFYAPQTAQTADGRRVLCGWMGLPDETQHPSCDQGWIHQLTALRELEWREGRIYQHPLRELDTLQSEPHTLLLSDNVTELKTKSFALQVTLPWGCELRLMQNTQYRVTLTLDAENQLLRLDRSATQIRQGDTIRELKLDSPTVELRILADQSSLEIFINQGEHVMTSRIFTPRDASGISLHGASVDAKLYYMAPASAPFNLEVNVQP

SEQ ID NO: 23916 - protein, 338 aa, Neurospora crassa
MVVKVGINGFGRIGRIVFRNAIEHDDIHIVAVNDPFIEPKYAAYMLRYDTTHGNFKGTIEVDGADLVVNGKKVKFYTDADPAAIPWSETGADYIVESTGVFTTTEKASAHLKGGAKKVIISAPSADAPMYVMGVNNETYDGSADVISNASCTTNCLAPLAKVIHDNFTIVEGLMTTVHSYTATQKTVDGPSAKDWRGGRTAAQNIIPSSTGAAKAVGKVIPDLNGKLTGMAMRVPTANVSVVDLTARIEKGATYDEIKEVIKKASEGPLAGILAYTEDEVVSSDMNGNPASSIFDAKAGISLNKNFVKLVSWYDNEWGYSRRVLDLISYISKVDAKKA

SEQ ID NO: 23917 - protein, 576 aa, Schizosaccharomyces pombe
MQPQEVDLMENSTMRNGARVLPPEAISKRHIGPYIIRETLGEGSFGKVKLATHYKTQQKVALKFISRQLLKKSDMHMRVEREISYLKLLRHPHIIKLYDVITTPTDIVMVIEYAGGELFDYIVEKKRMTEDEGRRFFQQIICAIEYCHRHKIVHRDLKPENLLLDDNLNVKIADFGLSNIMTDGNFLKTSCGSPNYAAPEVINGKLYAGPEVDVWSCGIVLYVMLVGRLPFDDEFIPNLFKKVNSCVYVMPDFLSPGAQSLIRRMIVADPMQRITIQEIRRDPWFNVNLPDYLRPMEEVQGSYADSRIVSKLGEAMGFSEDYIVEALRSDENNEVKEAYNLLHENQVIQEKSHLSKSKRVDSFLSVSPPAFSEYTSELQKKSKQELIDPTLEGPRWTVSDPPTYAKQTIDSNICVLVPTAEKNKLEMRTLADAASAVDTSQSTRKKSRRNKWHFGVRCRGDAPEILLAVYRALQRAGAQFTVPKPVNGKYRSDMYTIKSRWEIPHCKREGKNTYAYIELQLYEVMPGCFMLDVKSNGYKDIYSHPERTADHGMDDLKSSFPFLDLCAMLVCKLFSA

SEQ ID NO: 23918 - protein, 586 aa, Oryza sativa (japonica cultivar-group)
MASHIILPKEEEAALGVAVEEDHDSPAAPGYQHQQGPPVAKALPFSATCVRISRDSYPNLRALRNASAMSLPDDDAAYAKLEEGDYGYLLDDVPHFTDYLSDLPVSADTPPLPTHPCLALVVPLPDSTPATFPNPLQDHPAYSTVKQYFVNADDTVPEKVVVQKDSPRGVHFRRAGPRQRVYFESEDVKACIVTCGGLCPGLNTVIRELVCGLSHMYNVNDIFGIQNGYKGFYSSNYLPMTPKSVNDIHKRGGTVLGTSRGGHDTKKIVDNIQDRGINQVYIIGGDGTQKGAYEIYKEIRRRGLKVAVAGVPKTIDNDIAVIDKSFGFDSAVEEAQRAIDAAHVEASSAENGIGLVKLMGRYSGFIAMYATLASRDVDCCLIPESPFYLEGEGGLFEYIEKRLKENNHMVIVVAEGAGQDLIAKSIAAADQIDASGNKLLLDVGLWLTHKIKDYCKNKKMEMTIKYIDPTYMIRAIPSNASDNVYCTLLAHSAIHGAMAGYSFTVGMVNGRHAYIPFHRVTSTRNKVKITDRMWARLLSSTNQPSFLSQKDIDAAREADKLASKSPVPVNTKEHGENVKKPANGEK

SEQ ID NO: 23919 - protein, 112 aa, Thellungiella halophila
MALALRFFTCLVLTVCIVASVDAAISCGTVASSLAPCAGYLTKGGAVPAPCCAGVSKLNGMAKTTPDRQQACKCLKAAAQSINPSLASGLPGKCGVSIPYPISMSTNCDNVK

SEQ ID NO: 23920 - protein, 175 aa, Triticum aestivum
MAPAVMASSATSVAPFQGLKSTAGLPVSRRSNGASLGSVSNGGRIRCMQVWPIEGIKKFETLSYLPPLSTEALLKQVDYLIRSKWVPCLEFSKVGFIFREHNASPGYYDGRYWTMWKLPMFGCTDATQVINEVEEVKKEYPDAYVRIIGFDNMRQVQCVSFIAFKPPGCEESGKA

SEQ ID NO: 23921 - protein, 469 aa, Streptococcus pyogenes MGAS8232
MVSVMWFRRDLRIDDQKALAHVIASQSPTLCVFQFNKEQLNLLHSRNQSSFITSVLAFRKLLKCEGIDLYLMYGDLMTCFEQLLTQLKDWTDVYFNYDESGYGRLRDQKAAQFFKKNGIAVHTYQDHYLHGSQEIINQSGQPYKVFTPYYRIWQNYPKETPIKVELSQGRWLNLETPDDVLRTVESFKDEKYQDVATFDEASKQLNRFIQDQLAAYHANRDFPAQLGTSRLSPFLRIGAIGIRTVYHAVRQAPNSLGQATFLKELAWRDFYNMVYVAYPDQKTQPIQKAFSQIEWVNNPDWFQLWKEGKTGYPIVDAAMLQLQKTGWMHNRLRMIVASFLTKDLLCDWRLGEQYFQQQLIDYDAASNIGGWQWAASTGTDAVPYFRIFNPVTQGKRFDPKGEFIKAYLPQLEHVPEKYLHEPWKMPKNLQESVSCIIGTDYPQPIVDHAKQREQAIAKYEWAKEKAKIE

SEQ ID NO: 23922 - protein, 878 aa, Pseudomonas aeruginosa PAO1
MPEIDARLREDVHQLGELLGDTIREQYGPRFLDKIELIRKGAKAARRGSAEGAQQLTATLDGLEEDELLPVARAFNQFLNLANIAEQYHRIRRRRPNEPEPFENLVLEELLGRLKDAGHAPGQLARQLAGLEIELVLTAHPTEVARRTLIQKYDAITAQLAAKDHADLLPEERSRIQQRLQRLVAEAWHTDEIRKVRPTPVDEAKWGFAVIEHSLWQALPNVLRHVDEVLLRSTGERLPLTAAPLRFASWMGGDRDGNPNVTASVTREVLLLARWMAADLYLRDIDRLAAELSMQQASPQLLARVGDSAEPYRALLKQLRERLRVTRNWTHQALAGEVPAAEGVLEHNRDLVEPLQLCHESLHACGMGVIADGALLDCLRRAATFGLFLVRLDVRQDSARHAAALSEITEYLELGSYDEWDEKTRLEFLLEELNSRRPLLPAHYQPSADTAEVLATCRAIAAAPPASLGSYVISMAGQPSDVLAVQLLLKESGVDWPMRVVPLFETLDDLDNAGPCMERLLTLPGYRSRLSGVQEVMIGYSDSAKDAGTLTAAWAQYRAQEKLVEICRQHEVELLLFHGRGGTVGRGGGPAHAAILSQPPGSVAGRFRVTEQGEMIRFKFGLPDIAEQNLNLYLAAVLEATLMPPPAPEPAWRAQMDRLAKDALLAYRRVVRDDPQFVEYFRLATPEQELGRLPLGSRPAKRREGGVESLRAIPWIFAWTQTRLMLPAWLGWETALLNAIERGEGALLGQMREQWPFFTTRIDMLEMVLAKADADIARLYDERLVPLELRPLGRRLRDLLSQAVRVVLGLTGQSLLLAHASETRESISVRNSYLDPLHLLQAELLARSRRCRGDACGGLEQALLVTVAGVAAGLRNTG

SEQ ID NO: 23923 - protein, 164 aa, Tripsacum dactyloides
MEGGESAKGTVLVTGASGFVGSWLVMKLLQAGYTVRATVRDPANVGKTKPLMDLPGATERLSIWKADLAEEGSFDDAIRGCTGVFHVATPMDFQSKDPENEVIKPTVEGMISIMRACKEAGTVRRIVFTSSAGTVNLEERQRPVYDEDSWTDVDFCRRVKMTGW

SEQ ID NO: 23924 - protein, 212 aa, Oryza sativa
MSSPATAAAAAASCGVLRHHHPPASPRPPPTTTTTTSRLLLASRSRGLQRPLRVNHAPPRRLPPTAARAQSAAAAGYQPESEFYKVEAILRPWRVPYVSSGLLQMGIRGVTVSDVRGFGAQGGSTERHEGSEFAEDTFIDKVKMEIVVSKDQVEAVVDKIIEKARTGEIGDGKIFLIPVSDVIRIRTGERGERAERMAGGLADKLSSAMPIS

SEQ ID NO: 23925 - protein, 320 aa, Shigella flexneri 2a str. 301
MRQTKTGILLANLGTPDAPTPEAVKRYLKQFLSDRRVVDTSRLLWWPLLRGVILPLRSPRVAKLYASVWMEDGSPLMVYSRQQQQALAQRLPDTPVALGMSYGSPSLESSVDELLAEHVDHIVVLPLYPQFSCSTVGAVWDELARILARKRSIPGISFIRDYADNHDYINALANSVRASFAKHGEPDLLLLSYHGIPQRYADEGDDYPQRCRTTTRELASALGMVPEKVMMTFQSRFGREPWLMPYTDETLKMLGEKGVGHIQVMCPGFAADCLETLEEIAEQNREVFLGAGGKKYEYIPALNATPEHIEMMANLVAAYR

SEQ ID NO: 23926 - protein, 285 aa, Lactobacillus delbrueckii subsp. bulgaricus
MTSDPATGSLFDKLRSRFSSNEESGKDQLQAEIDQLHAGNVLTDTEYSMIEGSMAFHDKVAREVMVPRTDAFMIDIEDDLEENLDDILRQPYSRIPVYHQDKDQIVGVIHIRTILREARQHGFDQLTYDRLISPPLFAPETIELDDLLVQMQTSQQQLAILTDEYGGVTGLASIEDLLEEIVGDIDDEVDKAEVLVRQLNDRQFVIYGKMPLTDFNDRFGTELEMEDVDTLAGYMITKLGVIPGRGEQLEVPLDNGMVLTTRRMRGVAALNGLIDPARRKLRGRN

SEQ ID NO: 23927 - protein, 279 aa, Glycine max
MWKWLFSREPAPPPPPVVLVPPLFDFPPLAARNRMLHSSYDVVFGKLALTSLFEDYFHQARNFTTRIMLKPIEDPHVDLIATVSGPLDHKPKDSIAGDALFRWQSDVNDPHTFMDLYVSTSNPILQMRSCAYYPKYGFGAFGVFPLLLKKRESSQDYGLMGLRYGSGNLSFGVTLLPFAMKDELPKSAWLVSKMGRLTAGVQYEPQQGNAKLSNLMNWSCAMGYGVGSGSPLCPSFNFNLELVKSSQFIASFYQHMVVQRRVKNPLEENSVVGITNYID

SEQ ID NO: 23928 - protein, 429 aa, Picrophilus torridus DSM 9790
MDYDDVMLKTIGLKDKMDLFKDIPESLRIDIDLGPEIGEMELIKQFYEISKMNKKPEHFFLGNGIYRRYIPSLVDEIISRYEFLTSYTPYQPEISQGILQALFEYQSLICDLTGMDVTNSSMYDGFTALAEAVRMAYRINGRSEVLIPENLYKSKRSVINNYIHGLGIKLIEYKFNNGLIDLEDLNNKIGSNTCAIIGEIPNSYGILDKNVFEIKDIKKDSILISYYDPVSLGIIKPPGEYDADIAVAEGQQLGIHMNYGGPLLGLFSFKKDYIHKSPGRLIGESNDVNGRRAFVMTLQAREQHIRRARATSNICSNQALLAIAASVYLSVNGASGLYNIAMKTIENSEKLRRSMKSIGIEPVFNQRSFSDNLFNVKIKDFDEKLKNNDIAGGIKYRDLTGSGEDTWRFFSVTEMNDDNDFNALLKLGD

SEQ ID NO: 23929 - protein, 317 aa, Actinidia deliciosa
TFPVIDMEKLTGKERSPTMEKINDACENWGFFELMNHGISHELMDTVERLTKEHYKKCMEQRFKEMVATKGLEAVQSEIDDLDWESTFFLRHLPVSNISEIPDLEQDHRKAMKEFAEKLEKLAEQLLDLLCENLGLEKGYLKKAFSGSKGPTFGTKVSNYPPCPLPELIKGLRAHTDAGGIILLFQDNKVSGLQLLKEGEWIDVPPMKHSIVINIGDQLEVITNGKYKSVMHRVIAQTDGNRMSIASFYNPGSDAVIYPAPALVDKEEDQQKQVYPKFVFEDYMKLYAGLKFQAKEPRFEAMKAMESAVKLGPISTI

SEQ ID NO: 23930 - protein, 287 aa, Triticum aestivum
  misc_feature (247)..(247): Xaa can be any naturally occurring amino acid
AYLGDTIEQVCTKKQAGTGPEFPGYRRPTRPLVTAAVLLMVAALAGVRLAGQLPADGIVVMSGDQTTVDAAMMSTSSRGPESGVSEKTSGAAAHGGMLGADASGNAFPWSNAMLQWQRTGFHFQPEKNWMNDPNGPVYYKGWYHLFYQYNPDGAIWGNKIAWGHAASRDLLRWRHLPVAMSPDQWYDINGVWSGSATVLPDGRIVMLYTGSHNASVQVPCLAFPPDPLDPLLINWTKYENNPGKYPXPPASGEKNFREPTPAVGLEVSEKHRGGSAIRFQGRPPMPG

SEQ ID NO: 23931 - protein, 127 aa, Triticum aestivum
RAAARAGERAKLRGLRPSARPSLLIVASKKANKVQTAQPYGPGGGVEFKEGVDASGRVAKGKGVYQFADKYGANVDGYSLIYTPEEWSPSGDVYVEEKTGLFLWAITLAGNLLVGALLVYNTSALAS

SEQ ID NO: 23932 - protein, 877 aa, Oceanobacter sp. RED65
MNTLDDALKENVRLLGNLLGDVIEQDLGPNFIDKIVTIRTLAKTARANSTQDDEHFGDELIQYLNNLPDDEVIPITRAFNQFLNLANIAEQYHDVVRRRRQDEHDMLHNLDEVLDELKQSNSSTDLTHAIEQMDIQLVLTAHPTEVTRRTLIQKYEHVFNSLNQLDTQPYEVERHQILNRLKQIITQIWYTDEIRHQRPTPEDEAKWGFAVIEGSLWQAIPNFYRQLDELLLSKDLDPLSLDIAPIRIHSWMGGDRDGNPNVTAKVTQNVVWLGRWMAADLYLRDIHTLGSELSMQQCSESLRKKVGDANEPYRALLHELREQLKQTRAYAKMRLEGKKATRQGIFSANDLFSTLKHCYDSLIECNMPLVANGTLLDTLRRVKAFGMTLCPLDVRQESGRHAQVFSELTEYLEIGDYAQWTEDQKQAFLIAELENKRPLLPPHWQPSAEVQEVLDTARVIAQEDDACFSNYVISMATSPSDVLAVALILKMCGQQSPMPIAPLFETLSDLDGAAQTINRLLSIDWYRAYNGGKQMVMIGYSDSAKDAGQLAASWAQYRAQEELVKVCDEHSTELMLFHGRGGTVGRGGGPSLGAILSQPPGSVRGRIRVTEQGEMIRFKFGHPELAVRSLQLYASAVLKASYQPPLAPSDHWREIMNQISDESVKSYRQIVRENQEFVPYFRAITPEQELGKLALGSRPAKRKASGGVESLRAIPWIFAWMQIRLMLPAWLGSDEALDHYMRSDSGKKELQKMAKEWPFFSTLTDMLEMVLSKTDSNIAHYYERRLTNKEQQGLGRILRQRLQVAITNICQIKQVDELLENAPIIAESMGVRNPYTDPLHFLQAELLKRTREQETENIDHALKVTMAGIAAGMRNTG

SEQ ID NO: 23933 - protein, 169 aa, Brassica napus
GLMKAAIRSENPVILFEHVLLYNLKEKIPDEEYICNLEEAEMVRPGEHITILTYSRMRYHVMQAAKTLVNKGYDAEVIDIRSLKPFDLYTIGNSVKKTHRVLIVEECMRTGGIGASLTAAINENFHDYLDAPVMCLSSQDVPTPYAGTLEEWTVVQPAQIVTAVEQLCQ

SEQ ID NO: 23934 - protein, 738 aa, Arabidopsis thaliana
MEVCNCIEPQWPADELLMKYQYISDFFIAIAYFSIPLELIYFVKKSAVFPYRWVLVQFGAFIVLCGATHLINLWTFTTHSRTVALVMTTAKVLTAVVSCATALMLVHIIPDLLSVKTRELFLKNKAAELDREMGLIRTQEETGRHVRMLTHEIRSTLDRHTILKTTLVELGRTLALEECALWMPTRTGLELQLSYTLRHQHPVEYTVPIQLPVINQVFGTSRAVKISPNSPVARLRPVSGKYMLGEVVAVRVPLLHLSNFQINDWPELSTKRYALMVLMLPSDSARQWHVHELELVEVVADQVAVALSHAAILEESMRARDLLMEQNVALDLARREAETAIRARNDFLAVMNHEMRTPMHAIIALSSLLQETELTPEQRLMVETILKSSNLLATLMNDVLDLSRLEDGSLQLELGTFNLHTLFREVLNLIKPIAVVKKLPITLNLAPDLPEFVVGDEKRLMQIILNIVGNAVKFSKQGSISVTALVTKSDTRAADFFVVPTGSHFYLRVKVKDSGAGINPQDIPKIFTKFAQTQSLATRSSGGSGLGLAISKRFVNLMEGNIWIESDGLGKGCTAIFDVKLGISERSNESKQSGIPKVPAIPRHSNFTGLKVLVMDENGVSRMVTKGLLVHLGCEVTTVSSNEECLRVVSHEHKVVFMDVCMPGVENYQIALRIHEKFTKQRHQRPLLVALSGNTDKSTKEKCMSFGLDGVLLKPVSLDNIRDVLSDLLEPRVLYEGM

SEQ ID NO: 23935 - protein, 108 aa, Ralstonia metallidurans CH34
MSEQIKYVSDASFDADVLKSDKPVLLDFWAEWCGPCKMIAPILDEVAKDYGDKVQVAKINVDENQQVPAKFGIRGIPTLILFKNGQVAAQKVGALSKSQLTAFLDSQL

SEQ ID NO: 23936 - protein, 499 aa, Idiomarina loihiensis L2TR
MSKKVPLYIDGEFVASKSEQWIPVTNPATQEVIAQVPVATQSEMDAAVESAREAFKTWKEVPVSERARVMMRYQALLKEHQEEIAETLAQETGKTFEDAKGDVWRGIEVVEHAANIPSLLMGETVENVARKIDSYSYTQPLGVCAGITPFNFPAMIPLWMFPLAIACGNTFILKPSEQDPLTPTRLAELFEEAGAPKGVLQVLHGNKEQVDFLLDHPDVRALSFVGSVPVAEYIYRRGTENGKRVQAFAGAKNHCVIMPDANKQQVINNMVGSSVGAAGQRCMAISVAVFVGAAKEWIPEIAEAIAKVRPGAWNDEGAAYGPVISPQAKERVEALITQGEKEGAKLLVDGRNCKVDGLPNGNWVGPTVFSNVTPDMEIYKTEIFGPVLCATEVDSLEDALELVNNNPYGNGTSIFTASGAAARKYQHEVEVGQVGINIPIPVPLPFFSFTGWKRSFFGDLHAYGKQGVRFYSETKTVTARWFESDLEDPAGPNMSINLR

SEQ ID NO: 23937 - protein, 483 aa, Caulobacter crescentus CB15
MQVRNDSGDSKANLDAVIVWFRKDLRIADNPALRHAAQSGRPVIPLYILDETPGIRPMGGASLWWLDKSLKSLAASLETLGTKLVLRKGVAAEVLDQLIAQSGARSVVWNRLYDKPSTDRDAAIKAALRDRGVDCQSFNAGLLNEPWTVKNGSDQPYKVFTPYWRAAREHLTDVAVTAAPGHLVAPARFPASESLASWNLHPTKPDWSKGFDLWTPGEAGAHARLDAFLKGPIKGYGDQRDIPGVEATSKLSPHLHFGEIGPRQVWLATRSAADQGDIPLAEADKFLSEIGWREFNHSILYNWPHMPSANFKPEFDGFPWVKDEGALEAWKRGQTGYPIVDAGMRELWTTGFMHNRVRMIVASFLIKHLMIDWREGEAWFWDTLLDADLANNVGNWQWTAGSGADAAPYFRIFNPIAQGEKFDPKGDYVRRWVPELRNVSDDVIHKPWTKPLHLPAGAKRLYSRPIVDHAMARARALEAYHGL

SEQ ID NO: 23938 - protein, 304 aa, Aspergillus oryzae
MPLEAKEIELKAKALTKAATQNEPAANIVSLLKELQQGVKATEDLLRSTRVGIIVNKFKQHKSPEVSRLSSEIVSRWRNEVNKQKASGSPAPSQRSSNSPRPAQNGTASPAGTTPTDKASKLSVAPDKRTWKADGVDINQTGNKIRDSCIGLMYDGLCLNSTEAPRNVLSKASAVEAAAYKSLGPETKEQYRTKIRSLFQNLKNKSNPSLRIRVLSNDVTPDQFVRMSHDELRSDEQREKDAKIQKENMDKAMVAQAERSISTSLQCGKCGQRKVTYTEAQTRSADEPMTLFCTCLNCGKSWKQ

SEQ ID NO: 23939 - protein, 556 aa, Phytophthora infestans
MINDTPAWKALAEHAAEIKSTHLRELLNDDARNAAMRTEQQGIYLDFSRQNATSKTLDLLFELAETAELKKKLQAIASGEHVNATEDRAVMHMALRAPKTEKIVVDGHDVVPDVHEVLDAIRAFTSNVRDGKLVGATGKQLKNVISIGIGGSYLGPEFVFESLRYEPVAKAAAEGRNLRFLANVDPVDVARATSGLNPEETLVVVVSKTFTTAETMLNARTLRKWLVDDLTKKGSSEADAVAKHMVAASSAVPLVQQFGIDRANIFGFWDWVGGRYSVTSAVGILPLALQYGFDITEKFLAGAHAMDKHLLETPLRNNLPVIMGLLGVWNSSFLGHSSRALLPYSQALLRFAAHIQQVDMESNGKRVTVEGVDLPFQAGEVNFGEPGTNGQHSFYQLIHQGRVVPCDFLGFCESQNPVQLAGEPVSNHDELMSNFFAQPDALARGKSIEDPKAEGVPEKLQNHKLFPGNRPSISLLFKKLDAFSTGQLLALYEHRTVVQGAIWGINSFDQWGVELGKVLAKQVRAQLSASRTENAPVKGFNSATTSMLEAYLAHKA

SEQ ID NO: 23940 - protein, 249 aa, Solanum tuberosum
MKFNIANPTTGCQKKLEIDDDQKLRAFYDKRISQEVSGDALGEEFKGYVFKIMGGCDKQGFPMKQGVLTPGRVRLLLYRGTPCFRGHGRRNGERRRKSVRGCIVSPDLSVLNLVIVKKGENDLPGLTDTEKPRMRGPKRASKIRKLFNLGKDDDVRKYVNTYRRTFTNKKGKEVSKAPKIQRLVTPLTLQRKRARIADKKKRIAKAKSEAADYQKLLASRLKEQRERRSESLAKKRSRLSAASKPSIAA

SEQ ID NO: 23941 - protein, 645 aa, Ustilago maydis 521
MDLVAARTAGSARIGSSRHVVTASSMQYRAQPFVKLAIVALTALVHLIAPVLSAPFSFATPYLSTASDASGASHPHHDGDDPVSDDPLKLTIDILTIAALVVLGGIFAGLTLGLMGLDMVNLQVLASSGSDKERKHATKVLKLLEKGRHWVLVVLLLGNVIVNETLPVFLSDFGGGLAAVLSSTLLIVIFGEIVPQSICARYGLAIGAFCAPMVHATMLILAPIAWPTAKFLDWCLGEEHGTTYRKAELKTFVSLHQQIGTEHLHEDEVTIIRAVLELNDKTVRDVMTPIEDVYIMSSDTILDEEGVAKLVRSGYSRVPVHEPGKKDAIVGMLLVKNLIQYDPEDALAVSSFHLTPLPEASCDLTLLDCLNYFQQGRSHMILVSTHPGESRGALGVVTLEDVIEEMIGEEIVDETDIYVDVHNKIKVVRNRQAANSAGQNWQPLIRGIIERRRKLGGPMKAPLRSSYGTIGIMDNDLGARNDAKYGLPNSKVRAVDKVAIKRPGSPNSFASISRKASGSYEPNTPMRRESTSSVATSVDGLNYQDLHRAALSNQTSGSVQNSYSEPFIVEVGSQDRTPHIVRISDIQEYPGAEERARKEDERHQHQSANDIRNGDFINDDAAENDESGERRPLLDGIKRVSGRSN

SEQ ID NO: 23942 - protein, 556 aa, Phytophthora infestans
MINDTPAWKALAEHAAEIKSTHLRELLNDDARNAAMRTEQQGIYLDFSRQNATSKTLDLLFELAETAELKKKLQAIASGEHVNATEDRAVMHMALRAPKTEKIVVDGHDVVPDVHEVLDAIRAFTSNVRDGKLVGATGKQLKNVIPIGIGGSYLGPEFVFESLRYEPVAKAAAEGRNLRFLANVDPVDVARATSGLNPEETLVVVVSKTFTTAETMLNARTLRKWLVDDLTKKGSSEADAVAKHMVAASSAVPLVQQFGIDRANIFGFWDWVGGRYSVTSAVGILPLALQYGFDITEKFLAGAHAMDKHLLETPLRNNLPVIMGLLGVWNSSFLGHSSHALLPYSQALLRFAAHIQQVDMESNGKRVTVEGVDLPFQAGEVNFGEPGTNGQHSFYQLIHQGRVVPCDFLGFCESQNPVQLAGEPVSNHDELMSNFFAQPDALARGKSIEDLKAEGVPEKLQNHKLFPGNRPSISLLFKELDAFSTGQLLALYEHRTVVQGAIWGINSFDQWGVELGKVLAKQVRAQLSASRTENAPVKGFNSATTSMLEAYLAHKA

SEQ ID NO: 23943 - protein, 352 aa, Wolbachia endosymbiont of Diabrotica virgifera
VVANTDAQALEKSLCDKKIQLGINLTKGLGAGALPDVGKGAAEESIDEIMEHIKDSHMLFITAGMGGGTGTGAAPVIAKAAREARAAVKDRAPKEKKILTVGVVTKPFGFEGVRRMRIAELGLEELQKYVDTLIVIPNQNLFRIANEKTTFSDAFKLADNVLHIGIRGVTDLMVMPGLINLDFADIETVMSEMGKAMIGTGEAEGEDRAISAAEAAISNPLLDNVSMKGAQGILINITGGGDMTLFEVDAAANRVREEVDENANIIFGATFDQAMEGRVRVSVLATGINSRDNKSETSPISRQSEDSEKEKFKWPYSQSESMQDKTLETKPAEQVSEGAKWGSNIYDIPAYL

SEQ ID NO: 23944 - protein, 269 aa, Syzygites megalocarpus
HTFYNELRVAPEEHPVLLTEAPLNPKSNREKMTQIMFETFNAPAFYVAIQAVLSLYASGRTTGIVLDSGDGVTHTVPIYEGYALPHAILRLDLAGRDLTDYLMRILAERGHSFTTTAEREIVRDIKEKLCYVALDFEQEMQTAAQSSALEKSYELPDGQVITVGNERFRAPEALFQPSLLSLESSGIHETTYNCIMKCDVDIRKDLYSNIVMSGGTTMYPGIADRMQKEITALAPSSMKIKVVAPPERKYSVWIGGSILASLSTFQQMW

SEQ ID NO: 23945 - protein, 222 aa, Phanerochaete chrysosporium
TLTFVIYFLTQHPDVLQRLRQEILDVVGPSNLPTYDDIKQMKYLRAVLNETQRLYPPVPWNMRYAVEDSIVPNSEPEGKPWFIPAGASVSYSVHCMHRRKDYWGPDAEEFDPDRFLDERLHKYLTPNPFIFLPFNAGPRICLGQQFAYNEMSFFLVKLLQTFEDISFERDAFEPNALPPAEWAKFPGRKGKEKFWPRAHLTLYSEGGMWVKMREAQAMGQVA

SEQ ID NO: 23946 - protein, 556 aa, Phytophthora infestans
MINDTPAWKALAEHAAEIKSTHLRELLNDDARNAAMRTEQQGIYLDFSRQNATSKTLDLLFELAETAELKKKLQAIASGEHVNATEDRAVMHMALRAPKTEKIVVDGHDVVPDVHEVLDAIRAFTSNVRDGKFVGATGKQLKNVISIGIGGSYLGSEFVFESLRYEPVAKAAAEGRILRLLANVDPVDVARATSGLNPEETLVVVVSKTFTTAETMLNARTLRKWLVDDLTKKGSSEADAVAKHMVAASSAVPLVQQFGIDRANIFGFWDWVGGRYSVTSAVGILPLALQYGFDITEKFLAGAHAMDKHLLETPLRNNLPVIMGLLGVWNSSFLGHSSRALLPYSQALLRFAAHIQQVDMESNGERVTVEGVDLPFQAGEVNFGEPGTNGQHSFYQLIHQGRVVPCDFLGFCESQNPVQLAGEPVSNHDELMSNFFAQPDALARGKSIEDLKAEGVPEKLQNHKLFPGNRPSISLLFKKLDAFSTGQLLALYEHRTVVQGAIWGINSFDQWGVELGKVLAKQVRAQLSASRTENAPVKGFNSATTSMLEAYLAHKA

SEQ ID NO: 23947 - protein, 351 aa, Frankia sp. EAN1pec
MTVRLLDHWTCIEVDVDEQRMTMREALNLALDQALARDERVFLLGEDIADPGSSGPTKGLSTKYGADRVLDTPISEAAIVGAAIGAAMEGFRPVAEIMIMDFIGIAADQIVNHAAKLRFMTGGRTTAPITVRTQVYGGLGTGATHSQSLEAWFMHVPGLKVIVPSTPRDAKGLLASAIFDDDPCVFLETIRLQGQRGLVPVDPGFSIPLGQADVKRPGTDVTLIGYGRGVVESLGAAAVLEAEGVSAEVLDLRTLVPLDVPAMVDSVRRTRRAVVVHDAVRFAGPGAEIAAILQRELFGVLEAPVERVGARFVPNPAPPALESQIYPSTERIVAAVQQTLRSETTRDGACG

SEQ ID NO: 23948 - protein, 854 aa, Vibrio sp. Ex25
MSKLKLVVIGNGMVGHRYIEDLVEKADISNMEITVFCEEPRVAYDRVHLSSYFSHHTADELSLVKEGFYEKHGINMLIGERAININRENRIVYSSTGREVQYDKLILATGSFPFVPPIKGHESKDCFVYRTIEDLKAIEACAKNSKSGVVIGGGLLGLEAAGALKALGVETHVVEFAPKLMAEQLDLAGGNQLRQKIERMGVNVHTSKNTLEIAAEGKNARNVMRFADGTELETDFIVFSAGIRPQDKLARQMELELGPRGGVAINDHCQTSDENIYAIGECASWNEMFYGLVAPGYKMATVAVDHLLGNTESKFEGADMSAKLKLLGVKVGSIGDANGRTEGCKSYVYQNEEQEVYKRLIVSEDNKKLLGAVLVGDTSDYGDLLQLMLNEIDLPEHPDALILPAHAGAEKPALGADALPESAVICSCFDVTKGKIAQAVADGHHTLGDIKAVTGAGTGCGGCIPLVTSVLNAELAKSGIEVKNDVCEHFAYSRQELFHLIRIEEIKTFDELLEKYGKGYGCEVCKPLVGSILASCWGEHILKPQLVKLHDTNDNFLGNIQKDGTYSVIPRMAGGEVTPQALGALANVAAEYNLYTKVTGAQRIGLFGAQKDDLPEIWRKLIDAGFETGQAYAKALRMAKTCVGSTWCRYGVQDSVGLGSYIENRYKGIRTPHKMKFGVSGCTRECAEAQGKDLGIIATDAGWNMYVCGNGGMKPRHADLLASDLDKETLIKYIDRFMMFYIRTAAPLQRTSVWMENMEGGVDYLREVIVEDKLGINAQLEADVAKLVDEYECEWTATINDESQLTRFTHFINSDKRDDNVVFVQEREQHRPATFTEKHPEAKGDILHVAITEA

SEQ ID NO: 23949 - protein, 269 aa, Thamnidium elegans
HTFYNELRVAPEEHPVLLTEAPLNPKSNREKMTQIMFETFNAPAFYVSIQAVLSLYASGRTTGIVLDSGDGVTHTVPIYEGYSLPHAILRLDMAGRDLTDYLMRILAERGHSFTTTAEREIVRDIKEKLCYVALDFEQEMQTAAQSSALEKSYELPDGQVITVGNERFRAPEALFQPALLGLESSGIHETTYNSIMKCDVDIRKDLYSNIVMSGGTTMYPGIADRMQKEITALAPSSMKIKIVAPPERKYSVWIGGSILASLSTFQQMW

SEQ ID NO: 23950 - protein, 556 aa, Phytophthora cactorum
MINDTPAWKALAEHAAEIKSTHLRELLNDDARNAAMRTEQQGIYLDFSRQNATSKTLDLLFELAETAELKKKLQAIASGEHVNATEDRAVMHMALRAPKTEKIVVDGHDVVPDVHEVLDAIRAFTSNVRDGKLVGATGKQLKNVISIGIGGSYLGPEFVFESLRYEPVAKAAAEGRNLRFLANVDPVDVARATSGLNPEETLVVVVSKTFTTAETMLNARTLRKWLVDDLTKKGSSEADAVAKHMVAASSAVPLVQQFGIDRANIFGFWDWVGGRYSVTSAVGILPLALQYGLDITEKFLAGAHAMDKHLLETPLRNNLPVIMGLLGVWNSSFLGHSSRALLPYSQALLRFAAHIQQVDMESNGKRVTVEGVDLPFQAGEVNFGEPGTNGQHSFYQLIHQGRVVPCDFLGLCESQNPVQLAGEPVSNHDELMSNFSAQPDALARGKSIEDLKAEGVPEKLQNHKLFPGNRPSISLLFKKLDAFSTGRLLALYEHRTVVQGAIWGINSFDQWGVELGKVLAKQVRAQLSASRTENAPVKGFNSATTSMLEAYLAHKA

SEQ ID NO: 23951 - protein, 636 aa, Vibrio cholerae
MCGVAGFISKRLSPVDCLTSMVGSIMHRGPNDSGLWVDDDFGVCLAHARLSIQDLSSAGHQPMHSKSERYVMIFNGEIYNHLTLREELIEIVPSYWNGHSDTETLLAGFEVWGIEQTIQKCVGMFAIVLWDKVLKQLILIRDRFGEKPLYYGWQRDTFLFASELKALKAHPSFEGSINRQALSHFFRLNYIPTPLSIYEGIFKLEPGVIAVFSHEGQLLSKQTFWDASHAVSLQNFSDHDAVDKLDDLIKQSIQDQALSDVPLGAFLSGGVDSSTVVGILQSLSTRPVKTFTIGFDHADFNEASEASDVAKHLGTDHVELIVSAEDALAIINQLPVMYDEPFADASQVPTFLVSKLAKKEVTVCLSGDGGDELFCGYNRYHYTAKVWSYLEKIPFPIRKMLSVFLLTLSPSSWDVLSKTLGLNTRLPNLGNKIQKGAQALKARDIEDLYTRVVSNWDLDEPLVKNTAVEKLPFLSDLTELSHLNDLEKMMLWDKQSYLMDDVLVKTDRATMACSLEGRVPLLDHRIAEFAASLPIHLKYRGGKGKWLLREVLYRYVPKKLIERPKKGFSLPIAEWLRGPLKDWANVLLDSDRIDKEGFLSSELVQKKWREHLAGKRDWSSQLWSVLMFQLWLEKNK

SEQ ID NO: 23952 - protein, 430 aa, Streptomyces avermitilis MA-4680
MGLVVQKYGGSSVADAEGIKRVAKRIVEAKKNGHQVVVVVSAMGDTTDELIDLAEQVSPMPSGREFDMLLTAGERISMALLAMAIKNLGHSAQSFTGSQAGVITDSVHNKARIIDVTPGRIRTALDEGNIAIVAGFQGVSQDKKDITTLGRGGSDTTAVALAAALDAEVCEIYTDVDGVFTADPRVVKKAKKIDWIAFEDMLELAASGSKVLLHRCVEYARRYNIPIHVRSSFSGLQGTWVSNTPLVQKAQQQGEQKVEQAIISGVAHDTSEAKVTVVGVPDKPGEAASIFRAIADAEVNIDMVVQNVSAASTGLTDISFTLPKTEGRKAIDALEKAKSVIGFDSLRYDDQIGKISLVGAGMKTNPGVTAGFFEALSDAGVNIELISTSEIRISVVTRADDVPEAVRAVHTAFGLDSDSDEAVVYGGTGR

SEQ ID NO: 23953 - protein, 111 aa, Chlamydia trachomatis
IEESGADLIHIDVMDGHFVPNITFGPGVVAAINRSTELFLEVHAMIYTPFEFVEAFVKAGADRIIVHFEAAENIKEIVSYIQKCGVQAGVAFSPETSIEFVTSFIPLCDVI

SEQ ID NO: 23954 - protein, 556 aa, Phytophthora cactorum
MINDTPAWKALAEHAAEIKSTHLRELLNDDARNAAMRTEQQGIYLDFSRQNATSKTLDLLFELAETAELKKKLQAIASGEHVNATEDRAVMHMALRAPKTEKIVVDGHDVVPDVHEVLDAIRAFTSNVRDGKLVGATGKQLKNVISIGIGGSYLGLEFVFESLRYEPVAKAAAEGRNLRFLANVDPVDVARATSGLNPEETLVVVVSKTFTTAETMLNARTLRKWLVDDLTKKGSSEADAVAKHMVAASSAVPLVQQFGIDRANIFGFWDWVGGRYSVTSAVGILPLALQYGLDITEKFLAGAHAMDKHLLETPLRNNLPVIMGLLGVWNSSFLGHSSRALLPYSQALLRFAAHIQQVDMESNGKRVTVEGVDLPFQAGEVNFGEPGTNGQHSFYQLIHQGRVVPCDFLGLCESQNPVQLAGEPVSNHDELMSNFFAQPDALARGKSIEDLKAEGVPEKLQNHKLFPGNRPSISLLFKKLDAFSTGQLLALYEHRTVVQGAIWGINSFDQWGVELGKVLAKQVRAQLSASRTENAPVKGFNSATTSMLEAYLAHKA

SEQ ID NO: 23955 - protein, 109 aa, Moorella thermoacetica ATCC 39073
MAASNIITLTDANFEEEVLSATTPVLVDFWAAWCGPCRMIAPIVDELAQEYAGKVKVAKLNVDEYPKIPADYGIMSIPTLILFKNGEVIARTVGYQSKEKLAQVLENNL

SEQ ID NO: 23956 - protein, 352 aa, Wolbachia endosymbiont of Diabrotica barberi
VVANTDAQALEKSLCDKKIQLGINLTKGLGAGALPDVGKGAAEESIDEIMEHIKDSHMLFITAGMGGGTGTGAAPVIAKAAREARAAVKDRAPKEKKILTVGVVTKPFGFEGVRRMRIAELGLEELQKYVDTLIVIPNQNLFRIANEKTTFSDAFKLADNVLHIGIRGVTDLMVMPGLINLDFADIETVMSEMGKAMIGTGEAEGEDRAISAAEAAISNPLLDNVSMKGAQGILINITGGGDMTLFEVDAAANRVREEVDENANIIFGATFDQAMEGRVRVSVLATGIDSRDNKSETSPISRQSEDSEKEKFKWPYSQSESMQDKTLETKPAEQVSEGAKWGSNIYDIPAYL

SEQ ID NO: 23957 - protein, 108 aa, epsilon proteobacterium 899-1
VAGGGASVVYADTIADLAGGVEDLANYGEYSGGPTTDETRFYTETVLDLMTREKDPQGRDKILIIGGAIANFTDVAKTFTGIIQAFEKYADKMKDVGVRIYVRRGGPN

SEQ ID NO: 23958 - protein, 269 aa, Thermomucor indicae-seudaticae
HTFYNELRVAPEEHPVLLTEAPLNPKSNREKMTQIMFETFNAPAFYVAIQAVLSLYASGRTTGIVLDSGDGVTHTVPIYEGYALPHAILRLDMAGRDLTDYLMRILAERGHSFTTTAEREIVRDIKEKLCYVALDFEQEMQTAAQSSALEKSYELPDGQVITVGNERFRAPEALFQPSLLGLESSGIHETTYNSIMKCDVDIRKDLYSNIVMSGGTTMYPGIADRMQKEITALAPSSMKIKIVAPPERKYSVWIGGSILASLSTFQQMW

SEQ ID NO: 23959 - protein, 502 aa, Xylella fastidiosa Ann-1
MHNGFDALQLHANRLRGVTIPDLLAAELKRPEQYARQVGPLYFNFARQKYDCVALEALFALARNHNVTGAFQRMFCGEQVNVTEGRAVLHTALRGDLSGTSVAVAAYTAAAKVRERMYALIAGLDASEVTDIVSVGIGGSDLGPRLVVDALRPISQGRFRVHFVSNVDGAAMRRTLDMLDPSRTAGILISKTFGTQETLLNGRILYDWLGGSERLYAVSANPERAVHAFDIVPTQVLPIWDWVGGRYSLWSAVGFPIALAIGSQRFEELLAGAAEFDAYALRVPLEENVAVLHGLTAVWNRNFLGCATYAVMAYDQRLALLPAYLQQLVMESLGKRVKCDGTPVDRDTVPVWWGGVGTDVQHSFFQALHQGTNIVPADFIGTIRNDDLYTENHFALNANLLAQIEVLANGQLSDDPHRVYPGGNPSTLILLDALTPQALGGLIAMYEHSVYVQSVIWGINAFDQFGVELGKHLAVQLLPALKGESVEVVDPVTRAVLVRLRG

SEQ ID NO: 23960 - protein, 235 aa, Rickettsia conorii str. Malish 7
MKDIEYWEKNFESCKYSDQLIERLLFLNTQVKQPIDIREVQKGIYYARKYHGAQMRQSGDPYYSHPIAVTIMVAEFVAKEVPKLFTFRMLQAALLHDTIEDTELTEEIISNIFDEEVARHVAGLTRIKPWGKISSEKSLMLLIKQKRYDTALIKLFDRIHNLQTLEAKSPEKAHKIIKETLKSFLVLSEILEIPSVSELIYAECYKNNLKFNINSTFNKIINFDSFPFSQNKLLP

SEQ ID NO: 23961 - protein, 269 aa, Umbelopsis isabellina
HTFYNELRVAPEEHPVLLTEAPLNPKSNREKMTQIMFETFNSPAFHVSIQAVLSLYASGRTTGIVLDSGDGVSHTVPIYEGYSLPHAILRLDLAGRDLTDYLMRILAERGHAFTTTAEREIVRDIKEKLCYVALDFEQEMQTAAQSSALEKSYELPDGQVITVGNERFRAPEALFQPSLIGLESTGIHETTYNSIMKCDVDIRKDLYANVVMSGGTTMYPGIADRMQKELTALAPSSMKIKIVAPPERKYSVWIGGSILASLSTFQQMW

SEQ ID NO: 23962 - protein, 289 aa, Oryza sativa (japonica cultivar-group)
MSSGGELALRQEYVIGDEIGRGRFGTVRRCYAVATGEAFAVKSTPKAPLREAEAADALDLALAEQEPKVHLVASAPGPGASPHVVALHAAFEDDAAVHLVVDLCAGGDLLSLVSSRGRLPEHEAADLVAQLASALASCHRRGVAHRDVKPDNLLFDGGGVLKLGDFGSAGWFGDGRPMTGLVGTPYYVAPEVVAGREYGEKVDVWSAGVVLYMMLSGTLPFYGATAAEVFQCVLRGNLRFPPRAFASVSPEAKDLMRRMLCKDVSRRFSADQVLRHPWIVSRGGAAVMG

SEQ ID NO: 23963 - protein, 345 aa, Symbiobacterium thermophilum IAM 14863
MKANVAINGFGRIGRMVCRRLLRHPDLNLVAVNASYPAETLAHLLKYDTVHGRLDAQVVAGDGEIVVDGHVVRLVSERDASRLPWRELGIDIVIDATGKHKERERAALHLHSGARKVIITTATKDPDVTVVMGVNEGAYRPAEHHIIAAASCTTNCLAPVAKVLHETFGIRTGLMTTVHAYTNDQNMLDNPHRDLRRARAATASIIPTTTGAAKAVAQVLPELKGRLNGFALRVPTPDVSVVDLVVQLERPATREEINDALRSAAQGPLRGILAYSDEPLVSADFIGDPHSAIVDGTLTMVGPDNLAKVIAWYDNEWGYSCRVVDLAALVARQLALEPPLEGVAD

SEQ ID NO: 23964 - protein, 295 aa, Clostridium josui
MVFDMKKIRIGSRDSKLAIIQSELIMSAIRKYDPDIELELITMKTTGDKILDKTLDKIEGKGLFVKELDNALYNNEVDITVHSYKDMPLEENPELPVVALSKREDPRDAFILPQNGENGEPIGSSSLRRQLQLKELFPGCKTAPIRGNVQTRLKKLDSGEFSAIVLAAAGIKRLGLESRIGRYFSVDEILPAASQGIIAVQGRVGENFDFLKLFHSEESLCISLAERTFVREMNGGCSTPIAAYATIQGSEIILKGLYCNETTGELRKECVSGNRNNPVELGYELVKKMKSSKSI

SEQ ID NO: 23965 - protein, 111 aa, Chlamydia trachomatis
IEESGADFIHIDVMDGHFVPNITFGPGVVAAINRSTELFLEVHAMIYTPFEFVEAFVKAGADRIIVHFEAAENIKEIVSYIQKCGVQAGVAFSPETSIEFVTSFIPLCDVI

SEQ ID NO: 23966 - protein, 220 aa, Magnetospirillum magnetotacticum MS-1
RRGTRPAAQSRADAQHPPPAGKGPGAADPVTTLCALSDALGIVSLRAPLLALRVAGRIATTEGRDAPEEADLIEAARLVLAPRATRLPPAPTEEQEAQETPPEPPQDGGQSEEDSREPADAPRTPDDVVLEAVRAALPQDLLARLLAGGPPLRASAAGRMGAAAASPLTGRPAGNRPGDPRRGRLDLIATLRAAAPWQRLRKREGEARRIVVTSGDFRLR

SEQ ID NO: 23967 - protein, 137 aa, Synechococcus elongatus PCC 7942
MRLLHTMLRVGDLERSLQFYCEILGMQLLRRKDYPGGEFTLAFVGYGEEADHTVLELTYNWGKEQYELGDAYGHIAIGVDDIYATCEAIRARGGKISREPGPMKHGSTVIAFVEDPDGYKVELIQTGTSGASAQPAA

SEQ ID NO: 23968 - protein, 230 aa, Thellungiella halophila
MNDGDVSRQIQQMVRFIRQEAEEKANEISVSAEEEFNIEKLQLVEAEKKKIRQDYEKKEKQADVRKKIDYSMQLNASRIKVLQAQDDIVNAMKDKAAKDLLNVSSDANAYKQLLKALIVQCLLRLKEPSVLLRCRKEDLGFVESVLDDAKEEYAGKAKVHAPEVAVDTEIFLPGPPKSHDSHDLHCAGGVVLASRDGKIVCENTLDARLDVAFRMKLPVIRRSLFGQVAA

SEQ ID NO: 23969 - protein, 430 aa, Shigella flexneri 2a str. 301
MMNTEGNNGNKPLGLWNVVSIGIGAMVGAGIFALLGQAALLMEASTWGAFAFGGIVAMFSGYAYARLGASYPSNGGIIDFFRRGLGNGVFSLALSLLYLLTLAVSIAMVARAFGAYAVQFLHEGSQEEHLILLYALGIIAVMTLFNSLSNHAVGRLEVILVGIKMMILLLLIIAGVWSLQPAHISVSAPPSSGAFFSCIGITFLAYAGFGMMANAADKVKDPQVIMPRAFLVAIGVTTLLYISLALVLLSDVSALELEKYADTAVAQAASPLLGHVGYVIVVIGALLATASGINANLFAVFNIMDNMGSERELPKLMNKSLWRQSTWGNIIVVVLIMLMTAALNLDSLASVASATFLICYLAVFVVAIRLRHDIHASLPILIVGTLVMLLVIVGFIYSLWSQGSRALIWIIGAILLSLIVAMVMKRNKTV

SEQ ID NO: 23970 - protein, 628 aa, Anabaena variabilis ATCC 29413
MAAGLGLGVVGITKADIEGKTIWEALPPETSSEVELPYRQAFAGISSRFEAPYGHRVYEVHVLPVRNDDGEIFAGMTITQEITERKQSELALQDALQLLNLHIDTTPLAVVQWDCHLCVTRWSSTAEKIFGWRTEEVIGKYFQDLHMVYEEDMTAVAEASNRLLSGQESQIIQYNRNYTKDSRVIYCEWYNSSITNEAGSVTSVLSLVLDVTERIQAEKALRQSELMVIEERAQALERERAARIELERASRMKDEFLAIVSHELRSPLNGILGWSRLLRTRKLSPEKIEQALESIERNAQAQTQLIEDLLDISRIIRGNIRLLVRPTKLIPVIQAALDTVRPIANTKSIQIISRLNFDIGLVSADPERLQQVIWNLLSNAVKFTPEGGRVEICLEQVETNVQIRVTDTGKGISPEFLPYVFDRFRQADATTTRNQGGLGLGLAIVRNLVELHNGTVSVASPGEGQGATFTVQLPLLPSYSTVTPEEPLLQRQTTWDAKVQIRGLKILAVDDEPDTREFLKTALEQYGAIVTTAASTSEALKLLQLVKPDVLLSDIGMPNEDGYALIRQIRALSSEQGGNVPAAALTAYTRQSDRLLALTAGFQIHISKPIEPIQLLKIVATLAGNNSN

SEQ ID NO: 23971 - protein, 401 aa, Oenococcus oeni PSU-1
MEETKLAEKEHYERTKPHVNIGTIGHVDHGKTTLTAAITKVLSEKGLAQAQDYASIDAAPEERERGITINTAHVEYETDKRHYAHIDAPGHADYVKNMITGAAQMDGAILVVAATDGPMPQTREHILLARQVGVNYIVVFLNKTDLVDDPELIDLVEMEVRELLSEYDFPGDDIPIIRGSALKALQGDPEQEKVILHLMDVIDEYIPTPVRDVDKPFLMPVEDVFTITGRGTVASGRIDRGTVKINDPVEIVGLKDEVKNTVVTGVEMFRKTLDLGEAGDNIGALLRGIDRDGVERGQVLAKPGSIQTHKKFKGEVYILTKEEGGRHTPFFTNYRPQFYFHTTDVTGVVELPEGVEMVMPGDHVTFTVELMKPVAIEKGLKFTIREGGHTVGAGTVSEIDD

SEQ ID NO: 23972 - protein, 592 aa, Cryptococcus neoformans var. neoformans JEC21
MCGIFCCFNRAGDISQYRARAIACSKRQRHRGPDWSGCYMTNNTVLVHERLAIVGVDTGAQPLTNEDESLVLAVNGEIYNHVALRKSLKNKDAVFKTHSDCEVIMHLYKEHDTGLCNMLDGMFSFVLVDKSVSPPRLIAARDPIGITTLYMGWNSQSPDTLYFASELKCIHEECDNLQAFPPGHFYDSKEKKLTRYFNPSWWDSDKGVVPHNDIDYKLLRETLEAAVKKRLMSEVPYGVLLSGGLDSSLIASIAARETDKLAEEQEKLRQERKQAIASGKWVGDEQPLASWPQLHSFAIGLPGAPDLIAARKAADFLGTIHHEYNFTVQEGLDAIPEVIHHLETYDVTTVRASTPMYLLSRKIKAMGVKMVLSGEGSDEIFGGYLYFHAAPTAKDFHEECVKRVKNLHTADCLRANKSTMAWGLEARVPFLDKTFLEVSMNVDAKYKMFSKGTHQEVDEDGRPKMEKYILRKAFDCSPEGKAYLPDSILWRQKEQFSDGVGYSWIDGMKDHAAAIVSDEKFANRATRWPLDTPDTKEAYWIREIFEHHFPTEAAAKTAVRWVPKQEWGVSSDPSGRAVSIHTAAYADGEAKA

SEQ ID NO: 23973 - protein, 440 aa, Aspergillus oryzae
MESSSSSSESESEEEKPAKKEVKKAAKSSSESSSESSSESESDSDSDEEMEDASSSESEEEKPAKKQKQESKKESKKAKESSSESSDSSESESESESEDEKPAKKEVKKAAESSDSSESDSSDEEEAPKKAAKEASDSDSSESESDSDSEESPKKSESEDSEESAKDSKKRKAEEDVSATPKKTKTEEPAAGASANLFVGNLSWNVDEAWLQSEFEEFGELSGVRIMTERDTGRSRGFGYVEYTNAVDAAKAFEAKRDTEIDGRKINLDYATGRPANREQGGFQDRAQARARSFGDQASPESDTLFVGNIPFSANEDSLHEVFGQKGSILGIRLPTDPESGRPKGFGYVQFSSVEEAREAFNELNGAEIDGRPVRLDFSTPRANNGGGGGGRGRGGFGGGRGGPRGGGGRGRGGFGGRGGGPPNKARGGIPEYKGTKVTF

SEQ ID NO: 23974 - protein, 181 aa, Glycine max
  misc_feature (109)..(109): Xaa can be any naturally occurring amino acid
EKKSLLRHHSEKHFTAGEIVRDIIIGVSDGLTVPFALAAGLSGANATSSIVLTAGIAEVAAGAISMGLGGYLAAKSESDHYARELKREQEEIIAVPDTGFHFPLLFLSXAAEVAEIMAQYGIEAHEYAPVVSALRKNPQAWLDFMMKFELGLEKPDPRRALHSAMTIAIAYILSGLFLSFL

SEQ ID NO: 23975 - protein, 223 aa, Oenococcus oeni PSU-1
MSVIVAPSILAADYLNLGEQIKLVEGAGAKYLHIDIMDGDFVPSISYGPQWVKQIKASGSKLVLDVHLMVNHPEKLIDSFVSAGADIIGVHVEATAHIHRALQMIKNAGVHPEVVINPGTPVSAILPILYMVDQVLVMTVNPGFGGQKFLPEEISKISELHEYKKEHGLDFDIEIDGGVNNQTLVKAYEAGATVAVAGSYVYDKVDPAAKVKKLLEVTNFEVD

SEQ ID NO: 23976 - protein, 464 aa, Listeria monocytogenes str. 1/2a F6854
MLYSKENKESYLEPVFGSSAEDRDIPKYTLGKEPLEPRIAYRLVKDELLDEGSARQNLATFCQTYMEDEATKLMSETLEKNAIDKSEYPRTAELENRCVNIIADLWHAPKDQKFMGTSTIGSSEACMLGGMAMKFAWRKRAEKLGLDIYAKKPNLVISSGYQVCWEKFCVYWDIDMRVVPMDKEHMQLNTDQVLDYVDEYTIGVVGILGITYTGRYDDIYALNEKLEEYNSKTDYKVYIHVDAASGGFFTPFVEPDIIWDFRLKNVISINTSGHKYGLVYPGIGWVLWKDESYLPEELIFKVSYLGGEMPTMQINFSRSASHIIGQYYNFLRYGFEGYRTIHQKTSDVAQYLAHAVEQTGYFDIFNDGSHLPIVCYKLKNDANVKWTLYDLADRLQMRGWQVPAYPLPKSLENIIIQRYVCRADLGFNMAEEFIQDFQASIQELNNAHILFHNTQQSGVHGFTH

SEQ ID NO: 23977 - protein, 475 aa, Zea mays
MPRTTVVESPGCPPLRALTTDILGLVKVVEAHARPAGAAKVVETWGAPDASCAIVAASLADRATDPVLAVARKNGVVELLNPLNGDTLAAVKAVGPAPNDGGAEGDPLTALHLFTRQASDSILGTFLACTEQGKASIRSITKENAASGSHIEPSATWDVCGGANVQFCSVDHGENYVMFGGKGIEVSLWDITSCSKTWSAKSPRTNSLGIFTRPWFTAGTFLCKDDHRKIVACTNSHQVRLYDTALQRRPAISVEFKESPIKAVAADPNGHDVYIGTGTGDLASFDMRIGNMLASCYIGSIRSIVRHPDLPLIASCGLDSYLRIWDTNTRQLLSAVFLKQHLTTVVLDSHFSVEEPGEMKSKQLESSVETEAEVRKEKKKKSKAITEDETEAQIRKEKKKKKSRTIEEEEQAGLFDHSDINDEVYARKEKKKKKSRGIEGGKERDSDGEICSPKRRKSGERSKCLKKRSKKQLVA

SEQ ID NO: 23978 - protein, 419 aa, Dehalococcoides sp. CBDB1
MYELSVLPSGLRVISHHMPASRSVTICVYIGVGSRYEKDCEAGASHFIEHMVFRGSAKYPNSQLISSAIEGVGGILNAATDRESTLYYAKVGSDKFALALDVLSDMLVTPVFDPEDLEKERKVVYEEISMSMDNPSHRVGLLIDEILWPNHPLGRDIAGSRQSVAGLDRQRLLSFMHCHYNPANVVVAVAGDIKHSPAVSAISQAFSGLGGQNIVQTFEPYHSGNPCPVGVDKRDAEQINLMLAMPGMNRLDNRRYAFSILNTILGDGMSSRLFAHVRDNLGLAYSVQSGTEFLHDTGAFSIFAAVDPANLTACIEAILSEMEAAKTTITAEELTKAKEMSKGRIQLAMEDSRYMAKWIGSQELLCRRVNTHEDVIRLIDGVTLTSVMELAGEYFRKPEMRLALVGQIDKEKVSCLLKD

SEQ ID NO: 23979 - protein, 534 aa, Aspergillus oryzae
MKGWLQTFCLTALLAGRALANEVELTQDEAHRQRCSGMYSRKAWGGDVDPFILTKFVRDGDAGDSDPLVSLVIFEWSDEALIGRTVSDDADEKETICDEKSVNDKLCEPGDIGSFILAPNASESEFTIVTQAVHLNNPAAINYPVKKTGFYCVSTYGYSGRDYKAVVEFRNAYGELPAAQIAKLPFYGGLTIVYALIGVFWAFLYVQNRHDILPVQNYITAILVFLIVEQLMTWGFYDYQNRHGLNVGAKVLMVIVAVLNAGRNAFSFFLLLIVCMGYGVVKPSLGRAMIYVRILAIGHFIFAVIYAVASLSITPDSAGPLVLLIVLPLAGTLTAFYVWTLNSLNATMKDLIDRKQKVKALMYKKLWWCILGSIIVIFGFFFINSIAFAGRSEASFVPEHWKSRWFVLDGWLNLVYLFDIGFVAYLWRPTANNRRFAMSDEIAQDDDGFEIRSFNSELDEEDALGGIPESSAHEQRRDLSPVPPKPVPAAPRQRESLDGETIFAVGEDGDKWSDDEDDLSRDSGERKRLTGKDA

SEQ ID NO: 23980 - protein, 590 aa, Mycobacterium avium subsp. paratuberculosis K-10
MAFSVQMPALGESVTEGTVTRWLKQEGDTVELDEPLVEVSTDKVDTEIPSPAAGVLTKIIAQEDDTVEVGGELAVIGDAADGAAGGGAQAPSQPSQPQAPAQPEPQAQEPAQAQPEAPAQPQAPAQPAPQESGGGAATPVLMPELGESVTEGTVTRWLKKVGDSVQVDDALVEVSTDKVDTEIPSPVAGVLISITAEEDSTVPVGGELARIGTGAQAPAPAAPQPPPAPKPEPKPEPAPQPQAQPAPQPQAQPAPEPKAQPAQAQPAAGGEGTPYVTPLVRRLAAENDIDLSSITGTGVGGRIRKQDVLAAAEQKQRQQQAAAQPSAAPAPAAAEARKPAAPTPAPALAHLRGTTQKASRIRQITAAKTRESLLATAQLTQTHEVDMTRLVGLRARAKAAFAEREGVNLTFLPFIARAVIDALKIHPNINASYNEETKEITYYDAEHLGFAVDTEQGLLSPVVHNAGDLSLAGLARAIADIAARARSGNLKPDELSGGTFTITNIGSQGALFDTPILVPPQAAMLGTGAIVKRPRVIVDEFGNESIGVRSICYLPLTYDHRLIDGADAGRFLTTIKHRLEEGAFEADLGL

SEQ ID NO: 23981 - protein, 410 aa, Ralstonia solanacearum
MSRRRVVVTGLGLVSPVGNSVAEGWANLVAGKSGIATVTKFDPSNLAVHFAGEVKGFNVEEYLSAKDARQMDTFIHYGIAAGVQALKDSGLEVNEANAERAGVLVGSGIGGLPMIEDTHSTYVERGPRRISPFFVPGSIINMISGHLSIMHGLKGPNLAAVTACTTGLHSIGLAARLIQAGDADVMLAGGAESTVSPLGIGGFAAARALSTRNDDPATASRPWDKDRDGFVLGEGAGVMVLEEYESAKARGARIYAELVGFGMSGDAYHMTAPNMDGPRRCMLNALRDAGINTDQVQYLNAHGTSTPLGDKNESDAIKAAFGEHARKVVVNSTKSMTGHLLGGAGGLESVFSVLALHHQVSPPTINIFNQDPECDLDYCANTARDMKIDVAVKNNFGFGGTNGTLVFRRL

SEQ ID NO: 23982 - protein, 580 aa, Brassica rapa subsp. pekinensis
MCGILAVLGCVDNSQATRSRIIKLSRRLRHRGPDWSGLHCYEDCYLAHERLAIIDPISGDQPLYSEDKTVVVTVNGEIYNHKALRESESLKSHKYHTGSDCEVLAHLYEEHGEEFINMLDGMFAFVLLDTKDKSYIAVRDAIGVIPLYIGWGLDGSVWFASEMKALSDDCEQFMAFPPGHIYSSKQGGLRRWYNPPWFSELVPSTPYDPLVLRDTFEKAVIKRLMTDVPFGVLLSGGLDSSLVASVAIRHLEKSDARQWGSKLHTFCIGLKGSPDLKAGKEVADYLGTRHHELHFTVQEGIDAIEEVIYHVETYDVTTIRASTPMFLMSRKIKSLGVKMVLSGEGSDEIFGGYLYFHKAPNKKELHEETCRKIKALYQYDCLRANKSTSAWGVEARVPFLDKAFLDVAMGIDPEWKMIRPDLGRIEKWVLRNAFDDEKNPYLPKHILYRQKEQFSDGVGYSWIDGLKDHANKHVSDAMLTNANFVFPENTPLTKEAYYYRAIFEKFFPKSAARATVPGGPSVACSTAKAVEWDAAWKGNLDPSGRAALGVHVAAYEGDKAEAPRPEKVQKLAEKTAEAIV

SEQ ID NO: 23983 - protein, 229 aa, Listeria monocytogenes str. 1/2a F6854
MKLVLIRHGQSEWNKLNLFTGWHDVDLSQEGVVEAMTAGKRIKEAGLEFDVAFTSVLTRAIKTLNYVLEESDQMWVPVHKSWRLNERHYGALQGLNKQETAEKYGADQVQKWRRSYDTLPPLLEENDERQAKNDRRYQLLDTHAIPSGENLKVTLERVIPYWMDTIAPEIKEGRRVVIAAHGNSLRALVKFLEGISDDEIMDLEIPTGVPLVYELNDDLKPVNKYYLDK

SEQ ID NO: 23984 - protein, 384 aa, Desulfovibrio vulgaris subsp. vulgaris str. Hildenborough
MAWRRRHVGLASGLQGHLRRCVMLIDSTLREGAQAYGVYFDAADRESILQGVAASGVTEAEAGWAGQDDLAATLRLGARVAPSLRLAVWCRCCTADLDKAAEAGARRVHIGVPSSDAHMRLRLGMGRDEVLQRVTTVLEHAAHLGFLHVTLGLEDAGRAAPDLLEALARTAARTGAHRLRCSDTVGLLTPDGMVRLVLLARRASALPVAVHCHNDLGLATANALAALDAGADGADVSLLGLGERAGITRAEELAAALVVLRGESYRLDMLRGVCRRLAASLEMRLPPHWAVAGENLFAVESGVHLHGVQRDPALFEPFPPALVGAERRLGVGGKCGSAGVAAMAHSHGLTLQGDALRRHVRAVRDKACSLGRPLTDAEFLCAGR

SEQ ID NO: 23985 - protein, 248 aa, Bacteroides fragilis NCTC 9343
MKKIVLLRHGESAWNKENRFTGWTDVDLTEKGIAEACKAGELLKENGFNFDKAYTSYLKRAVKTLNCVLDRMDQDWIPVEKSWRLNEKHYGDLQGLNKSETAAKYGDEQVLIWRRSYDIAPNALSEDDPRNPRFENRYQEVPDAELPRTESLKDTIERIMPYWKCIIFPNLKTADEILVVAHGNSLRGIIKHLKHISDEEIVKLNLPTAVPYVFEFSDELNLEKDYFLGDPEEIRKLMEAVANQGKKK

SEQ ID NO: 23986 - protein, 154 aa, Triticum aestivum
  misc_feature (69)..(69): Xaa can be any naturally occurring amino acid
  misc_feature (127)..(127): Xaa can be any naturally occurring amino acid
MLPAAMAAGLAWSRPRCKSSLSPSPAEFNTITTANSIGMARGAAIPLVLVAMVATMLLVATDAAISCGXQVTSALSPCISYARGNGANPTAACCSGVRSLAGAARSTADKQAACKCIKSAAGGLNAXRAAGIPSKCGVSVPYAISANVDCSKIR

SEQ ID NO: 23987 - protein, 415 aa, Tradescantia virginiana
TTPISIEDVRREVKILKALSGHKHLVKFYDACEESLNVYLIMELCEGGELLDRILSRGGKYTEEDAKAIVMQILNVVAYCHLQGVVHRDLKPENFLFINRDENAPMKLIDFGLSDFTRPDERLNDIVGSAYYVAPEVLHRSYSMEADIWSIGVITYILLCGSRPFWARTESGIFRSVLRADPNFDDSPWPTASPEAKDFVKRLLNKDYRKRMTAAQALSHPWLRDKEPQIPLDILIYKQTKLYLRATPLKRAALKALSKALTEDELVYLRLQFKLLEPNNDGRVSLENFHTALAQNATEAMKESRVLDILNSLESLAYRRMDFEEFCAAAISCYQLEALEHWEQIASTAFEYFEQDGNRVVSVEELAQDLNLPQNAYAILKDWIRQSDKKLSFLGYTRYTRYLHGVTPRPNTRQH

SEQ ID NO: 23988 - protein, 220 aa, Streptococcus agalactiae A909
MSTNKIAPSILAADYANFANELKRIEETTAEYVHIDIMDGQFVPNISFGADVVSSMRKHSKLVFDCHLMVVDPERYIEAFAQAGTDIMTIHVEATKHIHGALQKIKEAGMKAGVVINPGTPVESLIPILDLVDQILIMTVNPGFGGQAFIPEMMSKVKTVAAWRKEYGHHYDIEVDGGIDNTTIKAAAEAGANVFVAGSYLFKASDLPAQVETLRVALDD

SEQ ID NO: 23989 - protein, 175 aa, Triticum aestivum
MAPTVMASSATSVAPFQGLKSTAGLPVSRRSNGASLGSVSNGGRIRCMQVWPIEGIKKFETLSYLPPLSTEALLKQVDYLIRSKWVPCLEFSKVGFIFREHNTSPGYYDGRYWTMWKLPMFGCTDTTQVINEVEEVKKEYPDAYVRIIGFDNMRQVQCVSFIAFKPPGCEESGKA

SEQ ID NO: 23990 - protein, 184 aa, Arabidopsis thaliana
  misc_feature (106)..(106): Xaa can be any naturally occurring amino acid
  misc_feature (114)..(114): Xaa can be any naturally occurring amino acid
  misc_feature (138)..(138): Xaa can be any naturally occurring amino acid
  misc_feature (153)..(153): Xaa can be any naturally occurring amino acid
MASSMLSSATYWLPLRAQATMVAPFNGLKSSAAFPATRKANNDITSITSNGGRVNCMQVWPPIGKKKFETLSYLPDLTDSELAKEVDYLIRNKWIPCVEFELEHGXFVYREHGXTPPGYYDGRYWTMWKLPLFGCTDXPVKVLKEVEKCKKEXPNAFIRIIGFGNPRQVQGLSFIAYKPPSFPG

SEQ ID NO: 23991 - protein, 452 aa, Glycine max
MATHAALASTRIPTNTKFPSKASHSFPTQCASKRLEVTEFSGLRSTSCVTYANDARESSFFDLVASQLTPKTNGSSTPVRGETVAKLKVAINGFGRIGRNFLRCWHGRKDSPLEVVVVNDSGGVKNASHLLKYDSMLGTFKADVKILDNETITVDGKPIKVVSSRDPLKLPWAELGIDIVIEGTGVFVDGPGAGKHIQAGAKKVIITAPAKGADIPTYVVGVNEGDYTHQISNIISNASCTTNCLAPFVKILDEEFGIVKGTMTTTHSYTGDQRLLDASHRDLRRARAAALNIVPTSTGAAKAVSLVLPQLKGKLNGIALRVPTPNVSVVDLVVNVEKKGLTAEDVNAAFRKAAEGPLKGVLDVCDVPLVSIDFRCSDVSSTIDSSLTMVMGDDMVKVVAWYDNEWGYSQRVVDLAHLVASKWPGAAKAGSGDPLEEFCETNPADEECKVYE

SEQ ID NO: 23992 - protein, 519 aa, Streptomyces exfoliatus
MPGTPGISRRSLFAGSAAGTAAALLPTGTATAKNRTKSAVTGASYRAAYHFTVPDQWKNDPQRPIWIDGEYHYYYLYNADYFTGVVGTAWRLATTKDLVSFTDRGVAVPKDTTPNGDLWSGSAVVDTGNTAGFGAGAVVVIVTMSPGGGTDHQEQFLYYSTDGGLTFTNYGTDPVLPNPGVADFRDPKVIRDEDRGRWVMALAENDKIGFYHSADLKSWTYVGGFVHDGIGVLECPDLFRITAGDGTVKWVLGASANGKGSGLPNTYAYWTGSFDGSAFAADTNDPQWLDHGWDWYGAVTFEKRAASGAVDAAARYAIGWVNNWDYANTTPTIDCDGFNGTDSVVREITLKKASDNTYYLASRPVAGLDSHVSRTVNLGDVTVNGTKVLDYTGISYEVTTQLTWSQLTGAGLQLRRSPDGGRHIDAGIYADYAFLNRRGTVNADTSGKWQESHTPFDPSAGTVKLRILVDRTSVEMFVDDGRYVHTSQVFPYLLDTRLALFTIGGSAVFRNTVIREFSV

SEQ ID NO: 23993 - protein, 269 aa, Utharomyces epallocaulus
HTFYNELRVAPEEHPVLLTEAPLNPKSNREKMTQIMFETFNAPAFYVSIQAVLSLYASGRTTGIVLDSGDGVTHTVPIYEGYSLPHAILRLDMACRDLTDYLMRILAERGHFFTTSAEREIVRDLKEKLCYVALDFEQEMQTAAQSSALEKSYELPDGQVITVGNERFRAPEALFQPSLLGLESAGIHETTYNSIMKCDVDIRKDLYSNIVMSGGTTMYPGIADRMQKEITALAPSSMKIKIVAPPERKYSVWIGGSILASLSTFQQMW

SEQ ID NO: 23994 - protein, 339 aa, Blastopirellula marina DSM 3645
MKYDALLVQSFGGPEGPDDVIPFLENVLRGKNVPRERLLEVAEHYQHFGGVSPINQQNRDLIAALRVELAAHGIDLPIYWGNRNWAPYLVDAMTQMKNDGVESALVFVTSVFSSYSGCRQYREDLTKAQVEVGDQAPRCDKIRTYYNHPGFIETMSSCVRESLDQIPSERRQRAELIFTAHSIPLGMSDNCNYVKQLQESCRLVSEATQHANWRLVYQSRSGPPTQPWLEPDVCDVIRDLGASGATDVIVSPIGFVSDHMEVLFDLDTEAKEAAAEVGLNFIRSGTAGVRPRFIEMIRQLIEERLDPDMPKQALGPLGPSHDFCPVDCCLYTPQRPRPG

SEQ ID NO: 23995 - protein, 199 aa, Triticum aestivum
  misc_feature (10)..(10): Xaa can be any naturally occurring amino acid
  misc_feature (33)..(33): Xaa can be any naturally occurring amino acid
  misc_feature (52)..(52): Xaa can be any naturally occurring amino acid
  misc_feature (71)..(71): Xaa can be any naturally occurring amino acid
  misc_feature (79)..(79): Xaa can be any naturally occurring amino acid
DKETSSVPNXAPQMTYLVRCTMMLRDIYTELLXDRFVNVSTETSDDDTERIXDLLCTVYARAPYRESVTQXSPLFERIXRLTARHTVRYRSILCSMRDDTTTDFRRRVLLCEMRAARLVYTSADEMSRDALKLESHHISERSLFDCERASAPTTSTGHFKCGRCGHSTTTYYHMQSRSAGETISTFVTCVTCTTHWKFC

SEQ ID NO: 23996 - protein, 269 aa, Zychaea mexicana
HTFYNELRVAPEEHPVLLTEAPLNPKSNREKMTQIMFETFNAPAFYVAIQAVLSLYASGRTTGIVLDSGDGVTHTVPIYEGYALPHAILRLDMAGRDLTDYLMRILAERGHSFTTTAEREIVRDIKEKLCYVALDFEQEMQTAAQSSALEKSYELPDGQVITVGNERFRAPEALFQPALLGLESSGIHETVYNSIMKCDVDIRKDLYSNIVMSGGTTMYPGIADRMQKEITALAPSSMKIKIVAPPERKYSVWIGGSILASLSTFQQMW

SEQ ID NO: 23997 - protein, 144 aa, Vibrio sp. Ex25
MSSFKTRCPSCGGLNRVPNERVAESATCGKCKSALFDGAPIEGTQDNFSVLLQSDTPVVVDFWAPWCNPCVGFAPVFSDVAHEQAGTARFVKIDTEAQQALAAQFGIRSIPTIMVFKNGQRVDMINGALPKSQFDQWLNQALNK

SEQ ID NO: 23998 - protein, 433 aa, Rubrivivax gelatinosus PM1
MSAKTDPTQLSSFLSYVTPSPTSPWGTYLSQVDRVIPYLGHLGKWAETLKRPKRALIVDVPIEMDDGSVRHFEGFRVQHNLSRGPGKGGVRYHPDVTLEEVMALSAWMTVKCAAVNLPYGGAKGGIRVDPKQLSQKELEKMTRRYTSEIGIIIGPQRDIPAPDVNTNGQIMAWMMDTYSQNTGATATGVVTGKPIHLGGSLGRVKATGRGVFVTGREAARRLGLALDGARVAVQGFGNVGGSAAELFAQAGAKIVAAQDHTGTIYNDKGLDLAELVPYVKQVGGVGGFKGAEAMDGESFWDVNADILIPAALEGVISAERAARIKARLVLEGANGPTVPAADDILRDRGVLVVPDVICNAGGVTVSYFEWVQDFSSFFWTEDEINVRLDKIMVDALRRIWDTADLHKITLRTATFAVACERILTAREERGLYP

SEQ ID NO: 23999 - protein, 108 aa, epsilon proteobacterium 899-3
MVAGGGASVVYADTIADMAGIDDLANYGEYSGGPTTGETKFYAETILDLMTREKDPKGRDKILIIGGAIANFTDVAKTFTGIIQAFEKYAEKMKEVGVKIYVRRGGPN

SEQ ID NO: 24000 - protein, 269 aa, Zygorhynchus heterogamus
HTFYNELRVAPEEHPVLLTEAPLNPKSNREKMTQIMLETFNAPAFYVAIQAVLSLYASGRTTGIVLDSGDGVTHTVPIYEGYSLPHAILRLDMAGRDLTDYLMRILAERGHSFTTTAEREIVRDIKEKLCYVALDFEQEMQTAAQSSALEKSYELPDGQVITVGNERFRAPEALFQPSLLGLESAGIHETTYNSIMKCDVDIRKDLYSNIVMSGGTTMYPGIADRMQKEITALAPSSMKIKIVAPPERKYSVWIGGSILASLSTFQQMW

SEQ ID NO: 24001 - protein, 115 aa, Triticum aestivum
MAHSAVAQVVLVAVVAAMLLAATEAAVSCGQVSSALSPCISYARGNGANPSAAYCSGVRSLASSARSTADKQAACKCIKSAAAGLNAGKAAGIPTKCGVSVPYAISSSVDCSKIR

SEQ ID NO: 24002 - protein, 504 aa, Bordetella parapertussis
MANQTAQVAHWIGGQAAYGAEHGLQDIHDPATGEVAAQVGLGGGDTVAQAVAAARAAQPAWAAKSPLHRARVLNRFLALLEDNKETLARMILREHGKVISDARGEVMRGIEVVEFACGAPELMKGAMSINVGGGIDNWVQREPLGVVAGITPFNFPVMVPLWMMPMALATGNAFVLKPSPLDASPSLALAEMLGQAGLPAGVASVVQGGVQAVNALIDHPDVKAVSFVGSTAVARQIYERSAREGKRVQALGGAKNHLVVMPDADPEGAADALVGAAFGSAGERCMAISVAVFVGGAAEAVMPHILRKARALKVRRGMQEDAEMGAIVSAAARDRIAAYIASGVDEGASLLLDGREIAAADCGEGCGNGYWLGPTVFDRVQPSMRIYREEIFGPVLACVHVETLEQAIDLINGHDFANGVSLYTDSGTAARAFVQGIEVGMVGVNVPIPVPAAWQGFGGWKQSLFGDLHVYGEEGVRFYTRQKSVMQRWAAKAAGMSFAMPRSG

SEQ ID NO: 24003 - protein, 292 aa, Carboxydothermus hydrogenoformans Z-2901
MKAVVLVAFGCPDCLENIGPFMERIMGRTPPPALIAAVRSRYEKIGGKSPLTEITSQQARALKTLLGSEFLVDFAYQYWRPEIPEVVFNLVQKGAKTIYFLPMSAFNSQVSTGAYQKTIKNLEEKFPEIKFYFKGGLAEEPYFIEAHRQLLTTALQPFSPKNTGIIFTAHNLPKKAIEQGDPYFAEFLKTVEAIARTFPFPWRYAFQSKGKSGEEWLKPEVDDVIISWQNQGVENIIINPIGFVADHIETLYDLDIELKEKFSTVNIVRLPALNDHPLLIKALHQLVQKMEG

SEQ ID NO: 24004 - protein, 227 aa, Arabidopsis thaliana
MAKLSFKDSLKALEADIQHANTLALDYPREKDGARVQMRLSYSPTAQFFLFLVQWTDCKLAGFLGLLRVLIYMTYADGKTTMSVYERKASIREFQDIDDSKQKEVCKMRYRKKDESEMSEIEIEREEECGICMEMNSKVVLPNCTHSLCIKCYRDWRGRSQSCPFCRDSLKRVDSGDLWMFLDQNDTVNLTAIARENQKRLFMYIEKLPLVVPDQVYASSPYDFHVR

SEQ ID NO: 24005 - protein, 536 aa, Oryza sativa
MDRVLLSSQLSSQTVVNTRVQQGSGGINSIGFAVIRKGSLKLRCYAIGGLGGGENLNDPLKESNNGPVLQGFNGSSASFRTVGAKITQETGDFFVSDAEGDPDKPTDGFSSIDEAIGALHEGKFVIAVDDESGDNEGDLVMAATLADPESIAFMIRNGSGIISVGMKEEDLTRLMIPMMSPIAEIEDISAAASTVTVDARVGISTGVSAADRAKTIFTLASPDSKPTDLRRPGHIFPLKYRNGGVLKRAGHTEASVDLVALAGLRPVSVLSTVINPVDGSMAGMPVLKQMALEHDIPIVSIADLIRYRRKREKLVELIAVSRLPTKWGLFRAYCYQSKLDGTEHIAVAKGDIGDGEDVLVRVHSECLTGDILGSARCDCGNQLDLAMQLIDKAGRGVLVYLRGHEGRGIGLGQKLRAYNLQDDGHDTVQANVELGLAVDSREYGIGAQILRDMGVRTMRLMTNNPAKFVGLKGYGLAVVGRVPVISPITKENQRYLETKRTKMGHVYGSDLPGNVPEEFLNPDDIAGDQDEDDTHN

SEQ ID NO: 24006 - protein, 102 aa, Piromyces sp. E2
VIEKRLGLDTRVTTLGHVQRGGAPSAYDRYLATIQSDEAIKAVLKSTPETPSPMIGIQQNKITTIPLMEAVSLTHSVSEAVSKKRFNKAMELRDPDFKDAYN

SEQ ID NO: 24007 - protein, 829 aa, Vibrio cholerae O1 biovar eltor str. N16961
MKMTRRAFVKANAAASAAAVAGITLPASATNLIASSDQTAIHWDKAPCRFCGTGCSVLVGTQDGRVVATQGDPEAPVNKGLNCIKGYFLSKIMYGQDRLKTPLLRMKDGQYHKDGEFTPVSWDTAFDVMAEKWKASLKTKGPTSVGMFGSGQWTVMEGYAAVKLMKAGFRSNNIDPNARHCMASAVVGFMRTFGIDEPMGCYDDFEHADAFVLWGSNMAEMHPVLWTRITDRRLSHPHVKVNVLSTYYHRSFELADHGYIFHPQSDLAIANFIANYIIQNDAVNWDFVNKHTHFKQAVTDIGYGLRDDHPLQKKAKNANSGDVSDISFEEYKKSVAPYTVEKASEISGVSPDKLITLAKQYADPNTKVMSLWTMGMNQHTRGVWMQSLVYNLHLLTGKIATPGNSPFSLTGQPSACGTAREVGTFAHRLPADMVVANPKHRAIAEKVWKLPEGTIPEKPGFHAVQQDRMLKDGVLNCYWVQCNNNMQAGPNINEERLPGYRNPENFIVVSDAYPTVTAQAADLVLPTAMWVEKEGAYGNAERRTQVWYQQVKTVGESHSDSWQVIEFSKRFKVEDVWPEELLAKAPQYRGKTLYDVLFKNGQVDKFPLSEARELNDDAHHFGFYIQKGLFEEYAEFGRGHGHDLAPYDVYHQVRGLRWPVVDGKETKWRFKEGSDPYAKAGSGWDFYGKPDGKAWIISSPYEAPPEMPNEEYDLWLCTGRVLEHWHTGTMTRRVPELYKAVPDALCFMHHEDAQARGLRRGDEVLISNSRGEVRVRVETRGRNKPPKGLVFVPFFDARILVNKLILDATDPLSKQTDFKKCPVKITKVA

SEQ ID NO: 24008 - protein, 2341 aa, Aspergillus oryzae
MEDSNILGEDLPLPPTRLFERLAQLPGYTWDQSIEPFHSTYSHWHVYGLRHSLESDVSTPAATSSGPSSLARNSPRAESRPPFRHHWRSSLSESSSEISLSRGDHEPIWTPVIARVSSHVVRLEREFHMQRSIVQTSDPDCNHTIRPIDLIRLPRDPGDAGPLLVAIFESPGQNMLKELVAFGPAWFAMGTKGDSSEPTPGEQVSLPVFLDFGIGACDCLELLHYGLKTVHGEIRGDAFHFSLETGSVKLINTGNGARSFDNILSEGWSSTARELGVKNKLQFIAPEQTGRMPTEPDSRTDIYALGVLFWTMLVGKPAFTGSDPVEVVQNVLGKKLPPVSAKRMDVPDAVSAVIEKMTQKAVNERYHTISSVKRDLVQISQLLGDGDSEALKDFQIAQRDVSSFFTLPSRMFGRKEEYKKLIEVVEKVYRRQQSAYARATTQSTSGLGSTSSISDGRVDSFEIASGSSDSGSFHIPHKPNSNGGPSNLGRVSTHESIHSTESSLSTPKPGYVSNKAKSPVESRASWDNTDRDGHLSTGASTQSHADSLGVNRSKTAHKLRRSGKCEVITISGAAGIGKTDLLNRVQPAIRRFGYIGIARLDRARRVPFEPFAKILASLLRQIFSERDVTTDYHESVRTALRPMWPTLHRVLELPEQLMSSGGSEKDISPKLSAAQHIFNKDVSTKGEPSKRIALPRFDQGQTSVDFFLSNAALKNMRLMETFLEILKTLSQFKLICVCVDDLHYADDETLDLIMNIVKAKIPCVLILTSRKAELESDAIKSLFEAENPSVTRIALNPLGEDEVMQIVAATMHQEPNPMLTPLAAVIQEKSVGNPFYVRLMLETCYSKNCIWYSWKNSVWEFDLDRIFTEFVAPRYGEGLGLGFIARRLQETPPAARSIMVWSTLLGSPFAFSLVQKLLTSEFLYSSDDDEAVDLTCPQNANLIRQSEADIVVGLQYLVQANLLVPGKTDDEFRFANDRIAQAAASLTEGRNVEKMHFIISQAIMKYYHDGRSRYAMARHVALASRIIKNRVLQRLDYRKILWDAAQTAAQSGARPTALWYFRHCIALLQENPWDDNNTDVYYDETLRLHIATAEMAWSQGHNSEALDLLDKVFVYGKSAVCKSRAWIVKAKIYAQMGNHLRSMDSLLTCLDELGVHLREFTTFEECDAAYRNLRRYLEKGDLEAVVRKPVSKDINMITIGAVMAEAMAVTYWDDPLTFYRMAIEMMNLHIFKGGFVQISIGCSHLAMISFSRFRDLDLAVKLSDHALTLLERCPEPWTQGRGSIVHNLYVSHLRVPLASTLPALEASVETSFSMGDPYITLISLSSMAMTRLFLGHDLTHLEGFCNESPEDIPEWVNDTRGGASLLAVRQVARALQGKTGYRNADTIMADEHHNTSEYIAFLENNASNADRPRDIYWGLAMIPLFVYGHHSKAIELGVQMMDTMPRLWSARVSYVVYFYLALSLLTLHNEYPAGGYLDGNMKTVLRYKAEVDFARSACDANYGMWSLILEALVFEVRNDHSSAIRAFEDKSSISIKAAIDHCQIHGWPLEEALALELHGDFLIRRGAKRAARSVMQDAIAAWAAISAVGKAAQLTEKHEWLLKTATSTRSVDVGCQTVDSLLGINRSSEPEDIGVSQHMEEDDRQHRWIEQNGVTTGERSLDISGVGLDIIDLSSILESSQVMSSELQIDKLLTKMIEIVLESCNGSDFAVIATNFDDNFTVAAAGDLENGQRSYVDGLPFSVVEDKMAQQISHYVMRTREEVLVHNVLEDDRFSNVSDAYQGRYPLGKSVIALPIMQAEHLLGVIHIEGKPNSFTQRNLVVLHLLCNQIGISLSNALLFREVRKVSATNASMVEAQKRALAQAREAEQKAKVAEAEAKHNVKLKEDAAKAKSIFLANISHDLRTPMNGVIGLSELLKATKLDKEQDEYVESIRVCADTLLTLINDILDFSKLEAGKMKISTVPLNIKETISEVVRALRYTHRDRGLETIEDLEKVPPDLVVLGDPVRLHQIFMNLLSNSYKFTPKGSVTVRARVTREGKGRIRLECSVSDTGIGIPEEQKSRLFRPFSQADSSTARSYGGSGLGLSICKAIIEDVLGGAIWLDSTPGVGTTVTFHLSFNKVKDASAKASGLKKGDPSDKTTSPSPTARDLTMIPRDQIRVCIAEDNPINQKIAVKFVTGLNLQCEAYSDGRQAVEALRARSQEGNPFHVVLMDVQMPTLDGYNATREIRRDPDPNVNEALVIAMTASAIEGDREKCLEAGMNNYLPKPVRSTILSEMLDQYLAPVPTFTKTRLAMRERGSVSHDTGTPNSSSPSPGSDSQGAQLTPESDKQVQQNSSEMN

SEQ ID NO: 24009 - protein, 194 aa, Arabidopsis thaliana
  misc_feature (59)..(59): Xaa can be any naturally occurring amino acid
  misc_feature (91)..(91): Xaa can be any naturally occurring amino acid
  misc_feature (106)..(106): Xaa can be any naturally occurring amino acid
  misc_feature (150)..(150): Xaa can be any naturally occurring amino acid
  misc_feature (159)..(159): Xaa can be any naturally occurring amino acid
FRNNGFLYALFRYYGCLSGSGALMVAPFNGLKSSAAFPATRKANNDITSITSNGGRVNXCMQVWPPIGKKKFETLSYLPDLTGFRIWLKEXVDYLYPATSGIPLCXNSEFEHGIFCTREQRVTFTRDTYDWTGTWTMWEASLCSGCTDFXKVFKEVEEXKKGYPQAFLRIIGFGNPRQVQGLSFIAYKPPSFPG

SEQ ID NO: 24010 - protein, 494 aa, Bacillus cereus ATCC 10987
MLTKNIELKPKVKAFLNEEIKMFINGEFVPSISGKTFETYNPATEDVLAVVCEAQEEDINVAVKAARSAFESGPWAEMTTAERAHLIYKLADLIEEHGEELAQLEALDNGKPYQVALDDDIAATVENYRYYAGWATKIIGQTIPISKDYLNYTRHEPVGVVGQIIPWNFPLVMSSWKMGAALATGCTIVLKPAEQTPLSLLYTAKLFKEAGFPKGVVNFVPGFGPEAGAAIVNHHDIDKVAFTGSTVTGKYIMRQSAETIKHVTLELGGKSPNIILEDADLEEAINGAFQGIMYNHGQNCSAGSRVFVHRKHYETVVNELVKMANNVKLGAGMEKETEMGPLVSKKQQERVLHYIEQGKAEGATVAAGGERAFEKGYFVQPTVFTNVTDDMTIVKEEIFGPVVVVLPFDSTEEVIERANRSSYGLAAGVWTQNIKTGHQVANKLKAGTVWINDYNLENAAAPFGGFKQSGIGRELGSYALDNYTEVKSVWVNIK

SEQ ID NO: 24011 - protein, 284 aa, Desulfitobacterium hafniense Y51
MAQLLDGKEISKVLKEEIKEEVKRWKEQGVNPKLAVVLVGDDPASVVYAKSKQKVSDSLGIDFELTVLPADSSEESILALIDSLNANPDVHGIMIELPLPKHISKERVMAAVRPDKDVDGVHPINRGYILSGEEGLFPATPESCIEIMLRSGVEIAGKHVVIVGRGETVGKPLVFLILKHNATVTICHSRTPDLGAFTRQADIIVAAVGKAKLVKKDMVKPGAIVVDAGINEIPGGICGDVDFEEVKEVASLISPVPGGVGSLTTALIMKNVLKGITLQRKEGQ

SEQ ID NO: 24012 - protein, 76 aa, Brassica napus
  misc_feature (57)..(57): Xaa can be any naturally occurring amino acid
MKEITDSVDPRIMFKHQSLLQDYHELRKETVFKMRKLEMMKQRRSNLDAEVRFLKRXYKHLKQDQTLETSSPNLLG

SEQ ID NO: 24013 - protein, 447 aa, Haloarcula marismortui ATCC 43049
MSNSNSHATGSPYAPQTAAETAAMLDVVGADDLESLFDVPESVAFDGEFGIDARSERATRREVAGLLSRNADLTEFLGRGHYDHYVPSVVDDLASRSEFLTSYTQYQPEVAQGFLQALFEFQSMLVELTGLDVANCSMYDDATALGEAATLSQRVRSVSGDRILVPEHLREGKRAVLSNYAEGPDLTVESYPMTDGVADVPALADEIGDDTAMVYAESPTVRGVIEERLGAIGDLAHDHDALFCLGSDPIALSLLERPANVGADVVVGDAASLGTGTAYGFGLGMFVTREEYLRQVPGRLVGASEDAADRRAYTLTLQTREQHIRKERATSNICTNQAWVALRTAMHAAWLGPDGLVDLAEDCVTRARDLADRLDDIVGVTAPIHGRHHFREFLAHTDQPASAIVADLAADGFAVHAVDDHLVQVCVTETTTDATDEFVAAFREVAK

SEQ ID NO: 24014 - protein, 144 aa, Triticum aestivum
  misc_feature (72)..(72): Xaa can be any naturally occurring amino acid
MALAEGNNGAVVFSEEQEALVLKSWAVMKKDSANLGLRFFLKVFEIAPSAKQMFSFLRDSDVPLEKNPKLKXHAMSVFVMTCEAAAQLRKAGKVTVRETTLKRLGATHLKYGVADGHFEVTGFALLETIKEALPADMWSLEMKK

SEQ ID NO: 24015 - protein, 249 aa, Brassica rapa subsp. pekinensis
MKFNVANPTTGCQKKLEIDDDQKLRAFYDKRLSQEVSGDALGEEFKGYVFKIMGGCDKQGFPMKQGVLTPGRVRLLLHRGTPCFRGHGRRTGERRRKSVRGCIVSQDLSVLNLVIVKKGEKDLPGLTDTEKPRMRGPKRASKIRKLFNLGKDDDVRKYVNTYRRKFTNKKGKEVSKAPKIQRLVTPLTLQRKRARIADKKKRIAKANADAADYQKLLASRLKEQRDRRSESLAKKRSRLSSAAAKPVAA

SEQ ID NO: 24016 - protein, 553 aa, Triticum aestivum
LNKFVQKSRLVPVRNSRDIVDPRVRISPRQTHSHTMGNRTSRHRRAAADQPATAPPPTAQPKPQPPPKPQTAPAPAPTPEAGQVAMGRVLGRPMEDVRATYTFGRELGRGQFGVTYLVTHKATGQRFACKSIATRKLVHRDDIEDVQREVQIMHHLTGHRNIVELRGAYEDRHSVNLIMELCEGGELFDRIIARGHYSERAAALLCREMVSVVHSCHSMGVFHRDLKPENFLFLNNKEDSPLKATDFGLSVFFKHGEQFKDLVGSAYYVAPEVLKRHYGAEADIWSAGIILYILLSGVPPFWADNEDGIFEAVLLGHIDFSSDPWPSISNGAKDLVKKMLRQDPKERLTAAEILNHPWIREDGEAPDKPLDITVISRMKQFRAMNKLKKVALKIVAENLSEEEITGLKEMFRSLDTDNSGTITLEELRSGLPKLGTKISESEITQLMEAADVDGNGTIDYSEFVSATMHMNRLEKEDHILKAFEYFDKDHSGYITVDELEEALKKYDMGDDKTIKDIIAEVDTDHDGRINYQEFVAMMRNNSPEIVPNRRRMF

SEQ ID NO: 24017 - protein, 385 aa, Aspergillus oryzae
MAFFFNRGRSRHPSDIVRSIKDQLVRLREASPTAAKVEDELAKQLSQMKLIVQGTQEIEVSPEQVHALVQATLQEDLLYELARSLYILPFEARKDTQTIFSHILRFKPGNSNQADPPVISYIVHNRPEVIIELCKGYEHSQSAMPCGTILREALKFDVIAAIILYDQSEDGEPAIRLGEVQPGVPQTGNGIFWNFFHWIDRGTFELSADAFTTFREILTRHKSLVTGYLATNFDRFFDQFNSVLVQSDSYVTKRQSIKLLGEILLDRANYNVMMAYVESGENLKLCMKLLRDDRKMVQYEGFHVFKVFVANPNKSVAVQRILINNRDRLLKFLPRFLEDRTDDDQFTDEKSFLVRQIELLPKEPIDPTRSAREPSRPGVNTATVA

SEQ ID NO: 24018 - protein, 485 aa, Cryptococcus neoformans var. neoformans JEC21
MMHASKHKMGFSDFRDAILIQPPSFKKKKEYVLEELLGRGGFGKVVKALWAPPEREPKEVALKIINKKLVKGNEQAVLDEISVLKHLDHPNIVHVWDDFESRDKYYIAFELAVGGELFDRISERGKFTERDAVECIRQVLQATAYLHEHNVAHRDLKPENILYKTRDADSPLVIADFGIAKHLETPDQECSEAAGSFGYAAPEVLLGKPHGMKVDCWSIGIIAYTLLCGYPPFRSDDRNGLLQEMTRGRIMFHDRYWSKVSRTAKDFVKDMLETDPKKRSTAADALNHPWLTSGQATETDLSAAIRDNFDAKRKWKSALRIIQASNRIRSASRSRSPSLSTSPPSTANTANPSPNSALFVPEVPHVLTPLSMTDEDPMSDEHYYFSADDQGHTEEEEEAKVMTRGGKKKAGSMPVGSGSGVTTGTVTPYTTGNEGSNTPKPTIKVIDGNGELRPEETDMQTPPATAPVGAGMMGSIRGMMGKLSL

SEQ ID NO: 24019 - protein, 601 aa, Mycobacterium sp. KMS
MNTPESTDAFSSVRAITTPSGPPHPGQPAWNTQRASAMPVSRYRSFAEEVEPVTLPDRTWPDKVVDTAPMWCAVDLRDGNQALIDPMSPARKRRMFDLLVRMGYKEIEVGFPSASQTDFDFVREIIEQGAIPDDVTIQVLTQCRPELITRTFEACKGAPRAIVHFYNSTSILQRRVVFRADREAVKQIAVDGARMCVEEAAKHPDTLWRFEYSPESYTGTELEYAVDVCNAVADIVKPTPEVPLIVNLPATVEMATPNVYADSIEWMNRHLSPRDSIILSLHPHNDRGTAVAAAELGYQAGADRIEGCLFGNGERTGNVCLVTLGLNLFSRGVDPQIDFSNIDEIRRTVEYCNQLPVHERHPYGGDLVYTAFSGSHQDAINKGLDAMKVAADEADSDVDDILWQVPYLPIDPKDVGRTYEAVIRVNSQSGKGGVAYIMKADHGLVLPRRLQIEFSQAIQKITDGEGGEVSPKEMWDVFAEEYLSPVRPLERMRQKVDAAEVDGGTDTITAVVKVDGVEREIVGAGNGPLAAFCDALGAIGFDISVLDYSEHALSAGEEAQAAAYVEASVGGKTVWGVGIATSITTASLRAVVSAVNRAARS

SEQ ID NO: 24020 - protein, 309 aa, Listeria monocytogenes str. 1/2a F6854
MTKKVGLLVMAYGTPYKDEDIERYYTDIRHGHKPSEEMIADLRGRYHAIGGLSPLAKITEAQAYGLEKALNDSQDEVEFKAYIGLKHIEPFIEDAVEAMHKDGIEEAISIVLAPHYSSFSVEAYNKRAKEAADKLGGPRIKAINDWYKQPKFIQMWADRINETAKQIPADELLDTVLIVSAHSLPEKIKQHNDPYPNQLQETADFIFEKVVVPHYALGWQSEGKTGEPWLGPDVQDLTRELYGREKYKHFIYTPVGFVAEHLEVLYDNDYECKVVTDEVGAAYHRPPMPNSDPEFLEVLRTVVWEKYSN

SEQ ID NO: 24021 - protein, 707 aa, Zea mays
MSASQSSMSGAGEPGARAVVWFRRDLRVEDNPALAAAARAAGEVVPAYVWAPEEDGAYYPGRVSRWWLSQSLKHLDASLRRLGAARLVTRRSNDAVAALLDLVRCTGATHLLFDHLYDPLSLVRDYRVKEQLAAEGIDVQSFNADLLYEPWEVLDEDRRPFTMFAPFWNRCLCMPDPAAPLLPPKRINSGDLSRCPWDELVFEDESERGSNALLARAWSPGWQNADKALTAFLNGPLVDYSVNHKKADSASTSLLSPYLHFGELSVRKVFHLVRMKQLMWSNDGDRAGEESCTLFLRAIGLREYSRYLTFNHPCSLEKPLLSHLRFFPWVVDEVHFKVWRQGRTGYPLVDAGMRELWATGWVHDRIRVVVSSFFVKVLQLPWRWGMKYFWDTLLDADLESDALGWQYISGSLPDGRELDRIDNPQFEGYKFDPHGEYVRRWLPELARLPTEWIHHPWDAPESVLQAAGVELGSNYPRPIVELDAANSRLQGALSEMWELEAASRAAIENGMEEGLGDSTDEPPIDFPQELRMEVDRQPAQPAIIHTPVVAGWRREDQRVPSMTSSLIRAETELTADFGNTSEDSRPEVPSNIHLQARPEREETVDGGTGNAVRVHGNHHQQNLQNNMHRVLGIAPSISEASSSWTGRDGGVVPVWSPPAASGHSDPYAADEADISSRGYLDRHPQSHTMMNWSQLSQSLTTGWEVDN

SEQ ID NO: 24022 - protein, 394 aa, Oryza sativa
MAAATTSRRGPGAMDDENLTFETSPGVEVISSFDQMGIREDLLRGIYAYGFEKPSAIQQRAVLPIISGRDVIAQAQSGTGKTSMISLSVCQIVDTAVREVQALILSPTRELAAQTERVMLAIGDYINIQVHACIGGKSIGEDIRKLEHGVHVVSGTPGRVCDMIKRRTLRTRAIKLLILDEADEMLGRGFKDQIYDVYRYLPPELQVCLISATLPHEILEMTSKFMTDPVRILVKRDELTLEGIKQFFVAVEKEEWKFDTLCDLYDTLTITQAVIFCNTKRKVDWLTERMRSNNFTVSAMHGDMPQKERDAIMGEFRSGATRVLITTDVSLVINYDLPNNRELYIHRIGRSGRFGRKGVAINFVKKEDIRILRDIEQYYSTQIDEMPMNVADLI

SEQ ID NO: 24023 - protein, 838 aa, Photobacterium sp. SKA34
MNNGIDKQHLIVIGNGMVGHHFIDQLVDKGGLAHYCITVIGEESIAAYDRVQLSAMFADKSQQDLMLGDVSWYQNQGIDLRLGQQVVEINRAQQTVNIRDVVTSESICLDYDKLVLATGSTPFVPPIKGNDRQNCFVYRTVDDLAAIKNACSQAKTGAVIGGGLLGLEAANALRLLGLETHVVEFAPRLMPVQLDDLAGDLLAKKITELGVHIHTDMRTEKITDGETATHRLWFENDTPLDVDVIVFSAGIRPQDTLARQCELEIGERGGIVIDDTCSTSDENIYAIGECALWQARIFGLVAPGYSMARTVASQLVSDTEAKFIGADMSTKLKLLGVEVASIGDAQMRTEGAKEVVLQDSAGGRYKKLVVNADSTQILGAILVGDSSDYDALLQCYLNQTILTEHPAQLLFDTSMLAPSTDENSVVCSCHNVTRGALISQVQQGCHELGEIKQVTKAGTGCGGCSSMVKQIVDEQLACMGMEVNNHVCQHFSYTRQELFHLCQVEKIQDFETLLSTHGKGLGCDICKPTAASIFASLWNEHVLESPYQPLQDSNDAFLANIQKDGSYSVVPRVPGGEITPDKLITLGEVAKKYDLYTKITGGQRVDLFGAQLSQLPDIWAELIEAGFETGHAYGKSLRTVKSCVGSTWCRYGVDDSMALSIELENRYKGLRSPHKLKFAVSGCTRECAEAQSKDIGIIATEQGWNLYVGGNGGMRPRHGDLFAVDLDKPTLIAYIDRILMFYVKTADRLQRTSVWLENLDGGLDYLKQVVIEDKLTINTSLEQQMEHVINSYQCEWKTTLSSEQKLNRFRQFVNLKDEEISLPYQRIRGQRIPIKEEL

SEQ ID NO: 24024 - protein, 239 aa, Candida glabrata CBS 138
MPRSKRSKLVTLAQTDKKGRENKERIFDEVREALDTYKYVFVLQLDDVRTPVLQEIREAWVGSKLLMGKRKVLEKALGTTREQEYKENLSKLTKYCSGVIGLLFTNETLDTVKEYFEAYSRLDYSRPNSRAPITFEVPEGIVYSRGGQIPIEEDVPMAHSLEPTLRNKYEMPTKIKAGKITLEAPYLVCKEGQKLDVRQALILKQFGVALAQFKVIISAYYDNESSTVSELNINKKQDA

SEQ ID NO: 24025 - protein, 494 aa, Bacillus anthracis str. A2012
  misc_feature (307)..(307): Xaa can be any naturally occurring amino acid
MLTTNIELKPKVKAFLDEEIKMFINGEFVPSISGKTFETYNPATEDVLAVVYEAQEEDIDVAVKAARSAFESGPWVEMTTAERAHLIYKLADLIEEHGEELAQLEALDNGKPYQVALDDDIAATVENYRYYAGWATKIIGQTIPISKDYLNYTRHEPVGVVGQIIPWNFPLVMSSWKMGAALATGCTIVLKPAEQTPLSLLYTAKLFKEAGFPNGVVNFVPGFGPEAGAAIVNHHDIDKVAFTGSTVTGKYIMRQSAETIKHVTLELGGKSPNIILEDADLEEAINGAFQGIMYNHGQNCSAGSRVXVHRKHYETVVNELVKMANNVKLGAGMEKDTEMGPLVSKKQQERVLHYIEQGKAEGATVAAGGERAFEKGYFVQPTVFTDVTDDMTIVKEEIFGPVVVVLPFDSTEEVIERANRSSYGLAAGVWTQNIKTGHQVANKLKAGTVWINDYNLENAAAPFGGFKQSGIGRELGSYALDNYTEVKSVWVNIK

SEQ ID NO: 24026 - protein, 351 aa, Thermotoga maritima
MGFDLDVEKKKENRNIPQANNLKIKVIGVGGAGNNAINRMIEIGIHGVEFVAVNTDLQVLEASNADVKIQIGENITRGLGAGGRPEIGEQAALESEEKIREALQDTHMVFITAGFGGGTGTGASPVIAKIAKEMGILTVAIVTTPFYFEGPERLKKAIEGLKKLRKHVDTLIKISNNKLMEELPRDVKIKDAFLKADETLHQGVKGISELITKRGYINLDFADIESVMKDAGAAILGIGVGKGEHRAREAAKKAMESKLIEHPVENASSIVFNITAPSNIRMEEVHEAAMIIRQNSSEDADVKFGLIFDDEVPDDEIRVIFIATRFPDEDKILFPEGDIPAIYRYGLEGLL

SEQ ID NO: 24027 - protein, 346 aa, Kineococcus radiotolerans SRS30216
MSDVTTNEIRNVIVVGSGPSGYTAALYAARAELRPLVFEGSVTAGGALMNTTEVENFPGFPEGILGPDLMDNMRQQAERFGAELITDDVVDVRLEGDVKEVVTGGGETYRAHAVILALGSAYRQLGLPDEKRLSGRGVSWCATCDGFFFREQDIVVVGGGDSAVEEATFLTRFARTVTIVHRRDELRASRIMRKRAEDNPKIRFAWNSEVTGILGGDKVEGLTLRDTVTGETREIPATGLFIAIGHEPRTDLVKGQVDLDENGFVLVEGRSTRTNVPGVFAAGDVVDHEYMQAITAAGMGCSAALDAEKYLAARGDAGLDAQPAREETETPDVPDSETTDRPQPRA

SEQ ID NO: 24028 - protein, 306 aa, Mesorhizobium loti MAFF303099
MSLPDDSRYLKGGPVAQRIIAAVREDAAIAKAEGFPPKLISITVGDTDAVDVYVRNQRAKAQLAGIDFEERRFPATITSGELEAAIHGLNADPRVTGIIIQRPVPAHISVKTLQAAVHPLKDVEGMHPASIGNIVYNQLDLAPCTAAASVELLKETGLDLKGLEVVVVGHSEIVGKPIAFLLMSEGATVTVCHHLTRSVAAHARRADALFVAVGKPRLIKADMVKPGAAVIDIGINSEIGPDGTSRIVGDVDTDSVKDVASWITPVPGGVGPITVAILLRNTMVALSRQRALYEATYGTADRLAAE

SEQ ID NO: 24029 - protein, 469 aa, Vibrio cholerae O1 biovar eltor str. N16961
MRLVWFRRDLRSFDNTALTAALNSGDPVAAMYIATPEQWHQHHLAPIQADLIWRRLAELQQELAALNVPLFYQQVADFQAAAVAVSQLAKTLNATQVLANRDYELDEQQRDQLAQQLLSEQGIIWSAFDDKCVLPPGSVRTKQGEFFKVFTPFKRAWLTLFQPPVIGKNRPVALWNVPSALAELVWHPEQAFDYPRIDSTPWAADFETVRAQLRDFCRERVQDYHQARDFPAREGTSSLSPYLAIGVLSARQCVARLYHESSMGELSEGAQVWLSELIWREFYQHLVAIEPNLSKSRDFVEWGARLEWWNDNEKFQLWCEGKTGYPIVDAAMRQLNQTGWMHNRLRMIVASFLTKDLHIDWRWGERYFMSRLIDGDYAANNGGWQWCASTGCDGQPYFRIFNPVSQGEKFDPNGDFIRRWVPELRSVSSAYIHQPWTYPAVNSVLYPARLVDHKQEREVTLRLYKTAKG

SEQ ID NO: 24030 - protein, 158 aa, Aegilops tauschii
EGEAFINEVATIGLIHHANIVQLLGFCSEGMRRALIYEFMPNESLEKYIFSGDSNIFQNLLVPEKLLDIALGIARGMEYLHQGCNQRILHFDIKPHNILLDYNFNPKISDFGLAKLCAGDQSIVTLTAARGTMGYIAPELYSRNFGGISYKSDVYSFG

SEQ ID NO: 24031 - protein, 754 aa, Lycopersicon esculentum
MGSLLRMNRLLSSIVESCNCIIDPQLPADDLLMKYQYISDFFIALAYFSIPVELIYFVKKSAVFPYRWVLVQFGAFIVLCGATHLINLWTFNMHTRNVAIVMTTAKALTALVSCITALMLVHIIPDLLSVKTRELFLKKKAAQLDREMGIIRTQEETGRHVRMLTHEIRSTLDRHTILKTTLVELGRTLALEECALWMPTRTGLELQLSYTLRHQNPVGLTVPIQLPVINQVFGTNHVVKISPNSPVARLRPAGKYMPGEVVAVRVPLLHLSNFQINDWPELSTKRYALMVLMLPSDSARQWHVHELELVEVVADQVAVALSHAAILEESMRARDLLMEQNVALDLARREAEMAVRARNDFLAVMNHEMRTPMHAIIALSSLLQETDLTPEQRLMVETILKSSNLLATLINDVLDLSRLEDGSLQLDIGTFNLHALFREVHSLIKPIASVKKLFVTLSLSSDLPEYVIGDEKRLMQILLNVVGNAVKFSKEGNVSISAFVAKSDSLRDPRAPEFFAVPSENHFYLRVQIKDTGIGITPQDIPNLFSKFTQSQALATTNSGGTGLGLAICKRFVNLMEGHIWIESEGLGKGSTAIFIIKLGIPGRANESKLPFVTKLPANHTQMSFQGLKVLVMDENGVSRMVTKGLLTHLGCDVTTVGSRDECLRVVTHEHKVVIMDVSMQGIDCYEVAVVIHERFGKRHGRPLIVALTGNTDRVTKENCMRVGMDGVILKPVSVYKMRSVLSELLEHGVVLES

SEQ ID NO: 24032 - protein, 492 aa, Oryza sativa (japonica cultivar-group)
MVLSKAVSESDMSVHSTFASRYVRASLPRYRMPENSIPKEAAYQIINDELMLDGNPRLNLASFVTTWMEPECDKLIMAAINKNYVDMDEYPVTTELQNRCVNMIAHLFHAPLGEDETAVGVGTVGSSEAIMLAGLAFKRRWQNKRKAEGKPFDKPNIITGANVQVCWEKFARYFEVELKEVKLRDGYYVMDPEKAVDMVNENTICVAAILGSTLNGEFEDVKLLNDLLDKKNKETGWETPIHVDAASGGFIAPFLYPELEWDFRLPWVKSINVSGHKYGLVYAGIGWCIWRNKEDLPEELIFHINYLGTDQPTFTLNFSKGSSQVIAQYYQLIRHGFEGYRNIMENCHENAMVLKEGLVKTGRFDIVSKDEGVPLVAFSLKDRSRHDEFEISDMLRRFGWIVPAYTMPPDAQHVTVLRVVIREEFSRTLAERLVLDIEKVMYQLDALPSRLMPPVPPAPLLVVAKKSELETQRSVTEAWKKFVLAKRTNGVC

SEQ ID NO: 24033 - protein, 484 aa, Haloarcula marismortui ATCC 43049
MSGEQELGITESKEHSPGEWYAEVVQKAGLADYAPMGGFIVTRPRGYAIWERIQNNLDGWFKDTGVQNAYFPLFIPESYLEKEKDVVEGFDPEVAWVTHGGHNELEERLAVRPTSESIIAPFMAQWTRSHRDLPMRLNQWCSVVRWEATETKPFFRTKEFLWQEGHTAHADEDGAWEETMTRLDQYARLYEEVMAMPPLKGRKPPHDKFPGAHTTTTIETLMPDGKTVQAATSHYLGTSFGEAFDITYADADEEENTAHTTSWGLSWRAMGALIMTHSDDQGLVLPPALAPDQVVVVPIWQEDNKDEVIDYAADLAAELDEADVRVELDDREHRNPGFKYNEHELHGVPLRVEIGPHEVEDGEATLVHRPDGETETVDRDGIADTVTDHLDTVHAKLYASAEETLEGEIREAESREEILGTIGQHGGYVKCGWCGDEDCEEPIKDAIAAEIVMVPLDRDEEPIHEDCAICGEDAEETAYFAKSY

SEQ ID NO: 24034 - protein, 98 aa, Synechococcus sp. RS9917
MTGCDAGVVPIRVTSPCPESVVIALGARQWPIWGCEVSSFPWHYDQHETCLVIEGEVTVTPDDGEPVHFGAGDLVDFPKGLRCTWTVHKPVRKHYRFT

SEQ ID NO: 24035 - protein, 736 aa, Lycopersicon esculentum
MDCNCFDPLLPADELLMKYQYISDFFIAVAYFSIPIELVYFVQKSAVFPYRWVLVQFGAFIVLCGATHLINLWTSTPHTRTVAMVMTTAKFSTAAVSCATAVMLVHIIPDLLSVKTRELFLKNKAAELDREMGLIRTQEETGRYVRMLTHEIRSTLDRHTILKTTLVELGRALQLEECALWMPTRTGVELQLSYTLHHQNPVGFTVPIQLPVINQVFSANCAVKISPNSAVARLRPTRKYIPGEVVAVRVPLLHLSNFQTNDWPELSPKSYALMVLMLPSNSARQWHVHELELVDVVADQVAVALSHAAILEESMRARDLLIEQNVALDLARREAETAVRARNDFLGVMNHEMRTPMHAVVALSSLLQESELIPEQRLMVETILKSSNLLATLINDVLDLSRLEDGSLQLDVGTFNLHALFREVLNLIKPVAAVKKLFVTLSLSSDFPEVAIGDEKRLMQILLNVVGNAVKFSKEGSVSVSAVNAKSESLIDPRAPEFFPVQSENHFYLRVQVKDTGSGINPQDFPKLFCKFAQNQEPATKNSAGTGLGLAICKRFVNLMEGHIWIESEGVGKGSTAIFIVKLGIPGRLNESKLPFTAGLPANHMQMTFQGLKVLVMDDNGFSRMVTKSLLVHLGCDVTTIGSGDECLRILTREHKVLIMDASITGMNCYDVAVSVHEKFGKRLERPLIVALTGNTDQVTKENCLRVGMDGVILKPVSIDKMRSVLSGLLEHGTVL

SEQ ID NO: 24036 - protein, 202 aa, Oryza sativa
MAAATMALSSSFAVAAAAAGGAPWRGVVSAGRAAPRRRVALVVRAQSEPEVEPTKEETATSSSSPSPATTPTPSPAAAAPKAKPAASTKLWDVLAFSGPAPERINGRLAMVGFVSALAVEASRGGGLLDQAGSGGGLAWFAATAAVLSAASLVPLLRGETAEARSGGVMSADAELWNGRFAMLGLVALAFTEFLTGSPLVNV

SEQ ID NO: 24037 - protein, 378 aa, Dunaliella salina
MAFALRTGVAPSVLPRGQSRRQMVCRAGKFDEELMKTARTIASPGRGILAMDESNATVGKRLDSIGLENSEANRQAYREMLVSTKGLGQYISGAILFEETLYQSGSNGKRMTDMLVENGIVPGIKVDKGLAPLANSNNEQWAMGLDGLDKRCAEYHKAGARFAKWRSVVSIPNGPSPIAVRETAYGLARYAAICQNNGLVPIVEPEILLDGDHDINRCLAVFEDVWAETFKYLADNKVLFEGILLKPSMVTPGAESPARATPQQVAEMTLIGLKRRVPPAVPGIMFLSGGQSELEATLNLQEMNRQPNPWHVSFSYARALQNTVLKTWQGKPENVPKAQEALLKRAKANSDAQRGQYDPATEGSTEAAQSMYQEGYSY

SEQ ID NO: 24038 - protein, 108 aa, Kineococcus radiotolerans SRS30216
MSSTAPVTDDTFDAEVLQSDKPVLVDFWAPWCGPCRQVAPILEEIAAEHGDKITVVKVNTDENPRIAAKYGVTSIPTLNVYSGGEVVKTVIGARPKPVLLKELGDFIG

SEQ ID NO: 24039 - protein, 355 aa, Burkholderia xenovorans LB400
MKIAVLPGDGIGPEIVKEAVKVLNVLGEKFELEEAPVGGAGYEAKGHPLPDSTLALAKEADAILFGAVGDWKYDSLERALRPEQAILGLRKHLQLFANFRPAICYPQLTGASSLKEEIVSGLDILIVRELNGDIYFGSPRGVREAPDGLFAGSKEGFDTMRYSEPEVRRIAHVAFQAAQKRGKKLTSVDKANVLETSQFWKDVMIDVSKEYADVELSHMYVDNAAMQLVKAPKSFDVIVTGNMFGDILSDEAAMLTGSIGMLPSASLDKNNKGLYEPSHGSAPDIAGKGVANPLATILSAAMMLRYSLNKAEQADRIENAVKKVLEQGYRTGDIVTPGCKQVGTVAMGDAVVAAL

SEQ ID NO: 24040 - protein, 194 aa, Brassica napus
RYISNIPLLLLQFHKREQWQWEIYLLLLPPPELHVLAVDDSFVDRKVIERLLRISACKVTTVESGTRALQYLGLDGDKGSSGLKDLKVNLIVTDYSMPGLTGYELLKKIKESSAFREIPVVIMSSENIQPRIEQCMTEGAEDFLLKPVKLADVKRLKELIMRGGEAEQEKTSNLIISSPKRILQNNTDSSSSAH

SEQ ID NO: 24041 - protein, 260 aa, Desulfitobacterium hafniense Y51
MTYSNILVDYQEQIALVTIDRPKALNALNTLTLQELSQVVEDLANNSSVRVVILTGSGEKAFVAGADIAEMNMKTPLEARTFSQLGQKLMNQIESLPQPVIAAINGFALGGGLELAMACDIRLASEKARFGQPEVNLGIPAGFGGTQRLPRLVGSGRASEILLTAELFDAQEAFRMGLVNRVYPKEELQEQALAMARKIAAKAPVAIQLTKSAIYKGANMDLISGQDYEAEVFALAFHTEDRKAGFKAFLEKSQTEFQGR

SEQ ID NO: 24042 - protein, 578 aa, Schizosaccharomyces pombe
MSSESRENEVKAETKDEIANDGSPQLNGDNNIQSSDGHNDENEESLSRKRDSSGATVGDLKQEEKESMPKKEPEPTVKKIRGSGMPPPQQKYCLAIVRQLKRTKNSAPFKVPVDPIKQNIPDYPTIVKNPMDLGTIEKKLTSYEYSVPQEFIDDMNLMFSNCFLYNGTESPVGSMGKALQEVFERQLKQLPDAEQPAAAPVKKSKQKSASTAPPRTRRNSSVSSTSASVAASTAPKAASPAVLPEGKPRRRKNNSQMRFCSTVLKELYKRQYESFAFPFYQPVDPVACDCPDYFDVIKEPMDLSTIQSKLNKNEYSTLEEFESDILLMFNNCFTYNPPGTPVHVMGRQLENVFKEKWEARPKFDDATLVKQQEAETDALFDNGEEEEALMSEEEINGAKFAAVDKQISMLQDTLEAMKAKKMNRMRKPRRRDLTKEYGPITYAMQNELAERCNYLSAEQLSNVAEILREEMPWLRDTDEIEIDVGNMKPEVFHRIYRYVCKPDADSSEPASPVLMPTKPEKKKGRVLSETEQAEKIRRLQQQLDRFAGKTSPTSPESNNAANVSDSESDNESESSESA

SEQ ID NO: 24043 - protein, 170 aa, Zea mays
MAPTVMMASSATAVAPFQGLKSAASLPVARRSTRSLGNVSNGGRIRCMQVWPAYGNKKFETLSYLPPLSTDDLLKQVDYLLRNGWIPCLEFSKLGFVYRENSTSPCYYDGRYWTMWKLPMFGCTDATQVYKELQEAIAAYPDAFHRVIGFDNVRQTQCVSFIAYKPPGSE

SEQ ID NO: 24044 - protein, 629 aa, Cryptococcus neoformans var. neoformans JEC21
MYPGSSTSALTRAAIARIALRRSTVACRRSVTSRTISADDKNLIPIRTNLRGSALLNTPRLNKGAGFTREERQIFGLEGFLPYDVHSLEKQCLRAYNQLCKQPSVILKHAFLASLRDQNQVLFYRLMQDRLKELLGVLYTPGAAEAVAGYSSLFRRPVGCYISFPNQDGMRAQLEGHLTDVNRTADVAYDSNKPDDAIDLVVVTDAEAILGIGDQGVGGITISTSKAALYTLGAGINPNRILPVVLDCGTDNHALFSDPLYMGWKRTRIRGKNYDQFIDRFITNCRELFPNAIIHFEDFGMANAYRLMEKYKNIPMFNDDIQGTGAVALAALLSAIKVAGSRLSDQRIVIYGAGSAGMGIADQIKDGLMILEGLNKDEAARRFWCVDRNGLLVESMGNGLRHSQMPYARPDAEVEHWNKEDEDRNGIWLMDVIKNVKPTVLIGTSTHSRAFSEELVREMGKHVERPIIFPMSNPTALCEVDPADALAWTENRALVATGSPFPPVQLGNGQEYIVAQTNNALIYPALGLGAILARSKTISNSMLMAGVNSLASLSPALSNSEASLLPDLADVRKVSVDVAAAVVRQAVEDGNAYDENTIKYVKGKGDVSLEEYIRSRMWDAVYRPLELVD

SEQ ID NO: 24045 - protein, 612 aa, Arabidopsis thaliana
MASLSGLYSSSPSLKPAKNHSFKGIAGAISRFLLFPTYLQTHQSTLTLSSARSVARDISHADSKKELLKDPDALWKRYLDWFYQQKELGLYLDISRVGFTDEFVAEMEPRFQAAFKAMEDLEKGSIANPDEGRMVGHYWLRNSKLAPKPTLKTLIENTLDSICAFSDDIISGKIKPPSSPEGRFTQILSVGIGGSALGPQLSLRLGPDNPPLKIRFIDNTDPAGIDHQIAQLGPELASTLVVVISKSGGTPETRNGLLEVQKAFREAGLNFAKQGVAITQENSLLDNTARIEGWLARFPMYDWVGGRTSIMSAVGLLPAHLQGINVREMLTGAALMDEATRTTSIKNNPAALLAMCWYWASNGVGSKDMVVLPYKDSLLLFSRYLQQLVMESLGKEFDLDGNTVNQGLTVYGNKGSTDQHPYIQQLRDGVHNFFATFIEVLRYRPPGHDWELEPGVTCGDYLFGMLQGTRSALYANGRESISVTIQEVTPTSVGAIIALYERAVGLYASIVNINAYHQPGVEAGKKAAAEVLALQKRVLSVLNEATCKDPVEPLTLEEIADRCHAPEEIEMIYKIIAHMSANDRVLIAEGNCGSPRSIKVYLGECNVDDLYA

SEQ ID NO: 24046 - protein, 475 aa, Anabaena variabilis ATCC 29413
MSASSNSSKIKFGTDGWRGIIADDFTFPNVRKVTRAIASYLETAYTKDRPVLIAYDTRFLADQFAQTAAQVLADLGWNVKITDRDCPTPVIAYNARHLNSAGALMFTASHNPAPYCGIKYIPDYAGPATPEITDTIVANIESASDELPSGKPSGSISTFDPKPDYLQFIYTLLDVEKIKSAQLKVKYDALYSTSRGYLDEVLIESGTQLESFHTWRDVLFGGGMPEPKGEQLVELVEAVRRDHADLGLATDGDSDRFGIVDELGNVLTPNTVLLVLARHLIKNKGKTGAIVRTVATTHLLDNFAAKYGLTIYETAVGFKYIGEKMRETAVLIGGEESGGLSIIGHIPEKDGVLADMLIAEAIAYEGKPLSQLVKEAIAEADGPLYNNRLDLHLTEAHKVAVIDSFTKNPPSEVAGIKVKEVGRKDGIKLYLEEGSWVLLRPSGTEPLVRVYLETNSPEKLSKLEQELESTIAKLG

SEQ ID NO: 24047 - protein, 474 aa, Mycobacterium sp. KMS
MGTWVCAARSDGGLATRRRYRCGVRRPRTAEGKSRCAQPLSLVGLFPARKASSVALVVQKYGGSSVSDAERIRRVAERIVETKKAGNDVVVVVSAMGDTTDDLLDLAKQVCPAPPARELDMLLTAGERISNALVAMAIESLGAQARSFTGSQAGVVTTGTHGNAKIIDVTPTRLRSALDEGQIVLVAGFQGVSQDTKDVTTLGRGGSDTTAVAVAAALNADVCEIYTDVDGVYTADPRIVPNARKLDTVSFEEMLEMAACGAKVLMLRCVEYARRYDLPIHVRSSYSDKPGTIVKGSIEDIAMEDAILTGVAHDRSESKVTVVGLPDVPGYAAKVFRAVADADVNIDMVLQNISKIEDGKTDITFTCARDNAPGAVEKLTSLQDEIGFTRVLYDDHIGKVSLIGAGMRSHPGVTATFCEALAEVGVNIDLISTSEIRISVLVKDTELDKAVAALHEAFGLGGDEEAVVYAGTGR

SEQ ID NO: 24048 - protein, 104 aa, Zea mays
LVCCHMQSIKPELIVQVEPIEDPYGPSITDEKLDAIIVSKETLNGGLAVNRKREEKGFPLLKVEVVDLLSGGVEGEKLSSSALRKLEAEQAQQSETKSGSLEAS

SEQ ID NO: 24049 - protein, 899 aa, Photobacterium sp. SKA34
MISQGIKSACPYCGVGCGVVTKQSEIIGDVSHPTNRGALCVKGSSLAASMSQPNRLLYPQIKGEVVEWAQATTQIAETISRVIAESGPEAIGMYLSGQLLTEDYYVANKLMKGFIGSSHVDTNSRLCMSSAVAAHNRAFGEDIVATNYSDLDSTDLIVLVGSNLAWTHPIVFKRIQQAKTQNPSLKIVVIDPRKTVTAEQADLHLALANDTDIHIYNGLIRYFIENNAVDSDFIVQVTEGFDALQQEVMKDKYTLLEVSKSSGIAIEQLATFYQWMKEAPRAVTVFCQGVNQASCGTDKANSIINSHLVSGKIAKQGCGPFSITGQPNAMGGREVGGLANQLAVHRGFDDNSISQVKAFWQAPNIATKAGHKAVDLFKSVESGDIRILWIMATNPMISMPDSEQIRRALEKCEYVIVSDITPESDTAAYADCLLPAAAWGEKSGMVTNSERMMSRQRAFTAMPGEVKADWQIICDVAKQLGFSKAFKYQSEADIFREHAALSGINNSTDLLFDISCLALLSDDDYQTWQPQQWPLNPNGNRVFEQHNNLPLFSTPTRKAQLVVTPSPSENTSSNVMLAQDGPQSIFWLNTGRQRDQWHTMTRTGHVPALAQSEAEPSLYIHPTSAKHVGLVDGDFVCIESLESYQDLNKHLARVVFDSTLSQQQVFMSMHWAGKYGAKSAINQSVIVACDPISGQPSFKSAQVKLTPISMEFYGVSLGDIPAQLDYEYASFQTYKNEHYQQKGIWRYAGKACLDKTALLRSLSESKQQYLLVEQKWGFALVQLAKVINPDVKLNTTALHLFSDQPINVDMTTLINCVNQPFVMTDVLEALGCQHSKQTLVCSCFQITDLMIEQAIVINNITSLSDLTKQLKCGTNCGTCLPQVERHFSESQQLIPTVQL

SEQ ID NO: 24050 - protein, 252 aa, Glycine max
MARLISSNPIALHRFQPCLPISRHFSANPRRRRPTNTRKLQTLACQTNPNLDQKDTPTTDEEKLVVEPSTSTTTSSLPQLPTKNINNKIALVSTLAALGLFLSARLDFGVSLKDLSANAMPYEEALSNGKPTVVEFYADWCEVCRELAPDVYKVEQQFKDRVNFVMLNVDNTKWEQELDEFGVEGIPHFAFLDKEGNEEGNVVGRLPRQYLLENVDALARGEASVPHARVVGQYSSAEARKVHQVADPRSHG

SEQ ID NO: 24051 - protein, 723 aa, Ashbya gossypii ATCC 10895
MTTRTVDVKGSMASMSGSSMLATMVPTVGQRPFKPCANCNCTPGQLWRQGRRTSQFLRRISNSRKASSPAGSRGGSNESIYSSDSLWQTKLVTTTERLLALRKQMAAEELCCYVIPSEDEHNSEYVGPADLRRQFITGFSGSAGVACVSRDMLNFNTDSPEGKAVLNTDGRYFNQARQELDHNWTLLRQGEDSMTWVDWCLNEAYDMSISLGGKPARIGIDPKLIVDSRVLSIKKQIADKTKGTNAVIELVPVEKNLVDAIWAEFEEPPKRELYPLVLLPSVISGESYQTKRQRLMKQLKENYAGHTAFCVTALDEICWFLNIRGSDVEYNPVFYAYFVIHQDSSVLYTDNPLSEEIEKYLADNDVAVKSYAEVWSDLKELDVKLESAKEAILLPSTASWAITSNVSNATYKLVSSPLAAFKAVKNEVEINNARASQVKEAVCLVQFFAWLEEELVQKEKLIDEYKAATKLHEIRKTQKNFVGNSFETISASGSNAAVIHYSPPSEGSAMICPYKIYLCDSGSQFLEGTTDITRTLHFSTPTQEEVDSYTLVLKGNLALERLVFPEGTTGNSIDVIARQFLWEQGLDYRHGTGHGIGSFLNVHEGPIGIGPSVAYAKYPLAKGNIISNEPGFYKDGEFGVRIENDMLVLEAEDLKFGTRKFLKFENITLVPYCRKLINPKLLTPEEIQQLNNYNSRIWSAVASHLQPQSISYKWLKRETAVYR

SEQ ID NO: 24052 - protein, 518 aa, Ustilago maydis 521
MNAALSSVRSRAFEAISQLSAGSRSSLPTSSSRSNDKPRRSLDRPRLFKRHGSNVDHIHTQLFDKAVAPPSRSTVLFVLGCLAWYISSSLSSNTSKALLSKGRNHVDSGLPQVRPPAFPYPVTLTLIHFGFVNVCCAICASRRMLGHRALTRLVPPSLSRVAEVGQLAFFNVVGQALSSLAIARVPVSTVHTIKALSPLFTVLSYTYLFNVSYSSKTYMSLFPLTAGVMMACTGFAFNADDMVGFAAALASTLVFVAQNIYSKKLLRKGERSEGEKMDKINILFYSSGCSIVLMIPMALYYDGSSLLFRPSWNASEAYPYDRRTFVLSWLLCNGLVHFAQNILAFNVLSMVSPVTYSIASLLKRVFVIVLAILWFRQSVTRLQWFGIGLTFYGLWMYNDSKTKDDVDKGDKKVERQQGVGNHAILPLTSASTASTASGASGWTDALHNRPHPFAPSTSAYAFAAQQPSAHAAPARLHQPVYPPAPTKGWNDIPDSTLTSYINDPTKSLPSPPDSDKEV

SEQ ID NO: 24053 - protein, 593 aa, Prunus persica
SVYWPGPGLSVYQNGRTDYNSSRIAVFDEMGNFVSSDDLIFSASDMGARVKRRLTTDYDGNLRLYSLNSTGSWVITWEALAQQCRVHGICGRNGICVYTPELKCSCLPGYEAVDTSNWNKGCKPKFKPTCSQSQRVKFKQIQYVDFYGFDLNYSESTSIQNCTKLCVEDCRCEAFVYRGQKCYTKGALFSGLRSPTIEGSLYLRLPEPLSMETSPAANLTVFNSCRTNAVKIGTSSMYDNPSKTVRWVYLYSFAAAIGAVEFLFILSGWWFFFRRSQGMSAPLVDKYRLISSNFRMYLYAELKKATRNFKEELGRGGSGTVYKGVLADERVIAVKALADIYQAEEVFWAEVSTIEKINHMNLVRTWGFCSEGKHRLLISEYVENGSLDKHLFPPNFLGWKERFKVAIGIAKGLAYLHHECLEWVIHCDVKPENILLDSNFEPKIADFGLAKLFQRGGLNAVSSHIRGTKGYMAPEWALNLSITAKVDVYSYGVVLLEIVKGIRLSNRVVDTAEEEEAEMKRFVRIARRKIQCGEDEWIEDMLDPRLEGQFGRNQAAKMVEVGISCVEEDRNKRPTMDSVVQMLLECEEESNIQ

SEQ ID NO: 24054 - protein, 636 aa, Vibrio cholerae O139
MCGVAGFISKRLSPVDCLTSMVESIMHRGPNDSGLWVDDDFGVCLAHARLSIQDLSSAGHQPMHSKSERYVMIFNGEIYNHLTLREELIEIVPSYWNGHSDTETLLAGFEVWGIEQTIQKCVGMFAIVLWDKVLKQLILIRDRFGEKPLYYGWQRDTFLFASELKALKAHPSFEGSINRQALSHFFRLNYIPTPLSIYEGIFKLEPGVIAVFSHEGQLLSKQTFWDASHAVSLQNFSDHDAVDKLDDLIKQSIQDQALSDVPLGAFLSGGVDSSTVVGILQSLSTRPVKTFTIGFDHADFNEASEASDVAKHLGTDHVELIVSAEDALAIINQLPVMYDEPFADASQVPTFLVSKLAKKEVTVCLSGDGGDELFCGYNRYHYTAKVWSYLEKIPFPIRKMLSVFLLTLSPSSWDVLSKTLGLNTRLPNLGNKTQKGAQALKARDIEDLYTRVVSNWDLDEPLVKNTAVEKLPFLSDLTELSHLNDLEKMMLWDKQSYLMDDVLVKTDRATMACSLEGRVPLLDHRIAEFAASLPIHLKYRGGKGKWLLREVLYRYVPKKLIERPKKGFSLPIAEWLRGPLKDWANVLLDSDRFDKEGFLSSELVQKKWGEHLAGKRDWSSQLWSVLMFQLWLEKNK

SEQ ID NO: 24055 - protein, 567 aa, Vibrio sp. Ex25
MTKILIVGGVAGGASAAARARRLSEDAEIIMFERGPFVSFANCGLPYHIGGDIQERSKLLLQTPESFLARFNVDVRVMNEVVSINRQDKTVTIKNLLDESEYVESYDFLLLSPGAGPIVPPIPGLDNPLTHSLRNIPDMDRIIETIQMNKPEHATVVGGGFIGLEMMEAFHQLGIKTSLIEMADQVMTPVDREMAGFVHAEIRDKGVDLKLGVALESVKFVPNEHVASFDSGESDKHQHLEGELELTLNNGEKLTTDILIMAIGVRPETKLAQEAGLQIGALGGIYTNEYMQTSDPSIYAVGDAIEEKDFVTGEQTLVPLAGPANRQGRMAADNMLGRKETYQGTQGTAICKIFGLAVASTGKNEKQLKCAGIEYDKVYVHTASHASYYPGAEVVSFKMLFDPKSGKILGAQAVGKDGIDKRIDVMAVAQRAGMTVEQLQHLELTYAPPYGSAKDVINQAAFVANNIIKGDAAAIHYDEIDNLTEDQILLDVRNPGELESVGYLEGAINIPVDQLRHRMGELPKDKEIVIYCQVGLRGNVAYRQLVNNGYKARNLIGGYRTLKFSRL

SEQ ID NO: 24056 - protein, 574 aa, Bacillus subtilis subsp. subtilis str. 168
MAHKTAGQAMTELLEQWGVDHVYGIPGDSINEFIEELRHERNQLKFIQTRHEEVAALAAAAEAKLTGKIGVCLSIAGPGAVHLLNGLYDAKADGAPVLAIAGQVSSGEVGRDYFQEIKLEQMFEDVAVFNREVHSAESLPDLLNQAIRTAYSKKGVAVLSVSDDLFAEKIKREPVYTSPVYIEGNLEPKKEQLVTCAQYINNAKKPIILAGQGMKKAKRELLEFADKAAAPIVVTLPAKGVVPDKHPHFLGNLGQIGTKPAYEAMEECDLLIMLGTSFPYRDYLPDDTPAIQLDSDPAKIGKRYPVTAGLVCDSALGLRELTEYIERKEDRRFLNACTEHMQHWWNEIEKDETEATTPLKPQQVVARLQEAAADDAVLSVDVGTVTVWMARHFKMNANQDFIVSSWLATMGCGLPGAIAASLSEPERQAIAVCGDGGFSMVMQDLPTAVKYKLPITVVILNNENLGMIEYEQQVKGNIDYVTKLQNVDYAAFAESCGAKGIKVTKAEELAPAFHEALHSDQPVVVDVMIGNEPPLPGKITYGQAKGFSKYMLKNFFENQKFEMPSLKKSLKRLF

SEQ ID NO: 24057 - protein, 365 aa, Oryza sativa
MASSAAAAAATDRIALVKAFDETRTGVRGLVESGVSAVPDIFRHPDPYASVPLAPPGVSIPVVNLSLPAPLAAEAAAGAARDWGFFYLVNHHALVPSGFTDGLLAAVRAFNELPAAERAAHYGRSVDGGVSYSSNVDLYRSGAASWRDTIQVTFGPSRPDTGRIPAACRAEVVGWDAHATAVARAVMALLCEGLGLRGETLEEASCLEGKLMVCHYYPVCPEPERTMGIVPHTDPGVLTVLAQDGVGGLQVKHTNEDGESYWVDTKPVPGALVINVGDLLQIMSNDKYKSVEHRVVMKSHEEARVSSAIFYNPGKRGDSVFYGPLPDLISSGNPPKYRNFTMSEFLGAFFKRDLASKALIEHFKI

SEQ ID NO: 24058 - protein, 563 aa, Thermoplasma acidophilum
MGEQSSIPSDANISYAENQDKKLRKALSTWDLLMLSVGGIIGSGWLFAAYAASVLSGPASILAWVLGGIIVIFIALVYAELGSMIPRSGAIVRYGHLSHGSFAGFLFGWAYFLSAVSVPAIEAEAVVTYAASYVTKPALIANGIMTGLGTLIAMILMIGFFFLNYAGVHIMGKTNQGLTWVKVIIPVITILVLIFVHFNPSEIIPSNGFMPYGWAPVFAAISSTGIVFSYFGFRQAIDYGGEARNPQRSIPIATIGSVLIGMLIYSLLQVVFVGGIDWSKVGLLPGQWQQLSSLASSSNAATAYPYAYDLMNAPFATVALSAGLVWLTYTLYASAYLAPSGTLNVYMGTSARTLYGMAVNGHLPKTFAKIEERNRIPLIPLITTLLVGFLFFLPFPSWYKMVGFISGATVFTYIVGGAALMNLRKQAPELKRPFRLPAADVFAPIAFILASEAVYWTGWPTTLYLAIGIFAGLVLYGILAALHKIEQSFNSTNVKAGLWVPFFIIVLTVLSYLGEYGGIDVIKFPLDLIVVAIVSALFYFWAIRSGIKTEEIAAMVANEDQYV

SEQ ID NO: 24059 - protein, 593 aa, Pisum sativum
MKSMASPSSQIWVILGLGLAGIYVLTRKLTQAVKEDFGAFLLKLKLLPPPPPAPPKAPHPLSSLNFAISDIFDIEGHVSTFGHPEWARTHEPASSTASAVSALVESGATCIGTTVVDELAYGISGENKHFGTPTNPAVPNRVPGGSSSGAAVAVAANFVDFSLGVDTSGGVRVPAGFCGILGFRPSHGAVSHVGIIPVSTSLDTVGWFAKDPDVLRRVGHILLQAPFVMQRNPRQIIIADDCFQHLNVPLDRTSQVVIKATEKLFGKQVLKHINFEDYISSKVSSLKACSIQKSNGVLKSSSLKLLANVMQSLQRHEFEHTHSEWMSIVKPDLHPAVSAQLHEKFEVSELEIENSKSVRSELRVAVNSLLKDEGVLVIPTVADPPPKLGGKEFLSHDYQSRALSLLSIASISGCCQVTVPLGFFDKNPVSVSLIARHGGDRFLLDTLKTMYTVLQEQADIAAPSKSSKSVVSKEQSAEISKEKGNQAYKDKQWQKAIGFYTEAIKLCGNNATYYSNRAQAYLELGSYLQAEEDCTTAISFDKKNVKAYFRRGTAREMLGYYKEAIDDFKYALVLEPTNKRAASSAERLRKLFQ

SEQ ID NO: 24060 - protein, 293 aa, Coccidioides immitis RS
MAITILPPVVDDEPYASSEENDDFHNADSDIEMDDATSRPSKRPRLSKNTIVTPGEVVTDDPQWMRGHGTFTPAPPGFSSTAQSSLSSTIIATVAGTVLKTNKLLSVYPLRARYNPEIGDLVVGRIVEVQSRRWKVDVAAPLLANLPLSAINLPGGILRKRTTADELQIRSFFNEGDLVVAEVQSVHQDGSASLHTRSLKYGKLRNGIFLAVAGMGGAGVARGTGVVRSRRQLFWVSMDIYGSRNAPMLQRRIVGWECRSHGWKIWFRAQCIRVKMMRSLSRRGGRLRGWRGV

SEQ ID NO: 24061 - protein, 340 aa, Prochlorococcus marinus subsp. marinus str. CCMP1375
MTLRVAINGFGRIGRNFMRCWLSRGENTGLDLVGVNVTSDPKTNAHLLKYDSILGQIKDAEIDYTDDTFVINGKTIKCFSDRNPMNLPWREWGIDLVIESTGVFNTFEGASKHLQVGAKKVILTAPGKGEGVGTFVVGVNADQYRHDDFNVLSNASCTTNCLAPIVKVLDQSFGINKGLMTTIHSYTGDQRILDNSHRDLRRARAAAMNIVPTSTGAAKAVALVYPEMKGKLTGIAMRVPTPNVSAVDLVFESGRSITADSINAALKSASEGSMKGIIKYGDTPLVSSDYAGTNDSTIVDTALTMAIGDNLGKVVAWYDNEWGYSQRVVDLAEVVAKNWK

SEQ ID NO: 24062 - protein, 309 aa, Synechococcus sp. RS9917
MGWSAADIPDQRGRLALVTGANSGLGLETTRALLAHGATVLMACRNRERGETARRSLSDQSASKGGSIELLDLDLADLESVDRCAQTVRQRFGRLDLLINNAGVMAPPRQCSRQGYELQFATNHLSHMALTRALLPLMEGQPDARVVTVTSGAQYFGRIAWEDPNGEQRYDRWQAYGQSKLANVMFALELDRKLRDRGSSIRSLAAHPGLARTNLQPASVSANGSRLEALAYRLMDPLFQSAAMGALPQLHAATAASAQSGEHYGPNRLGGLRGYPKRQRVAPAAEDPQQRERLWDLSLKLIEAGPALR

SEQ ID NO: 24063 - protein, 169 aa, Wolbachia endosymbiont of Tunga penetrans
AGALPEVGRIAAEESIDEIMEHIKDSHMLFITAGMGGGTGTGAAPVIAKAAREIKAAVKEKALREKKILTVGVVTKPFGFEGIRRMRTAELGLEELQKYVDTLIVIPNQNLFRIANEKTTFSDAFKLADNVLHIGIRGVTDLMVMPGLINLDFADIETVMSEMGKAMIG

SEQ ID NO: 24064 - protein, 1075 aa, Magnetococcus sp. MC-1
MSRLVKWLLVLVLLPVVADAQQGERPWPVTVAVLQDFPPLYSLDTHGKPQGLAIDLLQQVAQQAQLKITYKVVQNWGQAMQLVRQGEADFVPGIGITEVRRAEFLFSHPMESVPVSCFVRKQNRSIQGLQDLPGYSVGVIAQSAAHTRLSQIPNMRLKLYQSIDEAFFQLLAGELDAFVTSRPVMEKKARKIAPQEMIKVVGEPLMDLKRGYLLSTQNRALLQRIDPIIQHLTRSARYGEIYARWYGTAAPFWSVEQVFWIMSALLVAVLVVGGLYRVFAIARYNRELQRSIAAQQQAEQRLQRSEERFALAMRGSNDGLWDWDIPTDRVTFSPRWLEMLGYQGAPQDADMRHWQAHIHPDDQPRVEQALGRFLSGDQQHYHSEYRMRHKDGHTIAVLSRAFVLRDATGRAIRMVGTHADITALKEQARRLRESETRFRAYFEQSVVGMVMASLDRHFIDANHAFCHMLGYSRGELLKMNFPQITYPDDLERDLVQFEQLRSGQVSAFEMEKRYLHRDGHPVWGLLSATTVKDELGQASYLIAQVQNIDTQKKALEQLRQSESMMRGYFELGLIGMATTTAQHGWVQINQRLCEILGYPEMALRQKSWAEITHPQDRQADEVAIERLRKGLSEGYALEKRFIRQDGAFIYASISAGCLRKEGGEIGHFLTLVQDITARKRMELALQEQKEQAEAANRAKSTFLAVMSHEIRTPMNAILGMAELLRESDLTSRQHWCVETLNRSGESLLSLINDILDLSKIEAERLTLEHVVFDLVQLVGDVCSLFGYEAQSKGLALKHHIAPTLPRYVVGDPIRLRQIMMNLVGNAVKFTKQGHVSVELNPLADGRLSFVIRDTGIGVSVEQQRNIFKPFTQADSSITREHGGTGLGLTICMRLVALMGGEMQLESTLGEGSCFHFELELPAAPPGAESVVGTPRTLADVASALRLESAAHHNDPILVVDDAEDNRMLVNVFLKKTRYTLVMAENGLEAVNAFKQQPFALVLMDIQMPLMDGYEATRQIRQWEQQKGSGRTPIIALTAHALSEESQQILEAGCDIHLTKPIRKSKLLEVLAEVLA

SEQ ID NO: 24065 - protein, 145 aa, Glycine max
  misc_feature (104)..(104): Xaa can be any naturally occurring amino acid
MVAFTEKQDALVSSSFEAFKANIPQYSVVFYTSILEKAPAAKDLFSFLANGVDPTNPKLTGHAEKLFALVRDSAGQLKASGTVVADAALGSVHAQKAVTDPQFXVVVKEALLKTIKAAVGDKWSDELSRAWEVAYDELAAAIKKA

SEQ ID NO: 24066 - protein, 499 aa, Escherichia coli
MTEPHVAVLSQVQQFLDRQHGLYIDGRPGPAQSEKRLAIFDPATGQEIASTADANEADVDNAVMSAWRAFVSRRWAGRLPAERERILLRFADLVEQHSEELAQLETLEQGKSIAISRAFEVGCTLNWMRYTAGLTTKIAGKTLDLSIPLPQGARYQAWTRKEPVGVVAGIVPWNFPLMIGMWKVMPALAAGCSIVIKPSETTPLTMLRVAELASEAGIPDGVFNVVTGSGAVCGAALTSHPHVAKISFTGSTATGKGIARTAADRLTRVTLELGGKNPAIVLKDADPQWVIEGLMTGSFLNQGQVCAASSRIYIEAPLFDTLVSGFEQAVKSLQVGPGMSPVAQINPLVSRAHCDKVCSFLDDAQAQQAELIRGSNGPAGEGYYVAPTLVVNPDAKLRLTREEVFGPVVNLVRVADGEEALQLANDTEYGLTASVWTQNLSQALEYSDRLQAGTVWVNSHTLIDANLPFGGMKQSGTGRDFGPDWLDGWCETKSVCVRY

SEQ ID NO: 24067 - protein, 115 aa, Triticum aestivum
MARAAATQLVLVALVAAMLLVATDAAISCGQVSSALSPCISYARGNGANPTAACCSGVRSLAGAARSTADKQAACKCIKSAAGGLNAGKAAGIPSKCGVSVPYAISASVDCSKIR

SEQ ID NO: 24068 - protein, 191 aa, Aspergillus oryzae
MASATTFFDFEPVDKKGSPFPLTPLKGKTILVVNTASKCGFTPQFEGLEKLYQKLKSKYPEDFTILGFPCNQFGGQDPGSNDQIQDFCQLNYGVTFPVLGKLDVNGNEASPLWTWMKEQQPGLLGLKRVKWNFEKFLISPDGKVVGRWASTTKPESLEDTIVKEIEKAQKAGTAASVQAKEGESAEQAKLS

SEQ ID NO: 24069 - protein, 267 aa, Zea mays
MVQDARQMPELLHRAIRTAIGQRGVAVLVIPGDVALQPAPETRAVAFAPPATPRLVPQPQDLASIAALLDQSRAVTLLCGSGTAGAHDEVVALAEALQAPIVHAYRGKEWIEYDNPYDVGMTGLIGFSSGYHAMMECDTLLMLGTDFPYRNFYPDKAKVVQVDRDPSALGRRVPLDMAVVADVKEVASGLLPLIRAGRDGAFLDKARAHYRDARKGLDDLATPRTGEKPLHPQYVATLIDRIAAEDAVFTADVGTPAVWGARYLTMN

SEQ ID NO: 24070 - protein, 110 aa, Triticum aestivum
  misc_feature (76)..(76): Xaa can be any naturally occurring amino acid
MDSQFGALERGGSRQRRGPALARPNTAKRHMQQQRANAADKKVVIPNYFGIEAFFVLACLTVSLLILPLVLPPLPXPPSLLLFVPVCLLILLMVLAFMPNDVRSMATSYL

SEQ ID NO: 24071 - protein, 288 aa, Shigella flexneri 2a str. 301
MAAKIIDGKTIAQQVRSEVAQKVQARIAAGLRAPGLAVVLVGSNPASQIYVASKRKACEEVGFVSRSYDLPETTSEAELLELIDALNADNTIDGILVQLPLPAGIDNVKVLERIHPDKDVDGFHPYNVGRLCQRAPRLRPCTPRGIVTLLERYNIDTFGLNAVVIGASNIVGRPMSMELLLAGCTTTVTHRFTKNLRHHVENADLLIVAVGKPGFIPGDWIKEGAIVIDVGINRLENGKVVGDVVFEDAAKRASYITPVPGGVGPMTVATLIENTLQACVEYHDPQGE

SEQ ID NO: 24072 - protein, 350 aa, Methylocella silvestris
MFKVRAITEDQHDLTFECSPSEDVISAGLKRDVILLASCREGGCATCKAEIVDGDYELGGCSVQALPPDEEEAGVVLLCRTFPRSDLVLQLPYTFDRISFHKVNTDWQGEIVAVERISSNVARLQIEPKDPETGAAISIPFVPGQYVDIEIPGSSVSRSYSMATTSTQSRLDFLIRLLPDGQFSNFLTMAAKPGLTVKLRGPFGAFNLRENGFRPRYFVAGGTGLSPVLSMIRYMQQEQHPQEAKLFFGVTHQHELFYLEELKKLEESMPNFSAHVAVMQPDGNWQGSRGTVVDDLLKHLEGTKAAPDIYMCGPPGMIDATFAAAANYGVPKDHVYVEKFLATGQNQAAE

SEQ ID NO: 24073 - protein, 533 aa, Oryza sativa
MATCAADLAPLLGPVAANATDYLCNRFADTTSAVDATYLLFSAYLVFAMQLGFAMLCAGSVRAKNTMNIMLTNVLDAAAGALFYYLFGFASLRDCLRTPSNGFIGKQFFGLKHMPARPGSDYDFFLFQWAFAIAAAGITSGSIAERTQFVAYLIYSAFLTGFVYPVVSHWIWSADGWASASRTSGPLLFGSGVIDFAGSGVVHMVGGVAGLWGALIEGPRIGRFDHAGRSVALKGHSASLVVLGTFLLWFGWYGFNPGSFTTILKTYGPAGGINGQWSGVGRTAVTTTLAGSVAALTTLFGKRLQTGHWNVVDVCNGLLGGFAAITAGCGVVDPWAAIICGFVSAWVLIGLNLAARLKFDDPLEAAQLHGGCGAWGILFTALFARQKYVERSTAPAAYGLFMGRRKLLVGAVIQILVIFGWVSCTMGPLFYGLKKLGLLRISGRDETSGMDLTRHGGFAYVYHDEDEHDKSGVGGFMLRSAQTRVEPAAAGCLQQQQPSVTNPEASTSQRRKKSRVSLPLRSRSSRHKFDPHI

SEQ ID NO: 24074 - protein, 127 aa, Zea mays
MAASMITSPIVAPTSVPSLSRRGSSFAVVCSGGKKIKVDKPLGLGGGLTVDIDANGRKVGKKGVYQFVDKYGANVDGYSPIYTPEEWSESGDRYAGGTTGLLIWAVTLAGLLGGGVLLVYNTSALAG

SEQ ID NO: 24075 - protein, 404 aa, Listeria monocytogenes str. 1/2a F6854
MGLVVLKFGGTSVSTVDKIGKTADQAIYEKKQGNKVIVVVSAMGKSTDKLVAMAEEISEAPDKREMDMLLSTGEQITIALLAMTLKEKGHDAISYTGWQAGIETEAVHSNARIADIDSACIESALDAGQIVVVAGFQGFTTDGEITTLGRGGSDTTAVAIASALNAEKCAICTDVVGVFTTDPRYVKKAQKLEQITYDEMLELANLGAGVLHPRSVEYAKNFRIPLEVRASHEQVPGTMIEEDLTMENTKVVRGIAFEDQITRVTIHWKQKEAMRVSKVFTKLAENNIDVDIIIQGITGLGHGNLSFTIKTSALLATLAVLEESKELLQIEKLESEQELAKVSIVGSGMVSNPGVAAQMFEALTENNIPIKMISTSEIKVSTVVPARKMVEAAQVLHDQFELDK

SEQ ID NO: 24076 - protein, 335 aa, Ralstonia metallidurans CH34
MTIRIGINGFGRIGRMVFRAAVQDFKNDIEVVAINDLLEPDYLAYMLRYDSVHGRFKGEVVVDGGTLVVNGRKIRLTAVKDPAALAWGDVGVDVVVESTGLFLTHDTCQKHLDAGARKVIQSAPSKDDTPMFVYGVNHTQYAGEKIVSNASCTTNCLAPVAKVLNDSFGIKRGMMTTVHAATATQKTVDGPSNKDWRGGRGILENIIPSSTGAAKAMGRVIPALNNKLTGMALRVPTSDVSVVDLTVELAQETSYEKICAAMKAASQGAMKGVLGYTQDKVVSTDFRGEACTAVFDAEAGIMLDSTFVKVVAWYDNEWGYSSKVLEMVRVMGASR

SEQ ID NO: 24077 - protein, 291 aa, Pseudomonas putida KT2440
MTAQLIDGKALAAQVRQEVEEGVAAFIADGWAAPGLAVVLVGCDAASQVYVENKIRQTEAVGMRSERFLLPADTDESQLLTLIEQLNNNDAIHGILVQFPLPPQIDVSRVISAIHPSKDVDGFNPLNVGRLAAGLEGGLTPCTPLGVMRLIRSVHPDIAGMGALVVGASNVVGRPLARLLLQADCTVSIAHIRTTDLARRCREADILVVATGVPGLIRGDYIKPGATVIDVGISRVRLPNGRDKLTGDVAFEEAVEVAGAITPVPGGVGPMTIAYLLANTLQAARAAVRLR

SEQ ID NO: 24078 - protein, 526 aa, Thermoplasma acidophilum
MNSAELQIHTDTERVEEKYIREDRKLRKDLGIVDLFLIGITGVIGSGWLFAPLYAARVAGPASIISWAIGGVLVLLVGLTFSHLMGFRTEAGGMVRYPIYTHGKLAGSITGWALWLAYTMNPPSEASALVEYMSSYVPGVFHSGTLTPEGMGIALGFMFLFVLVNYYGVKIFARIINGLTALKLVVPTVTMLTLILLSFRFRNFTVSGFYPYGLSSVLAAIVSAGIVYSYLGFQAVINLAGESKRPARDGPTALILVIIFSLVFYIALEITFIGSVPSSFLRHGWSGLFLASPFADIALYFNLTWLYSLIIADSIYSPSGSSMAAVASNSRATYALAKDGFFPSFFVRIDGKTGIPRIALIFNFVISAIVLLTLKSWHSIIEALGVLLLISFIGPAASSGVIRRTSPENQILKGLYGVVQPAIFVMAGIIIFITPFTKIDIVIALFSIPAVLLILKEKNFRNVDLGYGIWLPVYLIIILSFSFLHTYYESLNILVPITAFVFLSLFVYIIAVRAGISFMKSGKQKE

SEQ ID NO: 24079 - protein, 611 aa, Arabidopsis thaliana
MIERQSVNRRNKDMVKIHTPVVRKVSPPYKVSHFSVALSNKCSKYLFTENLFSHVMDYLSSMGSQTARFCHNYTVLYIDNNNNSVTLGLSRQDFSGPFCSASFSSTLLSSGLFQNLPSYKSLTVFYACDPRRHFLGNFTCPVKGLGSIIQNSTYGILCDGSFSVPVPTSFVSEEEVLDLTHLESVLRKGFEVKLNIDEIPCPLECFSSRANCLFLAGSCCKYHDRTTTCGGDTGDLLREIIPNTRSILITIGQVVGFHVFIIVVMIIAFLFWRRKKVNDLRKQNLEALVTSRRYSYRQIKKITKSFTEVVGRGGFGTVYKGNLRDGRKVAVKILKDSNGNCEDFINEVASISQTSHVNIVSLLGFCFEKSKRAIVYEFLENGSLDQSSNLDVSTLYGIALGVARGIEYLHFGCKKRIVHFDIKPQNVLLDENLKPKVADFGLAKLCEKQESILSLLDTRGTIGYIAPELFSRVYGNVSHKSDVYSYGMLVLEMTGARNKERVQNADSNNSSAYFPDWIFKDLENGDYVKLLADGLTREEEDIAKKMILVGLWCIQFRPSDRPSMNKVVGMMEGNLDSLDPPPKPLLHMPMQNNNAESSQPSEEDSSIYSEV

SEQ ID NO: 24080 - protein, 582 aa, Populus tremula x Populus tremuloides
  misc_feature (567)..(567): Xaa can be any naturally occurring amino acid
MVLFNVSRVETTPFGDQKPGTSGLRKKVKVFKQPNYLQNFVQSTFNALTPQNVRGATLVVSGDGRYFSKDAIQIITKMAAGNGLRRVWVGQNGLLSTPAVSAVIRERVGVDGSKATGAFILTASHNPGGPNEDFGIKYNMENGGPAPEGITDKIYENTKTIKEYLTADLPDVDITTIGVTSFSGSEGQFDVEVFDSASDYIKLMKSIFDFESIRKLLSSPKFTFCYDALHGVAGAYAKRIFVEELGAQESSLLNCVPKEDFGGGHPDPNLTYAKELVARMGLGKSNSEVEPPEFGAAADGDADRNMVLGKRFFVTPSDSVAIIAANAVEAIPYFSAGLKGVARSMPTSAALDVVAKSLNLKFFEVPTGWKFFGNLMDAGLCSVCGEESFGTGSDHIREKDGIWAVLAWLSILAYKNRENLGGGKLVTVEDIVHNHWATYGRHYYTRYDYENVDAGAAKELMACLVKLQSSLTEVNEIVSGIQSDVSKVVHADEFEYKDPVDGSISKHQGIRYLFEDGSRLVFRLSGTGSEGATIRLYIEQYEKDPSKTGRDSQDALAPLVAVALGLXKMQEFTGRSAPTVIT

SEQ ID NO: 24081 - protein, 471 aa, Gloeobacter violaceus PCC 7421
MADLQKEGGLDGGLKRTLGPINLISLGVGAIIGAGIFVITGQAAAQYAGPAITISFILAAFACAFAGLCYAEFAALLPISGSAYTYAYATLGELVAWIIGWDLIIEYALSAATVAVGWSGYVVSFLRDFGIVMPPQFTASFGQPVTLADGTTAAGLLNVPAVLIILALSLLLVVGVSESASVNGIIVVVKVAVIVAFLVFGASYIDTANWTPFIPEPVEPGRYGYFGILRAAGVIFFAYIGFDAVSTAAQEAKNPQRDMPIGILGSLVVCTVLYILVALVLTGIVDYRQLGVPDPIAVGVDAIGLGWLTFIVKIGAIAGLTSVMLVTLYGQTRIFYTMSRDGLLPPLFSAIHPRFKTPYLSTMLLGLFVSVVAGLVPLGILGELVSIGTLFAFIVVSAGVLFLRYRQPDLPRPFRCPLVPWVPLASIVACLALMSGLPADTWLRLFAWLGLGLLVYFVYGRVHSKLQSRRA

SEQ ID NO: 24082 - protein, 344 aa, Wolbachia sp. wJapo
QALEKSLCDKKIQLGINLTKGLGAGALPDVGKGAAEESIDEIMEHIKDSHMLFITAGMGGGTGTGAAPVIAKAAREARAVVKDKGAKEKKILTVGVVTKPFGFEGVRRMRIAELGLEELQKYVDTLIVIPNQNLFRIANEKTTFADAFQLADNVLHIGIRGVTDLMIMPGLINLDFADIETVMSEMGKAMIGTGEAEGEDRAISAAEAAISNPLLDNVSMKGAQGILINITGGGDMTLFEVDAAANRVREEVDENANIIFGATFDQAMEGRVRVSILATGIDSCNDNSSVNQNKIPAEEKNFKWPYNQVPISETKEYASTEQTNERVKWGSNVYDIPAYLRRKK

SEQ ID NO: 24083 - protein, 374 aa, Magnetospirillum magnetotacticum MS-1
MLATPRREVNVAVPLRRDDGRTVLFHGYRVQHNVSRGPGKGGLRYAPSVDIDEVRALAMWMTWKCALVDLPYGGAKGGVAIDPRSYSDAELERVTRRYTSEIMPVIGPERDIMAPDMGTSERTMAWVMDTYSVNQGYTIPAVVTGKPITVGGSLGRTTATSAGVVHVTAAALEEAGVPLSDVRVAVQGFGKVGSHAAAIFAARGARVVAVSDQYGGVHAPDGLDVRALVEHVAATGSVVGFDRADPVDNDALLALDVDVLVPAAVEGVLDGDTARTVRARWVVEGANGPTTAEGDRVLAKNGVTVVPDVLANAGGVVVSYFEWVQANQAYWWTADEIGDKLEHRMLHAYEEVAVSRAARTSACATRRSSSASRT

SEQ ID NO: 24084 - protein, 598 aa, Rhodobacter sphaeroides 2.4.1
MFQTFHATSSPAQGPARLAALRQALTAEGLAGFLVPRSDAHQGEYVAARDDRLQWLTGFTGSAGFCLVLPEVAGVFIDGRYRVQVKHQVDLAHFTPVAWPEIQPGDWLREKLSQGVIGFDPWLHTADEIARLETALAGSGITLRPVENPLDRLWADQPDPPMGRAFVHPDALAGETGEAKRQRLAQTLAAAGRRAVVLSLPDSICWLLNIRGSDVPRNPVLHAFAVLHDDARVTLFAEAAKFDEATRAHLGAGVTLRPPQAFVPALRTLTGPVQVDRKTAPLAVLLELQDAGVEAVDGDDPCRLPKACKTAAEIAGMRDAHLRDGAAMVEFLTWLDAEAPKGGLTEIDVVTALEGFRRATNALHDISFDTICGAGPNGAIMHYRVTDGSNRPVQRDELLLVDSGAQYADGTTDITRTVAVGDPGQEARECYTRVLQGLIAISRARWPKGLAGRDLDALARYPLWLAGQDYDHGTGHGVGAFLSVHEGPQRIARISEVPLEPGMILSNEPGYYREGAFGIRLENLIVVEEAPALGDNRRQLAFETLTFVPFDRRLILPQLLSSAERDWIDAYHRDVLEKIGSRLSPAAWDWLEAAAAPL

SEQ ID NO: 24085 - protein, 388 aa, Ajellomyces capsulatus
MFSLRTAQPAQSLFRAATNTYSTSLPRSAIAARSFATVQSDIFKPTKYGGKYTVTLIPGDGIGTEVAESVKTIFKADNVPIEWEQVDVSGLDAGNKHSEDLFKESIASLKRNKLGLKGILHTPVERSGHQSFNVALRQELDIYASIVLIKNIPGYKTRHDNVDLCIIRENTEGEYSGLEHQSVSGVVESLKIITRAKSERIAKFAFSFALANNRKKVTCIHKANIMKLADGLFRSTFHKVAESYPTLETNDMIVDNASMQAVARPQQFDVMVMPNLYGGILSNVGAALVGGPGIVPGCNMGRDVAVFEPGCRHVGLDIKGKDQANPTALILSGSMLLRHLGLDEHANRISKAVYDVIGEGVTRTRDMGGQASTHEFTRAVLDKMESAL

SEQ ID NO: 24086 - protein, 854 aa, Brassica oleracea
MKRVKNIYHHNTFSFLLVFLVLILFHPALSIYVNTMSSSESLTISSNRTLVSPGGVFELGFFKPLGRSRWYLGIWYKKVPWKTYAWVANRDNPLSSSIGTLKISGNNLVLLGQSNNTVWSTNLTRGNARSQVIAELLPNGNFVMRHSNNKDSSGFLWQSFDFPTDTLLPEMKLGYDLKTRRNRFLTSWKGSDDPSSGNFVYKLDIRRGLPEFILINQFLNQRVETQRSGPWNGMEFSGIPEVQGLNYMVYNYTENSEEIAYSFYMTNQSIYSRLTVSELTLDRLTWIPPSRDWSLFWTLPTDVCDPLYLCGSYSYCDLITSPNCNCIRGFVPKNPQQWDLRDGTQGCVRTTQMSCGRDGFLRLNNMNLPDTKTATVDRTMDVKKCEERCLSDCNCTSFAIADVRNGGLGCVFWTGELVAIRKFAVGGQDLYVRLNAADLDISSGEKRDRTGKIISWSIGVSVMLILSVIVFCFWRRRQKQAKADATPIVGNQVLMNEVVLPRKKRIFSGEDEVENLELPLMEFEAVVTATEHFSDFNKVGKGGFGVVYKGRLVDGQEIAVKRLSEMSAQGTDEFMNEVRLIAKLQHNNLVRLLGCCVYEGEKILIYEYLENLSLDSHLFDETRSCMLNWQMRFDIINGIARGLLYLHQDSRFRIIHRDLKASNVLLDKDMTPKISDFGMARIFGRDETEADTRKVVGTYGYMSPEYAMNGTFSMKSDVFSFGVLLLEIISGKRNKVFCDSDSSLNLLGCVWRNWKEGQGLEIVDKVIVDSSSPTFRPREISRCLQIGLLCVQERVEDRPMMSSIVLMLGSEAALIPQPKQPGYCVSGSSLETYSRRDDENCTVNQITMSIIDAR

SEQ ID NO: 24087 - protein, 401 aa, Carboxydothermus hydrogenoformans Z-2901
MGFNTIEEALEDLKQGKMVIVVDDEDRENEGDLVCAAEKVTPEIINFMAKYGRGLICVPMEGKRLDELEIPIMVTQNTDPHHTAFTVSVDAVDTHTGISAAERAKTILKLIDPQARPQDFRRPGHIFPLRAKEGGVLRRAGHTEAAVDLARLAGLYPAGVICEIMRDDGQMARVPDLLEFAQKHNLKIITIASLIQYRRRNEKLVERGAFAMLPTKYGEFVAVAYESLLDHQTHLAVVKGNVADGEPVLVRVHSECLTGDVFGSLRCDCGDQLQTALKMIEKEGRGVLLYMRQEGRGIGLANKIKAYHLQDMGKDTVEANEALGFPADLRDYGIGAQILADLGIKKIRLMTNNPKKIKGLEGYGLEIVERVPIEIPPKKENKKYLLTKKKKLGHLLNLTEN

SEQ ID NO: 24088 - protein, 387 aa, Methylobacillus flagellatus KT
MFEIMDRDSQEAVIKVIGVGGCGGNAVAHMIEKEVGGVEFICANTDMQALKKSQAKTVLQIGTDITKGLGAGARPEIGREAALEDRDRIAEVIDGADMLFITAGMGGGTGTGAAPIIAEVAKEMGILTVAVVTKPFAFEGKRTKVAQEGLEELSKHVDSLIIIPNEKLMQVLGEDVPFLEAFQAANDVLHNAVSGIAEIINCPGMVNVDFADVRTVMSEMGMAMMGSATATGSERARIAAEQAVASPLLEDVNLANARGVLVNITASTSFKMKEYYDVMNTIKEFTAEDATVIVGNVFDESIGDGLRVTMVATGLNGVASRRQQKPELRVMTQVRDGTTNQPMYMGGTDDDSPAVFSSNGRRAQVEAMKMSGVEEYDIPAFLRKQAD

SEQ ID NO: 24089 - protein, 965 aa, Gossypium hirsutum
MAGRKVEKMASIDAQLRLLAPGKVSEDDKLVEYDAVLLDRFLDILQDLHGEDIRETVQECYELSAEYEGKHDPKILEELGKVLTSLDPGDSIVVTKSFSHMLNLGNLAEEVQIAYRRRIKLKKGDFADESSATTESDIEETFKRLVGQLNKSPEEVFDALKNQTVDLVLTAHPTQSVRRSLLQKHGRIRNCLTQLYAKDITPDDKQELDEALQREIQAAFRTDEIRRNPPTPQDEMRAGMSYFHETIWKGVPKFLRRVDTALKNIGINERVPYNAPLIQFSSWMGGDRDGNPRVTPEVTRDVCLLARMMAANLYFSQIEDLMFELSMWRCSDELRIRADELHRSSKKDAKHYIEFWKQIPPNEPYRIILGDVRDKLYNTRERARSLLANGFSDIPEEAAFTNVEQFLEPLELCYRSLCACGDRPIADGSLLDFLRQVSTFGLSLVRLDIRQESDRHTDVLDAITKHLDIGSYREWPEERRQEWLLSELRGKRPLFGPDLPKTEEVADVLDTFHVISELPSDSFGAYIISMATAPSDVLAVELLQRECHVKQPLRVVPLFEKLADLEAAPAAVARLFSIDWYRDRINGKQEVMIGYSDSGKDAGRLSAAWQLYKAQEELVKVAKQYGVKLTMFHGRGGTVGRGGGPTHLAILSQPPDTIHGSLRVTVQGEVIEQSFGEEHLCFRTLQRFTAATLEHGMHPPVSPNPEWRALMDEMAVVATKEYRSVVFQEPRFVEYFRLATPELEYGRMNIGSRPSKRKPSGGIESLRAIPWIFAWTQTRFHLPVWLGFGAAFKHVIQKDIKNLHMLQEMHNQWPFFRVTMDLIEMVFAKGDPGIAALYDKLLVSKELWPFGENLRANYEDTKRLVLQVAGHRDLLEGDPYLKQRLRLRDAYITTLNVCQAYTLKRIRDPDYHVKVRPHLSREYMESSKAAAELVKLNPTSEYAPGLEDTLILTMKGIAAGMQNTG

SEQ ID NO: 24090 - protein, 630 aa, Brassica rapa subsp. pekinensis
MDSASASQLKSSDDDETVADKVCNKSIVVPHRVVALANSFEKKDRSWYVKSQIPNDLSIQVNDITFQAHKFPLISKCGYLSNIELQPSTSGNGYHLKLENFPGGAETFETILKFCYGLQLDLNPLNVAPLRCASEYLYMTEEFQDGNLISKTDGFITFVVLVSWRDTLTVLRSCTSLSPWAENLQIVRRCCDLLAWKACNDSHDIPEDVENNERSLYSGIANLQLDHFMRVVTTVNARRGKPETIGRLIMKYAENWLPLIDEDIEGIRGYGSGNNELQFSVEGERTEESSLGCQEQKRIIESLVSVLPQQPEAVSCQFLLRLLKTAIVYSASPALVSDLEKRVGMALEDANVCDLLIPNFKNEDQQKGASSPEDYTIYNVDVVHRILEYYVMHEQQQQEQQIQGKPSITKLLDNYLAEIAKDPCLSITKFQVLAEMLPENAWKCHDGLYRAIDMFLKTHPSLSEHDRRRLCKTMNCEKLSLDACLHAAQNDRLPLRTIVQINTQVLFSEQVKMRMMMQEKQAGNNEENPEGCDDKRTSRDSEVRKLKGELENVRSKMAELQDDYNELQQEYEKLNSSKHKSTQYWGSRWQKVKRSFQMKREDDETRDTPRRRRSSTGPRTSLTRRRMSMS

SEQ ID NO: 24091 - protein, 607 aa, Arabidopsis thaliana
MVRVKQKNLESYRSNGTYPPTWRNPTTSFAPDQHRVSIHSSLKSKTKRRRLYKEADDNTKLRSSSSTTTTTTTMLLRISGNNLRPLRPQFLALRSSWLSTSPEQSTQPQMPPRVPNLIGGSFVESQSSSFIDVINPATQEVVSKVPLTTNEEFKAAVSAAKQAFPLWRNTPITTRQRVMLKFQELIRKNMDKLAMNITTEQGKTLKDSHGDIFRGLEVVEHACGMATLQMGEYLPNVSNGVDTYSIREPLGVCAGICPFNFPAMIPLWMFPVAVTCGNTFILKPSEKDPGASVILAELAMEAGLPDGVLNIVHGTNDTVNAICDDEDIRAVSFVGSNTAGMHIYARAAAKGKRIQSNMGAKNHGLVLPDANIDATLNALLAAGFGAAGQRCMALSTVVFVGDAKSWEDKLVERAKALKVTCGSEPDADLGPVISKQAKERICRLIQSGVDDGAKLLLDGRDIVVPGYEKGNFIGPTILSGVTPDMECYKEEIFGPVLVCMQANSFDEAISIINKNKYGNGAAIFTSSGAAARKFQMDIEAGQIGINVPIPVPLPFFSFTGNKASFAGDLNFYGKAGVDFFTQIKTVTQQWKDIPTSVSLAMPTSQKQ

SEQ ID NO: 24092 - protein, 375 aa, Xanthophyllomyces dendrorhous
MDDEVAALVIDNGSGMCKAGFAGDDAPRAVFPSIVGRPRHQGVMVGMGQKDSYVGDEAQSKRGILTLKYPIEHGIVTNWDDMEKIWHHTFYNELRVAPEEHPVLLTEAPLNPKANREKMTQIMFETFNAPAFYVAIQAVLSLYASGRTTGIVLDSGDGVSHTVPIYEGFALPHAILRLDLAGRDLTGYLVKCLMERGYPFTTTAEREIVRDIKEKLCYVALDFEQEMQTAAQSSQLEKSYELPDGQVITIGNERFRCPEALFQPSFLGLEAAGIHETTYNSIMKCDLDIRKDLYGNVVLSGGTTMYSGIADRMQKEITSLAPSSMKVKIVAPPERKYSVWIGGSILASLSTFQSMWISKQEYDEAGPSIVHRKCF

SEQ ID NO: 24093 - protein, 335 aa, Carboxydothermus hydrogenoformans Z-2901
MPVKVGINGFGRIGRNMFRAALNNPEIEIVAVNDLTDAKTLAHLLKYDSVHGIFAADVEAKDDAIVVNGKEVKVYAEKDPANLPWKELGVEIVIESTGKFTKKADAVKHLEAGAKKVIISAPATDEDITIVMGVNEDKYDPANHHVISNASCTTNCLAPVAKVLHEKFGIVKGLMTTVHSYTNDQRILDLPHKDLRRARAAATSIIPTTTGAAKAVALVLPELKGKLNGFAMRVPTPNVSVVDLVVELEKPATKEEINAALKEAAEGELKGILGYTELPLVSVDFNGNPLSSIVDGLSTMVIEDNMAKVIAWYDNEWGYSNRLVDLATYIAKKGL

SEQ ID NO: 24094 - protein, 192 aa, Gossypium hirsutum
PWIFAWTQTRFHLPVWLGFGAAFKHVIQKDIKNLLMLQEMYNEWPFFRVTIDLVEMVFAKGDPGIAALYDKLLVSEELWSFGERLRTNFEETKSLLLQIAGHKDLLEGDPYLKQRLRLRDSYITTLNVCQAYTLKRIRDPNYSVKLRPHISREIMESSKPADELVKLNPTSEYTPGLEDTLILTMKGIAAGM

SEQ ID NO: 24095 - protein, 255 aa, Candida glabrata CBS 138
MLVLALSDAHIPDRAVDLPSKFKKLLSIPDKISQVAVLGNSSNSSEFLKFVTDITPNVHIVRGEFDRATIPAIHTDKVPVVKTPGQERTIKSNRVELPMNAVITQGEFRIGCCSGYTVVPKNDPVSLLTLARQLDVDILLWGGTYNVEAYTLEGKFFINPGSCTGAFNTDWPVFSDILGNTDVKKEETKTDDSSSKSKDAKNGPDHLYVSDLDINGANVPSFCLLDIQGSTCTLYIYLYVDGEVKVDKVIFEKQR

SEQ ID NO: 24096 - protein, 221 aa, Prosthecochloris aestuarii DSM 271
MQAKTTLLAPSILSADFTQLGNSIQLAEKAGADWLHCDVMDGHFVPNITFGPFIIQAIAKCSSMTIDTHLMISDPDRYIPDFIKAGSHQVTVHQETCPHLHRSVQLIKSLGAKAGVSINPGTPISTLEAIIGELDMVLLMSVNPGFGGQKFIPSSVEKIKKLHEMRNAMNPDMVIAVDGGVTVDNAQELVSAGADALIAGTAFFKAENPAEAAAQIKSASR

SEQ ID NO: 24097 - protein, 135 aa, Triticum aestivum
  misc_feature (67)..(67): Xaa can be any naturally occurring amino acid
  misc_feature (86)..(86): Xaa can be any naturally occurring amino acid
  misc_feature (109)..(109): Xaa can be any naturally occurring amino acid
  misc_feature (120)..(120): Xaa can be any naturally occurring amino acid
  misc_feature (122)..(122): Xaa can be any naturally occurring amino acid
MAASMITSPIVAPTSVPSLSRRGSSFAVVCSGGKKIKVDKPLGLGGGLTVDIDANGRKVGKKGVYQXFVDKYGANVDGYSPIYTPXEEWSESGDRYAGGTTGLLIWAVXLAGLLRGGVSXSXNTNALARLKRTSN

SEQ ID NO: 24098 - protein, 569 aa, Arabidopsis thaliana
MANIVWCNIAMFLLVSLFLTDDAVVVLDALDNVPNNIKNQPYRTGYHFQPPKNWMNGPMIYKGIYHLFYQWNQNGAVMDVNKTVWGHATSTDLINWITLSPAIRPSRPSDINGCWSGSVTILPNGKPVILYTGNDRYNRQVQNLVKPKNLTDPYLRHWTKSPENPLVTPSPVNHINSSAFRDPTTAWFGRDGRWRITTGSQEGRRGLAILHTSKDFVIWKQSPKPLHYHDGTGMWECPDFFPVARTDSRGLDTSFSSGPMVKHVLKVSLTDTFNDYYTIGTYDEVRDVYVPDKGFVQDETAPRYDYGKFYASKTFYDSVNQRRILWGWVNESSPEKDNIKKGWAGLQAIPRKVWLDESGKRLVQWPVKEIERLRTTQVKWGNKLLKGGSVMEVHGVTAPQADVEVFFKVSGFDLEKADVIEPGWTDPQLICSQRNASSGLGPFGLMVLASKNMEEYTSVNIRIFRAGENSKEHVVVMCSDQSTSSLEKGNDKTTYGAFLDISPYQPISLRTLIDKSIVESFGGKGKTCITSRVYPKLAIGERTHLFAFNKGSQNVNVLSLSAWSMKSSL

SEQ ID NO: 24099 - protein, 236 aa, Bartonella bacilliformis
RITVFGVGGGGGNAVNNMINAGLQGVDFVVANTDAQALAMSKAERVIQLGAAVTEGLGAGALPEVGQAAADECIDEIIDHLADSHMVFITAGMGGGTGTGAAPVVARAAREKGILTVGVVTKPFQFEGARRMKTAEAGIEELQKSVDTLIVIPNQNLFRIANEKTTFADAFAMADQVLYSGVASITDLMIKEGLINLDFADVRSVMHEMGRAMMGTGEASGEGRALAAAEAAIANP

SEQ ID NO: 24100 - protein, 515 aa, Bacillus licheniformis ATCC 14580
MKKAVYKRISILTVCLGIFIMIFLSVRETEKKGESPDTPEYRAAFHLTTPDKWKNDPQKPVYFNGEYHYYYLYNRDYPDGNGTEWRHAVSDDLVHWQDKGVAIPKYTNKNGDPWSGSVVVDSKNTAGFGKGTIVAVMTQPSANDGKEEQFLWYSQNGGKTFKPYGEEPVLPNPGTVDFRDPKVIWDEQDDKWVMALAEGTKVGFYESQNLKEWRYTGSFQTENIGIIECPDLYKMRADDGTYKWVLGASANGKGTGKPNTYAYWTGSFNGNEFTADEAEPQWLDYGFDWYAGVTFEDGETNDPYEKRYALAWMNNWDYANRTPTWKDGFNGTDSIVRQIRLKHKGGDRYSLASHPIDQLDELTESADELDRIEVNGSKTLQIKGNTYQLEADISWDDLKNAGFRLRESADRKRHIDVGISAEGGYSYVNRGFTGQPDSTRTYLESKAPFDPEKKRVHFTIIVDQNTVEAFIDDGETTHSNLAFPDMNDTGITLFSENGTAVFENLKIKHLRSIRD

SEQ ID NO: 24101 - protein, 416 aa, Mycobacterium avium subsp. paratuberculosis K-10
MSKPSTANGGYPSVVVTAVTATTSIAPDVESTWKGLLAGESGIHVLEDDYITKWDLPVRIGGHLKEPIDERMSRLDLRRMSYVQRLAKLLSTQLWETAGNPELDPDRFSVVVGTGLGGAERIVESYDLMNEGGPRKVSPLAVQMIMPNGAAAVVGLQLGARAGVITPVSACSSGSEAIAHAWRQIVMGDADVAVCGGVEGPIDALPIAAFSMMRAMSTRNDEPERASRPFDKDRDGFVFGEAGALMLIETEEHAKARGAKPLARLMGAGITSDAFHMVAPAGDGVRAGRAMTRSLELAGLSPKDVDHVNAHGTATPIGDTAEANAIRVAGCQEAAVYAPKSALGHSIGAVGALESVLTVLTLRDGVIPPTLNYETPDPEIDLDIVAGEPRYGDYQYAINNSFGFGGHNVALAFGRY

SEQ ID NO: 24102 - protein, 481 aa, Citrullus lanatus
MKVTMTSGGMPSIPSSISPPPVTLPLRNIPGSYGLPLFGSIGDRLDYFWFQGPEKFFRSRMEKNQSTVFRTNVPPSFPFFFTDPRVIAVLDCKSFAHLFDMEIVEKKNVLVGDFMPSTSFTGNMRVCAYLDTSESQHSKIKNFVMDVLRRSSRIWIQELESNLSTMWDSIESEIAKDTKSSFRNHLQPTLFNFFSKTLAGADTAKSPEVAKSGYIDVIIWLGLQLVPTIHIGILQPLEEIFLHSFRLPFFPIASRYQRLYDFIQKEGEEVVERGVSEFGLTKDEAIHNLIFTMGFNAYGGFSLFFPVLLDRILNDKTGLQQRILEEVKAKTGSGLTFESVKEMDLIYSVVYETLRLDPPVPTQYARARKDFKLSSYDSAYSIKKGELLCGYQPLVMRDPKVFNKPKTFNPGRFRGEKGAALLDYLFWSNGPQTGLPSEHNKQCAGKDLVVLTAVVFVAYIFRRYDWIAGEGGSITAFQRTN

SEQ ID NO: 24103 - protein, 440 aa, Mycobacterium avium subsp. paratuberculosis K-10
MRAAPARKVAGQVREGIFARPMTELVTGKTLPNVVVTGIAMTTALATDAETTWKLLLDSQSGIRTLDDPFVEEFDLPVRIGGHLLEEFDSQLTRVELRRTGYLQRMSTILGRRVWENAGSPEVDSNRLMVSIGTGLGSSEEMVFSYDDMRARGMKAVSPLGVQKYMPNGAAAAVGLEHHAKAGVITPVSACASGSEGIAQAWRNIVFGEADIAICGGVETKIEAVPIAAFAQMRIVMSTKNDDPVGACRPFDRDRTGFVFGEAGALMVIETEEHAKARGANILARIMGASITSDGYHMVAPDPNGERAGHAMSRAIQLAGLTPGDIDHVNAHATGTSVGDVAESKAINNALGPHGGNAAVYAPKAALGHSVGAVGAVESILTVLALRDQVVPPTLNLENLDPEIDLDVVAGKPRPGNYQYAINNSFGFGGHNVAIAFGRY

SEQ ID NO: 24104 - protein, 344 aa, Wolbachia sp. wDry
QALDKSLCDKKIQLGINLTKGLGAGALPDVGKGAAEESIDEIMEHIKDSHMLFITAGMGGGTGTGAAPVIAKAAREARAVVKDKGAKEKKILTVGVVTKPFGFEGVRRMRIAELGLEELQKYVDTLIVIPNQNLFRIANEKTTFADAFQLADNVLHIGIRGVTDLMIMPGLINLDFADIETVMSEMGKAMIGTGEAEGEDRAISAAEAAISNPLLDNVSMKGAQGILINITGGGDMTLFEVDSAANRVREEVDENANIIFGATFDQAMEGRVRVSVLATGIDSCNDNSSVNQNKIPAEEKIFKWPYNQIPISETKEYASTEQTNERVKWGSNVYDIPAYLRRKK

SEQ ID NO: 24105 - protein, 777 aa, Neurospora crassa
MAQAYDDEELSISLSPSQIRSRNKRSGDGASGFGPSTGNLHEYGQHGQQLHPNINAVMADAPLRDKMRTEQRIGAYNIVKTLGEGSFGKVKLAVHRMTGQQVALKIIARKKLISRDMQGRVEREIEYLQLLRHPHIIKLYTVIKTPTEIIMVLEYAGGELFDYIVQHGKMKEDEARRFFQQMLCAVEYCHRHKIVHRDLKPENLLLDDNLNVKIADFGLSNIMTDGNFLKTSCGSPNYAAPEVIGGKLYAGPEVDVWSCGVILYVLLVGRLPFDDEHIPSLFAKIARGSYMVPTWMSPGAASLIKKMLVVNPVQRATIDEIRQDPWFLKDLPAYLHPPVEEFLNTGVDPNKAIKVSDIAPNAPPQEQEKLHNEVTEKISKTMGYGKRDVEEALEADEPSAIKDAYMIVRENKLMQSNLDFATSHPPSASILHLPSGEHRLTQKKSKSLSLRPSSFWSNTNEEYQDTLLKTDEEIPGLTTEESVPSPLHDPNMSSARSIASVSTATSPRPYVSKIGILPSSLPTYHRVFMEREKAKAEGLEPPDAIPTIVEPANQPRSQAEQEETIRRLKPHSRSQLRLDEANKRPQGLTPVHPPKKNKPARWQFGIRSRNAPWEALVCIYKALNKLGAGWIVDEDYERAHRDDDDTDDYDGPSIGSRKKSSSSMDPTKTYRLPADPWHIKIRWTTDKLKKHSVASGLSEAGENTHVSRDGSDSKYQVVAMRMEIQIYEMEHGVYLVDFKVDGYETPDGKLLEDKEVTSPFPFLDMAAKLIMQLADAD

SEQ ID NO: 24106 - protein, 505 aa, Glycine max
MYRVAASSFRRHLKGHGGNLGSTRFSTSAAVAARTSSGGLFSWLTGERSSALPPLDMPLGGVALPDSLPDYVEQSKTKITTLPNGLKIASETSPNPAASIGLYLDCGSIYETPLSSGVSHLLERMAFKSTTNRSHFRIVREVEAIGGNIGASASREQMGYTFDALKTYAPQMVELLVDCVRNPAFLDWEVNEELRKVKAELGELSNNPQGLLLEAIHSAGYSGALAFPLLAPEAALNRLDGPNLEEFVVENYTAPRMVLAASGVEHEELLSIAEPLLSDLPKVPRPEEPKSIYVGGDFRRHGEGGTHVAIAFEVPGGWQKEKDAIALTVLQMLMGGGGSFSAGGPGKGMHSRLYLNVLNEYQQIQSFSAFNSIFNNTGLFGIYASTSPDFVPKTVDIAAKELIAIASPGQVTQVQLDRAKKSTKSAVLMNLESRMIASEDIGRQILTYGERKPVEQFLKAVDEITLNDITKIAQKIISSPLTMASYGDVMNVPSYESVNSKFHAK

SEQ ID NO: 24107 - protein, 386 aa, Haloarcula japonica
MDSIIDDAIDEAEQDGEDAAGGTVDETTSTPSQDMSTSGTMSDEELASVVKDLETKITVVGCGGAGGNTVTRMMEEGIHGAKLVAANTDAQHLADEVAADTKILIGRKRTGGRGAGSVPKIGEEAAQEDIEDIQQSIDGSDMVFVTAGLGGGTGTGAAPVVAQAAQEAGALTISIVTIPFTAEGERRRANADAGLERLRSVSDTVIVVPNDRLLDYAPSMPLQDAFKICDRVLMRSVKGMTELITKPGLVNVDFADVRTIMENGGVAMIGLGESDSENKAQDSIRSALRSPLLDVEFDGANSALVNVVGGPDMSIEEAEGVVEEIYDRIDPDARIIWGASVNNEFEGKMETMIVVTGVESPQIYGQSEAEQEKAAQQLGEDIDYVD

SEQ ID NO: 24108 - protein, 293 aa, Chlamydophila pneumoniae CWL029
MFHSLSKNTPIITQGITGKAGSFHTEQCLAYGTNFVGGVTPGKGGTLWLDLPVYDSVLEAKQATGCRATMIFVPPPYAAEAILEAEEAGIELIVCITEGIPVRDMLEVARVMDNSTSQLIGPNCPGIIKPGECKIGIMPGYIHLPGNIGVVSRSGTLTYEAVWQLTQLKIGQSICVGIGGDPLNGTSFIDVLQALEEDPYTELILMIGEIGGSAEEEAAAWIQAHCTKPVVAFIAGVTAPKGKRMGHAGAIISGNSGDAKSKIQVLRESGVTVVESPAHIGKTVDAVLRAKEL

SEQ ID NO: 24109 - protein, 412 aa, Haloarcula japonica
MQDIVNEALERDEQEQKKMSDEDVDGFGDPRIVIVGCGGAGNNTVNRLYNIGVEGADTVAINTDKQHLKMIEADTKILVGKSLTNGLGAGGDPSMGERATEMAQGTIKEVLGDADLVFVTAGMGGGTGTGAAPVVSKIAKEQGAIVVGMVSTPFNVERARTVKAEEGLEKLRNEADSIIVLDNNRLLDYVPNLPIGKAFSVMDQIIAETVKGISETITQPSLINLDYADMTSIMNQGGVAVMLVGETQDKNKTEEVVKDAMNHPLLDVDYRGASGGLVHITGGPDLTLKEAEGIAQNITERLEADANVIWGARIQEEYKGKVRVMAIMTGVQSAQVLGPTTQKQANKSREAIQEVGDDTSFDASDNVESFDSPAPNSGSQNSGGRTTGYSETDGGQDQREKNNGLDVIRTNK

SEQ ID NO: 24110 - protein, 391 aa, Bartonella quintana str. Toulouse
MAKSKFERTKPHVNIGTIGHVDHGKTSLTAAITKYFGEFKAYDQIDAAPEERARGITISTAHVEYETEKRHYAHVDCPGHADYVKNMITGAAQMDGAILVVSAADGPMPQTREHILLARQVGVPAIVVFLNKVDQVDDAELLELVELEIRELLSKYDFPGDDIPIVKGSALAALEDKDKSIGEDAVRLLMSEVDNYIPTPERPIDQPFLLPIEDVFSISGRGTVVTGRVERGVIKVGEEIEIIGIRPTSKTTVTGVEMFRKLLDQGQAGDNIGALLRGVDREGIERGQVLAKPGSVTPHTRFKAEAYILTKDEGGRHTPFFTNYRPQFYFRTTDVTGIVTLPEGIEMVMPGDNVAMDVSLIVPIAMEEKLRFAIREGGRTVGAGIVSKIIE

SEQ ID NO: 24111 - protein, 498 aa, Vibrio sp. Ex25
MMTRLVPLFIGGEFRESQTSDWVEVTNPATNDVIAYVPCSTDHEMEAAIDNAKETFQSWKEVAVSERARVMLRYQHLLKEHHDELATLLSHETGKILADAKGDVWRGIEVVEQAANIASNMMGETVENVATDIDSYSMIQPLGVCCGITPFNFPAMIPLWMFPIAIAAGNTFVLKPSEQVPLTSIRLAELFEQAGAPKGVLQIVHGRKDQVDFLLAHPDIRAVSFVGSVPVARYIYTTGTKHFKRVQAFAGAKNHMVIMPDANKEQVVNNLVGASVGAAGQRCMAISVAVFVGDSKQWITDLKQAMAKVHPGPWDDEQAAYGPLISEQAKQRILDLIEDGKQQGAVCELDGSQCEVEGFPDGNWIGPTLFSGVTANMSIYTQEIFGPVLVCMELDTLQEAIELVNRNPYGNGTSIFTANGAAARKYQHDIQVGQVGINVPIPVPLPFFSFTGWRGSFYGDLHAYGKQAVRFYTETKTVTARWFDDDIPTGPNLTIQLR

SEQ ID NO: 24112 - protein, 511 aa, Bacillus subtilis subsp. subtilis str. 168
MVNHDITETAIRRSLNNLTITFQDFNLSSDLMKAINRMGFEEATPIQAQTIPLGLSNKDVIGQAQTGTGKTAAFGIPLVEKINPESPNIQAIVIAPTRELAIQVSEELYKIGQDKRAKVLPIYGGQDIGRQIRALKKNPNIIVGTPGRLLDHINRRTIRLNNVNTVVMDEADEMLNMGFIDDIESILSNVPSEHQTLLFSATMPAPIKRIAERFMTEPEHVKVKAKEMTVSNIQQFYLEVQERKKFDTLTRLLDIQSPELAIVFGRTKRRVDELAEALNLRGYAAEGIHGDLTQAKRMVALRKFKEGAIEVLVATDVAARGLDISGVTHVYNFDVPQDPESYVHRIGRTGRAGKTGMAMTFITPREKSMLRAIEQTTKRKMDRMKEPTLDEALEGQQQVTVERLRTTISENNLNFYMTAAAELLEDHDAVTVVAAAIKMATKEPDDTPVRLTDEAPMVSKRYKNQRSSKRRDGQGGGYRGGKGKSNNRSSYDKKRSNDRRSSGDRRQKKSY

SEQ ID NO: 24113 - protein, 107 aa, Synechococcus elongatus PCC 7942
MSIYVGNLSYEVTEADLTAVFTEYGAVKRVQLPIDRETGRMRGFGFVEMSADAEEDAAIAALDGAEWMGRGLRVNKAKPREERSGGGSFGGGGGRRGGGGGGGYRNY

SEQ ID NO: 24114 - protein, 166 aa, Corynebacterium glutamicum ATCC 13032
MTQSAPEFIATADLVDIIGDNAQSCDTQFQNLGGATEFHGIITTVKCFQDNALLKSILSEDNPGGVLVIDGDASVHTALVGDIIAGLGKDHGWSGVIVNGAIRDSAVIGTMTFGCKALGTNPRKSTKTGSGERDVVVSIGGIDFIPGHYVYADSDGIIVTEAPIKQ

SEQ ID NO: 24115 - protein, 158 aa, Triticum turgidum subsp. durum
MEYQGQQQHGQAATNRFAEYGNLVAGHGAGTGMAAHGGVGTGAVAAAGGHFQPTREEHKAGGILQRSGSSSSSSSSEDDGMGGRKKKGIKDKIKEKLPGGHGDQQQTAGTYGQQGHTGTAGTGGTYGQPGHTGMAGTDSTGEKKGIMDKIKEKLPGQH

SEQ ID NO: 24116 - protein, 97 aa, Pseudomonas sp.
VDRLTQPLLRMTNGQYDKQGEFQPISWEKAFDIMELKFKEALKSKGPGSVGMFGSGQWTVWEGYAANKLMKAGFRSNNIDPNAPHCMASAVMGFMRT

SEQ ID NO: 24117 - protein, 150 aa, Triticum turgidum subsp. durum
MEFQGQHDNPANRVDEYGNPFPLAGGVGGGHAAPGTGGQLQARRGEHKTGGILHRSGSSSSSSSSEDDGMGGRRKKGMKEKIKEKLPGGHKDNQQHMATGTGTGGAYGPGTGTGGAYGQQGHAGMAGAGTGTGEKKGIMDKIKEKLPGQH

SEQ ID NO: 24118 - protein, 416 aa, Alkalilimnicola ehrlichei MLHE-1
MALIVQKYGGTSVGTTERIKNVARRVQASRERGDDVVVVVSAMSGETNRLLALAEEIGPNPPAREVDVLVSTGEQVTIALLTMALESIGTPARCYTGPQVRILTDSAHSRARILDIDAKQINDDLRLGRVVVVAGFQGVDESGAITTLGRGGSDTTAVAIAAALKADECQIYTDVDGVYTTDPRVVPKARRLERITVEEMLELASLGSKVLQIRSVEFAGKYKVPLRVLSSFKEGPGTLITYEENPMEEPLISGIAFNRDEAKLTVLGAPDVPGIAASILGPISDAGIEVDMIIQNVSTSGATDFTFTVHKRDYEQALKILQDNKDKLGAREIYGDPKIVKLSLVGVGMRSHAGVASTMFKALSAEGINIQMISTSEIKISVVVDEKYLELGVRTLHTAFGLDDENAQVEVEGDNA

SEQ ID NO: 24119 - protein, 567 aa, Vibrio parahaemolyticus RIMD 2210633
MTKILIVGGVAGGASAAARARRLSEDAEIIMFERGPFVSFANCGLPYHIGGDIQERSKLLLQTPESFLARFNVDVRVMNEVVSINRQDKTVTIKNLLDESEYVESYDFLLLSPGAGPIVPPIPGLDNPLTHSLRNIPDMDRIIETIQMNKPEHATVVGGGFIGLEMMEAFHQLGIKTSLIEMADQVMTPVDREMAGFAHAEIRDKGVDLKLGVALESVKFVPNEHVASFDSGESEKHQHLEGELELTLNNGEKLTTDILIMAIGVRPETKLAQEAGLQIGALGGIYTNEYMQTSDPSIYAVGDAIEEKDFVTGEQTLVPLAGPANRQGRMAADNMLGRKETYQGTQGTAICKIFDLAVASTGKNEKQLKRAGIAYDKVYVHTASHASYYPGAEVVSFKMLFDPQSGKILGAQAVGKDGIDKRIDVMAVAQRAGMTVEQLQHLELTYAPPYGSAKDVINQAAFVANNIIKGDATAIHYDEIDNLTEDQILLDVRNPGELESVGYLEGAINIPVDQLRHRMDELPKDKEIVIYCQVGLRGNVAYRQLVNNGYKARNLIGGYRTYLHSKV

SEQ ID NO: 24120 - protein, 168 aa, Triticum aestivum
  misc_feature (127)..(127): Xaa can be any naturally occurring amino acid
MATMMTMSSFAGAAVLPRGSTGHFGAQSLPALGRRSLVVRAQTDGPSAPPPNKPKASTSRWDALAFAGPAPERINGRLAMVGFVTALAVEAVRGDGLLSQLGSGTGQAWFVYSVAVLSVASLVPLLXEGRAGAIMNANAELWNGRFAMLGLIALAATEIITGAPFINV

SEQ ID NO: 24121 - protein, 269 aa, Medicago truncatula
MELLGVKYRQIGTWTREEASTRNLRYSVHTHNCRWLSEQSTSTTTRIRFISTTKRLLTAPLSSLLRFFSISTTLPNKPIIHKPLFTTLTPSLYFTLRRTDHTMASASNPQSIHDFTVKDAKGNDVNLGDYKGKVLIIVNVASQCGLTNSNYTELSQLYEKYKSKGLEILAFPCNQFGAQEPGSVEEIQNFVCTRFKAEFPVFDKVDVNGATAAPIYKYLKSSKGGLFGDGIKWNFSKFLVDKNGNVVDRYAPTTSPLSIEKDLLKLLDA

SEQ ID NO: 24122 - protein, 456 aa, Mycobacterium avium subsp. paratuberculosis K-10
MSVAEPKRDIAGLPLAPKNPLSYRERLRAIKEFHTGTNKLRDAGGPVTRVTLGPRWLISPIVLATSPQGIRDIVSVRDGSIDKTSTVATELRRLLGPNLFVLPHTEWLPRRRTLQPVFTRQRVREFGGHMAEAAESVCAGWPEDTEIDLDAQCRTLTLRALGRSVLGLDLDERSDAIAEPLRVATSYAVRRALRPLRAPEWLPTPSRRRARAAAGAIRALADEILQACRADPGREAPLVHALIAATDPETGQALSDKEIRDEMIIFLFAGHDTTATTLTYALWALGRHPEYQARVAAEVAELPDRHLTPDDVARLGFTVRVLQEALRLCPPGPTGTRMATRDVEVAGYRVEAGTMLAFGRMAVQTDPSLWDAPLRFDPDRFDPRRAGDRDRWQYLPFGGGPRSCIGDHFAMLEATLALATIVRRVEIESLSDDFPLAVPFTMVAAAPIRAMVRRRR

SEQ ID NO: 24123 - protein, 474 aa, Oryza sativa
TSNVILHLFWDNIKCSTILLLLIKFVVIAGTKKTGRKIILIVLTAAAAGLLLPCLYVLIWHRKGKKLRHLLCTKTSSTSERNIEALIESYGSIAPTRYKYSEVTKITSFLNYKLGEGGYGVVFKGRLQDGRMVAVKFLHDSKGNGEEFVNEVMSIGRTSHINIVSLFGFCLEGSKRALVYEYMPNGSLDNYIYSENPKEILGWEKLYGIAIRVARGLEYLHHSCNTRIIHFDIKPQNILLDQDFCPKIADFGLAKLCRTKESKLSMTGARGTIGFIAPEVIYRTFGVVSTKSDVYSYGMMLLEMVGGRKNAKQMVENSSEKYFPDWIYDHFALDDGLQACQVTSEVEQIAKKMTLIGLWCVQVLPMHRPTITQVLDMFERGLDELEMPPKQNFSELLGGCVTADGGQWRRQRHAGAGGGKRAGKQGQGKGSYAFLELKGGAMFVRGAGATEAKMGGAAGDGDEGLHHHRHNQAV

SEQ ID NO: 24124 - protein, 639 aa, Cryptococcus neoformans var. neoformans JEC21
MPMLSDPSKRYLPFQPVPFPNRTWPDKTHKKAPIWLSTDLRDGNQSLANPMTNQQKLRFFRHLVQLGFKEIEVAYPAASETDYNFVRELIDRKEVPDDVWIQVLTPARADLIKRTFEAVAGLKHVIVHMYNATSCLFREVVFNNDRDETIKLAMDHTILIRQLAEKYAESHGTSFRYEYSPETFSQTETPYAVEVCEAVKKAWLGGHGSVWADGRKEERIIFNLPATVEVATPNCFADQVEIFCNSISEREKCIISLHTHNDRGCAVAAAELGVLAGADRIEGTVLGNGERTGNVDLVTLALNCYSQGISPNLDFSDMFSVIDTVTECTGLPVHPRHPYAGELVFTAFSGSHQDAIKKGFEAQAKRDHAGDQVWSMPYLPIDPADVGCTYEAVIRVNSQSGKGGIAYIVKSALSLDLPRRMQIAFYKVVQECSEATGREMTSKDITTAFRQTYHLGGSIYDGRLVLKSFVTVDLFSSQTPSVAGTPDLSPIRSRSQTRMPPLSLSSSVAEPSPDRSLDRNLPSMSKRLTAKVLVDGKLHEIVGEGNGPLSSFLNALESDLGIVLSVREYTEHAVGAGSDVKAATYVELIPANVDAKDKTQGGFWGVGVDADITASGLKAVVSAANGFLGQGPIPSQNSI

SEQ ID NO: 24125 - protein, 402 aa, Physcomitrella patens subsp. patens
MSTCAVAALSSPPTSFTSERVTSGITASVQPSAFLGTKISVCKGASVLSRAVSASISRQPLVAPIRAQGVAAPADTKAPTTTKKTDTKSTVIITGASSGLGLATAKVLADSGEWHVIMACRDFLKAERAARAVGMPKDSYTVIHCDLSSLNSVKQFVDNVRQSGRPLDVLVCNAAVYLPTAKEPRYTADGFELSVGTNHLGHFLLANMLMEDIQHKENDTNRRVIIVGSITGNTNTIAGNVPPKANLGDLRGLAGGLDGVRSSVMIVGGEFDGAKAYKDSKVCNMLTMQEMHRRFHEKTGVTFASLYPGCIATTGLFREHYQLFRTLFPPFQKYITKGYVSEEEAGKRLAQVVSDPTLNKSGVYWSWNNQSNSFENELSQEASDAEKAKKLWEISEKLVNLS

SEQ ID NO: 24126 - protein, 931 aa, Streptococcus agalactiae A909
MSHPKLESSSNKEIITEEVGLLKQLLDEATQKLIGSESFDKIEKIVSLSSTDDYTGLKETISALSNEEMVIVSRYFSILPLLINISEDVDLAYEINYKNNLNQDYLGKLSTTIDVVAGHENAKDILEHVNVVPVLTAHPTQVQRKTVLELTSKIHDLLRKYRDVKAGIVNQEKWYADLRRYIGIIMQTDTIREKKLKVKNEITNVMEYYNRSLIKAVTKLTAEYKALAAKKGIHLENPKPLTMGMWIGGDRDGNPFVTAETLRLSAMVQSEVIINHYIEQLNELYRNMSLSINLTEVSPELVTLANQSQDNSVYRENEPYRKAFNFIQDKLVQTLLNLKVGSSPKEKFVSRQESSDIVGRYIKSHIAQVASDIQTEELPAYATAEEFKQDLLLVKQSLVQYGQDSLVDGELACLIQAVDIFGFYLATIDMRQDSSINEACVAELLKSANIVDDYSSLSEEEKCQLLLKELTEDPRTLSSTHAPKSELLQKELAIFQTARELKDQLGEDIINQHIISHTESVSDMFELAIMLKEVGLIDANQARIQIVPLFETIEDLDNSRDIMTQYLHYELVKKWIATNNNYQEIMLGYSDSNKDGGYLSSGWTLYKAQNELTKIGEENGIKITFFHGRGGTVGRGGGPSYEAITSQPFGSIKDRIRLTEQGEIIENKYGNQDAAYYNLEMLISASIDRMVTRMITNPNEIDNFRETMDGIVSESNAVYRNLVFDNPYFYDYFFEASPIKEVSSLNIGSRPAARKTITEISGLRAIPWVFSWSQNRIMFPGWYGVGSAFKHFIEQDEANLAKLQTMYQKWPFFNSLLSNVDMVLSKSNMNIALQYAQLAGSKEVRDVFNIILNEWQLTKDMILAIEQHDNLLEENPMLHASLDYRLPYFNVLNYVQIELIKRLRSNQLDEDYEKLIHITINGIATGLRNSG

SEQ ID NO: 24127 - protein, 475 aa, Streptococcus agalactiae A909
MTKEYQNYVNGEWKSSVNQIEILSPIDDSSLGFVPAMTREEVDHAMKAGREALPAWAALTVYERAQYLHKAADIIERDKEEIATVLAKEISKAYNASVTEVVRTADLIRYAAEEGIRLSTSADEGGKMDASTGHKLAVIRRQPVGIVLAIAPYNYPVNLSGSKIAPALIGGNVVMFKPPTQGSVSGLVLAKAFAEAGLPAGVFNTITGRGSEIGDYIVEHEEVNFINFTGSTPVGKRIGKLAGMRPIMLELGGKDAGVVLADADLDNAAKQIVAGAYDYSGQRCTAIKRVLVVEEVADELAEKISENVAKLSVGDPFDNATVTPVIDDNSADFIESLVVDARQKGAKELNEFKRDGRLLTPGLFDHVTLDMKLAWEEPFGPILPIIRVKDAEEAVAIANKSDFGLQSSVFTRDFQKAFDIANKLEVGTVHINNKTGRGPDNFPFLGLKGSGAGVQGIRYSIEAMTNVKSIVFDMK

SEQ ID NO: 24128 - protein, 520 aa, Neurospora crassa
MVHLTIIPKEDEIRDGLDIPLTGALKAVHLQLANDEDRFTTSVYGSKFAAADLPRHEMPDEEMPKEVAYRMIKDELSLDGNPLLNLASFVTTYMEEEAEKLMTESLPKNFIDYEEYPQTADIQNRCVSMIGRLFNAPVKDAEASSAVGTSSVGSSEAIMLGVLAMKKRWKNKRIAEGKPADKPNLIMSSAVQVCWEKATRYFEVEEKFVYCTPDRYVIDPKETVDLVDENTIGICCILGTTYTGEYEDVKAVNDLLVERGLDTPIHVDAASGGFVAPFVVPDLEWDFRLKNVVSINVSGHKYGLVYPGVGWVVWRSAEYLPQELVFNINYLGADQASFTLNFSKGASQVIGQYYQLIRLGKHGYRAIMSNLTRTADYLAESLAALGFIIMSQKSGQGLPLVAFRLKEDPDRTYDEFALAHQLRVRGWIVPAYTMAPKTEGLKMLRIVVREDFSRNRCDGLISDIRSCQGILEQMDKETVKKQQEFIHKHHVVSGKASHNHPKYHILWSESNSSRNQATPE

SEQ ID NO: 24129 - protein, 261 aa, Vibrio sp. Ex25
MPLTQEAIQHTIANHVAVVTMNNPPANTWTAESLKALKSLILTLNDDKQVYALVLTGSGEKFFSAGADLKLFSDGDKAVALDMARCFGEAFETLSEFRGVSIAAINGYAMGGGLEVALACDIRVVEEQAVLALPEAKVGLLPCAGGTQNLTALVGEGWAKRIILCGEQVSADKAKELGLAEELVPKGEALSKALELAESVANQSPSSVAACKALIQNMRSAPLKHGLMKERELFLNLFDTEDQVEGVRAFLEKRPPQWKNR

SEQ ID NO: 24130 - protein, 419 aa, Bacillus anthracis str. 'Ames Ancestor'
MAFEFKLPDIGEGIHEGEIVKWFIKPGDEVNEDDVLLEVQNDKAVVEIPSPVKGKVLEVLVEEGTVAVVGDTLIKFDAPGYENLKFKGDDHDEAPKAEATPAATAEVVNERVIAMPSVRKYARENGVDIHKVAGSGKNGRIVKADIDAFANGGQAVAATEAPAAVEATPAAAKEEAPKAQPIPAGEYPETREKMSGIRKAIAKAMVNSKHTAPHVTLMDEVDVTELVAHRKKFKAVAADKGIKLTYLPYVVKALTSALREYPMLNTSLDDASQEVVHKHYFNIGIAADTDKGLLVPVVKDTDRKSIFTISNEINDLAGKAREGRLAPAEMKGASCTITNIGSAGGQWFTPVINHPEVAILGIGRIAEKPVVKNGEIVAAPVLALSLSFDHRLIDGATAQKALNQIKRLLNDPQLLVMEA

SEQ ID NO: 24131 - protein, 357 aa, Helicobacter pylori J99
MRGLERESHFTLNENAMFFECAYSCDNALFLQLDDRSFFITDSRYTQEAKESLQPKKGVLVEVIESSDLVQSAIDLITKSSVKKLFFDPNQVNLQTYKRLDSAVGNKVVLEGVPSYHRQKRIIKNEHEIQLLKKSQALNVEAFENFAEYVKKIFDEKESLSERYLQHKVKDFLTKEGVYDLSFEPILALNANASKPHALPSAKDFLKADHSILLDMGIKYERYCSDRTRTAFFDPKDFVFKREQSFKDKERQKIYDIVKEAQEKAISGIRAGMTGKEADSLARGVISDYGYGQYFTHSTGHGIGLDIHELPYISSRSETILEEGMVFSVEPGIYIPGFFGVRIEDLVVIKNSRAELL

SEQ ID NO: 24132 - protein, 1032 aa, Glycine max
MTDITGDIAEEISFQSFDDDCRLLGNLLNDILQREVGTNLLDKIERTRVLAQSGCNMRQAGIVNMAEMLEKQLASELSKMTLEEAFTLARAFSHYLTLMGIAETHHRVRKGGNMAQIAKSCDDIFNQLVQGGVPPEELYDTVCKREVEIVLTAHPTQINRRTLQFKHIRIAHLLDYNDRPDLSTEDREMVIEDLVREITSIWQTDELRRQKPTPVDEARAGFNIVEQSLWKAVPHYLRRVSNALKKHTGKPLPLTCTPIKFGSWMGGDRDGNPNVTAKVTKDVSLLSRWMAIDLYIREVDSLRFELSMNQCSDRLSRLAHEILEAKHENRRENWNQSANRSLTLPTQLPARAHLPSIAENGESRHPRLDIPAPDYMQSNHKDGGVSVSSTTSKLANPNTRLPGTSSANSSASSAALGQKKLYAESQTGKSTFQKLLEPMLPQLPGIAPYRIVLGNVKDKLEKSRRRLEILLEDVACDYDPLDYYETSDQLLEPLLLCYESLQSCGSGVLADGRLADLIRRVATFGMVLMKLDLRQESGRHAEALDAITQYLDMGTYSEWDEEKKLDFLTRELKGKRPLVPVSIEVHPDVKEVLDTFRIAAELGSDSLGAYVISMASNASDVLAVELLQKDARLAAIGELGKACPGGTLRVVPLFETVKDLRGAGSVIRKLLSIDWYHEHIVKNHNGHQEVMVGYSDSGKDAGRFTAAWELYKAQEDVVAACNDYGIKVTLFHGRGGSIGRGGGPTYLAIQSQPPGSVMGTLRSTEQGEMVEAKFGLPQIAVRQLEIYTTAVLLATLRPPIPPREEKWRNVMEEISNISCQCYRNVVYENPEFLAYFHEATPEAELGFLNIGSRPTRRKSSVGIGHLRAIPWLFAWTQTRFVLPAWLGVGAGLKGACEKGYTEELKAMYKEWPFFQSTIDLIEMVLGKADIPIAKHYDEVLVSKERQELGHELRSELMTAEKFVMVISGHEKLQQNNRSLRRLIENRLPFLNPLNMLQVEILKRLRRDDDNRKIRDALLITINGIAAGMKNTG

SEQ ID NO: 24133 - protein, 101 aa, Bartonella quintana str. Toulouse
MIARIYSPAKTAMQSGRGNTGFWILQYEPIQAKMLEPLMGYTATSDMNNQVRIRFNRKEEAIAFARKNAIPYRVEKTHRPIRRAVSYSDNFRSDRQQSWTH

SEQ ID NO: 24134 - protein, 342 aa, Yarrowia lipolytica CLIB122
MPPTSLVTGSTGFLASHVVDQLLSAGHRVIGTVRSPHKAARLAEAFKQQIASGQLELETLSDVRNAGEFKAIFEKHPEIKYILHTASPFNYNTTDPEKEMLQPAVEGTTTVLKAAKDHAPNVEKVVITSSLAAILNIATFNDPSTTLTEKDWNPITWEQAAEKGNPYANYIGSKAMAEKASVEFEKMEKPKFKLTWVNPVLILGPGIILDPLAINTSNEAIVTNAFETKPGQKPPVKAGYFVDVRDCAKAHVSALNPEFDGRRLFLSTSKYCTQDFLNIANQLPEFKGKIAEFDPIEREKELHSLAQIDNSATLKLLNYDLISLEHSVTDFAKEWLSYERND

SEQ ID NO: 24135 - protein, 320 aa, Xanthomonas axonopodis pv. citri str. 306
MRMNTTPDTALLVVNLGTPESPTAPAVRRYLAEFLSDRRVVAIPPLFWKPLLYGVILPIRGPKSAEKYAKVWLPEGSPLAVYTRRLAGGLQAVMPDWHVEWAMRYGEPALRKTLDRLRARGIKRIVVLPLYPQYSTTTTASIQDVVDAWRTSAPEIAVEVIQDYCEDTGWVAAIAESIRAHWQVHGRSEKLMFSFHGLPQRVADAGDPYPQQCERSAQAIVAALGLGADEWQMGYQSRFGAERWLQPYAEPTLWKLAEGGVRSFDLVCPGFATDCLETLEEVALGFSETLAERGATLSYIPCLNASDAHAHALAAMARRA

SEQ ID NO: 24136 - protein, 97 aa, Pseudomonas sp.
VDRLTQPVLRMTNGQYDKQGEFQPISWEKAFDIMELKFKEALKSKGPGSVGMFGSGQWTVWEGYAANKLMKAGFRSNNIDPNAPHCMASAVMGFMRT

SEQ ID NO: 24137 - protein, 97 aa, Pseudomonas sp.
VDRLTQPLSRMTNGQYDKQGQFQPISWEKAFDIMELKFKEALKSKGPGSVGMFGSGQWTMWEGYAANKLMKAGFRSNNIDPNARHCMASAVMGFMRT

SEQ ID NO: 24138 - protein, 516 aa, Listeria innocua
MTKFSEFGLDEKIVKSVNRMGFEEATPIQEKTIPLGLAGKDLIGQAQTGTGKTAAFGLPMIHKIDQKSNNVQALIIAPTRELAIQVSEELYKLSYDKHVRVLAVYGGSDISRQIRSLKKNPQIVVGTPGRILDHINRRTLKLDHVETLVLDEADEMLNMGFIDDIETILKEVPAERQTLLFSATMPDPIRRIGERFMHSPELIRIKAKEMTALLIEQFFVKVHEKEKFDVLSRLLDVQAPELAIVFGRTKRRVDELSRALDMRGYVAEGIHGDLTQAKRMSVLRKFKEGKIDVLVATDVAARGLDISGVTHVYNYDIPQDPESYVHRIGRTGRAGKEGMAITFVQPREMGYLRIVEETTKKRMQPLQAPTWDEAFAGQLRVATEKIQEAITEENLADYKTFANELLEKYDATDIAAAMLKMLAKEPDKTPVHITEERPLPSRGGGGYKGKNGKGGKGGGYRGGSGKGGSYRDRNNSGKGRRSGGGSGSGGGGNRDRRGGGEQRSGGNKGNYSQKSK

SEQ ID NO: 24139 - protein, 611 aa, Cryptococcus neoformans var. neoformans B-3501A
MENPSGPPKVPAEANREIIVCINTQVSQTEPSSLATYAKQIKMNSDEIAPVATLSSSSLPPSEMKAEATSSGLTHEGQLIDEAVIQAENEDKMTPYLVFLIGSAALGGFLYGYDTGVVGIALPYVGTDLGHALSSPEQEIATAATTIGAIFGAAILGYFADKWGRKWCLLISDLFFTAGAIIIASSFSLGQLTAGRLVLGVGVGGAAIICPLYITELAPTAVRGRCVGTNGFFIPFGQTVSVAIGAGLKDVKYNWRILFGLGVVPSLLQLCLMHKLPESPRVLILRGQDDRAREVLKQIYRYASHEVIELKLEIVKAHVQATTVLERSTTWAQRAKKLWCHKPYRRSILTVCMIQVFGQFTGYNTLLYYAGTLFGLVGLSNASLGGLIPSITNTFFLLVGMLFVDRIGRRGLLMKFGPLMIIGLIWCLIAFYFMCKETGGFLVEGFVYNQRDVGLVIAGIVIFVMGFGSTYAHICWYQSEYLALEIRAIGSAISTTASFSANLVVAVSFLSELETLTPSGTYGLYLGFVVIGYVLAYYCYPETKGLSIDEAFSLFDDDFGVKKSVKMRREKAEAQKRYNAEGGESGQVVDYLGAKPETSHIERVEPVASGL

SEQ ID NO: 24140 - protein, 106 aa, Nicotiana tabacum
GIRGVTVSDVRGFGAQGGLTERQAGSEFSEDKFVAKVKMEIVVSKDQVEGVIAKIIEEARTGEIGDGKIFLIPISDVIRVRTGERGEKAERMVGGHADMSSALSTS

SEQ ID NO: 24141 - protein, 162 aa, Brassica napus
ENKKWHVYAASSAQTSSDCNNNVYTLEMCMTGLDKEKASVFYKNETGGENGSMTDNSGIRKILPKSQICDFEFEPCGYSMNSIEGDAISTIHVTPEDGFSYASFEAVGYDFNTLDLSQLVTRVLSCFEPKQFSVAVHSSVGSNAYKPEISVDLEDYGCRERT

SEQ ID NO: 24142 - protein, 358 aa, Cryptococcus neoformans var. neoformans B-3501A
MAPSSALPATSKKAKKPQPTPKAPLPLPSTFSTAQAEKAVKALLAHHAKVSKQKEEEQLLPREEHVWVVVNTKTGSTRRSLNPVKIQLPHPALPPPPTSSVCLFTKDPQRQYKDLLAQHNIKFISRVVGVEKLKGKFKPYEARRELLRDHDMFLCDERVLGVMPKLLGKMFFEAKKQPIPVNLQRKDLTSTLARAISSTYFHPTTGTSTSTRIATPSHSSTSQTLANLLEAVPQIVAEVDGGWEGVLSVGIKTSGSVMLPVWTGKLGGRFEKAEKPEKSANSGEEMEVEVEEKSETPSAPAPTVEKREKKEKAAAAPVEKPKKKSSTIGSTAGGAAKRAKQVAVGAKKPAVKKSKSKL

SEQ ID NO: 24143 - protein, 285 aa, Xanthomonas campestris pv. vesicatoria str. 85-10
MSDKPHVFDATTDTFETEVLQKSLTTPVLVDFWATWCGPCKSLTPILEKLAGEYNGAFELGKVDVDKEQQIAAAFQIRSVPTVFLVKGGEIVDGFPGAMPEGQVREFLTQHGVLPAEPQVAEDVPPAPLDPQAQAAALREAVAAEPDKDELKLDLALALLKTGDTAEAEQLIDALPANLATDDRAVCAKARLSFANVLKDAPDAGTPQAAVDANSADLRARHLLGVRHLLDGNDEAALEQFLEMLRQDRSFDDNLPRRSLIDAFRVIQDEDLVGRYRRKMSALVF

SEQ ID NO: 24144 - protein, 252 aa, Coccidioides immitis RS
MAPPAIIAPSILSADFANLGAECSNLMKADSDWIHVDIMDGHFVPNITFGAPVVSNIRAHVQKPASIGGKGTFDCHMMIAEPQKWVKEFKQAGCDLYCFHWEAAMTSTAAKDPTDKETTARTSPKELIRYIHETGMQAGIALKPATSVDVLWDILENPVEIERPDMVLIMTVNPGFGGQKFMASELPKVAALRKKYPDMNIEVDGGLGVGTIDQAADAGANVIVAGSAVFGAKDPAEVIAKLREAVEKRRSA

SEQ ID NO: 24145 - protein, 987 aa, Synechococcus sp. RS9917
MTLLEQRCVASAEAIEQHRLSPFVERHLGPDPEQQQCMLQALGFASLEDFVRAVVPADILDAEPPLEAMPEGVAEAQALAELRKIAAANRLHRSLIGLGYHDTATPALIQRHVLENPAWYTAYTPYQAEIAQGRLEALLNFQTLISELTGLPIANASLLDESTACAEAMSLSLAVCKRPQACRFLVDAAVLPQTLAVLETRATPLGVSLEVGEPDAFRWDEDVFGVLLQLPGRNGHLWDPSALIAAAHAHGALATVAIDPLAQVLLAPVGSLGADIAVGSAQRFGVPMAGGGPHAAFFATREIYKRQVPGRIVGQSVDAEGRPALRLALQTREQHIRRDKATSNICTAQVLLAVMASFYAIHHGPDGLAVIARRLVGQRIALERGLVALGYPLPQAPRFDGFDVVTPLAPAVHQRASECGFNLRVLPDGAPVEQAEGFGLSLDELSDPGELQALLTVLAEVVDQPVPVLDPLAMAAETVDLEQALPALPLRRGRWLQQPVFQRYRSETELLRYIQRLVSRDLSLVHSMIPLGSCTMKLNAAAELVPVSWRSFSALHPFAPAEQCRGLQHLVHDLEGWLAALTGFAAVSLQPNAGSQGEYAGLLVIRAWHRSRQDAHRDVCLIPTSAHGTNPASAVMAGLRVVPVACDAQGNVDVEDLRAKAEQHSASLAALMVTYPSTHGVFETRIREICDLVHQHGGQVYLDGANLNAQVGLCRPGAYGADVCHLNLHKTFCIPHGGGGPGVGPIGVAAHLQPFLPGHPLVACGGDQGITPVSAAPWGSAGILPISWMYLRLMGPRGLRRASAVALLAANYLAHRLGDHYPVLFRGDAGLVAHECILDLRDLKRSAGLDVDDIAKRLMDYGFHAPTVSWPVAGTVMVEPTESESLPELDRFCDAMIAIRAEAAAIESGDVDRQNNPLKRAPHTLAAVTADHWDRPYSRREAAYPMADQREAKFWPHVARIDNAFGDRNLICTCPSVEELAAAQPAG

SEQ ID NO: 24146 - protein, 548 aa, Gloeobacter violaceus PCC 7421
MTSTFAPTPLTQRAAWQALAAHYEQIREIHLRALFAEDPSRGERFALEAEGFYLDYSKNRLTDETLRLLSVLAEESDLRGRIEAMFSGEKINTTEQRSVLHTALRAPRGATVIEDGENVVPEVHAVLDRMAEFADRVRGGEWRGYTGRRIRTVVNIGIGGSYLGPDMAYDALKHYSDRDLKVRFAANVDGSNFAEVIHDLEPDETLFIVCSKTFTTLETMTNAHSARQWCLAALGDEQAIAKHFVAVSTNAAEVEKFGIDTAHMFGFWDWVGGRYSMDSAIGLSTMIAVGPEHFRAMLAGFHAMDEHFRTAPFERNLPVLMALIGLWYNNFFGAQTLAVLPYDYYLGKLPAYLQQLDMESNGKHVDIDGQPVTYQTGPIIWGQPGTDGQHSFYQLIHQGTKLIPCDFIGFCQTLNPIAPHHDQLMANFFAQTEALAFGKTEAEVRAEGVADWLLPHRVFEGNRPTNTLLAERLTPEVLGKLIALYEHKVFTQGVIWNLDSFDQWGVELGKVLAGRIIPELESAEEPELAHDSSTNALIRRYRRAKRQN

SEQ ID NO: 24147 - protein, 402 aa, Physcomitrella patens subsp. patens
MATCVAAAVSSSLTALTSERATTGITASVQSSAFVGIKVSVCKDASALLKAVNAGTSRQPLVEPVRAQSVAAPASTNASTSSKKTDTKSTVIITGASSGLGLATAKVLADSGEWHVIMACRDFLKAERAAKSVGMPKENYTVMHCDLSSLNSVKQFVDNFRRSGRPLDVLVCNAAVYLPTAKEPRYTADGFELSVGTNHLGHFLLANLLMEDIQHKENNNSRRVIIVGSITGNTNTVAGNVPPKANLGDLRGLAGGLDGVRSSVMIDGGEFDGAKAYKDSKVCNMLTMQEMHRRFHEKTGVTFASLYPGCIATTGLFREHYSLFRTLFPPFQKYITKGYVSEEESGRRLAQVVSDPSMNKSGVYWSWNNQSGSFENELSQEASDAEKAKKLWEVSEKLVGLA

SEQ ID NO: 24148 - protein, 700 aa, Arabidopsis thaliana
MGVVENRKILPEKKLGGWRAITFILGMFFLSISFLPIMFFSLKRIINLPFASNIHMITNSQSKLKIYTFHNYDSLNLNFIDNTYNDMPSLFSFLIGSCVQHHANIMTHEHTKLLLRVMQFNNLRKYIVAIEMESEIKLSDFKFIFSTVSSNETLEKLGSIGVSANFMLYLRNVFHMEPVEAFNVYYLWMGLTNFAPLLGALISDAYIGRFKTIAYASLFSILGLMTVTLTACLPQLHPPPCNNPHPDECDDPNKLQLGILFLGLGFLSIGSGGIRPCSIPFGVDQFDQRTEQGLKGVASFFNWYYLTLTMVLIFSHTVVVYLQTVSWVIGFSIPTSLMACAVVLFFVGMRFYVYVKPEGSVFSGIARVIVAARKKRDLKISLVDDGTEEYYEPPVKPGVLSKLPLTDQFKFLDKAAVILDGDLTSEGVPANKWRLCSIQEVEEVKCLIRVVPVWSAGIISIVAMTTQATFMVFQATKMDRHMGPHFEIPAASITVISYITIGIWVPIYEHLLVPFLWRMRKFRVTLLQRMGIGIVFAILSMFTAGFVEGVRRTRATEMTQMSVFWLALPLILMGLCESFNFIGLIEFFNSQFPEHMRSIANSLFPLSFAAANYLSSLLVTTVHKVSGTKDHPDWLNKDLDRGKLDYFYYLIAVLGVVNLVYFWYCAHRYQYKAGSQIEDFNEEKSLLDIEPNQRHDQSPS

SEQ ID NO: 24149 - protein, 654 aa, Prochlorococcus marinus subsp. marinus str. CCMP1375
MCGIAGLICKDRQILALDEIGSKMNTSLLNRGPDDSGIWIDNDIGILLSHTRLSVNDLSKAGHQPMLSSSNRFVLTFNGEIYNHWDLRQELEITQGSQNWKSHSDTETLIQAIECWGVYKTLTKLIGMFAFGIFDRKENKFYLARDRFGEKPIYWGITGVGTRKVLIFGSDLKALKSYPEFNNTINRESMGLFINYNYVPDPHSIYENIWKLEAGKILEIDVTDDDYSKIYPMSWWQLEDTIKNVDGREIENESEAINLLKQELIKSVKSQSKADVKITSFLSGGIDSSLVSALLQETSNSQINTFTIGFENKRFDEATYARRISNYLGSNHSELIFTNEDALNIVPKINEYYSEPFADPAAIPTLLLCNAAKSQGYTVALSGDGADELFGGYNRYTMAPKIWKYFGIIPNFMKPMLINSVNKLSTQSIDLIGSILKIRQFRERLYKITDKISYSNSLEDLYYRLIREWSDVSSITEYKYNQPFTPISNERLNQSIHELKLDPVTFMMVIDCLSYLPGNNQVKLDRASMAVGLETRSPFLDKNVGELIWRLPINLKIKNNCGKYILKEILADYIPKKLFERPKAGFATPINEWIKGPLREWAEEMLNSNKVRDEGFLNPEITTKLLNEHIQGVKDNSKKLWSALIWESWIDKNI

SEQ ID NO: 24150 - protein, 494 aa, Bacillus cereus E33L
MLTTNIELKPKVKAFLDEEIKMFINGEFVPSIRGKTFETYNPATEDVLAVVYEAQEEDIDVAVKAARSAFESGPWVEMTTAERAHLIYKLADLIEEHGEELAQLEALDNGKPYQVALDDDIAATVENYRYYAGWATKIIGQTIPISKDYLNYTRHEPVGVVGQIIPWNFPLVMSSWKMGAALATGCTIVLKPAEQTPLSLLYTAKLFKEAGFPNGVVNFVPGFGPEAGSAIVNHHDIDKVAFTGSTVTGKYIMRQSAETIKHVTLELGGKSPNIILEDADLEEAINGAFQGIMYNHGQNCSAGSRVFVHRKHYETVVNELVKMADNVKLGAGMEKDTEMGPLVSKKQQERVLHYIEQGKAEGATVAAGGERAFEKGYFVQPTVFTDVTDDMTIVKEEIFGPVVVVLPFDSTEEVIERANRSSYGLAAGVWTQNIKTGHQVANKLKAGTVWINDYNLENAAAPFGGFKQSGIGRELGSYALDNYTEVKSVWVNIK

SEQ ID NO: 24151 - protein, 499 aa, Burkholderia xenovorans LB400
MTRVRRLNDTFDTGLVWLRRDLRNTDNAALYYALKHCERVWCVFVFDTTILQPLVDAWHARHPDTQPQDRRIEFILAALGELDEALRADGGGLIVLYGNPAELVPKLADELGVDAVFANHDYEPVAIERDGTVRERLAEAGRQWLTFKDQVIFERDEVLTGQSKPFTVFTPYRNAWLRQLSAFDLKPYPVETYAKRLAALPSKFDRQLPTLEQLGFAPSNLGELNLPAGMSGAQRLLDDFMTRIDSYADRRDFPAAKGPSYLSIHLRFGTVSIRTLARLAHEMSLQPDGQGSATWLSELIWRDFYFMILAHHPRLARGASFREEYDRLRWEQGLQADEAFAAWCNGRTGYPLVDAAMLQLNRTGYMHNRLRMVTASFLVKDLGVDWRLGERYFAEQLNDFDFSANNGGWQWAASTGCDAQPYFRIFNPVTQSEKFDAEGRFIKRYLPQLAKLPSKWIHAPWLAGAERLADCGVVLGKDYPAPIVDHAEARARTLARFGK

SEQ ID NO: 24152 - protein, 254 aa, Catharanthus roseus
MASQCCSSGSAKELHVLAVDDSLVDRKVIERLLKISCCKVTAVESGRRALQYLGLDGEKSTVGFDGLKVNLILTDYSMPGMTGYELLKKIKGSSTLKEIPVVIMSSENILTRIDRCLEEGAEEFLVKPVKLSDVKRIKDFVLKGGDEDGEKKTLGASKVGDENRPKETRKRNLDQSSSMSLSSTLVYSPLVLNKSSSSSLEEPHSPRTLLDNGIDQSAARDSSTLLRSSSAAVLASESEESHSKRSRLDSGAES

SEQ ID NO: 24153 - protein, 639 aa, Solanum tuberosum
MATQYHSSYDPENSASHYTFLPDQPDSGHRKSLKIISGIFLSSFLLLSVAFFPILNNQSPDLQSNSRSPAPPSRGVSQGVSDKTFRDVVNASHVSYAWSNAMLSWQRTAYHFQPQKNWMNDPNGPLYHKGWYHLFYQYNPDSAIWGNITWGHAVSKDLIHWLYLPFAMVPDQWYDINGVWTGSATILPDGQIMMLYTGDTDDYVQVQNLAYPTNLSDPLLLDWVKYKGNPVLVPPPGIGVKDFRDPTTAWTGPQNGQWLLTIGSKIGKTGIALVYETSNFTSFKLLDEVLHAVPGTGMWECVDFYPVSTEKTNGLDTSYNGPGVKHVLKASLDDNKQDHYAIGTYDLTKNKWTPDNPELDCGIGLKLDYGKYYASKTFYDPKKQRRVLWGWIGETDSESADLQKGWASVQSIPRTVLYDKKTGTHLLQWPVEEIESLRAGDPIVKQVNLQPGSIELLHVDSAAELDIEASFEVDKVALQGIIEADHVGFSCSTSGGAASRGILGPFGVVVIADQTLSELTPVYFFISKGADGRAETHFCADQTRSSEAPGVAKRVYGSSVPVLDGEKHSMRLLVDHSIVESFAQGGRTVITSRIYPTKAVNGAARLFVFNNATGASVTASVKIWSLESANIRSFPLQDL

SEQ ID NO: 24154 - protein, 450 aa, Botryotinia fuckeliana
MSNLPSEPEFEQAYNELASTLENSTLFEKNPEYRTALKVVSIPERVIQFRVVWEDDKNQVQVNRGYRVQFNSALGPYKGGLRFHPTVNLSVLKFLGFEQIFKNALTGLNIGGGKGGADFDPKGKSDNEIRRFCVSFMRELSKHIGADTDVPAGDINVGGREIGFLFGAYKAIQNKWEGVLTGKGGSWGGSLIRPEATGYGLVYYVAHMIQYAGQGSFQGKRVAISGSGNVAQYAALKCIELGATVVSLSDSQGSLIAEGDAYFTPEDVGKIAELKLKRQSLTAFEHGGKYKYIEGSRPWTHVKVDVALPCATQNEVSKEEAESLVASGARYIAEGSNMGCTQEAIDVFEAERKEKKDKAIWYAPGKAANAGGVAVSGLEMAQNSARISWTQEEVDEKLKDIMKNAFETGLETPKKYVEAKDGEYPSLVAGSNIAGFVKVASAMHNHGDWW

SEQ ID NO: 24155 - protein, 174 aa, Triticum aestivum
MAIMMAMSSFAGAGAAVLPRCSASRFGAQSLPALGRRALVVRAQTGGPSAPPPNKPKASTSIWDALAFSGPAPERINGRLAMVGFVTALAVEAGRGDGLLSQLGSGTGQAWFAYSVAWLSVSSLVPLLQGESAEGRAGIIMNANAELWNGRFAMLGLVALAATEIITGAPFINV

SEQ ID NO: 24156 - protein, 316 aa, Bacillus licheniformis ATCC 14580
MSEEKMYDVIIIGAGPAGMTAAVYTSRANLSTLMVERGVPGGQMANTEDVENYPGFESILGPELSNKMFEHAKKFGAEYAYGDIKEVVDEGDYKIVKAGSKEFKARAVIITAGAEYKKLGVPGEKELGGRGVSYCAVCDGAFFKNKELVVVGGGDSAVEEGVYLTRFASKVTIVHRRDKLRAQSILQARAFDNEKVDFLWNKTVKEIHEQDGKVGKVTLVDTVTGEEEEFRTDGVFIYIGMLPLSEPFKNLGITNEEGYIVTNEQMETKVEGIFAAGDIREKTLRQIVTATGDGSIAAQSVQHYIEELKEKEKAVK

SEQ ID NO: 24157 - protein, 337 aa, Monascus purpureus
MVVPKVGINGFGRIGRIVFRNAIEHEGVDIVAVNDPFIEVHYAAYMLKYDSTHGRFNGTVEFDGNTLIVNGKKIKFYAERDPAQIPWSETGAEYVVESTGVFTKQEKASLHLKGGAKKVIISAPSSDSPMFVMGVNNDQYTKDITVLSNASCTTNCLAPLAKVINDKFGIVEGLMTTVHSYTATQKVVDGPSNKDWRGGRTAAQNIIPSSTGAAKAVGKVIPSLNGKLTGMSMRVPTSNVSVVDLTARLEKAATYDEIKQAVKEASEGPLKGVLGYTEDDVVSSDLNGDPHSSIFDAKAGIALNSNFVKLVSWYDNEWGYSRRVIDLIAYIAQVDAQ

SEQ ID NO: 24158 - protein, 266 aa, Ashbya gossypii ATCC 10895
MNKSGNGRPSRTVYLGSIPYDQTEQQILDLCSNVGPVTGLKMMFDPQTGKSKGYAFIEFKDLATSSSAVRNLNGYALGNRTLKCGYTTGGGISEEYSLSNRGELSQVGGMGPQEELAYPNLPEGADVNINMTTPAMVISSELSKLSKPEQFNLLEKLQEMSRNDREAFVALLKQCPQISFVVAELLLTNGISQIDDLTQLAVDQTNGSAASKDSTPQVGEDDMQKLELLKQVLQLTDAEIATLPEDERMSLWDLKQRAMKGEFGPI

SEQ ID NO: 24159 - protein, 509 aa, Yarrowia lipolytica CLIB122
MTWIVQKFGGTSVGKFPKNICNDIVQQYSQSYDVAVVCSARSTGTKAEGTTTRLIAAADSALLGSDAYNPIIESIREDHLAAAKRDVKNPELLENLNADINGECDQLLRILAAAEIISEISPRTLDSIMAIGEKLSCMYMTAVMRDAGVNARYFDLSHAVTTTNAEDPKFYSDLGRVLGEIITLPGSPNTDSAPVKGNMVPVLTGFFGPVKGGLLSQIGRGYTDLCAALVAVGLDAKELQIWKEVDGVFTADPRKVSTARLLPIITPEEAAELTYYGSEVIHPFTMEQVIKAHIPIRIKNVENPLGGGTIIYPSADGSGNLKTKNNVQDLASSTDSLTSLSSGSFTPQVSAPVDDEKKPTAVTTKSNITVLNVHSNKRTKSHGFLNKIFATLDQQKLVVDLISTSEVHVSMAFHAPDSNLKQAVEELRKYGTVDVKRGMTIVSLIGTRMKAMVGCAGMFFSTLAQAGINIEMISQGANEINISCVIEEKDALKALNVIHQGLLCPRRKI

SEQ ID NO: 24160 - protein, 304 aa, Ashbya gossypii ATCC 10895
MDAKDVVTHVKNLEKNKSDEQTVLRILRILDKELVATEKLLRETKVGVIVNQFKKSSNDEIAKLVKKMIGTWKDAITKEKKKKAAVAAGGSGSGAGTAGGGAHSSHSGNSGPHEPKIQEKYHAKGPRSAKNDGVNTTIYGDKLRDMVIRAFYDALAKESEHPPQSILAIAIDIEKHMWQLNDPGENEKAYKDKYRVIYSNVISKNNRDLKHKITNGDITPEYLVNCDPKELAPEHLRKKLEEIAKQNLFNAQGATLERSVTDRFQCGKCKEKKVSYYQLQTRSADEPLTTFCTCEACGNRWKFS

SEQ ID NO: 24161 - protein, 360 aa, Moorella thermoacetica ATCC 39073
MRKRLGILTGGGDCPGLNAVIRAATKTAMSHGYEMIGFLDGYTGVVEGRYIRLDPAAISGLLHRGGTILGTNNRSNPFYFPIQENGETIYRDMSDLAIERLKEMNIEVLLVVGGDGTLAGARDFKAKGARVIGIPKTIDNDLAATDQTFGFDTAVRTATDALDKLHTTAESHHRVMVLELMGRYAGWIALYSGLAGGADVILIPEIPWNIESVLAKIEARRAEGKPFSIVVVAEGVKSPEGELVVQRRVEGSVERVRLGGIGQLVGKLIEEKSGIETRVTVLGHIQRGGSPSSYDRVLATRFGVAAAELAVRGVHGVMVCLRGSDISHVPLEEAVGKPRTIPRDHQLLAAARAIGISFGE

SEQ ID NO: 24162 - protein, 448 aa, Helicobacter pylori J99
MYVEKILQSLQKKYPYQKEFHQAVYEAITSLKPLLDSDKSYEKHAVLERLIEPEREIFFRVCWLDDNHQIQVNRGCRVEFNSAIGPYKGGLRFHPSVNESVIKFLGFEQVLKNSLTTLAMGGAKGGSDFDPKEKSEHEIMRFCQAFMNELYRHIGATTDVPAGDIGVGEREIGYLFGQYKKLVNRFEGVLTGKGLTYGGSLCRKEATGYGCVYFAEEMLQERNSSLEGKVCSVSGSGNVAIYTIEKLLQIGAKPVTASDSNGMIYDKDGIDLELLKEIKEARRGRIKEYALEKTSAKYTPTENYPKGGNAIWHVPCFAAFPSATENELSVLDAKTLLSNGCKCVAEGANMPSSNEAIELFLQAKISYGIGKAANAGGVSVSGLEMAQNASMHPWSFEVVDAKLHHIMKEIYKNVSQTAKEFKDPTNFVLGANIAGFRKVASAMIAQGV

SEQ ID NO: 24163 - protein, 486 aa, Vibrio sp. Ex25
MTFINNVQAEKSLYIAGEWQSGMDTIANINPSDISENIGDFAQASVSQVEQAIQAAKSAQPEWEKTPIERKQAVLQAIGDELIARCDELGTLLSREEGKPFAEGRGEIYRAGQFFQYFAAEVLRQIGDNAASVRPGVSVEVTREAVGVIAIISPWNFPTATAAWKIAPALAFGNSVVWKPANLTPASAVALTEIIHRQGLPAGTFNLVLGSGSQVGNTLINSKDVNGVSFTGSVDTGRKVAAATAPNFVRCQLEMGSKNALVVADDADIQIAVEATIAGSFSGAGQKCTASSRLVVMDGIHDAYVEALIKRMSELKVGHALEEGVFMGPVVDGNQLNANFEWIENARQAGAELAFGGERLSLEHDGYYMSPTLFLNTQNNWEVNQEEVFAPMASVIRVSDLDEAIAVANDTRFGLTGGIITQSLRNSAIFKQQVQTGCVMVNLPTAGTDYHVPFGGRKESSFGPREQGQYAKEFYTVVKTAYQRPY

SEQ ID NO: 24164 - protein, 500 aa, Streptomyces coelicolor A3(2)
MTNIVNHWIGGKTAEGASGTYGPVTNPATGEVTTKVAFASVDEVDAAVAAAREAYLTWGQSSLAQRTSILFRFRALLDAHRDEIAELITAEHGKVHSDALGEVARGLEIVDLACGINVQLKGELSTQVATRVDVSSIRQPLGVVAGITPFNFPAMVPLWMFPIAIACGNTFVLKPSEKDPSAAVKVAELLSEAGLPDGVFNVVHGDKVAVDRLLEHPDVKAVSFVGSTPIARYIHTTASANGKRVQALGGAKNHMLVLPDADLDAAADAAVSAAYGSAGERCMAISAVVAVGAVGDELVEKIRERAEKIKIGPGTDPSSEMGPLITKAHRDKVASYVAGAAAEGCEVVLDGTGYTVDGHEEGHWIGISLLERVPTTAKAYQDEIFGPVLCVLRADTYEEGVALINASPFGNGTAIFTRDGGAARRFQLEIEAGMVGVNVPIPVPVGYHSFGGWKDSLFGDHHIYGNDGTHFYTRGKVVTTRWPDPADAPAGVDLGFPRNH

SEQ ID NO: 24165 - protein, 567 aa, Aspergillus nidulans FGSC A4
MRQKRKLSNGADERYHPNAQQTADFGIVLRDFYPPEMSNARCEAYNSGILERPIESWQKAYTETSAQQNAMTANAAVVHWFKSDLRLHDNRALQMAYRVAREHKIPLIGLYILSPEDLTAHLSSPARVDLTLRTLEQLKRDLGELDVPLYMETQACRKDIPRRIINLCQEWGANHLFANLEYEVDELRREAKLIRLCAENGIRFETAHDMCVVPPGVLSSQQGRQYAVYSPWFRSWLAFLNENPEYLEVSEDPTSNPGDARRYFKELFECPVPATPENKRFDDVEKADRVRRAFPAGEHEGLRRLEEFLEKATAYDDERNFLSGETTSKLSPYFASGSLSARTAVAKAREANAGKISRGEAGYISWISEVAWRDFYKHVLVHWPFICMNKCFKFEFTNIDWSYNNTHFEAWAAGKTGYPLVDAAMRQLHATAWMHNRCRMVVSSFLCKDLLIDWRRGERYFMEHLIDGDFASNHGGWGFGSSTGVDPQPYFRIFNPIRQSERFDPDGEFIRRWVPELRGVEGNAIHAPYERGAGDIARANGYPEPIVDHARQRGVALRKYKDAARGA

SEQ ID NO: 24166 - protein, 369 aa, Vibrio cholerae O1 biovar eltor str. N16961
MPISTPQEIIEDIRQGKMVILMDDEDRENEGDLIMAAEHITPAAINFMATHGRGLICLTLTKERCRRLGLNPMVQDNNAQYTTNFTVSIEAAEGVTTGISAADRARTVQAAVAKEAKAADLVQPGHIFPLAAQDGGVLTRAGHTEAGCDLARLAGLEPASVIVEILNDDGTMARRPDLEVFAEKHGLKLGTIADLIEYRNHTETTIERVAQCKLPTEYGEFELVTYRDIIDKQIHFALRKGDITSAPTLVRVHLQDTFTDLLHSNRAAERSWPLATAMQRIGQEGGVLVILGHEESSELLLHRVKMFELQDKGEAPAMAKKQGTSRRVGVGSQILADLGVKEMRLLSSPNKKYHALGGFGLNVVEYVCE

SEQ ID NO: 24167 - protein, 463 aa, Salinibacter ruber DSM 13855
MPDRSLFLFRRDLRLADNTGLARACRASDEVVPAFIFDPRQCDPDNNAFFSEHAFAFLVRSLKELRRRLRERGGRLFVFEGDPAAILSELVSAGDISAVHVNRDYTPFARRRDDQLRSVCREEGARFQSSNALLLTEPEEVQPSGGGAYHTFTPFRRRAQSVSTPPPRGKVEGPFCDRALSVETTPLETYDRYPTDDLRAKGGRAEGIEFLEEIETLGAYRDARHQPAKESLTALSAHHKFGTISIRESLYVVKKAFEDYHKLISQFYWRDFYTHLLFHRPEQLTTSLRPIGRHIPWRNERGEFDRWHEGATGVPFVDAGMRELRETGYMHNRVRMVVASFLTKDLLVDWRWGAQHFARTLTDYDPAVNAGNWQWAASVGTDYRLRIYNPYSQAEKHDPEAEYIKRWVPEVRDVDADRLASGTQEDFSDAAPGYPAPIVDRNDAYHRAKDAFREAGRALEEAQ

SEQ ID NO: 24168 - protein, 396 aa, Psychrobacter arcticus 273-4
MAKAKFERLKPHVNVGTIGHVDHGKTTLTAAIATVAAITSGGEAKDYASIDSAPEEKARGITINTSHVEYDTPSRHYAHVDCPGHADYVKNMITGAAQMDGAILVVSATDGPMPQTREHILLSRQVGVPYIVVFMNKCDVVDDEELLELVEMEVRELLSDYDFPGDDTPIIHGSATEALKGSQEKYGQPAVVELLNVLDTYIPEPERDIDKAFLMPIEDVFSISGRGTVVTGRVESGIVRVGEEIEIVGIRDTQKTTCTGVEMFRKLLDEGRAGENCGVLLRGTKREDVQRGQVLAKPGSITPHTKFDAEVYVLSKEEGGRHTPFLNGYRPQFYFRTTDVTGAIQLQDGTEMVMPGDNVEMGVELIHPIAMDKGLRFAIREGGRTVGAGVVANVHV

SEQ ID NO: 24169 - protein, 950 aa, Methylobacterium extorquens
MTLIKEIDYGTPIRLNEQTVTLTIDGESVTVPAGTSVMAAAMHMGTKIPKLCATDSLEPFGSCRMCLVEIDGRRGAPASCTTPAENGMVVHTQTDKLHRLRKGVMELYISDHPFDCLTCAANGDCELQDTAGQVGLREVRYGYDGDNHVKPASDRYLPKDESNPYFTYDPSKCIVCNRCVRACEETQGTFALTIEGRGFDSRVAAGPTNFMQSECVSCGACVQALPTATLQEKTIHQYGQPDHSEVTTCAYCGVGCAFKAEMQGDKVVRMVPYKGGKANEGHSCVKGRFAYGYATHKDRITKPMIREKITDPWREVSWEEAINHAASEFKRIQATYGRDSVGGITSSRCTNEEAYLVQKLVRAAFGNNNVDTCARVCHSPTGYGLMSTLGTSAGTQDFKSVEESDVILVIGANPTDGHPVFGSRMKKRLREGARLIVADPRKIDLVKSPHIRADHHLPLKPGSNVAFINAFAHVIVTEGLIAEDYVRERCDLAEFESWARFIAEERNSPEAAQAITGVDPQEIRAAARLYATGGKAAIYYGLGVTEHSQGSTMVMGMANIAMATGNIGMVGAGVNPLRGQNNVQGSCDMGSFPHELPGYRHVSDDATRESFEAIWGAKLDNAPGLRITNMLDEAVGGSFKGMYIQGEDIAQSDPDTHHVTSGLKAMECIVIQDLFLNETAKYAHVFLPGASFLEKDGTFTNAERRISRVRKVMAPMGGYGDWEGTVLLANALGYKMEYTHPSEIMDEIAALTPSFAGVSYDKLEELGSIQWPCNEKAPLGTPMMHVDRFVRGKGRFMITEYVPTDERTTGKFPLILTTGRILSQYNVGAQTRRTENSRWHEEDVLEIHPFDAEMRGIVDGDLVALESRSGDIALKAKVTERMQPGIVYTTFHHAKTGANVITTDYSDWATNCPEYKVTAVQVRRTNRPSDWQAKFYEEDFSLTRIAEAAE

SEQ ID NO: 24170 - protein, 108 aa, Methylobacillus flagellatus KT
MSEHITHISDDTFDQEVLQSQLPVLVDYWAEWCGPCKMIAPILDEIAKEYAGRLKIAKLNIDENQNTPPKYGIRGIPTLMLFKDGNVEATKVGALSKSQLTAFIDSNI

SEQ ID NO: 24171 - protein, 854 aa, Brassica oleracea
MQGVRNIYHHSYTLSFLLVFFVWILFRPAFSINTLSSTESLTISSNRTLVSPGNVFELGFFKTTSSSRWYLGIWYKKFPYRTYVWVANRDNPLSNDIGTLKISGNNLVLLDHSNKSVWSTNVTRGNERSPVVAELLDNGNFVMRDSNSNNASQFLWQSFDYPTDTLLPEMKLGYDLKTGLNRFLTSWRSSDDPSSGDYSYKLEPGRLPEFYLWKGNIRTHRSGPWSGIQFSGIPEDQRLSYMVYNFTENREEVAYTFQMTNNSFYSILTISSTGYFQRLTWAPSSVVWNVFWSSPNHQCDMYRICGPYTYCDVNTSPSCNCIQGFNPENVQQWALRIPISGCKRRTRLSCNGDGFTRMKNMKLPDTTMAIVDRSIGVKECKKRCLGDCNCTAFANADIRNGGTGCVIWTGELADIRNYADGGQDLYVRLAAADLVKKRDANWKIIIVGVSVVLLLLLLIMFCLWKRKQNRAKAMATSIVNQQRNQNVLMNGMTQSNKRQLSRENKTEEFELPLIELEAVVKATENFSNCNELGQGGFGIVYKGMLDGQEVAVKRLSKTSLQGIDEFMNEVRLIARLQHINLVRILGCCIEADEKILIYEYLENSSLDYFLFGKKRSSNLNWKDRFAITNGVARGLLYLHQDSRFRIIHRDLKPGNILLDKYMIPKISDFGMARIFARDETQAMTDNAVGTYGYMSPEYAMDGVISEKTDVFSFGVIVLEIVSGKRNRGFYQVNPENNLLSYAWSHWAEGRALEIVDPVIVDSLSSLPSTFQPKEVLKCIQIGLLCIQERAEHRPTMSSVVWMLGSEATEIPQPKPPVYCLIASYYANNPSSSRQFDDDESWTVNKYTCSVIDAR

SEQ ID NO: 24172 - protein, 160 aa, Oenococcus oeni PSU-1
MSIYDYKATLENGESYKLDKYKGKIMVIVNTATKCGFAPQFEELEKIYKQFKDSGLVVLGFPSNQFKQELDSSQAAAEACRTTYGVTFLMHEINDVNGKDELPLFSYLKDNAPGAIGKSIKWNFTKFLVKQDGEVAKRYAPKTDPEKMIPDIEELLQLQK

SEQ ID NO: 24173 - protein, 566 aa, Frankia sp. CcI3
MPTSPRAGQPAAPEDLVDVDGLLAAYHEIHPDPADPTQRVSFGTSGHRGSALRGSFNADHILATTQAICDYRKEAGVDGPLFVGIDTHALSAPALASALEVLAANGVTVCIAPDGEATPTPVISHAILRHNRERTPSNRTGRTDTTGATGATGPARGLADGIVVTPSHNPPADGGFKYNPTHGGPADTGVTKVIQDRANALLDGGLAGVARVPYPQARAAAVVHDYVGAYVADLGDVIDLDAIRGAGVRIGVDPLGGASLVYWQAVAERYKLDLDVVNTTIDPTFAFMTTDWDGRIRMDPSSPYAMASLVRLAGSFDVALANDADADRHGIVTGTAGLLNPNHYLSAAIAYLFGHRPGWPTGTAIGKTLVSSSMINRVGVGLGRDVVEVPVGFKWFVAGLTDGNLGFGGEESAGASFLRRDGAVWTTDKDGIIACLLAAEMTAVTGRDPGQLYRELTNVHGAPAYRRVDAPATPAQKKILAALTPESLSATTLAGSPVTAALSHAPGNGAAIGGVKVVTDDAWFAARPSGTEDVYKVYAESFRGPGHLDEVITEAQSIVDAALARG

SEQ ID NO: 24174 - protein, 479 aa, Pinus taeda
  misc_feature (453)..(453): Xaa can be any naturally occurring amino acid
EAEKEDLVKQVAAECKGLPLALKVIGSSLRGKRRPIWINAERKLSKSESISEYYKESLLKRLETSIDVLDDKHKQCFLDLGAFPKGRKFSVETLLDIWVYVRQMEWTDAFEVLLELASRNLLNLTGYPGSGAIDYSCASELTFSQHDVMRDLALYLASQDNIISPKRLFTPSKEDKIPTEWLSTLKDQASRAQFVSIYTGAMQEQDWCQIDFPEVEALALFFSANQYCLPTFLHRTPKLKVLIVYNYSSMRANIIGLPRFSSPIQIRSVFLHKLIVPASLYENCRSWERLEKLSVCLCEGLGNSSLVDMELEPLNFPNITEINIDHCSDLGELPLKLCNLTSLQRLSVTNCHLIQNLPDDMGRLKSLRVLRLSACPSLSRLPPSICKLGQLEYLDISLCRCLQDLPSEFDQLSNLETLDMRECSGLKKVPTVIQSSLKRVVISDSDKEYEAWXSIKASTLHTLTIDVVPEIFSLAWLDD

SEQ ID NO: 24175 - protein, 948 aa, Mycobacterium sp. KMS
MLDSHQPRFADRHIGPDSDAVAVMLDTIGVATLDDLAAKALPANILDALSADGVAPGLECLPAPASETEALAELRALAESNTVAVSMIGQGYFDTLTPPVLRRNILENPAWYTAYTPYQPEISQGRLEALLNFQTMVSDLTGLEVANASMLDEATAAAEAMTLMQRAGRSKSNRLAVDADLYRQTAAVLATRARPLGIEIVTADLRHGLPEGDFFGVIVQLPGASGALVDWAPLVADAHDRGALVAVGADLLALTLVTPPGEFGADVSFGSTQRFGVPMGFGGPHAGYLAVHTKHARQLPGRLVGVSVDADGSPAYRLALQTREQHIRRDKATSNICTAQVLLAVIAAMYASYHGAEGLTSIARRVHGHARAVATGLAEAGVDVVHDAFFDTVLVKVPGRAAEIRDAAKSHGINIWLVDADHVSVSCDEATTADHVAAVLSAFGATRGGKPFAGPEIATRTSAFLTHPAFTRYRTETEMMRYLRSLADKDIALDRSMIPLGSCTMKLNAAAEMEPITWPEFARQHPFGPESDAPGLRRLIADLQTWLTGITGYDEISLQPNAGSQGEYAGLLAIKAFHDANGAPERDVCLIPSSAHGTNAASAALAGMRVVVVGCRPNGDVDLDDLRAKVTENAERLAALMITYPSTHGVYEHDVAEICAAVHDAGGQVYVDGANLNALVGLARPGRFGGDVSHLNLHKTFCIPHGGGGPGVGPVAVRAHLAPYLPGHPLADELGDDYTVSAAPYGSASILPITWMYIRMMGAPGLRAASLTAIASANYVARRLDEYYPVLYTGENGMVAHECILDLRTITKQTGVTVDDVAKRLADFGFHAPTMSFPVAGTLMVEPTESESLSEVDAFCEAMIAIRAEIDQVGSGAWPVDDNPLRGAPHTAESLLVTEWEHPYTREQAAYPLGKGFRPKVWPPVRRIDGAYGDRNLMCSCPPVEAFA

SEQ ID NO: 24176 - protein, 144 aa, Vibrio parahaemolyticus RIMD 2210633
MSSFKTRCPSCGGLNRVPNERVAESATCGKCKSPLLDGVPIEGTLDNFSALLESSTPVVVDFWAPWCNPCVGFAPVFSDVAQEQAGTARFVKIDTEAQQQLAAQFGIRSIPTIMVFKNGQRVDMLNGALPKSQFDQWLNQALTK

SEQ ID NO: 24177 - protein, 856 aa, Brassica oleracea
MQGVRNIYHHSYTLSFLLVFFVLILFRPAFSINTLSSTESLTISSNRTLVSPGNVFELGFFKTTSSSRWYLGIWYKKFPYRTYVWVANRDNPLSNDIGTLKISGNNLVLLDHSNKSVWSTNVTRGNERSPVVAELLDNGNFVMRDSNSNNASQFLWQSFDYPTDTLLPEMKLGYDLKTGLNRFLTSWRSSDDPSSGDYSYKLEPGRLPEFYLWKGNIRTHRSGPWSGIQFSGIPEDQRLSYMVYNFTENREEVAYTFQMTNNSFYSILTISSTGYFERLTWAPSSVVWNVFWSSPNHQCDMYRICGPYTYCDVNTSPSCNCIQGFNPENVQQWALRIPISGCKRRTRLSCNGDGFTRMKNMKLPDTTMAIVDRSIGVKECKKRCLGDCNCTAFANADIRNGGTGCVIWTGELADIRNYADGGQDLYVRLAAADLVKKRNANWKIISLIVGVSVVLLLLLLIMFCLWKRKQNRAKAMATSIVNQQRNQNVLMNGMTQSNKRQLSRENKADEFELPLIELEAVVKATENFSNCNELGQGGFGIVYKGMLDGQEVAVKRLSKTSLQGIDEFMNEVRLIARLQHINLVRILGCCIEADEKILIYEYLENSSLDYFLFGKKRSSNLNWKDRFAITNGVARGLLYLHQDSRFRIIHRDLKPGNILLDKYMIPKISDFGMARIFARDETQARTDNAVGTYGYMSPEYAMDGVISEKTDVFSFGVIVLEIVSGKRNRGFYQVNPENNLLSYAWSHWAEGRALEIVDPVIVDPLASLPSTFQPKEVLKCIQIGLLCIQERAEHRPTMSSVVWMLGSEATEIPQPKPPVYCLIASYYANNPSSSGQFDDDESWTVNKYTCSVIDAR

SEQ ID NO: 24178 - protein, 831 aa, Rhodobacter sphaeroides
MTLTRRDLIKAQAAATAAAAAGLPVSALAQPVTGGAEALRIRWSKAPCRFCGTGCGVMVGTRDGQVVATHGDTQAEVNRGLNCVKGYFLSKIMYGEDRLTTPLLRMKDGVYHKEGEFAPVSWDEAFDVMAAQAKLVLKEKAPEAVGMFGSGQWTIWEGYAASKLMRAGFRSNNLDPNARHCMASAATAFMRTFGMDEPMGCYDDFEAADAFVLWGSNMAEMHPILWSRLTDRRLSHEHVRVAVLSTFTHRSSDLSDTPIIFRPGTDRAILNYIAHHIISTGRVNRDFVDRHTNFALGATDIGYGLRPEHQLQLAAKGAADAGAMTPTDFETFAALVSEYTLEKAAEISGVEPALLEELAELYADPDRKWMSLWTMGFNQHVRGVWANHMVYNLHLLTGKISEPGNSPFSLTGQPFACGTAREVGTFAHRLPADMVVTNPEHRAHAEEIWKLPAGLLPDWVGAHAVEQDRKLHDGEINFYWVQVNNNMQAAPNIDQETYPGYRNPENFIVVSDAYPTVTGRAADLVLPAAMWVEKEGAYGNAERRTHFWHQLVEAPGEARSDLWQLMEFSKRFTTDEVWPEEILSAAPAYRGKTLFEVLFANGSVDRFPASDVNPDHANHEAALFGFYPQKGLFEEYAAFGRGHGHDLAPFDTYHEVRGLHWPVVEGEETRWRYREGFDPYVKPGEGLRFYGKPDGRAVILGVPYEPPAESPDEEFGFWLVTGRVLEHWHSGSMTLRWPELYKAFPGAVCFMHPEDARSRGLNRGSEVRVISRRGEIRTRLETRGRNRMPRGVVFVPWFDASQLINKVTLDANDPISRQTDFKKCAVKIEAV

SEQ ID NO: 24179 - protein, 740 aa, Catharanthus roseus
MESCNCIEPQWPADELLMRYQYISDFFIALAYFSIPLELIYFVKKSAVFPYRWVLVQFGAFIVLCGATHLINLWTFTMHSRTVAVVMTTAKVLTAVVSCATALMLVHIIPDSLSVKTRELFLKNKAAELDREMGLIRTQEETGRHVRMLTHEIRSTLDRHTILKTTLAELSRTLALEECALWMPTRSGVELQLSYTLRLPNPVGFTVPILLPVINQVFSTNRAVKISPNSPVARLRPTGKYMPGEVVAVRVPLLHLSNFQINDWPELSTKRYALMVLMLPSDSARQRHVHELELVEVVADQVAVALSHAAILEESMRARDLLMDQNVALDLARREAETAIRARNDFLAVMNHEMRTPTHAIIALSSLLQETELTPEQRLMVETILKSSNLLATLINDVLDLSRLEDGSLQLDIATFNLHSLFREVLNLIKPITSVKRLFATLSLAPDIPEYAISDEKRLMQIMLNVVGNAVKFTKEGGISITAFVAKSDSLRDPRAPEFFPVPSDSHFYLRVQVKDSGSGINPQDIPQLFTKFAQSQTLATRNSGGGGLGLAICKRFVNLMEGQIWLESDGLGKGCTAIFMIKLGIPGRSSEAKLPLVSRVPADHVQTTFPGLKVLLMDDNGVSRMVTKGLLLQLGCEVTTVSAGDECLRVISNEHRVAFMDVSIPGKDIYEVAVRIHEKFSKRLDRPLIIALTANADRVMKENCLRVGMDGVVQKPISVDKMRSVLSELLDHGVLLEAQ

SEQ ID NO: 24180 - protein, 102 aa, Oryza sativa
MAPTVMASSATSVAPFQGLKSTAGLPVSRRSGNSSFGNVSNGGRIRCMQVWPIEGIKKFETLSYLPPLTVEDLLKQIEYLLRSKWVPCLEFSKVGFVYRVNH

SEQ ID NO: 24181 - protein, 178 aa, Cryptococcus neoformans var. neoformans
MSSTGWEIRFSNSRQIPYFYNSERSISTWEPPSELSAEQIQQLPGAAKYMNVQLAQPAGGKEGQVRASHILAKHAGSRRPASWRNVRITITSDEAQAIIEQHIAYLQSLPPADLPKEFAKIASTESDCSSARKGGDLGWFGRGQMQKPFEDATFNTPVGQLSGIVKTDSGIHVILRTG

SEQ ID NO: 24182 - protein, 448 aa, Streptococcus pneumoniae R6
MTSAKEYIQSVFETVKARNGHEAEFLQAVEEFFNTLEPVFEKHPEYIEENILARITEPERVISFRVPWVDRDGKVQVNRGYRVQFNSAVGPYKGGLRFHPTVNQGILKFLGFEQIFKNVLTGLPIGGGKGGSDFDPKGKTDAEVMRFCQSFMTELQKHIGPSLDVPAGDIGVGGREIGYLYGQYKRLNQFDAGVLTGKPLGFGGSLIRPEATGYGLVYYTEEMLKANGNSFAGKKVVISGSGNVAQYALQKATELGATVISVSDSNGYVIDENGIDFDLLVDVKEKRRARLTEYAAEKATATYHEGSVWTYAGNYDIALPCATQNEINGEAAKRLVAQGVICVSEGANMPSNLDAIKVYKENGIFYGPAKAANAGGVAVSALEMSQNSLRLSWTREEVDGRLKDIMTNIFNTAKTTSETYGLDKDYLAGANIAAFENVANAMIAQGIV

SEQ ID NO: 24183 - protein, 526 aa, Brassica napus
SASATTESDIEETLKRLLQLNKTPEEVFDALKNQTVDLVLTAHPTQSVRRSLLQKFGRIRDCLTQLYAKDITPDDKQELDEALQREIQAAFRTDEIRRTPPTPQDEMRAGMSYFHETIWKGVPKFLRRVDTALKNIGINERVPYNAPLIQFSSWMGGDRDGNPRVTPEVTRDVCLLARMMAANLYFSQIEDLMFEMSMWRCNEELRVRAEVQRCAKRDAKHYIEFLKQIPSNEPYRAIPRDVRDKLYNTRERARQLLSSGVSDIPEDSVFTSVDQFLEPLELCYRSLCDCGDRPIADGSLLDFLRQVSTFGLALVKLDIRQESDRHTDVLDAITQHLGIGSYKEWSEDKRQEWLLSELSGKRPLFGHDLPKTEEIADVLDTFKVISELPHDSFGAYIISMATAPSDVLAVELLQRECGITHPLRVVPLFEKLADLENAPASVARLFSIEWYRNRINGKQEVMIGYSDSGKDAGRLSAAWQLYKTQEELVKVAKEYGVKLTMFHGRGGTVGRGGGPTHLAILSQPPD

SEQ ID NO: 24184 - protein, 362 aa, Burkholderia vietnamiensis G4
MTDPTMQRTRAVFPFAALVAQEPLQQALLLAAIDPALGGVLVSGPRGTAKSTAARALAELLPEGEFVTLPLSASDEQVTGTLDLAHALAENGVRFRPGLLARAHRGVLYVDEVNLLADGLVDTLLDVAASGVNVVERDGVSHAHDARFVLVGTMNPEEGELRPQLLDRFGLMVELENCFDAAQRAQIVKARLAFDGDPDAFRAHHADAQRALGERIRAARQRLAALDFDDAVHARVSALCIDAAVDGLRADLVMLRAARALAALEQAAAVTVSHVERVADAVLRHRRHADAPRAPDASPSRDDGARDGRAPPDPHSRRDERGGAHAAGGAAPSPDGDWGYLPPEPAGLHDVKGVVPLPLKKR

SEQ ID NO: 24185 - protein, 331 aa, Debaryomyces polymorphus var. polymorphus
FPSIVGRPRHQGIMVGMGQKDSYVGDEAQSKRGILTLRYPIEHGIVTNWDDMEKIWHHTFYNELRVAPEEHPVLLTEAPMNPKSNREKMTQIMFETFNVPAFYVSIQAVLSLYSSGRTTGIVLDSGDGVTHVVPIYAGFSMPHGILRIDLAGRDLTDYLMKILSERGYAFTTTAEREIVRDIKEKLCYVALDFEQEMQTSSQSSAIEKSYELPDGQVITIGNERFRAPEALFRPSDLHLEAAGIDQTTFNSITKCDIDVRKELYGNIVMSGGTTMFPGIAERMQKEITALAPSSMKVKIIAPPERKYSVWIGGSILASLSTFQQMWISKQE

SEQ ID NO: 24186 - protein, 132 aa, Brassica napus
  misc_feature (18)..(18): Xaa can be any naturally occurring amino acid
WLERVHVPELYNTTIPLXKHLHKMSLILCKINNSFDQTGVDVSCIFPKLGDLTIDHCDDLVTLPSSICKMTSLNSLSITNCPRLGELPKNLSKLQALELLRLYACPELKALPDEICELPQLKYLDISQCVSL

SEQ ID NO: 24187 - protein, 601 aa, Oryza sativa
  misc_feature (76)..(76): Xaa can be any naturally occurring amino acid
MIICYFSDRVFFETISQSANLDTIKMKLWEQISGNLVLGAYNQIPEWQLKLGPRDTARGSVILDDVWSLSQLEELXSRFPGCKTLVVSRFKFPSLVTRTYEMELLDEEAALSVFCRAAFDQESVPRTADKKLVRQVAAECRGLPLALKVIGASLRDQPPKIWLSAKNRLSRGETISDSHETKLLERMAASIECLSGKVRECFLDLGCFPEDKKIPLDVLINIWMEIHDLDEPDAFAILVELSNKNLLTLVNDAQNKAGDLYSSYHDFSVTQHDVLRDLALHMSGRDALNNRRRLVMPRREESLPKDWQRNKDTPFEAQIVSIHTGEMKESDWFQMSFPKAEVLILNFASSVYYLPPFIATMQNLKALVLINYGTISATLDNLSAFTTLSDLRSLWLEKITLPPLPKTTIPLKNLRKISLVLCELTNSLRGSKVDLSMTFPRLSNLTIDHCIDLKELPSSICEISSLESISISNCHDLTELPYELGKLHCLSILRVYACPALWRLPPSVCSLKRLKYLDISQCVNLTDLPEELGHLTSLEKIDMRECSRLRSLPRSSSSLKSLGHVVCDEETALLWREAEQVIPDLRVQVAEECYNLDWLVD

SEQ ID NO: 24188 - protein, 314 aa, marine gamma proteobacterium HTCC2207
MSETQHYPLIILGSGPAGWTAAVYAARANLSPVVITGIQQGGQLTTTTDVDNWPGDADGVQGPELMERMQKHAERFDTKTIFDHIDEVVLDERPFRLKGSSNYSCDSLIIATGASAQYLGLPSEEAFMGKGVSACATCDGFFYRNKPVAVLGGGNTAVEEALYLSNICSEVTLIHRRDELRAEKMLQDKLFEREKTGNITIEWSHNLDEVLGDDAGVTGVRIKSTADGATKDLSVDGVFIAIGHKPNTDIFADKLAMKDGYLTIAGGMAGNATETSVPGVFAAGDVADHVYRQAVTSAGSGCMAALDAERFLDQ

SEQ ID NO: 24189 - protein, 578 aa, marine gamma proteobacterium HTCC2207
MELLSGGEILIRALKDAGIKHVWGYPGGAALHIYDALYRQEDVQHLLVRHEQAAVHAADGYSRSTGEVGTALVTSGPGATNAITGIATAYMDSIPMVVISGQVPLTKIGQDAFQETDMVGVSRPIVKHSFLVTRAEDIAETIAKAYYIAATGRPGPVVVDIPKDVTDPSYQIPYEYPAEVKMRSYQPSDKGHRGQIRRAVRTLIGAKRPVLYTGGGVVLDNASEHLIALAKKLNYPVTNTLMGLGGYPGTDPQYLGMLGMHGTYEANTAMHHADVIFAIGARFDDRVTNDLEKFCPHATIIHIDVDPTSVSKNIEAHIPIVGTCNSVLPEMLSLIDQSETTPDSDAIAEWWQQIDQWRADKGIYTASRYEESSGNCIKPQDVIKMLYKVTEGKAIVTSDVGQHQMFAAQYYLFDKPRTWINSGGLGTMGFGLPAAMGCKLAFPDCDVACVSGEGSIQMNIQELSTCSQHNLPVKIINLNNAALGMVRQWQDMNYSSRYSESVYEESLPDFIRLAEAYGHVGMKITHIDQLEEKMREAFAMKDRVVFLDIDVDRSEHVYPMQMPGGSMRDLWLNKTERT

SEQ ID NO: 24190 - protein, 284 aa, Streptomyces avermitilis MA-4680
MTAQILDGKATAAAIKSDLTARVAALKEKGVTPGLGTILVGDDPGSQKYVAGKHRDCAQVGIASIQRELPATATQEEIEAAVRELNEDPACTGYIVQLPLPKGIDENRILELMDPDKDADGLHPMNLGRLVLNEPAPLPCTPNGVLTLLRRYGVEIKGAEVVVVGRGVTIGRPMPLLLTRRSENATVTQCHTGTRDLSSHLKRADIIVAAAGSAHLIRPEDVKPGAAVLDVGVSRSAEGKIVGDVHPGVAEVAGWISPNPGGVGPMTRAQLLVNVVEAAERSVG

SEQ ID NO: 24191 - protein, 332 aa, delta proteobacterium MLMS-1
MTVKSCFPQPDRSRLDSKPPPPEEIRDLVIIGGGPGGLTAGIYAMRAALDTVLVEKGLPGGQLNNTATVENWPGTETISGVELAEKMTAHAKANGLEIMAREVKEIEPGDDHHCVYLDNGEQIPTRAVIIGSGGQPRQLGVPGETENYGKGVSYCAVCDGFFFRDKTVVVVGGGDTAMEEALYLAKIATKVYLVHRRQEFRAGMILQKRVLAEEKIEVLLNGVVTEIKADGGGVTAAEVQNRESGEKVEITTDGVFVFIGFEPDNSLVPAGIRMNVDGYVITDEKCETCMQGIFVIGDLREKPIKQIVTAAADGCIAAQAAARLVEHRAAKR

SEQ ID NO: 24192 - protein, 148 aa, Rickettsia sibirica 246
MRQSGNPYYSHPIEVKIMLAEFVAEEAPKLYNIIMLQAALLHDTIEDTEFTEEAITKIFGPEVAKHVEGLTRIKSYGKISSGESLNLLIKEKRYNTALIKLFDRIHNVQTLGVKSPEKARKIIEATLINFLLVAANINYKLEQELSYA

SEQ ID NO: 24193 - protein, 519 aa, marine gamma proteobacterium HTCC2207
MNSSEQPKEKLIIFDTTLRDGEQSPGASMTKDEKVRIAIALEKMRVDVIEAGFAISSQGDFEAIQAIARSVTESRICSLSRAVSGDIERAAEALKGANAGRIHTFIATSPIHMKHKLQMEPDQVLEQAVGAVKIARGLIDDVEFSLEDASRTEFDFMCRITEAVISAGARTINLPDTVGYSDPGEYAAMIKRLMNSVPNADKAIFSVHCHNDLGLAVANSLAAIQSGARQVECTVNGLGERAGNAALEELVMAIRTRQDVFPVQTNIDATHIVPTSRLVSSITGFPVQPNKAIVGANAFAHESGIHQDGILKFRETYEIMRAEDVGWSTNKLSLGKLSGRAALSSRLEELGIKFDSQEEFNQLFKRFKALADKKREIFDEDLQALVSDAQLGSEADALTLIDLEVLSKSGQAPQSKIIVSYQDKQHSAEASGDGAVDAIFNAIEKLVSSGSNLQLYSVNAVTEGTDSQGGVTVRLEKDGRIINGQGADTDILVASAKAYLNALTLMRNPGRLHPQLGGI

SEQ ID NO: 24194 - protein, 253 aa, Streptomyces avermitilis MA-4680
MADAPYKLILLRHGESEWNAKNLFTGWVDVNLNEKGEKEAVRGGELLKDAGLLPDVVHTSLQKRAIRTAQLALESADRHWIPVHRSWRLNERHYGALQGKDKAQTLAEFGEEQFMLWRRSYDTPPPPLADGSEFSQSDDPRYASIPPELRPKTECLKDVVNRMLPYWYDGIVPDLLTGRTVLVAAHGNSLRALVKHLDGISDEDIAGLNIPTGIPLSYELDTDFKPLNPGGTYLDPDAAAAAIEAVKNQGKKK

SEQ ID NO: 24195 - protein, 464 aa, Staphylococcus aureus subsp. aureus MRSA252
MACTMKVSKFGGSSVSNATQIKKVLNIVNSDPERKIVIVSAPGKRHDNDIKTTDLLIRLYEKVINHLDYHDKKREIIQRYDDIVKELQMDESILRTIDVTLEHYINQLKNEPKRLLDALLSCGEDFNAQLIALYNNSQGIPTKYISPKEAGIFVTDVPQEAQILDSAYSEIKKLRDYDEKLIIPGFFGVSHEGYIVTFPRGGSDITGAIISSGVRATIYENFTDVSGIYKANPNIIKDPELIEEITYREMRELSYAGFSVFHDEALQPLYKDRIPVVIKNTNRPQDKGTFIVHDREINAKNVISGISCDKDFTVINIKKYLMNRQVGFTRKILGVLEDNNISFDHMPSGIDTISIVMRSKQIQNKETKVLNEIRQKCDVDELSIEHDLAILMIVGEGMNKVIGTANKITHALAESKINLKMINQGASEISMMFGIHVDDAEKAVLSTYEFCYHGVALKNLCDKN

SEQ ID NO: 24196 - protein, 293 aa, Triticum aestivum
MAARIAIINEDRCKPKKCRQECRKSCPVVKTGKHCIEVTPASKTAFISEELCIGCGICVKRCPFGAIQIINLPKDLDKDTTHRYGANTFKLHRLPVPRPGQVLGLVGANGIGKSTALKVLCGKLKPNLGKFNNPPDWQEILTYFLGSELQNYFTRLLEDNLKAIIKRQDVESIPKAVQGNVGQLLDKLDQRGVKAQLCIDLELNQVLDRNVEDLSGGELQRFAIAGTAAQSADIYMFDEPSVYLDVQQRLKAAQVIRSLLRANSYVIVVEHDLSVWDKWSDLLLVLWETRALV

SEQ ID NO: 24197 - protein, 335 aa, Helicobacter pylori J99
MNLINEKLNNLENSATKSPKEAVVLLNMGGPNSLYEVGVFLKNMFDDPFILTIKNNFMRKMVGKMIVNSRIEKSKKIYEKLGGKSPLTPITFALTERLNELDPSRFYTYAMRYTPPYASMVLQDLALKEIESLVFFSMYPQYSSTTTLSSFNDAFNALKSLETFRPKVRVIERFYADKKLNEIILNTILSALNNCKSQDFVLIFSVHGLPKSIVDAGDTYQQECEHHVSLLKELMQQKNIPFKEVLLSYQSKLGPMKWLEPSTEELIEKHRKSNIIIYPLAFTIDNSETLYELDMQYRLMAERLAVKEYLVCPCLNDSIEFAKFIIELVKNLKSE

SEQ ID NO: 24198 - protein, 217 aa, Arabidopsis thaliana
MDSNWINCPSVFSSSSSSSRRCQSRSDLYLGGGYEDLEGEDDLKAEFICPFCAEDFDIVGLCCHIDEEHPVEAKNGVCPVCTKRNLCLFLDERFYVQRRRRLRRGGYSSTYLALKKELREANLQSLLGGSSSFTSSTNIDSDPLLSSFMFNSPSVNQSANKSATPVTVGNAATKVSIKESLKRDIQEAPLSGEDQEKAKKSEFVRGLLLSTMLEDDF

SEQ ID NO: 24199 - protein, 227 aa, Triticum aestivum
SARRPMEPGLARRLWHVVLAVCHMLRRGLCRKRLMMDLHLLLGRGKLAGRALRGLLAQPATAHGHGHRISSSSTSAMASFYGHHARAVEFSCTTTPSYPQYYGLFPFKSRGGRSGGGRGTARDDYGGLDAAAVARAFEMMSADVESGRATPAVAGMATATPSPMVAWILGRSPAGVRRLRVTDSPFPVVPEDGNSGSNERVDAEADDFIRRFYEQLRIQHSIAIPEC

SEQ ID NO: 24200 - protein, 333 aa, Cryptococcus neoformans var. neoformans B-3501A
MNFFNRQKTRTPADTVKSLKDNITRLDNAPAGEASRKINEDISRQLSIVKILLSGEGDTEPNPDAVAQVANEVYAQDLLSSMVVHLGKFDFEARKDVCNIYGVLLRRQLGSRSPTVDTIATRPDIIFNTLKGYANQDIALNTGMILKEMLRYEPLARILLYSDQFYTFPSYIENTSFGISCDALANMKVCETLTRHKPMVAQYIEANYDRFFNMYNTLILSSNYVTKRQSLKLLGEILLDRANYNIMTRYIASEANLKMMMNFLRDKSRNIQFEAFHVFKVFVANPNKPPQIASILRRNKEKLLVFLREFHNDKDDEQFNDEKQFLIHQIQQL

SEQ ID NO: 24201 - protein, 399 aa, Borrelia burgdorferi
MKDYNMIDSHTRRFDSTTNPTILKVIGAGGGGSNAVNRMIEYGVRDVEFIVANTDLQALQTSIAPIKIALGAKVTAGLGAGGKPEIGQAAAEEDIDVIRNHLSGADMVFITAGMGGGTGTGAAPVIAQVAKELGILTVGVVTKPFKFEGPKKLRLAEQGINNLRKSVDTLIIIPNQKLLTVVDKRTTIKDAFKRADDVLRMGVQGIAGLIIEHGEVNIDFADVKSIMQGQGDALMGIGYGKGENRAVDRRTSAISNPLLEEVRIEGSKGLLVNVTGGDDFSLLELEEIMGIITVSVDDEATVIYGHAINSNLEDEIYVTVVATGFASKKQKEISSAPENNTLSSKEFDTLMSGNQNAPSGSYEQQDSSFAAKSKNVNYFDDDIDVPTFLRNLNKKSSDD

SEQ ID NO: 24202 - protein, 479 aa, Arabidopsis thaliana
MVVEEENRSMEEGLLQHQNDRDDRRITACVILSTFVAICSAFSYGCAAGYTSGAETAIMKELDLSMAQFSAFGSFLNVGGAVGALFSGQLAVILGRRRTLWACDFFCVFGWLSIAFAKNVFWLDLGRISLGIGVGLISYVVPVYIAEITPKHVRGAFTASNQLLQNSGVSLIYFFGTVINWRVMAVIGAIPCILQTIGIFFIPESPRWLAKIRLSKEVESSLHRLRGKDTDVSGEAAEIQVMTKMLEEDSKSSFSDMFQKKYRRTLVVGIGLMLIQQLSGASGITYYSNAIFRKAGFSERLGSMIFGVFVIPKALVGLILVDRWGRRPLLLASAVGMSIGSLLIGVSFTLQQMNVLPELIPIFVFVNILVYFGCFAFGIGGLPWVIMSEIFPINIKVSAGTIVALTSWTSGWFVSYAFNFMFEWSAQGLYFLYYFFINLDKTIYQKKLRVIFIKIHKSNIKLFKNRVRILTFVSNSFRC

SEQ ID NO: 24203 - protein, 381 aa, Gloeobacter violaceus PCC 7421
MAEIFDCAVIGAGPGGGAAAYHLARCGHSVLVLEKQSLPRYKPCGGGVSPAVAAWFDFDFSPAICAYVDTIRYTWQMGERVEAPLGLQTPIWMVRRDVFDHFLISQAVARGAELHAPCPVGAITRSGDRWRLDTDAGPFYSRYLIGADGAKGPTARWLGLEKRAVAIGGAIEVEISAPVPEPNFAHFEFGMVKDGYLWNFPKNGAHSIGIGSFGRRKVDLKTPLAQYVAHFGLSLDGITLHGHPLLLWKGPSLLHTEGALLCGEAAGIVDPFTAEGIRPALYTGVQAAHAVAEALAGDTHALARYSEHIKSEWGEDLRWADRLAQVFYAFPRIAYKVGVHRPSATRTMGRLLSGSLSYREAAGRAIQRLVGYNHAQSGGRQ

SEQ ID NO: 24204 - protein, 476 aa, Triticum aestivum
MGRAFVYVVLGGGVAAGYAALEFARRGGYSRGELCIISEEPVAPYERPALSKGYLLPEDPSRLPKFHTCVGANDELLTTKWYKEQGIELVLGTRVISADVRRKTLLTATGETISYKTLIIATGARALKLEEFGISGSDAANICYLRNLEDADKLVNAMSSCSGGNAVVIGGGYIGMECAAALVTNKIKVTMVFPEKHCMGRLFTEKIAEYYESYYTLKGVTFTKGTVLTSFEKDSTGKVTSVILKDGNHLPADMVVVGIGIRANTSLFEGQLLMEKGGIKVNGQMQTSDSSVYAVGDVAAFPIKLFDGDIRRLEHVDSARRTARHAVAAILEPSKSRDVDYLPFFYSRVFTLSWQFYGDNVGEVIHYGDFTSNSPRFGAYWVSKGQITGAFLEGGDRDDYEALSVVVWRKTKVSDMSELERQGLAFAIQESKKDVPDSGVTLGEKPTFVWYATAGVVAAVSISAFGYWYGRKRRRW

SEQ ID NO: 24205 - protein, 193 aa, Vibrio angustum S14
MQVVSSNHFILRLILLVSSIFFTSLVTTSANASSCPTLYQAPLKKLNSDEYYDICQQLTGKVVLVVNTASQCGFTPQFKQLEELYKTYKDSGLVVIGFPSNDFKQDRGSEQQTANICYSNYGVTFPMMTKTSVKGSRANSLYKHLIAQSGKSVGWNFQKYLLNKQGQVVGVFPSSLSPTSNEMVAAIKQQLKM

SEQ ID NO: 24206 - protein, 395 aa, Ehrlichia chaffeensis str. Arkansas
MVEERKPHINVGTIGHVDHGKTTLTAALTTVLAKRLSGEGNKSVKYDEIDKAPEEKARGITISTAHVEYETENRHYAHVDCPGHADYIKNMITGAAQMDAAILVVSATDGAMPQTREHILLAKQVGVKDIVVWMNKCDVVDDEEMLSLVEMEIRELLSKYGYPGDDIDVVRGSAVKALEEETGSGVWSEKIMELMNALEKISLPTREKDKPFLMSIEDVFSIPGRGTVVTGRIERGVIRVGDKIEIVGLRDIQSTVCTGVEMFHKALDAGEAGDNAGILLRGIKKEDVERGQVLSAPGQIHSYKKFKAEVYILKKEEGGRHTPFFSNYQPQFYVRTTDVTGSIKLPEGVEMVMPGDNISIEVSLDKPVAIDKGLRFAIREGGRTVGSGIITEILE

SEQ ID NO: 24207 - protein, 144 aa, Zea mays
RSFRRSYLHCELSLKMILVQLRDVPVMDGFICLSHTCSLHAEKFHEIYNFAFAWAREKGQKSLALETAIGMWQLLFAERSWPLIDYWCQFLQVRHNKAISRDTWAQLLEFVKTIDPQLTNYDEEGAWPYLIDEFVDYLKENGLA

SEQ ID NO: 24208 - protein, 469 aa, Streptococcus pyogenes M49 591
MAFEIIMPKLGVDMQEGEIIEWKKQEGDTVNEGDILLEIMSDKTNMELEAEDSGVLLKIVRPAGDTVPVTEVIGYIGAEGESVDTIASSEKTTEIPVPASADAGPTVAPKENVASPAPQVAATAIPQGNGGKVRATPAARKVAAEMGIDLGQVPGTGPKGRVHKEDVENFKGAQPKASPLARKIAADKGIDLATVSGTGFNGKVMKEDIMAILEAAKPAEAKAPAAKEEKVVDLPEGVEHKPMSAMRKAISKGMTNSYLTAPTFTLNYDIDMTEMIALRKKLIDPIMAKTGLKVSFTDLIGMAVVKTLMKPEHEYMNASLINDANDIELHRFVNLGIAVGLDDGLIVPVIHGADKMSLSDFVLASKDVIKKAQTGKLKAAEMSGSTFSITNLGMFGTKTFNPIINQPNSAILGVGATIPTPTVVDGEIVARPIMAMCLTIDHRLVDGMNGAKFMVDLKKLMENPFELLI

SEQ ID NO: 24209 - protein, 395 aa, Rickettsia sibirica 246
MRVKIIVPSLGESITEATIAKWYKKEGDSVKTDELLLEIETEKVTLEVNAPCNGTIGKISKTDGANVAVGEEIGEINEGASANTAGTNNESAKAQAVTQPTSEKPAVANNTLAPSVQKLVTENKLDPNNIKGTGRDGRITKGDVLATINTTTTSAPAISKSNEERVQRVRMSRLRKTIAQRLKDSQNTAAILTTFNEIDMSKVIALRNQYKEEFEKKHAVKLGFMSFFVKATIEALKLIPSVNAEIDGDDLVYKNYYDIGVAVGTEQGLVVPVVRDADKMGFAEVEKTIGILAKQAREGKLSMADLSGGTFSISNGGVYGSLLSTPIINPPQSGILGLHKTEERAVVIDGKIEIRPMMYIALSYDHRIIDGKEGVSFLVKIKQLIENPEKLLLNL

SEQ ID NO: 24210 - protein, 374 aa, Chlamydomonas reinhardtii
MALMMKSSASLKAVSLAALAAPSLCAPGKYDEELIKTAGTVASKGRGILAMDESNATCGKRLDSIGVENTEENRRAYRELLVTAPGLGQYISGAILFEETLYQSTASGKKFVDVMKEQNIVPGIKVDKGLVPCPTPTMSWCMGLDGWTSAAEYYKAGARFAKWRSVVSIPHGPSIMLPRLAYGLARYAAIAQNAGLVPIVEPEVLLDGEHDIDRCLEVQEAIWAETFKYMADNKVMLQGILLKPAMVTPGADCKNKAGPAKVAEYTLKMLAARAPPVPGIMFLSGGQSELESTLNLNAMNQSPNPWHVSFSYARALTNTVLKTWQASPRTVQAPRLAAQARKANSDAQQGKYDATTEGKEAAQGMYEKGKGYVY

SEQ ID NO: 24211 - protein, 362 aa, Arabidopsis thaliana
MSTNPNPWSPYDSYNDCSQGICNIYCPQWCYLIFPPPPPSFFLDDDSSSSSSSFSPLLIALIGILTSALILVSYYTLISKYCHRHHQTSSSETLNLNHNGEGFFSSTQRISTNGDGLNESMIKSITVYKYKSGDGFVDGSDCSVCLSEFEENESLRLLPKCNHAFHLPCIDTWLKSHSNCPLCRAFVTGVNNPTASVGQNVSVVVANQSNSAHQTGSVSEINLNLAGYESQTGDFDSVVVIEDLEIGSRNSDARSELQLPEERRETKDEDSLPIRRSVSLNSGVVVSIADVLREIEDEEGESGGVGTSQRREEGEDGDGKTIPPTEANQRSGGVSGFFVRSLSTGRFIFSRYDRGRNYRLPL

SEQ ID NO: 24212 - protein, 854 aa, Vibrio parahaemolyticus RIMD 2210633
MSKLKLVVIGNGMVGHRYIEDLVEKADVSQMDITVFCEEPRVAYDRVHLSSYFSHHTADELSLVKEGFYEKHGINMLIGERAININRENRIVYSSTGREVQYDKLILATGSFPFVPPIKGHESKDCFVYRTIEDLKAIEACAKKSKSGVVIGGGLLGLEAAGALKALGVETHVVEFAPKLMAEQLDLAGGNQLRQKIERMGVNVHTSKNTLEIAAEGKNARNVMRFADGTELETDFIVFSAGIRPQDKLARQMELELGPRGGVAINDHCQTSDENIYAIGECASWNEMFYGLVAPGYKMATVAVDHLLGNTESKFEGADMSAKLKLLGVKVGSIGDANGRTEGCKSYVYQNEEQEVYKRLIVSEDNKKLLGAVLVGDTSDYGDLLQLMLNEIDLPEHPDALILPAHAGAEKPALGADALPESAVICSCFDVTKGKIAQAVADGHHTLGDIKAVTGAGTGCGGCIPLVTSVLNAELAKSGIEVKNDVCEHFAYSRQELFHLIRIEEIKTFDELLEKYGKGYGCEVCKPLAGSILASCWGEHILKPQLVKLHDTNDNFLGNIQKDGTYSVIPRMAGGEVTPQALGALANVAAEYNLYTKVTGAQRIGLFGAQKDDLPEIWRKLIDAGFETGQAYAKALRMAKTCVGSTWCRYGVQDSVGLGSYIENRYKGIRTPHKMKFGVSGCTRECAEAQGKDLGIIATDAGWNMYVCGNGGMKPRHADLLASDLDKETLIKYIDRFMMFYIRTAAPLQRTSVWMENMEGGVDYLRAVIVEDKLGINAQLEADVAKLVDEYECEWTATINDASQLTRFAHFINSDKRDDNVVFVQEREQHRPATFTEKHPEAKGDILHVAITEA

SEQ ID NO: 24213 - protein, 349 aa, Magnaporthe grisea 70-15
MPPVSRILSYAPRVAIRPSSQLARPARAFAVGTVRYYSAEQPEEPLIRVTDLPAPNSGHIRVLELNRPKARNAISRALLASLREEVHSIARQYDAQTGEEIPTPSWNKRFGGIAGDSEKGPTRALVLASAVESSFCAGADLKERRGFTQEETNEFLANLRSTFAALDALPIPTISAISSRALGGGLELALCTHFRVLTSNAIVSLPETRLGIIPGAGGTHRLPRLIGLGRARDMIVTGRAVSGAEAYFLGLADRLVEVLPPDEQEAADTTDKDAALLSAAREAALTEAVRLASQICEGGPIGIRAALQAVQAPSQETENKMYERVIGTEDRNEALKAFAEKRKPVFKGR

SEQ ID NO: 24214 - protein, 350 aa, Mycobacterium sp. KMS
MSAHRIAVIPGDGIGTEATASARTVLDAVAERHGIDLSYEEFDWSCRRFERDGAMMPADGLETLSGFDAILLGAVGWPGVPDHVSLWGLLIPIRRAFRQYVNLRPIRVFDGVASPLRDATDVDFVVVRENVEGEYSEIGGRINRGFPDEMAVQESVFTRVGVTRIADYAFDLAETRRRYVTSATKSNGIVHTLPFWDEVVAERAANHPGVRFDSEHIDALAAKFVLQPGRFDVVVGSNLFGDILSDLAAAVAGSIGIAPSANLDPTKQYPSMFEPVHGSAPDIAGRGVANPIGAVWSAALMLEHLGHASAAADVMTAVERTLAQPQTRTVDLGGHASTADVTDALVAQLR

SEQ ID NO: 24215 - protein, 118 aa, Oryza sativa
MARAQLVLVALVAAALLLAGPHTTMAAISCGQVNSAVSPCLSYARGGSGPSAACCSGVRSLNSAASTTADRRTACNCLKNVAGSISGLNAGNAASIPSKCGVSIPYTISPSIDCSSVN

SEQ ID NO: 24216 - protein, 360 aa, Mycobacterium sp. KMS
MATEDPLRLGVVAGDGIGPEIVSAAVQISERALAAVSVPVDWRRLRMGAEAITAEGTPLPEATLAELDRLDAWLLGPHDNAGYPAPFRDALSPGGTIRKRYGLYANIRPARRLSGAIPAVCPTLDVVVVRENTEGFYSDRNMYDGPGEFMPTADVAMAVAVFTREACERIAHQAFRLARTRRRSVTVAHKANVLSKTTGLFRDSCVRVAEQYPDVTVRLEHIDALAALLVARPAEFDVIVAENMFGDILSDLTGQLAGSLGMAPSVNLSDTKAMAQAAHGSAPDIAGHNIANPVAMILSTAMLLEWLAERHHRGALAGAATRIRDAVCRSLDDGVHTPDLGGAATTTGFTEHVLSVLASA

SEQ ID NO: 24217 - protein, 364 aa, Arabidopsis thaliana
HLLLIFAMAVSGFEGFEKRLELRFFDDDKPITKNPMGLRLIDFESLDQVLNEVQCTVVSAVANRSFDAYVLSESSLFVYPTKIIIKTCGTTQLLKSIRPLIHLARNLGLTLRACRYSRGSFIFPKAQPFPYTSFKDEVIVVEESLPKSLCYRKASVMTPSNNPSRAWHVFTASADVESDEHVVVVEVCMTELDRVNARSFFKRKGDEKNNSDSAGKEMTRLSGIDNINANAYICDFAFDPCGYSMNGVDGDRYSTIHVTPEDGFSYASFECGLSLYDNGHEDISEVLSRAIDVFRPSDVSIATTYGGEDYNHEVTKRVERVLAKKLDLKCRSRLMDEFPGSGTVVYQSFTPRKCFFFSMCVFDI

SEQ ID NO: 24218 - protein, 607 aa, Bacillus cereus G9241
MCGITGWVDWKEDLSNQHVILEKMANRIQHRGPDAEGFWFSPRAAFAHRRLIVIDPEGGTQPKTFRAGDYTYALTYNGEIYNFRELREQLRKCGHAFETHSDTEVLLHAYLEWKEDCVQHLNGIFAFALWDDQKQQLFLARDHLGVKPLFYTERNDSIIFGSEIKALLAHPSVPAEIDADGINEIFGLGLFRTPGCGVFKHIQEVRAGHSITFTRDKKVVQKYWNLESKVHTDSIEDTSSHILSILQDTVKRQLIADVPLVCMLSGGLDSSGITALAGKEFAAENKTLHTYSVDFVNSAKDFELTFARTGLDAPWVKRVSEHVGTSHHDIIVNAEELANHLFVPLHAKDLPSAGEMETSLYLLFCEMKKDATVALSGESADEVFGGYPWFHQEELLYVDKFPWLTNWKNTSPLLLNEVSNQCNLENYIDTRFQEAILEVPTLEGESKKSAKQRQMFYLFLTRFLPFLLDRKDRMSMAVGFEVRVPFCDYRLVEYLWNVPFNIKSIDNIEKGILRRALKPALPDDIRNRRKSAYPTSQDPHYLQTIRHLSLDMCSNKNNPIFSLINHSTLLAIANQSNKEINNFEARSAMEYMLQVNEWLKTYHIHIA

SEQ ID NO: 24219 - protein, 522 aa, Shewanella sp. ANA-3
MSNRVIIFDTTLRDGEQALAASLSVKEKLQIAMALERLGVDVMEVGFPVSSPGDFESVQTIARTIKNSRVCALSRALEKDIDAAAQALSVAEQFRIHTFISTSTIHVESKLKRSFEQVLEMAVGAVKYARRFTDDVEFSCEDAGRTPIDNLCRMVEAAIHAGARTINIPDTVGYTVPSEFGGIIQTLFNRVPNIDQAIISVHCHDDLGMSVANSITAVQHGARQIECTMNGIGERAGNCSLEEIAMILATRKNLLGVETGINAKEIHRTSNLVSQLCNMPIQSNKAIVGANAFTHSSGIHQDGMLKAQNTYEIMTPESIGLNRNNLNMTSRSGRHVIKHRMEEMGYSEQDFNLDALYEQFLHLADKKGQVFDYDLEALAFMEAQAAEDNFYQLQQLVVQSDSTEGVATATVRIDVGGEIKTEAATGNGPVDAAYNAIARATDRRIDIISYKLGAKGEGQNALGQVDITAVYHEQNFHGVGLATDVVEASARALVHVMNLTCRADKVADYKQNMHKNRELGGV

SEQ ID NO: 24220 - protein, 364 aa, Shewanella sp. ANA-3
MSYQIAVLAGDGIGPEVMAEARKVLKAVEARFGLNIEYSEYDVGGIAIDNHGCPLPEATLKGCEAADAILFGSVGGPKWEKLPPNEQPERGALLPLRGHFELFCNLRPAKLHDGLEHMSPLRSDISARGFDVLCVRELTGGIYFGKPKGRQGEGESEEAFDTMRYSRREIARIARIAFEAARGRRKKVTSVDKANVLACSVLWRQVVEEVAVDFPDVELEHIYIDNATMQLLRRPDEFDVMLCSNLFGDILSDEIAMLTGSMGLLSSASMNSTGFGLFEPAGGSAPDIAGKGIANPIAQILSAALMLRHSLKQEEAASAIERAVSKALNSGYLTGELLSSDQRHKAKSTVEMGNFIADAVKAGV

SEQ ID NO: 24221 - protein, 468 aa, Lilium longiflorum
MSAHMSCCTLLDVRFSFGVLVESGRCRKNSVRIPGEARSPRFRCAANSHRTGKFNNSDQFLHLHPEISMLRGPTNDAIVDPRKKEKSGGDAIDSLQESSVTSSDYNGAKIKVIGVGGGGSNAVNRMIASSMDGVEFWIVNTDVQAMRMSPVYPENRLQIGQELTRGLGAGGNPDIGMNAAKESKVSIEESVSGADMVFVTAGMGGGTGTGGAPVIAGVAKSMGILTVGIVTTPFMFEGRRRTVQAQEGIAALRNNVDTLIVIPNDKLLTAVSPNTPVTEAFNLADDILRQGVRGISDIITVPGLVNVDFADVRAIMANAGSSLMGIGTATGKTRARDAALNAVQSPLLDIGIERATGIVWNITGGNDLTLYEVNAAAEVIYDLVDPAANLIFGAVIDPSISGQVSITLIATGFKRQDETEGQKSQGTQLGLGGNLGINRRPSSSMTMGGIVEIPHFLRKKAGSRNPRA

SEQ ID NO: 24222 - protein, 134 aa, Methylococcus capsulatus str. Bath
MTEKKLADWWNESHGSLYEKLGGEAAVNAAVDIFYRKVLADPRINRFFEGVDMEKQAAKQKAFLTMAFGGPHNYTGMDMRRGHAHLVKQGLNDAHFDAVMEHLGATMKELNVPDELIAQAAAIAESTRNDVLGR

SEQ ID NO: 24223 - protein, 170 aa, Triticum aestivum
  misc_feature (130)..(130): Xaa can be any naturally occurring amino acid
MSPATSSAVGTLSGGLLPHGAHRRRPLPTARLLPPRWSRLQVNAARHRRLATPPRAQSAPSPGYLPDSEFYKIEAILRPWRVSHVSSGLLEMGIRGVTVSDVRGYGAQGGSTERYEGSEFSEDTFIAKVXMEIVVCKEQVEPVIDKIFEKARPGEIGEGKKFLDPRPGML

SEQ ID NO: 24224 - protein, 327 aa, Vibrio sp. Ex25
MAELTLVEAVNLALHHEMQQDQNVVVLGEDVGDNGGVFRATVGLKQEFGLKRVIDTPLAEALIGGVAVGMATQGLRPVAEFQFQGFVFPAMEHLMCHAARMRNRTRGRLTCPAVFRAPFGGGIHAPEHHSESVEALFAHTAGFKVVIPSSPQRAYGLLLAAIRSNDPVMFFEPKRIYRTVKSEVVDNGEALPLDTCFTLRKGRDITLVTWGACVVESLQAAQTLSSQGIEVEVIDLASIKPIDTATIFSSLEKTGRLLVVHEASKTCGVGSELLARTAEHAMCLLKAPPKRVTGMDTIMPYYRNEDYFMVQEEDIVTAARELVEDWK

SEQ ID NO: 24225 - protein, 268 aa, Prunus persica
ELVSHGIPTEFLDTVERLTKEHYRQCLEQRFKELVASKGLEAVKTEVNDMDWESTFYLRHLPKSNISEAPDLEDQYRNVMKEFALKLEKLAEQLLDLLCENLGLEQGYLKKAFYGTNGPTFGTKVSNYPPCPNPELIKGLRAHTDAGGLILLFQDDKVSGLQLLKDGQWVDVPPMRHSIVINLGDQLEVITNGKYKSVEHRVIAQTDGTRMSIASFYNPGSDAVIYPAPTLVEKEAEEKNQVYPKFVFEDYMKLYAGLKFQAKEPLQF

SEQ ID NO: 24226 - protein, 318 aa, Rubrobacter xylanophilus DSM 9941
MGARVIDGRPIAGELKKRVASEVEGLAARGVRPGLATVLVGEDYAARAYERRVGGLAAELGCRYVCERLPREAEEADVLAVVGKLNADPRVSGILVLRPLPGHISEPAVFSALDPLKDIEAVHPVNAGLLALGRPRYVPSTPAACFYLLDRYLERSGRPPEEFYPRSTVVVVGRSNNVGKPAVSLGFARGAAVISCDANAYRAGRLREHTLKADALIVAAGVAGLIDESYVREGVIAVDVGINPVADPGGSGRTLLVGDLDFGSVARKAEALTPVPGGVGPITDVWLLKNTVAAGRGLASQAKARCLLRGSHAHSSLI

SEQ ID NO: 24227 - protein, 180 aa, Zea mays
  misc_feature (8)..(8): Xaa can be any naturally occurring amino acid
  misc_feature (167)..(167): Xaa can be any naturally occurring amino acid
  misc_feature (169)..(169): Xaa can be any naturally occurring amino acid
  misc_feature (172)..(175): Xaa can be any naturally occurring amino acid
  misc_feature (177)..(179): Xaa can be any naturally occurring amino acid
LHRGGGRXHKGLPEEVGTEVAIFTRVGVTRIMRYAFQLAQSRPRKFLTVVTKSNAQRHGMVMWDEIAAEVATEFPDVTWDKMLVDAMTVRMTLHPKSLDTIVATNLHADILSDLAGALAGSLGVAPTSNIDPQRRFPSMFEPIHGSAFDITGKGIANPIATFWTGAXMXEHXXXXDXXXR

SEQ ID NO: 24228 - protein, 368 aa, Lactobacillus delbrueckii
MNLDKLQNWLQENGMDVAYVSSPTTINYFTGFITDPEERIFKLFAFKDAEPFLFCPALNYEEAKASAWDGDVVGYLDSEDPWGKIAEEIKQRSKDYQNWAVEKNGLTVAHYQALHAQFPDSDFSKDLSDFIAHIRLFKTESELVKLRKAGEEADFAFQIGFEALRNGVTERAVVSQIEYQLKLQKGVMQTSFDTIVQAGKNAANPHQGPSMNTVQPNELVLFDLGTMHEGYASDSSRTVAYGEPTDKMREIYEVNRTAQQAAIDAAKPGMTASELDGVARKIITDAGYGEYFIHRLGHGIGMEVHEFPSIANGNDVVLEEGMCFSIEPGIYIPGFAGVRIEDCGVLTKEGFKPFTHTSKELKVLPVKE

SEQ ID NO: 24229 - protein, 319 aa, Xanthomonas campestris pv. vesicatoria str. 85-10
MTMATHHQLIILGSGPAGWTAAVYAARANLKPLVLTGLQMGGQLMTTTEVDNWPGDAHGLMGPDLMTRMQAHAERFETEVVFDHIHTADLSKRPFTLTGDSAQYTCDALIIATGATAKYLGIPSEEAFKGRGVSACATCDGFFYKDQDVIVVGGGNTAVEEALYLSNIARKVYLVHRRDTLRAEKIMQDKLFAKVAAGKVETVWHHEVDEVLGNDMGVTGVRVKSTLDGSTRDIDAHGFFVAIGHSPNTELFKGQLAMNNGYLEIRSGLGGNATQTSVEGVFAAGDVADQHYRQAITSAGFGCMAALDAERFLDSAVVR

SEQ ID NO: 24230 - protein, 206 aa, Oryza sativa
  misc_feature (31)..(31): Xaa can be any naturally occurring amino acid
  misc_feature (118)..(118): Xaa can be any naturally occurring amino acid
  misc_feature (186)..(186): Xaa can be any naturally occurring amino acid
WNQKNLFCGWYDADLSEKGNEEAKQAGKWLXEKGYTFDIAFTSVLKRAIKTLYNIQQELDLHWIPVQRHWRLNERMYGALQGKNKSETAAKYGEDQVKIWRRAYDIPPPELEESSEYXPRTDSKYKNLDPRVLPLTECLKDTVDRALPYWHDAIVPAIRSGQKVLIAAHGNSLRALIKYLDKVPDXEIVETHLPTGIPLVYELDAI

SEQ ID NO: 24231 - protein, 308 aa, Escherichia coli
INGFGRIGRIVFRAAQKRSDIEIVAINDLLDADYMAYMLKYDSTHGRFDGTVEVKDGHLIVNGKKIRVTAERDPANLKWDEVGVDVVAEATGLFLTDETARKHITAGAKKVVMTGPSKDNTPMFVKGANFDKYAGQDIVSNASCTTNCLAPLAKVINDNFGIIEGLMTTVHATTATQKTVDGPSHKDWRGGRGASQNIIPSSTGAAKAVGKVLPELNGKLTGMAFRVPTPNVSVVDLTVRLEKAATYEQIKAAVKAAAEGEMKGVLGYTEDDVVSTDFNGEVCTSVFDAKAGIALNDNFVKLVSWYDN

SEQ ID NO: 24232 - protein, 550 aa, Pichia stipitis
MSSQDLPSGAQTPIDGSSILEDKVEQSSSSNSQSDLASIPATGIKAYLLVCFFCMLVAFGGFVFGFDTGTISGFLNMSDFLSRFGQDGSEGKYLSDIRVGLIVSIFNIGCAIGGIFLSKIGDVYGRRIGIISAMVVYVVGIIIQISSQDKWYQLTIGRGVTGLAVGTVSVLSPMFISESAPKHLRGTLVYCYQLCITLGIFIGYCVTYGTKDLNDSRQWRVPLGLCFLWAIFLVVGMLAMPESPRFLIEKKRIEEAKKSLARSNKLSPEDPGVYTELQLIQAGIDREAAAGSASWMELITGKPAIFRRVIMGIILQSLQQLTGVNYFFYYGTTIFQAVGLQDSFQTSIILGTVNFLSTFVGIWAIERFGRRQCLLVGSAGMFVCFIIYSVIGTTHLFIDGVVDNDNTRQLSGNAMIFITCLFIFFFACTWAGGVFTIISESYPLRIRSKAMSIATAANWMWGFLISFCTPFIVNAINFKFGFVFTGCLLFSFFYVYFFVSETKGLSLEEVDELYAEGIAPWKSGAWVPPSAQQQMQNSTYGAEAKEQEQV

SEQ ID NO: 24233 - protein, 106 aa, Xanthomonas campestris pv. vesicatoria str. 85-10
MLQELNNDNFDTTLGQVPGVYAVRFWAEWCGPCRVMSPIFKDVARDMQDRAHFGEVDIDQAPELAGRFGVQSIPTVVLFKDGQVIDRMTGAAPKPNVLRFINNHLD

SEQ ID NO: 24234 - protein, 179 aa, Gloeobacter violaceus PCC 7421
MESAPENKTGIWLRNGIVALASVLIAVLVFFAARNQAPTMQQLAAEAVPLDEALANGKPTLVEFYADWCASCQTMAPTVARLKERYGEQANFVMLNVDNPRWLPELQQYKVSGIPHYAFLDAAARPLGSAIGLQPSQILEDNLTALAAGAETLPKAGAPAGQTSKFTPPKKVDQPRDHS

SEQ ID NO: 24235 - protein, 402 aa, Oceanospirillum sp. MED92
MENVNSAVETLIQSSNTLFILMGAIMVFAMHAGFAFLEVGTVRHKNQVNALVKILTDFGFSAMAYFFVGYWVAYGVTFFSPAAELAANNGYELVKFFFLMTFAAAIPAIVSGGIAERGKFWPFLIASALIVAFVYPFFEGIIWNGNYGFQAWLEESFGAGFHDFAGSVVVHGVGGWLALVAVLMLGIRNGRYKGGRLVAFPPSNIPFLALGAWILCIGWFGFNVMSAQTMDGISGLVAVNTLMAMVGGIITALIFGKNDPGFIHNGPLAGLVAVCAGSDVMHPMGSLVVGAVAGAIFVVLFTIQQNKWKIDDVLGVWPLHGVCGAWGAIACGIFGTEALGGLGGVSLMSQIIGTVAGIAVAVIGGVIVYGGVKAVCGLRLSQEEEYNGADLSIHKIESTCDN

SEQ ID NO: 24236 - protein, 470 aa, Streptomyces avermitilis MA-4680
MPLHKGPVKSDERPMSFNPFFGEANPVSGMTEAPPKHRLADGPLPPSTAYQLVHDELMLDGNARLNLATFVTTWMEPQAGVLMAECQDKNMIDKDEYPRTAELEKRCVAMLADLWNAPDAGAAVGCSTTGSSEACMLAGLALKRRWARRNADRYPARDVRPNLVMGINVQVCWEKFCNFWEVEMRQVPLEGERYHLDPGAAAELCDENTIGVVGILGSTFDGSYEPIAELCAALDALQERTGLDIPVHVDGASGAMIAPFLDEDLVWDFRLPRVASINTSGHKYGLVSPGVGWALWRDSEALPEELVFRVNYLGGNMPTFALNFSRPGAQVVAQYYTFLRLGREGFRAVQQTTRNVARSLAERVAALGDFHLLTRGDELPVFAFTTAPEVASYDVFDVSRRMREHGWLVPAYTFPPNREDLSVLRVVCRNGFSTDLAELFVEDLSRLLPDLRRQARPQTHDKDAATGFHH

SEQ ID NO: 24237 - protein, 484 aa, Haloarcula marismortui ATCC 43049
MSKSQTRSPEAELGLLDATMIGMGAMIGAGIFVLTGLAAEIAGPAAILVFALNGVVTAFTGLSYAELAASIPKSGGGYAFVREIFDDFASFIMGWMLWFAYMIAGALYALGFAPNFLELLHVYDVVPSPDEIGAVAVPVIDVGLPPAFLLAFIAVLGLVALNAVSTAASGSVETIFTIIKVSILVVFVAFGLTSPMFSGAEFQPLFPEGSGAAAVLPAMGLTFIAFEGYDLITTVTEEVQNPRENIPKAIFISLAVTVVVYLAVVTVAIGTLGAEGLADAGEAGIATAATSFMPTGLPIIQNGGALIVFGAVFSTLTALNAVVIASSRVAFSMGREGQLLPSIGQIHHRYGTPFVAILTSAIVMLGSVALPTQSAGNMSSLFFLLSFIIVNVAVIRLRRERPNMNRPYEMPFYPAPPIIGIALNLILTGVLIEFLLRTDPLALGLSVAWILLGAVVYFALKRIRQQSDREQATAVSEIKPEAED

SEQ ID NO: 24238 - protein, 422 aa, Streptomyces halstedii
MSRRVVVTGIGVVAPGGIGAARFWDLLAGGRTATRRISLFDPARLRSQIAAECDFDPSAHGLDDETVRRCDRYVQFALVATAEAVRDAGLDTTREDPWRMGAVLGTAVGGTTRLEHDYVLVSEGGSRWDVDHRRAEPHLHRAFAPSTLASTVAETFGAQGPVQTVSTGCTSGLDAVGYAYHAIAEGRADVCLAGASDSPISPITMACFDAIKATSPSNDDPEHASRPFDARRNGFVMGEGGAVLVLEELEHARARGADVYCELAGYATFGNAHHMTGLTREGLEMARAIDTALDMARLDGTDIDYVNAHGSGTQQNDRHETAAVKRSLGEHAYRTPMSSIKSMVGHSLGAIGSIEVVACVLALAHQVVPPTANYETPDPECDLDYVPREARERELRSVLSVGSGFGGFQSAVVLTGPERRLR

SEQ ID NO: 24239 - protein, 739 aa, Nicotiana tabacum
MSSKNLFSFLFLLVLPFSSSSDATAWIKSGFWYAGSEFPVPEIPSTMFTHIHFAFAYINASSFELYVSHSDEPYISTFSNTVKQKNPSVITLLSIWGGRDESPNFFAMTSQFSRRKSFITTSIKTARQYGFQGLDLIGVNPNTDANMTNMRSFIEEWRTAINSESKSSGTRTLILTMGAYYSPMLDSMSYPIDTIIRNFDWVHLKAYAALYDPTSKLNTDYGIKEWIKRGLPANKIVLGLAYHGYAWTLVNPKHNTVRTPARGLAITQDGSISYRYIKQYMKSYGVTPVYNSTFVVNYVTIGSFWIGYDDVEAIRTKVSYAKDKGLLGFAAFQIPSDDVNWELSKTAQDEEEEDQSGSNRRLLAILLPTLTLTILLLSTIVFILKKKTLRSEGIRELNERAIGHNLKVFKFDKIKAATDNFSIKNKLGEGGFGPVYKGRLSDGQEIAIKRLSAYSKQGVEEFQNEVTLASKLQHVNVLQLQGCCTEREEKILIYEYMPNKSLDFYLYDPVQSLQLDWETRVRIIEGVTQGLLYLQEYSAFTVIHRDLKASNILLDDEMKPKISDFGIAKLFQKDEKEANTGRIVGTYGCVPPEYVKRGLYSRKYDVYSFGVLLLQILGEKKNSSEYGIKNDLNLLEYAYELWEKGNGVDFLDLSLQDDSRIGKQLRYMQAALLCVQEKWEDRPSMLEVYSMLKNETEVLPNPKVPAFSKNKDNDTQETLVTPDLTCSDNSLTISQLIAR

SEQ ID NO: 24240 - protein, 586 aa, Oenococcus oeni PSU-1
MTKMIAGRALVKALEDWGVDHVYGIPGGSINHTVEGLYLEQDKVKYIQVRHEEVGALAASADAKFTGKIGVAFGSAGPGATHLFNGLYDAKMDHVPLLAIIGQVPQETMNTNYFQEMDEVPLFSDVSVYNRTVTTAEQIPYVINQAIREAYRQKGVATVVLPENLAAKEIDYKETKTPKVVANNFSQKVDSKAVSDTLAMLKAAKHPLIYAGRGLLGARDVLTKFSEQFNIPVMNTVPATGVISTDDPNFIGTFGRLGSKSGFEALQHTDLILFLASEFPFAGFWPKNIKVIEVNNNPFDIGKTVDVDYAVISDAKSYLQALINTGQTLPAGNWLKANQENKRNWDNWLAELAKDESDGLNPESVTAKIASMVGPNDTYAVDTGNVSEWGARGLPMNHNQRFAISGLFATMGFGLPGGLAGALSVPDGQAWSLSGDGGFSMVVQDLITEVRYGLPVINIVFSNDRFGFIYHEQVQTKQHFYGVDLTGADWAKVSEGLGAISFTVKTIADIDQVFTKIKKLQESGNKKPIVVNAVIKKDDPFPTDYMPLDPKLYGQDAVDQYAEKYHFDLEKQPSLGALLRAQGDNL

SEQ ID NO: 24241 - protein, 480 aa, Prochlorococcus marinus subsp. marinus str. CCMP1375
MTKNKTVSQVLEKSYEYGFLTDVESEKIPKGINESIIRLISEKKSEPDFLLEFRLKAFRKWEKMEEPKWADLNYPPINYQDLVYYSAPKDIEKKTSLDDVDPEILATFDKLGIPLNEQKRLTNVAVDAVFDSVSIATTFKEKLAEDGVIFCSISEAIQKYPELVDKYLGTIVPMSDNFFAALNSAIFSDGSFVYIPKGVNCPMELSSYFRINSGDTGQFERTLIIAEEKSSVSYLEGCTAPMFDTNTLHAAVVELIALDDASIKYSTVQNWYAGDKNGIGGIYNFVTKRGRCKGKRSKISWSQVETGSSITWKYPSCILEGDGAVGEFYSVALTNNKQIADTGTKMIHIGKNTKSTIISKGISAGKSKNSYRGLVHMGSKAFGAKNYSQCDSLLIGDQASANTYPYIHSKQMNSSIEHEASTSKISEDQLFYLKSRGINSEEAVSMMVSGFCQDVFNKLPMEFASEADSLLGLKLEGTIG

SEQ ID NO: 24242 - protein, 107 aa, Ehrlichia chaffeensis str. Arkansas
MIEQIGDSEFDNKVTSCNDNILILVDFWAPWCGPCRSLEPQLEKLAQQYTENVKIYKINIEDNQDVATQYGVSAIPTILMFKNGKKLSQVIGADISKIISEINNNIN

SEQ ID NO: 24243 - protein, 907 aa, Staphylococcus aureus subsp. aureus MW2
MKKRIDYLSNKQNKYSIRRFTVGTTSVIVGATILFGIGNHQAQASEQSNDTTQSSKNNASADSEKNNMIETPQLNTTANDTSDISANTNSANVDSTAKPMSTQTSNTTTTEPASTNETPQLTAIKDQATAAKMQDQTVPQEANSQVDNKTTNDANSIATNSELKNPQTLDLPQSSPQTISNAQGTSKPSVRTRAVRSLAVAEPVVNAADAKGTNVNDKVTAKDFQLEKTTFDPNQSGNTFMAANFTVTGQVKSGDYFTAKLPDSVTGNGDVDYSNSNNTMPIADIVNDKNEVVAKATYDILTKTYTFVFTDYVNDKQNINGKFSLPLFTDRAKAPKSGTYDANINIADEMFNNKITYNYSSPIAGIDKPNGANISSQIIGVDTASGQNTYKQTVFVNPKQRVLGNTWVYIKGYQDKIEESSGKVSATDTKLRIFEVNDTSKLSDSYYADPNDSNLKEVTDQFKDKITYKYQNVASINFGDINKTYVVLVEGHYDKTGKNLKTQVIQENVDPATGKDYSIFGWNNENVVRYGGGSADGDSAVNPKDPTPGPPVDPEPSPDPEPEPSPDPDPEPTPDPEPSPDPDPDSDSDSDSGSDSDSDSDSDSDSDSDSGSDSDSDSDSDSESDSESDSDSDSESDSDSDSDSESDSDSDSDSDSDSDSDSDSDSDSDSDSDSDSDSDSDSESDSDSDSDSESDSDSDSDSDSDSDSDSDSDSDSDSDSDSDSDSDSESDSDSDSDSDSDSDSDSDSDSDSDSDSDSDSDSDSDSESDSDSDSDSDSDSDSDSDSDSDSDSDSDSDSDSDSESDSDSDSDSDSDSDSDSDSDSDSDSDSDSDSRVTPPNNEQKAPSNPKGEVNHSNKVSKQHKTDALPETGDKSENTNATLFGAMMALLGSLLLFRKRKQDHKEKA

SEQ ID NO: 24244 - protein, 352 aa, Bipolaris oryzae
MPPAGSGSSRKISFNVSEQYDIQDVVGEGAYGVVCSALHKPSGQKVAIKKITPFDHSMFCLRTLREMKLLRYFNHENIISILDIQKPRNYETFTEVYLIQELMETDMHRVIRTQELSDDHCQYFIYQTLRALKAMHSANVLHRDLKPSNLLLNANCDLKVCDFGLARSAASTEDNSGFMTEYVATRWYRAPEIMLTFKEYTKAIDVWSVGCILAEMLSGKPLFPGKDYHHQLTLILDVLGTPTMEDYYGIKSRRAREYIRSLPFKKKIPWKAMFPKTNDLALDLLERLLAFNPVKRISVEDALKHPYLEPYHDPDDEPGADPIPEEFFDFDKNKDNLTKEQLKLLIYQEIMR

SEQ ID NO: 24245 - protein, 433 aa, Ralstonia solanacearum
MSNVASPSTLQHAIPSYLPADNLGPWGIYLQQVDRVTPYLGSLARWVETLKRPKRALIVDVPIQMDDGRIAHFEGYRVQHNTSRGPGKGGVRFHQDVTLSEVMALSAWMSVKNAAVNVPYGGAKGGVRVDPRKLSSGELERLTRRYTSEIGIIIGPNKDIPAPDVNTNAQIMAWMMDTYSMNEGATATGVVTGKPIALGGSLGRREATGRGVFVVGSEAARNLGIDVKGARIVVQGFGNVGSVAAKLFQDAGAKVIAVQDHKGIVFNGAGLDVDALIQHVDHNGSVDGFKAETLSADDFWALECEFLIPAALEGQITGKNAPQIKAKIVVEGANGPTTPEADDILRDRGILVCPDVIANAGGVTVSYFEWVQDFSSFFWTEDEINQRLVRIMQDAFRAIWQVAQDNKVTLRTAAFIIACTRILQARQERGLYP

SEQ ID NO: 24246 - protein, 552 aa, Prochlorococcus marinus subsp. marinus str. CCMP1375
MSLKNLSADSQFKVVLEAPFTDQKPGTSGLRKSTKHFQQPHYLESFVEAIFQTLHGLEDGVLVLGGDGRFGNRNGIDVIIRMAAAHGVRKVITTVDGILSTPAASHLIRTKKAVGGIILSASHNSGGPDGDFGVKVNGPNGGPASESLTDAIYAKTQILDSYQIINHDSISLELPAKYEVGGMIVEVIDGIEDYIALMQKIFDFDRIKSFLKDDFLIAFDALNAVTGPYAKRLLEDFFGAPTGTVRNGIPLEDFGGCHPDPNLTYAKDLADLLLNGSEYSFGAACDGDGDRNMILGRNCFVNPSDSLAVLTANANCVPAYSGGLLGVARSMPTSSAVDVVAKDLDISCFETPTGWKFFGNLLDSGQITLCGEESFGTGSNHVREKDGLWAVLFWLQILAHKKCSVEELMHKHWDHFGRHYYSRHDYESIASDIAQNLYETVELRLPSLIGNSFAGRQVTTADNFTYTDPVDHSITARQGLRILLDDGSRVILRLSGTGTKGATLRVYLESYVSSQGDLTQNPQNALSQLITSIDSFAEISNRTGMSRPTVIT

SEQ ID NO: 24247 - protein, 245 aa, Glycine max
MGWVGPPPPPNTSHSITMAMAFPSVTSVTVENVTFPPTVKPPCSPNTFFLAGAGVRGLQIHHAFVKFTAICIYLQYDALSFLSVKWKTKSTHQLTESDQFFSDIVTGPFEKFMQVTMIKPLTGQQYSEKVAENCVAIWRSLGIYTDSEAEAIDKFLSVFKDLTFPPGSSILFTVSPNGSLTISFSGDETIPEVTSAVIENKLLSEAVLESMIGKNGVSPAAKQSLASRLSHLFKEPGVCDPQSHK

SEQ ID NO: 24248 - protein, 265 aa, Frankia sp. CcI3
MNEPRVRYAKKGHVASIMIDRPEVFNALDQRTHQELAAIWNDVEADDEVWVAVLTGAGDRAFSVGQDLKERAELTERGTPATSLGSRGQPGWPRLTERFTLSKPVIARVNGYALGGGFELALACDLIVAAEHAVFGLPEARLGLIPGAGGAFRLARQLPLKTAMGYLLTGRRMTAATALRFGLVNDVVSYPELDGCVAEWTDDIIRSAPLSVRAIKEVVLRSLDMPLPEAFSARYHWEERRRHSLDSAEGVRAFVEKRDPEWAGR

SEQ ID NO: 24249 - protein, 337 aa, Candida albicans SC5314
MTKVFITGASGFIAQHIIKLLLSKGYEVVGTVRSTTKGEQLKSFMPSDAKFTYEIVKELSTPNSFDEALSKHNDIEYLFHTASPLTFDTEDPENVILQPAIKGTENILHAAADLCPNLKRVVLTSSDAAIYSNTDETNPTLSFNEGSWNNTSYQDALKDNITAYYASKAFAEKLAWEFVLMQKPVFGLVVVNPSWVFGPKAYDFDPKRFNSSNEMIDDLLKLNHENNSTFENVSGGYISATDIAKVQVYAIESDDLVNKRLLMTNGYFTCQQILDIINKHFPELNLPKGNPGTEAEEFKKLARVNNDATRKLLPWEFEPLETIVVDTVKQILESKQN

SEQ ID NO: 24250 - protein, 481 aa, Papaver somniferum
SLVAVVITTFLYLIFRDSSPKGLPPGPKPWPIVGNLLQLGEKPHSQFAQLAETYGDLFSLKLGSETVVVASTPLAASEILKTHDRVLSGRYVFQSFRVKEHVENSIVWSECNETWKKLRKVCRTELFTQKMIESQAEVRESKAMEMVEYLKKNVGNEVKIAEVVFGTLVNIFGNLIFSQNIFKLGDESSGSVEMKEHLWRMLELGNSTNPADYFPFLGKFDLFGQSKDVADCLQGIYSVWGAMLKERKIAKQHNNSKKNDFVEILLDSGLDDQQINALLMEIFGAGTETSASTIEWALSELTKNPQVTANMRLELLSVVGKRPVKESDIPNMPYLQAFVKETLRLHPATPLLLPRRALETCKVLNYTIPKECQIMVNAWGIGRDPKRWTDPLKFSPERFLNSSIDFKGNDFELIPFGAGRRICPGVPLATQFISLIVSSLVQNFDWGFPKGMDPSQLIMEEKFGLTLQKEPPLYIVPKTRD

SEQ ID NO: 24251 - protein, 112 aa, Shewanella oneidensis MR-1
MKKVEAIIKPFKLDDVRESLAEIGITGMTVLEVKGFGRQKGHTELYRGAEYMVDFLPKVKIELVIQDDLVDQAIDVIVETARTGKIGDGKIFVTDVERVIRIRTGEENEEAV

SEQ ID NO: 24252 - protein, 158 aa, marine gamma proteobacterium HTCC2207
MKSTPDLCDQYPDLVQVVEPMFSNFGGRECFSGEIVTVKCFEDNSCVKQLVDTQGQGRVMVVDGGGSMRRACLGDMLAEKASVNGWSGLIIYGCIRDVDEIMATDIGVQALGTHPMKTDKKGIGETQVSITFGGVTFNPGNYIYADNNGIVVATQQLV

SEQ ID NO: 24253 - protein, 163 aa, Ginkgo biloba
MAQQKPSEGCAQDAPEHQNRGLFGTFGKKKEDEQAGHPQGTAQETPVSAEQKQQHGLLGKLHQGDKTSQGDKTSSGSSSEEDEGGEKKEGGGRRKKKGMKEKIMERVGGGKEEGKSEGMQDQQQQHDKPTKDEEQKGFMEKIKGKLPGQQHTKEGEPGNAPCT

SEQ ID NO: 24254 - protein, 855 aa, Brassica rapa
MKRVHNIYHHSYTFSFLLVFLVLILFHPALSIYVNTMSSSESLTISSNRTVVSPGGVFELGFFTPLGRSRWYLGIWYKEVPRKTYAWVANRDNPLSNSIGTLKVSGNNLVLQGQSNNTVWSTNITRGNARSPVIAELLPNGNFVMRYSNNKDPSGFLWQSFDFPTDTLLPEMKLGYDLKTGRNRFLTSWKGSDDPSSGNFVYKLDIRRGLPEFILINTFLNQRVETQRSGPWNGIEFSGIPEVQGLNYMVYNYTENSEEIAYSFQMTNQSIYSRLTVSEFTLDRFTWIPPSWGWSLFWTLPTDVCDPLYLCGSYSYCDLITSPNCNCISGFVPKNPQQWDLRDGTQGCVRRTRLSCSEDEFLRLNNMNLPDTKTATVDRTIDVKKCEERCLSDCNCTSFAIADVRNGGLGCVFWTGELVAIRKFAVGGQDLYVRLNAADLDISSGEKRDRTGKIIGWSIGVSVMLILSVIVFCFWRRRQKQAKADATPIVGNQVLMNEVVLPRKKRIFSGEEEVENFELPLMEFEAVVTATEHFSDFNKVGKGGFGVVYKGRLVDGQEIAVKRLSEMSSQGTDEFMNEVRLIAKLQHNNLVRLLGCCVYEGEKILIYEYMENLSLDSHLFDETRGCMLNWQMRFDIINGIARGLLYLHQDSRFRIIHRDLKASNVLLDKDMTPKISDFGMARIFGRDETEADTRKVVGTYGYMSPEYAMNGTFSMKSDVFSFGVLLLEIISGKRNKGFCDSDSSLNLLGCVWRNWKEGQGLEIVDRVIIDSSSPTFRPSEISRCLQIGLLCVQERVEDRPMMSSVVLMLGSEAALIPQPKQPGYCVSGSSLETYSRRDDENWTVNQITMSIIDAR

SEQ ID NO: 24255 - protein, 404 aa, marine gamma proteobacterium HTCC2207
MKRAVITGLGIVSCLGNDKESVAHSLKEGISGIRRREDFAEMGLRCNVGAVLDIDPKDHIDRKILRFMGPSASYAYIATDRAIADAGLTPEMVSNHRTGLVMGSGGVSGEMFTESIDVMRDRGIKRAGPYRVTQIMASTVSACVATPFKIKGVNYSIASACATSAHCIGHAVELIQLGKQDVLLAGGSEDMHWSMAGMFDAMGALTSKYNDTPEIASRAYDSQRDGFAPGLGAGTVVVEELEHALARGANIICEVTGYGATSDGADMVSPSGEGAERCMKMAMETAKGPIDYINTHGTSTPVGDVAELGAIRNTFPENCPDISSTKSLSGHSLGAAGVHEAIYCMLMMQNNFVAGSAHIDELDENAAGLPILLETKEKQLNCIMSNSFGFGGTNATLIMERFTG

SEQ ID NO: 24256 - protein, 270 aa, Prunus persica
CENWGFFELVNHGISHELMDTVEKLTKEHYKKCMEQRFKEMVASKGLEAVQSEIHDLDWESTFFLRHLPVSNISQIPDLDEDYRKVMKEFAVELEKLAEQLLDLLCENLGLEKGYLKKAFYGSKGPNFGTKVSNYPPCPKPDLIKGLRAHTDAGGIILLFQDDKVSGLQLLKDGQWIDVPPMHHSIVINLGDQIEVITNGKYKSVMHRVVAQPDGTRMSIASFYNPGDDAFICPATALLEKETENISAYPKFVFDDYMKLYSGLKFQAKE

SEQ ID NO: 24257 - protein, 369 aa, Bacillus licheniformis ATCC 14580
MKVTTVDSRQFEIGDDPMKVFNIASIPGDGVGKEVVPAAQRVLKAVSDVHGGLSFRFTEFPYSCEYYLEHGEMMPDDGLEQLKEFDSIFLGAVGNSKLVPDHISLWGLLIKIRREFEQVINIRPAKYLQGIKSPLANPKDFDLLVVRENSEGEYSSIGGRIFRDEDEIAIQNAVFSRKGAERAMRFAFELAAKRKKHVTSATKSNGIVYSMPFWDEVFENTAKDYPDITADSQHIDALSAFFVTRPEKLDVIVASNLFGDILTDIGAAIMGSIGVAPAANINVNGKYPSMFEPVHGSAPDIIGKGIANPIGQIWTAKMMLDHFGEEELGARLLDVIEDVLKSGYLTPDIGGSSTTDDVTEEIIKRVRTI

SEQ ID NO: 24258 - protein, 547 aa, Neisseria meningitidis Z2491
MNAFTRAWYALERHYQDTRHVLLRDRFACEPDRFERMHERLDGMLFDYSKNRLGEDTLQLLCRLAETADLEGKMRALRTGAKVNNSEGRAALHTALRLPDGAGAVYADGRDVLPEIRRELNRALKFAHSLDDGSYQGTTGKRITDFVHIGIGGSDLGPAMCVQALEPFRRHIAVHFAANADPACLDEVLCRLNPETTVFCVASKSFKTPETLLNAEAVKAWYRGAGFSESETGCHFCAVSADTEAAQSFGIAAERVFAMYDWVGGRYSVWSPVGLPVMVAVGGARFRELLAGAHAMDSHFFHTPPRRNIPVLMALIAVWYNNFQHADGQTAVPYSHNLRLLPAWLNQLDMESLGKSRASDGSPAACKTGGIVFGGEGVNCQHAYFQLLHQGTRLIPCDFIVPMTAQGVEDGRSRFTVANAFAQAEALMKGKTLDEARAELADLPEAERERLAPHKEFPGNRPSNSILLERLTPYNLGMLMAAYEHKTFVQGVIWDINPFDQWGVEYGKQLAKTIIGELEGGTSVHDASTEGLMAFYRECRLKGGGAA

SEQ ID NO: 24259 - protein, 340 aa, Xanthobacter autotrophicus Py2
MARKLSFKMAINEALDLEMRRDPSVILLGEDIVGGSGAPGEKDAWGGVLGVTKGLYAKHGNRLLDTPLSESAYIGAAVGAAACGMRPVAELMFLDFMGVCFDQILNQAAKFRYMFGGKATTPVVIRAMVGAGFRAAAQHSQMLTPMFTHVPGLKVVCPSNAYDAKGLLIQSIRDNDPVIFCEHKNLYGHEVDVPTEAYAIPFGEANVVRDGKDVTIVSYGLTVHRAMDAASALSRQHGIEAEVIDLRTLSPIDWDTVIESVENTGRLVVVDEAHPRCSIATDVAAYVAQQAFGALKAAPQMVTAPHTPVPFSPTLEDLYIPTADAIAGAVLRTVPHALAA

SEQ ID NO: 24260 - protein, 114 aa, Forsythia x intermedia
NEVIKPTIEGFRSLIRSCTKAKTVKRIVFTSSAGTVNVEEHQKSVYDETDYSDLNFIYSKKMTGWMYFVSKILAEKVAWEAAKENSIGFISIIPTLVVGPFIMPTFPPSLITAL

SEQ ID NO: 24261 - protein, 340 aa, Coccidioides immitis RS
MEMTGVCLGSGIGNFEEIYNSSVAYDNGLRDKKVPRPLAIFEPVEGYRKISPLFVPKLLINLGAGHISMKYGFMGPNHAATTACTTGAHSIGDAARFIAHGDADVMVAGGAESCIHPLAIGGFARCRSLATDFNDQPKKSSRPFDRDRQGFVVGEGAAVVILEELEHATSRGARIYAELKGYGCSADAYHMTAPKENGKGALLAMQRALKNAALPPSKVDYINAHGTSTVIGDAAENAAIKTLLLGSEGKERPSDINISSTKGAIGHLLGGAGAIEAVFSVLTIYEGILPPTINLENTTEEFDCNYVPNVAQGREVDVVLTNSFGFGGTNSSLCFARYRQ

SEQ ID NO: 24262 - protein, 371 aa, Forsythia x intermedia
METDALPLPATTVCVTGASGFIGSWLVMRLLERGYFVRATARDPENKQKVKHLLELPRADTNLTLWKADMTVEGSFDEAIQGCEGVFHVATPMDFESKDPENEVIKPTIEGFLSLIRSCTKAKTVKRIVFTSSAGTVNVEEHQKSVYDETDYSDLNFIYSKKMTGWMYFASKILAEKVAWEAAKENSIGFISIIPTLVVGPFIMPTFPPSLITALSPITGNEAHYSIIDQCQYVHLDDLCEAHIFLYEYPNAEGRYICSSHDATIYDVAKMIRDKWPKYDIPTEFEGIGKDIPVVSFSSKKLIGMGFTFKYTLEDMYRGAIETCREKGLLPYSTRNQANREKKELLLNLKKFHGHDQEELPANGKEKHTNG

SEQ ID NO: 24263 - protein, 105 aa, Oryza sativa
MGPQQDRSAAKPYANGSTAAAAAAGRKENNKVVRYRECQRNHAASIGGHAVDGCREFMASGAEGTAAALLCAACGCHRSFHRREVEAAAAECDCSSDTSSGTGRR

SEQ ID NO: 24264 - protein, 396 aa, Salinibacter ruber DSM 13855
MAKEEFAREKPHVNVGTIGHVDHGKTTLTAAITKVLAERVGGAAEQTFEAIDNAPEERERGITIATSHVEYETENRHYAHVDCPGHADYVKNMVTGAAQMDGAILVVGSDDGPMPQTREHILLARQVGVPYLVVFMNKTDLVDDAELLELVEMEVRELLTEYEFPGDEVPVVRGSALQALESSEEHEEKIMELMEAVDEYIPTPERDVEKPFLMPVEDIFSITGRGTVVTGRIERGRVQLQDEIEIVGMQEEKMDSVVTGIEMFNKTLEEGEAGDNAGILLRGIEKEEVKRGMVLAEPGTVTPHKEFECEVYVLSKEEGGRHTPFFDGYQPQFYFRTTDVTGSIELPEGVEMVMPGDNATFEGSLIEPVALEEGLRFAIREGGHTVGAGVVTDILD

SEQ ID NO: 24265 - protein, 232 aa, Arabidopsis thaliana
MAEASDLLEWPKKDNRRFLHVVYRVGDLDRTIEFYTEVFGMKLLRKRDIPEEKYSNAFLGFGPETSNFVVELTYNYGVSSYDIGTGFGHFAISTQDVSKLVENVRAKGGNVTREPGPVKGGGSVIAFVKDPDGYTFELIQRGPTPEPFCQVMLRVGDLDRAIKFYEKALGMRLLRKIERPEYKYTIGMMGYAEEYESIVLELTYNYDVTEYTKGNAYAQAQMMCTKAVKLLR

SEQ ID NO: 24266 - protein, 486 aa, Triticum aestivum
MTSLPERGAAPPSNPTPSLSCVGDAAVASSSSSTSSAPEEQRKDGGPKQCKASILSSVLTIFEPDQDQSGRSGGHASGSYAWSRVLRRFVGGGSMWRFLGCGKALTAADVQFLGKCYKLSSEESSSDLDSEGGHAAFLEDFSSRIWITYRKGFDAISDSKLTSDVNWGCMVRSSQMLVAQALIFHHLGRSWRKSAQNPSNPEYIRILHLFGDSEACAFSIHNLLQAGKSYGLAAGSWVGPYAMCRAWQTLIRTNREQPEVINRNESFPMALYVVSGDEDGERGGAPVVCIDVAAQLCYDFNKDQSAWSPILLLVPLVLGLDKINPRYIPLLKETFTFPQSLGILGGKPGASTYIAGVQDDRALYLDPHEVQLAVNIASDNLEADTSSYHCSTVRDMPLDLIDPSLAIGFYCRDKDDFDDFCSRASELAEQANGAPLFTVVQSVQPSKQMYNQDDGSGCSGYGVSDNIDTEDLDGSGETGEDEWQIL

SEQ ID NO: 24267 - protein, 201 aa, Oryza sativa
  misc_feature (19)..(19): Xaa can be any naturally occurring amino acid
  misc_feature (37)..(37): Xaa can be any naturally occurring amino acid
  misc_feature (189)..(189): Xaa can be any naturally occurring amino acid
  misc_feature (196)..(196): Xaa can be any naturally occurring amino acid
MAENLELLEWPKKDRRILXHAVYRVGDLDRTIKFYTXECFGMNLLRKRDIPEEKYSNAFLGFGPEESSFVVELTYDYGVDKYDIGTGFGHFAIATQDVYKMVEDIRSKGGNITREPGPAKGGSTVIAFVKDPDGYIFELHQRGPTPEPFYQIMLRAGDSERSIKIYEKALRMKVVKTVDRPDSQYAVAXMLGYATXQETTV

SEQ ID NO: 24268 - protein, 356 aa, Hypocrea lixii
MSRSNPPNNASASRKISFNVSEQYDIQDVVGEGAYGVVCSAIHKPSGQKVAIKKITPFDHSMFCLRTLREMKLLRYFNHENIISILDIQKPRSYDSFNEVYLIQELMETDMHRVIRTQDLSDDHCQYFIYQTLRALKAMHSANVLHRDLKPSNLLLNANCDLKVCDFGLARSAASQEDNSGFMTEYVATRWYRAPEIMLTFKEYTKAIDVWSVGCILAEMLSGKPLFPGKDYHHQLTLILDVLGTPTMEDYYGIKSRRAREYIRSLPFKKKVPFRTLFPKTSDLALDLLEKLLAFNPVKRITVEDALKHPYLEPYHDPEDEPTAPPIPEEFFDFDKHKDTLSKEQLKQLIYQEIMR

SEQ ID NO: 24269 - protein, 441 aa, Rubrobacter xylanophilus DSM 9941
MARPITMPQLGESVTEGTIARWLKAEGDEVEKDEPIAEVDTDKVSAELPSPLAGRIERLLVPEGATVEVGTEIALVATGEEPGPDGPAREDARSEGPTEEFPAAGTRAQPVAAGPGESRAAGRGEGDGRGARVPSAEELRLRRSSPVVRRLAAEHGVEISSIRGTGVGGRVTKKDIEAYIREREARPREEAPPRPAPPPPRERVEVHEGDEVVEVTSVRRAIAERMSRSKREAPHAWTLVEADVSGLVGLREARKEEFRRREGVNLTYLPFVVRAVVESLKEHPVLNSVWDGDRIVLRKRINIGIAVDLEEGALIVPVIKDADDYGIVGLARRIDEVVRRARQRRLSPDDVSGGTFTVNNPGALGSVVSTPIINHPQAAILSAEAIVKRPVVLEDDAIAVRSMMNLEVSFDHRILDGGAALRFLNAVKRRLESYTPESEIG

SEQ ID NO: 24270 - protein, 180 aa, Oryza sativa
MRPGAGFNATAVAAAKAAVVAPVAAGGAASGSPGCRIGTRLFGGLAAMLGLIAFALLILACSYWKLSGYLEGGAGGRGGNDDGGAPADGAKPAASELPPPIWEEKILVIMAGDVKPTYLATPMSSRASSFGDRSSSNGDQADDEKKKVQEVAMGSLVKDGENGEHSESQRDRDEHHIPEV

SEQ ID NO: 24271 - protein, 571 aa, Legionella pneumophila str. Lens
MLDFSLNRDPQTGELYIETSLCGKPLLTTPQLNKGTAFTQEERKDFGLLGKLPHRVETLDEQVKRAYLQYSSYTTRLQQHIYLNNLHDKNQIVFYKLLSRHLGEMLPIIYTPIVGAAAKRFSHEYRQPRGLYIAHSDKNQLEEIINNRSNPDIDLVVVTDGEGVLGIGDQGIGGMDIPVAKLMVYSLCGGIDPTRTLPIFLDVGTNNQELLNDPMYLGCRHPRIKSSEYDDFIKTFVNKIHKQFPNAFLHWEDFGRGNARRILDQFQDELCTFNDDIQGTGAVTLAAILAACDVTGLPLHEHRIVVFGAGSAGTGISDQIVDAMVKNRLSLTDAYDRFWLIDKQGLLLATDQELTDAQKPYARNPIDIQSWEINNKQHPSFTDTIRHVKPTILIGCSAQTGAFSQDIVETMSTACERPIIFPLSNPDEKCEAQPSDILAWSKGRALIATGTAFAPIEYQNRMVQIAQCNNALVFPGIGLGVLAVSASRLTKDMILAAAQTLSKFAPSKKDSFLPLLPSLDNAQIVAKEIAIAVAQCAIDSGYAQKNQDKELPRLIDELFWEPRYLPFRKRG

SEQ ID NO: 24272 - protein, 110 aa, Sinapis alba
MSGVWVFKNGVIRLVENPNQSGGDTNSRRKVMVYLPTGEVISSYSTLEQILRSLGWERYFGGGDTDLLQFHKRSSIDLISLPKDFTKFSSVYMYDIVVKNPNYFHVRDSN

SEQ ID NO: 24273 - protein, 261 aa, Glycine max
AGDSVAALAAVLSLTDPERRRQLQAEEVGGGDKEVVREYFNNSGFQRWKKIYGDTDEVNRVQRDIRLGHAKTVENTLSMLKDEGSLHGVTVCDAGCGTGSLSIPLAKEGAVVFASDISAAMVAEAEKQAKEQLATSEDGSVPVMPKFVVKDLESLDGKYDTVVCLDVLIHYPQHKADGMIAHLASLANNRLILSFAPKTFYYDLLKRVGELFPGPSKATRAYLHSEADVERALQKVGWTIRKRGLTTTQFYFARLIEAVPM

SEQ ID NO: 24274 - protein, 1080 aa, Magnaporthe grisea 70-15
MPRPRRPPLTIAQIVEQADQFEFNINIHLKHWVGAAETLYREGEFYKEEGNFAKAYLLLLRHCSLVLKKFPEHPMAHTRDGRKLIKPLQERLTRIISELEDLKRHINEAYNEWERLVRTGQIDDRPVPDSRYDKYAAQDPALSWNNATQAQLLDAGNNQELAVRLAKDDYIRRDAARRSIRQAGVSEYEEQIRRSGGVWEDWDARRGMGPRNTVDDRNDIQRQIQETRRRLDRSNDQDSEVVVRDFSYNDSWSSSAGSRSSRPPIQNPASQHYNYPSVSRPRPLNYNSYEASPAPSRPPKEQYPSYQDRLEPLPPPIPRKAPEAGRAPPTLPPKTLDQPEERNVQNSTSSVDRAVNELSKRKNITFLPAGYTEAGKPLRPIFVPRSLKDKFLEIAGPNTRKGLELCGIICGRPINNALFVAALLIPNQICTSDTCETEDEFQIFEFCEKENMIIIGWIHTHPTQTCFMSSRDLHTHASYQAISPESVAIVCAPKYNDFGVFRLTDPPGLPHVLRCPHTNTFHQHELPESEIYKDALHPLHSYNKSRPSAALIGIVSFGRPLAALMIRVRVRDESATVTNPFDIPQMENPQTDDPWRPGWDPRRLATLTRPDPRYYRYVPDLSGYFVVAHYQTPDWRPGEGDPSSIRWLLEEAPELIVDGRLRVDSEDLDGQTRSCLAGVGGSGAEARVMAQQKSPSSAPPVVRPFGGRPGWSGGESTYDQSCGVARDYPQRGRQDWQTGESKSQALQRHQNPQNHGFQGQQSQFELSMEQGNSKRNGPIHHQQQRPTPQRHSSNESSEDSQRSWIWPENSDIALPGQQMDPRHMRISQDVLAKIHRYPMGHPQSPWGWPETSDGSGVTGLTESESIGMREARRRHNAEIEKRAPHPQRFIRPSSPGTSNWGPRRDSRDGSTWSKNSSSSFRVQMPQWPSAQQYSGSRDSPSYLHGTQRVGIMSMGVSRSEATGVGLSKVQVWRTNSRLCRLGVTMTTAHHEPPGMAITDTASQAMSSHTLKTNRVLTITAVTAASSLRIIHREMSRRGTAGHRKTGDSSNECNNPNTIPSDTRRQTFSPPADVQAIRLRG

SEQ ID NO: 24275 - protein, 663 aa, Triticum aestivum
  misc_feature (425)..(425): Xaa can be any naturally occurring amino acid
  misc_feature (450)..(450): Xaa can be any naturally occurring amino acid
MDSSRVILIPGTPPLPYAYEQLPSSSADAKGIEERTAGGGLRWRACAAVLAASAVVALVVAAAVFGAGGAGRDAVAASVPATPATEFPRSRGKEHGVSEKTSGAYSANAFPWSNAMLQWQRTGFHFQPDKYYQNDPNGPVYYGGWYHFFYQYNPSGSVWEPHPAWGHAVPKDLIHWRHLPPALVPDRWYDIKGVLTGSITVLPDGKVILLYTGNTETFAQVTCLAEPADPSDPLLREWVKHPANPVVFPPPGIGMKDFRDPTTAWYDESDGTWRTIIGSKNDSDHSGIVFSYKTKDFISYELMPGYMYRGPKGTGEYECIDLYAVGGGRKASDMYNSTAEDVLYVLKESSDDDRHDWYSLGRFDAAANKWTPIDTELELGVGLRYDWGKYYASKSFYDPVKKRRVVWAYVGETDSERADITKGWXANLQSIPRTVELDEKTRTNLIQWPXVEELDTLRINTTDLSGITVGAGSVAFLPLHQTAQLDIEATFRIDASAIEALNEADVSYNCTTSSGAATRGALGPFGLLVLANHALTEQTGVYFYVSKGLDGGLRTHFCHDELRSSHASDVVKRVVGSTVPVLDGEDFSVRVLVDHSIVQSFAMGGRLTATSRAYPTEAIYAAAGVYMFNNATGTSVTAEKLVVHDMDSSYNHIYTDGDLVVVD

SEQ ID NO: 24276 - protein, 162 aa, Haloarcula marismortui ATCC 43049
MNVALGGTFDPIHDGHRALFERAFELGDVTVGLTSDDLAPKTRHDQRHVRPFSERQSALADELAALATDLEREWEVRELTEPTGIATEPQFDTLVVSPETETGGRRINEIREERGHDPLEIEVVPHVRAADGDIISSTRIVEGEIDEHGNLTPNRTGRQNIS

SEQ ID NO: 24277 - protein, 530 aa, Rhodopirellula baltica SH 1
MSATSSAQPVLIYDTTLRDGSQGEGVSFSLQDKLNIAIRLAEIGIEFIEGGYPLSNEKDVAFFEQIRKHDLGKSKVCAFGMTRRRSMKAEDDPGMKALVAAKTPCCTLVGKTWDFHVTEVLRATLDENLAMIGESAEFLAGHSELIYDAEHFFDGYNANPEYAIKTLQAAAASGAKWLALCDTNGGTLPERVAEVTRIAKEAMASYDVGIGIHCHNDCELAVANSLAAVDVGATQVQGTINGIGERCGNVDLIAVIANLALKKENTTVLGGRPLQQLTELSRFVYETANLQWRNNQPFVGQSAFAHKGGMHVHAINKAASTYEHIDPTLVGNERRILVSELSGRSNIEAIAGKYDVGDDKELQNKILAEVVRLENQGYQFESATASFDLLIRRVSGKFRPHFETIKYRVVAGDRDVKSQVAFAEAIIKLQVGDTLWFDAAEGHGPVNALDAGLRKALAGAYPVLSEISLIDYKVRVVDSGSGTAASIRVNIESTDGKETWGTIGVSDNIIEASWQALVDSVEYKLHRSEA

SEQ ID NO: 24278 - protein, 854 aa, Brassica rapa
MKRVKNIYHHYTFSFLLVFLVLILFHPALSIYVNTMSSSESLTISSNRTLVSPGGVFELGFFKPLGRSRWYLGIWYIKVPLKTYAWVANRDNPLSSSIGTLKISGNNLVLLGQSNNTVWSTNLTRGNARSPVIAELLPNGNFVIRHSNNKDSSGFLWQSFDFPTDTLLPEMKLGYDLKTGRNRFLTSWKGSDDPSRGNFVYKLDIRRGLPEFILINQFLNQRVETQRSGPWNGMEFSGIPEVQGLNYMVYNYTENSEEISYSFHMTNQSIYSRLTVSEFTFDRLTWIPPSRDWSLFWTLPTDVCDPLYLCGSYSYCDLITSPNCNCIRGFVPKNPQQWDLRDGTQGCVRRTQMSCGRDGFLRLNNMNLPDTKTATVDRTMDVKKCEERCLSDCNCTSFAAADVKNGGIGCVFWTGELVAIRKFAVGGQDLYVRLNAADLDISSGEKRDRTGKIIGWSIGVSVMLILSVIVFCFWRRRQKQAKADATPIVGNQVLMNEVVLPRKKRNFSGEDEVENLELPLMEFEAVVTATEHFSDLNKVGKGGFGVVYKGRLVDGQEIAVKRLSEMSAQGTDEFMNEVRLIAKLQHNNLVRLLGCCVYEGEKILIYEYLENLSLDSHLFDETRSCMLNWQMRFDIISGIARGLLYLHQDSRFRIIHRDLKASNVLLDKDMTPKISDFGMARIFGRDETEADTRKVVGTYGYMSPEYAMNGTFSMKSDVFSFGVLLLEIISGKRNKGFCDSDSTLNLLGCVWRNWKEGQGLEIVDKFINDSSSPTFKPREILRCLQIGLLCVQERVEDRPMMSSVVLMLGSEAALIPQPKQPGYCVSGSSLETYSRRDDENWTVNQITMSNIDAR

SEQ ID NO: 24279 - protein, 133 aa, Parietaria judaica
MRTVSMAALVVIAAALAWTSSAELASAPAPGEGPCGKVVHHIMPCLKFVKGEEKEPSKSCCSGTKKLSEEVKTTEQKREACKCIVAATKGISGIKNELVAEVPKKCGITTTLPPITADFDCSKIESTIFRGYY

SEQ ID NO: 24280 - protein, 713 aa, Arabidopsis thaliana
  misc_feature (690)..(690): Xaa can be any naturally occurring amino acid
MFDAYYFLTGGTSGIGAETARVLAKRGVRVVMAVRDMKKAEMVKERIIRENPEADIILFEIDLSSLSSVARFCSQFLSQDLPLNILINNAGVFSPNLEFSEEKIELTFATNFLGHYLLTEMLIEKMIDTAEKSGIEGRIINLSSVIHNWVKPDCFSFPKLLHPIRYNGTRAYAQSKLATILHAKALSKQLKDRNANVTINAVHPGIVKTGIIRAHKGLFTATTCYVALSNETKGLSGKYFADCNETNCSDLANDEYVALKLCTQSPLGNYLMALPMFGSIDFTNWFLKKLEEQDESFGGTFLHLAVKLGNEELVKKIVEIHPSLSTAESIESLEETVPNDLKLAEMVNKDGFTPLHCAVMNGSVETLTAFINKAPLSFDSVTLQTSETVFHLAARHKKMEAFIFMAKNANLRRLLYELDGEGNTVLHAAASVGFLSNDKGFEAVDLLNKDDEDFKMMSMILGHDSEIVQRAASSPRDAYTPSTQTEVENSEIHHEQGLVAPEIKEENVTNENNKVFEAIDLPTKEDGDLKMLAGTDSETFQLPSSRTGILTPETETEMVISNTLHGIRHGLRESRIKEKEMQSEALQNARNTITVVAVLIASVTFTCGLNPPGGVYQDGHFIGKATAGGTVAFKVFSVSNSIALFTSLCIVILLLSIIPFRTKSLKTFLIITHKMIWLAVIAMASAYVAXLANHMSRKKKMRKNMMSRIETLN

SEQ ID NO: 24281 - protein, 366 aa, Gerbera hybrid cv. 'Terra Regina'
MEEDSPATVCVTGAAGFIGSWLVMRLLERGYVVHATVRDPGDLKKVKHLLELPKAQTNLKLWKADLTQEGSFDEAIQGCHGVFHLATPMDFESKDPENEIIKPTIEGVLSIIRSCVKAKTVKKLVFTSSAGTVNGQEKQLHVYDESHWSDLDFIYSKKMTAWMYFVSKTLAEKAAWDATKGNNISFISIIPTLVVGPFITSTFPPSLVTALSLITGNEAHYSIIKQGQYVHLDDLCECHIYLYENPKAKGRYICSSHDATIHQLAKIIKDKWPEYYIPTKFPGIDEELPIVSFSSKKLIDTGFEFKYNLEDMFKGAIDTCREKGLLPYSTIKNHINGNHVNGVHHYIKNNDDDHEKGLLCCSKEGQ

SEQ ID NO: 24282 - protein, 139 aa, Salmonella typhimurium LT2
MNTVCTHCQAINRIPDDRLQDAAKCGRCGHELFDGEVINATGETLDKLLKDDLPVVIDFWAPWCGPCRNFAPIFEDVAEERSGKVRFVKVNTEAERELSARFGIRSIPTIMIFKHGQVVDMLNGAVPKAPFDSWLNEAL

SEQ ID NO: 24283 - protein, 281 aa, marine gamma proteobacterium HTCC2207
MSALILDGKSLAAKTEAELSQRVAALKAANNGQAPILATILVGGDPASATYVKMKQNACKRVGMESIAVEMAHDTSTEQLLAKIEELNNNPDCHGILLQHPTPKQIDERACFDAIALAKDVDGVTCLGFGRMAMNEEAYGSATPQGIMRILEGYAIDMSGKHAVVVGRSPILGKPMALMLLNANATVTICHSKTQNLPELIKQADILVGAVGRPEFIKAEWIKDGAVVVDAGYHPGGVGDIELAPLVDRVAAYTPVPGGVGPMTINTLILQSVAAAEKSLG

SEQ ID NO: 24284 - protein, 176 aa, Parietaria judaica
MRTVSAPSAVALVVIVAAGLAWTSLASVAPPAPAPGSEETCGTVVRALMPCLPFVQGKEKEPSKGCCSGAKRLDGETKTGLQRVHACECIQTAMKTYSDIDGKLVSEVPKHCGIVDSKLPPIDVNMDCKTLGVVPRQPQLPVSLRHGPVTGPSDPAHKARLERPQIRVPPPAPEKA

SEQ ID NO: 24285 - protein, 349 aa, Gibberella zeae PH-1
MSPLWVRRLCIRVVDSLYGSFLYLPLAILFLKRSVTGFGTGEWDESQIPKLDGKVAVVTGGNAGIGYYTVKHLASRGAKVYLGARSESRAKAAIKRLLEENPLIPQENVVWLRLDLANQSQVVDAAVELQSKEQRLDILVNNAGIDPYDYIRTADGFEMTMAVKYTNPAAAAQEESDVRVITVSSSGEAYSSPTNQFTSPKDLDDPCASPGWENSCLGQAMRYGTTKLANVLFASELQRRMDEEDANIISLSLNPGTVRTDGAANVMPFMVRPLVRFLFTAPERGADTSLFAATAEEIKENSERWKGRYLDGPGRIKVPSLRARDAVAGRNLWNITEAAVRGTGALDRL

SEQ ID NO: 24286 - protein, 340 aa, Bacillus licheniformis ATCC 14580
MKVKVAINGFGRIGRMVFRKAMLDEQIDIAAINASYPPETLAHLIKYDTNHGRYELDVKAGEDCLFVNGKKVMLTNQRDPKLLPWAQYGIDIAVEATGKFNSKEKAEAHIEAGAKKVILTAPGKNEDITIVMGVNERDFDAERHTIISNASCTTNCLAPVAKVLDDAFGIENGLVTTVHAFTNDQKNIDNPHKDLRRARACGSSIIPTTTGAAKALSLVMPHLKGRMHGLALRVPVSNVSLVDLVADLKSDVTAEDINEAFRMAAAGSMSGIIDVCDEPLVSSDFNTNPYSAVIDSLSTMVLENRKVKVLAWYDNEWGYSCRVVDLIRYAASRMKHPSAV

SEQ ID NO: 24287 - protein, 417 aa, Methanosarcina mazei Go1
MSCGSNRGNEMKDKYDVLVIGAGPAGSIAAKTAAEKGLDVLLIEKRQEIGDPVRCAEGVNKECLKKHVEIDKRWICADLKGSCIFSPDGTKIEMAEEISGGEVGYVLERKVFDRALAEHAATAGAEVRVKTRATGLIIEDDFVKGARLMHLGKEYEVRASIVIGADGVESKVGRWAGIDTALKPVDVETCAQYLIAGADINQEYCEFYIGNEMAPGGYVWVFPKGGGKANVGIGILGSKMGKFKPRPVDYLNDFVQKKFPDARIVEMVFGGVPVSGSIEKTSVNGLMLVGDAARQSDPITGGGILNAMDAGKLAGEAAYEAISAGDVSVVKLEEVYEKKWRDTVGHDIDMSLIVKNCFINLTDDDLDSLAHSLKDVKFERMSLLDLLQALFKANKKLLWDLRVLFKDAAKEVIKNKT

SEQ ID NO: 24288 - protein, 123 aa, Triticum aestivum
  misc_feature (100)..(100): Xaa can be any naturally occurring amino acid
MARLNSKAVVAAVVLAAVVLMMAGREASAALSCGQVDSKLAPCVAYVTGRASSISKECCSGVQGLNGMARSSSDRKIACRCLKSLATSIKSINMGKVSGXCPGKCGVSVPFPISMSTNCDTVN

SEQ ID NO: 24289 - protein, 179 aa, Brassica napus
MESSPAAAAKPARGAGGRKGGDRKKSVSKSVKAGLQFPVGRISRYLKKGRYAIRYGAGAPVYLAAVLEYLAAEVLELAGNAARDNKKNRINPRHLCLAIRNDEELGKLLHGVTIASGGVLPNINPVLLPKRSASQTEKPEKAAKAAKSPIKRRTCFFRDCVVYFLCLLSVWFVLWISNG

SEQ ID NO: 24290 - protein, 87 aa, Arabidopsis thaliana
  misc_feature (21)..(21): Xaa can be any naturally occurring amino acid
AVVTSPDQATRGAPFSGLKSXSAAFPVTRKASKDITSITSNRGRVSCMNVWAPIGKKKFETRSKLPDLTDVELAKGVDYLLRNMWIP

SEQ ID NO: 24291 - protein, 347 aa, Camellia sinensis
MKDSVASATASAPGTVCVTGAAGFIGSWLVMRLLERGYIVRATVRDPANLKKVKHLLDLPKADTNLTLWKADLNEEGSFDEAIEGCSGVFHVATPMDFESKDPENEVIKPTINGVLSIIRSCTKAKTVKRLVFTSSAGTVNVQEHQQPVFDENNWSDLHFINKKKMTGWMYFVSKTLAEKAAWEAAKENNIDFISIIPTLVGGPFIMPTFPPSLITALSPITRNEGHYSIIKQGQFVHLDDLCESHIFLYERPQAEGRYICSSHDATIHDLAKLMREKWPEYNVPTEFKGIDKDLPVVSFSSKKLIGMGFEFKYSLEDMFRGAIDTCREKGLLPHSFAENPVNGNKV

SEQ ID NO: 24292 - protein, 112 aa, Bartonella quintana str. Toulouse
MKKIEAIIKPFKLDEVKEALQKIGLHGITVTEAKGFGRQKGHTELYRGAKYVVDFLPKVKIEIVVADEKLDQAIDAIRNAAQTKHIGDGKIFVFSIDNAIRIGTGKSGIEAL

SEQ ID NO: 24293 - protein, 226 aa, Spinacia oleracea
WEQEGSTNAVLEGESDPEGAVSWGSETQVSDEGGVEGGQGFSEPPEEAKLFVGNLPYDVDSEKLAGIFDAAGVVEIAEVIYNRETDRSRGFGFVTMSTVEEAEKAVELLNGYDMDGRQLTVNKAAPRGSPERAPRGDFEPSCRVYVGNLPWDVDTSRLEQLFSEHGKVVSARVVSDRETGRSRGFGFVTMSSESEVNDAIAALDGQTLDGRAVRVNVAEERPRRAF

SEQ ID NO: 24294 - protein, 297 aa, Chlamydomonas reinhardtii
MMLASRPAVALGARAQPQVLRPTLVPRPGMVSNLRLQPVKVADPIVASETSQVMEAPQEKKLSEFELKRLERKQQRAQEAATYKFSAIAATVLVLSIAVVATYYRFAWHFAEDGDLPVDEMAATLLLVFGGMFGMEMYARFAHKVLWHDFEPGWALHKSHHEPRTGPFELNDIYAVANALPAMALCAYGFFTPHVIGGVCFGAGLGITLFGIAYMFFHDGLVHRRFPVGPIANLPYMKRIMVAHQIHHTNKFGGVPFGMFLGVQELEAVPGGKEELDKLMADLEAREAAAAKAAGSS

SEQ ID NO: 24295 - protein, 1208 aa, Arabidopsis thaliana
MVRGLVNFTGLSTRLLNICVDSLCKFRKLEKAESLIIDGIRLGVDPDVVTYNTLISGYCRFVGIEEAYAVTRRMRDAGIRPDVATYNSLIAGAARRLMLDHVLYLFDEMLEWGIYPDLWSYNTLMCCYFKLGKHEEAFRVLYKDLQLAGLNPDNALELFKEMQSRFKPELMTYNILINGLCKSRRVGTAKWMLTELKKSGYTPNAVTYTTILKLYFKTRRIRRGLQLFLEMKREGYTYDGYAYFAVVSALIKTGRTKEAYEYMQELVRKDGNLDAVDDLLGEIERRGMKADEYTHTIIVNGLLRTGQTRRAEEHFVSMGEMGIGLNLVTCNCLVDGLCKAGHVDRAMRYFESMEVKDEYTYTSVVHNLCKDMRFVCASKLLLSCYNKGIKIPTSARRAVLSGLRMSGCYGEARKAKAEMKLTLVGMARVRLVTPSSSESEDERVTIIREADMNREEVAEENKFEDENCEQESPENLNEPEEENISEEGDNVEPMQSQGMEENPEEEEKEGEEEEESEGNQNPNFFSIQPKTYQRTWIWRDMRKIRRRRRFVVLFVGGSSSSEKREGEKKSFREKKGEEGNKERERKFSNSPVKLELKSPAKSELKSPAAKSEKITSEVVGENRGSNDRSIRMGLSWDRLVVVVGTDSFCDCQKRGQSLSFRASVSSYRVALMLITCLCILAVDFTIFPRRYAKTETYGTSLMDLGVGSFVLANAVVSRQARDVSSGNWITGIKATAPLLLLGFIRLVTTSGVDYQVHVTEYGVHWNFFFTLAAISILTSFVNIPAKYCGLLGFAVLAGYQTWLLSGLNTYLLSDERGTDIISKNKEGVYSILGKILTWLLGHVPSWRSLRIVTILFDNYVERISRRTALGIFMLSSYIPLNKLSSLEEAIDQNLLATFLLSDPNPSAWNQYINPRDCTQGLCSTFCPQWCTYINFSPPPISYEQFLNDGVASNPNLSPLVIAIFGIFATAFLLAAYYTLVSKYCANDTTNEAASESGRSDIILDVNSPERGDQDDPFALESSTAGLDDTLIKKIGFFKLKKHQNGFKINGTDCSICLGEFNEDESLRLLPKCNHTFHVVCIDRWLKSHSNCPLCRAKIIVPTTQQPEHHVVVMNLDRFTSNVGSAEGNVVVDDHREEVSVSISSHHPSWVSAAVIVLRFRWDGEEEEGNYDLENGNREKLVDLKRSFSSGGLVLGTQGRTRRSLNICP

SEQ ID NO: 24296 - protein, 92 aa, Thiomicrospira crunogena XCL-2
MDQDVIIESTPNEDRLNSLGTREWPIWEKEVSNFPWHYDEQEVCYVLEGEVTVTVEDGTQYHIKPGDLVTFRQGLNCYWSVETPIKKHYKFG

SEQ ID NO: 24297 - protein, 542 aa, Vibrio sp. Ex25
MEQKSFELYESTQQLSVALKKLELKSKKDLRKFEFEEKVDATLIKFGRTFLSSTFDEAMIASFIEQLTSNSIISAAYLHLDSTKLSSLRRHHFGHLQLRHENTIKTVPNWQGENLHLPIIIDKQTVGELIFSVQLDQIDQSFISKQMELVSDLVHGVIGRHLSLEREVELRKRAEESEKATKEFVAMINHELRTPLNGVLGSAELLSRTQLGEEQRHYLNNLTQSGDLLRVIINDLLDFSKMNAGMMEIIDKVFAWEELEKAIMGVFSAKAAEKRIHFSIDKKLGIPEFLVGDLERITQILVNLVGNAIKFTHLGGVVLRVEWINGIAHFEVEDTGIGIPIEAQPSLFDPFVQVDRSAKRSFEGSGLGLAICKNLVDLMQGEISFESEERKGTTFKVSIPLKEGQAQGAAEGELATIERSDLAGRSILVVDDIRMNQVIVTQMLKKLDITPDLKANGKEALEAVKNKEYELIFMDCRMPEMDGYEATMYLRERGFTHPIIALTAGTTIEERQKCIDSGMDDILTKPYTATDIEQIMCKWLEQ

SEQ ID NO: 24298 - protein, 473 aa, Psychrobacter arcticus 273-4
MCSFIYQKSRPYQIIFSICLPLLMIYCDFFLLPFSSLFRLPNLFTSFVSVPRLHRSRACRKDASAKPPPTMRGDTRLSIKSLLALSVWITLLLPQTVWAAEGVADPSTSSVLLLILYVVVAIGISFICSLAESALLTMTPSYIADVQERNPKKAHMLRRLKIDNIDQSLAAILTLNTVAHTFGSIGAGAQATIVFGSAWFGLFSAIMTLAILFLSEIIPKTLGTMYWRQLSGMVAYFVRGIILLLYPLIWISEKLTKLLVRGKEPQTFSRREFAALASIGEEAGQIDPLESRIIRNLLAFGAIKVEDIMTPRSVMLAFEENKTVAELLVDRPKLTFSRLPIYDGDLDNITGFVLKTDMLLAKVNHAVDRPLTQFKRDITFVFSKMKLFDLLELMLKNRIHIAITVGEYGEVKGLVTLEDVFETLLGLEIVDEIDRVEDMQALARQMMDRRIERLGMKLSDDEHYEDYTVDNKQ

SEQ ID NO: 24299 - protein, 806 aa, Coccidioides immitis RS
MVTPPPEATALEDKVKLLPVADPAVAATTTGNAQLPSRPLDKMDEAAGRVDRSLSPLANGTSLPNGTKEALNGLTSPSTEKEPKPAAETTSSNSFLTRANEVETSSSLPKADTLDEEKKTKPTESEANLRNELSAPDTATEVVTSLVPQGEQVMPQVEKAEDKPLSQPISPPATAPVVEPNETQSSAPAPTLSTSQDQTMAEAPPLSPTKMSREREEDEADEPAAKRTKTDAITPPQAEFKVPDLPPPASTAITPLQNKFFIRTLAALKRTHDARFFRVPVDPVKLNIPNYPTIIKEPMDLHTMEDKIKSGAYKTVDQITADFKLMIDNCITFNGPEHVVTVEGMRLRDNWERHLTKLPSPSEVEPTAAEKKAKKASTAPTKTQPARRESQAKAAAPKVANATSPTTFALGPEGLPLIRRDSNTVDGRPKRSIHPPKNRDLPYSTKPKKKKFHWELKFCEEVIDELHKPKHYNFAAPFYQPVDPVALNIPTYHNIIKKPMDLSTIRTKLQTGQYENSKEMENDVRLMFKNCYKFNIPGDPTYNAGKKLEEIFDYKWGQKARWLETHDPASAHQSDSSDNESSEGEESNDDEQHEKLQILQKQIAEMSKQVEAIRQKKKKTPPGPSKKASKAKPGKKDNKKGAPSRKDKKGGSKSTKSSEKQRWITYREKQIISHGISTLPENKVQDALHIIQSNVPSLKGTDQAEVELDIDELPNNVLVLLLNFVKKHAPQSFEFDEPAPEPLPTAVPAKPKKNKPMNAHEQEAQIGRLAGTLSKFQGGAQSSDPIHSEAARESSDDDDSEESEEE

SEQ ID NO: 24300 - protein, 155 aa, Arabidopsis thaliana
TGKGILAQLNLETGIPIYEAEPLLLFFILFTLLGAIGALGDRGKFVDDPPTGLEKAVIPPGKNVRSALGLKEQGPLFGFTKANELFVGRLAQLGIAFSLIGEIITGKGALAQLNIETGIPIQDIEPLVLLNVAFFFFAAINPGNGKFITDDGEES

SEQ ID NO: 24301 - protein, 290 aa, Magnetococcus sp. MC-1
MSIFIDKNTKVICQGFTGANGTFHSEQAIAYGTQMVGGVTPGKGGSTHLGLPVFNTVAEAVAATGATATVIYVPPPFAADAIMEAAAADLDLAICITEGIPVLDMMKVKRYLEGRKTRLVGPNCPGVITPDACKIGIMPGHIHKRGSVGVVSRSGTLTYEAVAQTTAIGLGQSTCVGIGGDPINGTNFIDCLERFNEDDETEVVVMIGEIGGTAEEEAAAWIKAHMKKPVVGFIAGSTAPPGKRMGHAGAIISGGKGTAAEKFAALEAAGVFIAQSPSAIGETVKKALGQ

SEQ ID NO: 24302 - protein, 488 aa, Listeria innocua
MSIKETSLPKVQTKLFINGKWIDGDNKETKDIVNPANGEVIAKIAQAGPKETKQAIKAAKDAFPDWAKMELADRVKLLHNIADLMEERADTLAKIMTLEQGKPLKESKGEVLTGAENFRFAAEEARRLYGETIPAPNNHAFIVKKQPIGVVAAITPWNFPGGMVTRKLAPALATGNTIVLKPSGDTPLSALAIFEIFEEAGLPKGVANIVMGSSKEIGETLTDSDDVRKLTFTGSTKVGQTLFKQSADTLKKISLELGGHAPFIVFADANLEAAVDDLITAKFRNNGQVCVSPNRIFVAKEIKEKFTKTLVAKVEKLKVGNGLDDVNVGPLIREDAIDKIDKQLKNATDKGAKVLTGGERLTGSDYDKGNFYKPTVLDNVTREMDIFYEETFGPVIPLIVFENEDEAIEMANDSEFGLASYFYTKDLARVEKVGAALEYGMVGANEIAISNPETPFGGVKHSGFGRENGHYGMEEYIQVKFINLKYRD

SEQ ID NO: 24303 - protein, 223 aa, Zea mays
MERELLETFDAAKKAADATAGQGDSPEAGRCLDALHRLRDIRVNTDILVSTQDSDLAWRERKRGKQLFCRLRILWNLVVITLEGYAWRGSEKQKMQGVGKRLRPLTKHPHSGIQAVASDLFGYWKKVVLEETGKKNGSSENEKSMDSSGKVEKVRPMKVEKNSASASMKVEKRDVDDRGQKPDNVKVEKTASNGSRTQSVKVERVSKEVNRTDAKKPASVPNG

SEQ ID NO: 24304 - protein, 329 aa, Schizosaccharomyces pombe
MSFLFNKRPKSTQDVVRCLCDNLPKLEINNDKKKSFEEVSKCLQNLRVSLCGTAEVEPDADLVSDLSFQIYQSNLPFLLVRYLPKLEFESKKDTGLIFSALLRRHVASRYPTVDYMLAHPQIFPVLVSYYRYQEVAFTAGSILRECSRHEALNEVLLNSRDFWTFFSLIQASSFDMASDAFSTFKSILLNHKSQVAEFISYHFDEFFKQYTVLLKSENYVTKRQSLKLLGEILLNRANRSVMTRYISSAENLKLMMILLRDKSKNIQFEAFHVFKLFVANPEKSEEVIEILRRNKSKLISYLSAFHTDRKNDEQFNDERAFVIKQIERL

SEQ ID NO: 24305 - protein, 447 aa, Escherichia coli
MDQTYSLESFLNHVQKRDPNQTEFAQAVREVMTTLWPFLEQNPKYRQMSLLERLVEPERVIQFRVVWVDDRNQIQVNRAWRVQFSSAIGPYKGGMRFHPSVNLSILKFLGFEQTFKNALTTLPMGGGKGGSDFDPKGKSEGEVMRFCQALMTELYRHLGADTDVPAGDIGVGGREVGFMAGMMKKLSNNTACVFTGKGLSFGGSLIRPEATGYGLVYFTEAMLKRHGMGFEGMRVSVSGSGNVAQYAIEKAMEFGARVITASDSSGTVVDESGFTKEKLARLIEIKASRDGRVADYAKEFGLVYLEGQQPWSLPVDIALPCATQNELDVDAAHQLIANGVKAVAEGANMPTTIEATELFQQAGVLFAPGKAANAGGVATSGLEMPQNAARLGWKAEKVDARLHHIMLDIHHACVEHGGEGEQTNYVQGANIAGFVKVADAMLAQGVI

SEQ ID NO: 24306 - protein, 358 aa, Cryphonectria parasitica
MAEFVRAQIFGTTFEITSRYSDLQPVGMGAFGLVCSARDQLTNQNVAIKKIMKPFSTPVLAKRTYRELKLLKHLRHENIISLSDIFISPLEDIYFVTELLGTDLHRLLTSRPLEKQFIQYFLYQIMRGLKYVHSAGVVHRDLKPSNILVNENCDLKICDFGLARIQDPQMTGYVSTRYYRAPEIMLTWQKYDVEVDIWSAGCIFAEMLEGKPLFPGKDHVNQFSIITELLGTPPDDVINTIASENTLRFVKSLPKRERQPLASKFKNADEQAVDLLERMLVFDPKKRITASDALAHEYLAPYHDPTDEPVAEEKFDWSFNDADLPVDTWKIMMYSEILDYHNVDASGASAAMGEFNGQ

SEQ ID NO: 24307 - protein, 334 aa, Sulfitobacter sp. EE-36
MAETRETKLLIIGSGPAGYTAGVYASRAMLNPILVQGIEPGGQLTTTTEVENWPGDSEVQGPDLMIRMQDHAKAMGTEIIGDIITDLDLSSRPFHAKGDSGTTYVADAVILATGARAKWLGLETEEKFKGFGVSACATCDGFFYRNQEIVVIGGGNTAVEEALFLTNFASKVTLIHRRDELRAEKILIDRLMKNPKIEPLWFHQLDEVYGTDAPLGVEGVKVKHVETGEITDIPCKGVFVAIGHAPANELVKDTLETHMGGYVVTKPDSTETSVPGVFAAGDLTDHKYRQAVTSAGMGCMAALEAERFLAEVGDDEGKDTSLPLGYGAEVKDDA

SEQ ID NO: 24308 - protein, 351 aa, Bromheadia finlaysoniana
MENEKKGPVVVTGASGYVGSWLVMKLLQKGYDVRATIRDPTNLEKVKPLLDLPRSNELLSIWKADLNDIEGSFDEVIRGCVGVFHVATPMNFQSKDPENEVIKPAINGLLGILTSCKKAGSVKRVIFTSSAGTVNVEEHQAAVYDENSWSDLHFVTRVKMTGWMYFVSKTLAEKAAWEFVKENAIHFIAIIPTLVVGSFITNEMPPSLITALSLISGNEAHYSILKQAQFVHLDDLCDAHIFVYEHPEANGRYICSSHDSTIYDLANMLKNRYATYAIPQKFKEIDPNIKSVSFSSKKLMDLGFKYKYTIEEMFDDAIKTCRDKNLMPLNTEELVLAAEKYDEVKEQIAVK

SEQ ID NO: 24309 - protein, 242 aa, Methanosarcina acetivorans C2A
MQLPDILNRFKIPAFKFEEKGSIMKDNLPEKGAIVQRDRETYAIAPHLPGGVVDPDTLIKIAEVAKKYGAAALKATSAQRIAIVGLKEEDLDNVWADLNIKPGAAIGLCVRSIKICPGTTFCKQAKQDSLGLGLKLDEKYHGMPMPSKLKIGVSGCPNSCAEPAIKDIGIMGTAKGYNLMVGGSAAATPRLADVVAKGLSEDEVLDAVERILTYYKNSGTKKRLGKFIDGMSLEEFKTQVGL

SEQ ID NO: 24310 - protein, 129 aa, Zea mays
  misc_feature (45)..(45): Xaa can be any naturally occurring amino acid
MAASMISSSALAVAPQGLPPLGRRASSFAVVCSKKKIKTDKPYGXLAGGLTVDVDANGRKGKGKGVYQFVDKYGANVDGYRPIYNEDDWSPTGDVYVGGTTGLLIWAVTLGGMLGEGALLVYNTSALSG

SEQ ID NO: 24311 - protein, 669 aa, Vibrio angustum S14
MKNKLDDNSLKHGKNERLHAKISHDIDVHHLYHKTSLFSKIALVMSSVLLCVMLTALYISYYNNTQRVVKDIKVMMNTFSPLIIDAAIYKDTETSIELNRSLETHKKILSLSLYDLDGNLIHFYEKNDGNSYTPLAQAPGLSIYEGNYTLTYPVSFNGDNIFNYVIYYSSAEIIRTILIQLFVFILPFLLFIIFILVYMYRKVTRPLTFLIGQLPKIGSGGVNITEVEDAEGEVSLLASELKKADECIYNTESKLQGLNRKLREQANDLSEAIKIKAEFMANMSHEIRTPMNGVLGFVQCLEERNLDQESQRQIGYIKESAYSLLVIINEILDYSKLESGNVELHMTAFNLKPFVHSCATPFIHQAKIKKIQLSTEIGEGLADSFTADEGRLRQILINLIGNAVKFTHTGSVKLVVEKRDPPEQQCEELKKYNDKHIQWLRFKVKDTGIGIAEEKLAFIFDSYTQADGSISRQFGGTGLGLSISNSLCRLMSAKLQVDSTIGNGTEFWFDIPLKQSDIQRKENGEDHALITNLSMYEDRKILVVEDSMVNQQLIKAFLTAFGLKNITIVNDGVQAVEYMIENTADVILMDCQMPNMGGLEATELIRDMPSMSRPIIIALTANVMEEEKKRCLSVGMDDYVSKPIEKIMLYKSLQRAFDNEHGENWAANI

SEQ ID NO: 24312 - protein, 284 aa, Legionella pneumophila str. Lens
MPASLIDGREISALRRTELKQRVQYHVEQGQRAPGLAVVLIGNDPASVIYVSNKRKACEEVGITSHSYDLPAETTQEKLIELINELNQSDKIDGILIQLPLPKHINERTIIEHIKPEKDVDGFHPYNLGRLAQRNPFLRPCTPLGIMNLLHHYELNVKRKHAVVIGASNIVGRPMSLELLLAGATVTICHKFTQQLQKFVEIADFLIVATGKMDVIATDWLREHQVVIDVGMHRLPDGSIRGDIDFKKAVEKVAWITPVPGGVGPMTIVTLLENTMMSAARLRE

SEQ ID NO: 24313 - protein, 380 aa, Vibrio angustum S14
MFEPMMEMSDEAVIKVIGVGGGGGNAVDHMVRESIEGVQFISVNTDAQALRKTSVSTVIQIGGDITKGLGAGANPQVGRDSALEDREAIKKELEGSDMIFIAAGMGGGTGTGAAPIIAEVAKELGILTVAVVTKPFSFEGKKRMAFAEQGIDELSKHVDSLITIPNEKLLKVLGRGITLLDAFAKANDVLKNAVQGIAELITRPGMINVDFADVRTVMSEMGHAMMGSGVASGDDRAEEAAEMAISSPLLEDIDLAGARGVLVNITAGMDMRLDEFETVGNTVKAFASDNATVVIGTSLDPDMTDELRVTVVATGIGKEVKADITLVTSSKPVQATVAQEKTVVAEEKTVTNNDGQATAAKPQADHDYLDIPAFLRKQAD

SEQ ID NO: 24314 - protein, 230 aa, Arabidopsis thaliana
MNDGDVSRQIQQMVRFIRQEAEEKANEISVPAEEEFNIEKLQLVEAEKKKIRQDYEKKEKQADVRKKIDYSMQLNASRIKVLQAQDDIVNAMKDQAAKDLLNVSRDEYAYKQLLKDLIVQCLLRLKEPSVLLRCREEDLGLVEAVLDDAKEEYAGKAKVHAPEVAVDTKIFLPPPPKSNDPHGLHCSGGVVLASRDGKIVCENTLDARLDVAFRMKLPVIRKSLFGQVTA

SEQ ID NO: 24315 - protein, 257 aa, Sinorhizobium meliloti
MSYETLLVETQGRVGLITLNRPQALNALNAVLMRELDAALKAFDADRAVGAIVLAGSEKAFAAGADIKEMQGLDFVDGYLADFLGGWEHVANARKPMIAAVSGFALGGGCELAMMCDFIIASETAKFGLPEITLGVIPGMGGSQRLTRAVGKAKAMDLILTGRMMDAAEAERSGLVSRVVAPDRLLEEALGAAEKTASFSLPAAMMAKEAVNRSLELTLTEGLRFERRLFQSLFATEDQKEGMAAFVAKRKAEFKHR

SEQ ID NO: 24316 - protein, 356 aa, Desulfitobacterium hafniense DCB-2
MYDVLIIGAGPAGSSLARLIGDKYKVLLIDKRDLANENPHNLAGKCCGGLLAPDAQKMIAKLGLGIPKDILVNPQLFAVRTIDLTNNLERLYQRFYLNMDREKFDRWLVSILPKKVDKKFNAVFKDFVEIPGGYEVKYIHNGQEISAKTRVIIGADGAFSKLRRFLNQDINGPEKYIAIQEWYECPHHVPYFTAIFDEEISDFYSWIIPKENYLLLGSALKPKEKAREKYELLKTKLTQRGFNFDNKIRTEGAYLYRPKKVSQFYAGRDSIALVGEAAGGISPSSAEGISYALKSSAYLAQSLEEGIDGFLDRYKLKVKGIKLNLLLKNLKSPAMYNPLLRQLAMKSGLQSIDRTE

SEQ ID NO: 24317 - protein, 351 aa, Candida glabrata CBS 138
MTAANNNTTVFVSGASGFIAQHIIRQLLDQNYKVIGSVRSTEKGDNLKNAIFKSANFNYEIVKDIADLNAFDPVFEKHGKDIKVVLHTASPLNFTTTEYEKDLLIPAVNGTKGILESIKKYAAQTVERVVVTSSFASHTSTVDMCNTKGKITEDSWNQDSWENCQTDAVRAYFGSKKFAEEAAWEFLNKNKDAVKFKLATVDPVYVFGPQNHIEPGKKVLNVSSEVINQLVHLKKDDPLPQVACGYIDVRDIAKAHILAFQKDELIGQRLLLHSGLFTVQTLLDAINEQFPELRGKIPAGEPGSNKPEDLLTPIDNTKTKKLLGFEFRDLKTIIQDTVSQILEAENASAKL

SEQ ID NO: 24318 - protein, 421 aa, Amycolatopsis mediterranei
MALVVQKYGGSSLESADRIKRVAERIVATKKAGNDVVVVCSAMGDTTDELLDLAQQVNPAPPEREMDMLLTAGERISNSLVAMAIAAQGAEAWSFTGSQAGVVTTSVHGNARIIDVTPSRVTEALDQGYIALVAGFQGVAQDTKDITTLGRGGSDTTAVALAAALNADVCEIYSDVDGVYTADPRVVPDAKKLDTVTYEEMLELAASGSKILHLRSVEYARRYGVPIRVRSSYSDKPGTTVTGSIEEIPVEQALITGVAHDRSEAKITVTGVPDHTGAAARIFRVIADAEIDIDMVLQNVSSTVSGRTDITFTLSKANGAKAVKELEKVQAEIGFESVLYDDHVGKVSVVGAGMRSHPGVTATFCEALAEAGVNIEIINTSEIRISVLIRDAQLDDAVRAIHEAFELGGDEEAVVYAGSGR

SEQ ID NO: 24319 - protein, 170 aa, Elaeis oleifera
ILVKRDELTLEGIKQFYVNIEREEWKLETLCDLYETLAITQSVIFVNTRRKVDWLTDKLRSRDHTVSATHGDMDQNARDIIMREFRSGSSRVLITTDLLARGIDVQQVSLVINYDLPTQPENYLHRIGRSGRFGRKGVAINFVTRDDERMLFDIQRFYNVVIEELPSNVA

SEQ ID NO: 24320 - protein, 242 aa, Chlamydia muridarum Nigg
MLSAYYNDPFLSDFCLGKIPLRLASRKSPLAVLQAHECLRRLQTFFPRLWGQVITETTQGDLDQHTPLHSVENTGFFTDDIDFLVQSGKCDLAIHSAKDLPEKPKARVIAITASIDPRDILVFQEKYLLQPFPSRLRIGCSSDRRRALISSLYPSAVITDIRGTIQTRLALLDQQKFDAIVMANAAVSRLGLRLPCTVVLPPPYHPFQGRLAITSCHHIASWEKLFLTCKITENINLLHFFS

SEQ ID NO: 24321 - protein, 583 aa, Silicibacter sp. TM1040
MTREMTGAKMVVQALKEQGVDTVFGYPGGAVLPIYDEIFQQNDIRHILVRHEQGAVHAAEGYARSTGKPGVVLVTSGPGATNAVTGLTDALLDSIPLVVLTGQVPTFMIGSDAFQEADTVGITRPCTKHNWLVKDTDKLASTIHEGFHVATSGRPGPVLIDIPKDVQFATGTYEPKKPSASHYQPVVKGDMEEITELVAAMETAKRPVFYTGGGVINSGPAASQLLRELVEATGFPITSTLMGLGAYPASGKQWLGMLGMHGLYEANMAMHDCDLMINIGARFDDRITGRIDAFSPKSIKAHIDIDPSSINKVIKADIPIVGDVGHVLEDILKVWKSRGRKTNAEALAKWQGQIDEWRAVKCLTYEMSETTIKPQYALERLEALTKGRDRYITTEVGQHQMWAAQFLGFEDPNRWMTSGGLGTMGYGTPASIGAQIAHPDALVINVAGEASWLMNMQEMGTATQYRLPVKQFILNNERLGMVRQWQELLHGERYSHSWSEALPDFVKLAEAFGAKGIICSDPKDLDDAIMEMIEYDGPVIFDCLVEKHENCFPMIPSGKAHNEMLLGAAETQGVIQSGGAVLV

SEQ ID NO: 24322 - protein, 264 aa, Triticum aestivum
  misc_feature (193)..(193): Xaa can be any naturally occurring amino acid
  misc_feature (243)..(243): Xaa can be any naturally occurring amino acid
  misc_feature (255)..(255): Xaa can be any naturally occurring amino acid
LLFRLRPILGDLVEQVCTKKQAGTGPEFPGYRRPTRPVWVGQDSLLSTPAVSAIIRERISADGAKATGAFILTASHNPGGPTEDFGIKYNMGNGGPAPESVTDKIFSNTKTVTEYLIAEDLPNVDISVIGVTSFTGPEGPFDVDVFDSATDYIKLMKTIFDFESIKKLLASPKFSFCFDGLHGVAGAYAKRMXVDELGASESSLLNCVPKEDFGGGHPDPNLTYAKELVDRMGLGKTSNVEPXEFGAAADGDLTXHMVLGKRFS

SEQ ID NO: 24323 - protein, 1274 aa, Arabidopsis thaliana
MENKTVVPGCSTRLSLRQPRTIITPPASLRVFSSLGSNQDPTGSVLIETTATSSSSLETSAADIVPKSTVSGGVQDVYGEDAATEDMPITPWSLSVASGYTLLRDPHHNKGLAFSHRERDAHYLRGLLPPTVISQDLQVKKIMHTLRQYQVPLQKYMAMMDLQETNERLFYKLLIDHVEELLPVIYTPTVGEACQKYGSIFLRPQGLFISLKEKGKIHEVLRNWPEKNIQGMGIPVGKLSLYTALGGVRPSACLPVTIDVGTNNEKLLNDEFYIGLRQRRATGEEYSELMHEFMTAVKQNYGEKVVIQFEDFANHNAFDLLAKYGTTHLVFNDDIQGTASVVLAGLIAALRFVGGSLSDHRFLFLGAGEAGTGIAELIALEISKKSHIPLEEARKNIWLVDSKGLIVSSRKESIQHFKKPWAHDHEPIRELVDAVKAIKPTVLIGTSGVGQTFTQDVVETMAKLNEKPIILSLSNPTSQSECTAEEAYTWSQGRAIFASGSPFAPVEYEGKTFVPGQANNAYIFPGFGLGLIMSGTIRVHDDMLLAASEALAEELMEEHYEKGMIYPPFRNIRKISARIAAKVAAKAYELGLATRLPQPKELEQCAESSMWKLTKNNIIYHSPMVREKDICWEYAEKLDGNKVKCKFCSRVLNGGISRLKHHLSRLPSKGVNPCAKVRDDVTDRVRSILSAKDDPPITNKYKPPPPLSPPFDAPASKLVFPSSPPNAQDIAERSISLFFFENKIDFAVARSPSYHHMLDAVAKCGPGFVAPSPKTEWLDRVKSDISLQLKDTEKEWVTTGCTIIAEAWTDNKSRALINFSVSSPSRIFFHKSVDASSYFKNSKCLADLFDSVIQDIGQEHIVQIIMDNSFCYTGISNHLLQNYATIFVSPCASQCLNIILEEFSKVDWVNQCISQAQVISKFVYNNSPVLDLLRKLTGGQDIIRSGVTRSVSNFLSLQSMMKQKARLKHMFNCPEYTTNTNKPQSISCVNILEDNDFWRAVEESVAISEPILKVLREVSTGKPAVGSIYELMSKAKESIRTYYIMDENKHKVFSDIVDTNWCEHLHSPLHAAAAFLNPSIQYNPEIKFLTSLKEDFFKVLEKLLPTSDLRRDITNQIFTFTRAKGMFGCNLAMEARDSVSPGLWWEQFGDSAPVLQRVAIRILSQVCSGYNLERQWSTFQQMHWERRNKIDREILNKLAYVNQNLKLGRMITLETDPIALEDIDMMSEWVEEAENPSPAQWLDRFGTALDGGDLNTRQFGGAIFSANDHNIFGL

SEQ ID NO: 24324 - protein, 585 aa, Arabidopsis thaliana
MVSFKVSLVSTSPIDGQKPGTSGLRKKVKVFKQPNYLENFVQATFNALTTEKVKGATLVVSGDGRYYSEQAIQIIVKMAAANGVRRVWVGQNSLLSTPAVSAIIRERVGADGSKATGAFILTASHNPGGPTEDFGIKYNMENGGPAPESITDKIYENTKTIKEYPIAEDLPRVDISTIGITSFEGPEGKFDVEVFDSADDYVKLMKSIFDFESIKKLLSYPKFTFCYDALHGVAGAYAHRIFVEELGAPESSLLNCVPKEDFGGGHPDPNLTYAKELVARMGLSKTDDAGGEPPEFGAAADGDADRNMILGKRFFVTPSDSVAIIAANAVGAIPYFSSGLKGVARSMPTSAALDVVAKNLGLKFFEVPTGWKFFGNLMDAGMCSVCGEESFGTGSDHIREKDGIWAVLAWLSILAHKNKETLDGNAKLVTVEDIVRQHWATYGRHYYTRYDYENVDATAAKELMGLLVKLQSSLPEVNKIIKGIHPEVANVASADEFEYKDPVDGSVSKHQGIRYLFEDGSRLVFRLSGTGSEGATIRLYIEQYEKDASKIGRDSQDALGPLVDVALKLSKMQEFTGRSSPTVIT

SEQ ID NO: 24325 - protein, 146 aa, Legionella pneumophila subsp. pneumophila str. Philadelphia 1
MKYLHTMVRVSNLEQSLDFYCNKLGLIEVKRTENAKGRFTLVFLAAPADIEQVQTSYGPMLELTYNWDPEDYTEGRNFGHLAYHVDDIYKICQHLQECGVVINRPPRDGHMAFIRSPDNISIELLQKGEPLPKQEPWLSAPNIGHW

SEQ ID NO: 24326 - protein, 231 aa, Methanosarcina acetivorans C2A
MLCREAIPMKSTIPEKNAIIQRDGETYVIAPRTPGGIVDPATLRKIADVAEKYGAATLKMTSEQKMAIVGLKEEDIDAAWSDLGMDAGIVTGPFVKGVKFCPGTTFCRKGQQDAVSLGMKLEARYRGMKLPYMMKMAVSGCPSSCSEPVIKDVGVMGTAKGYILMVGGAAGLKPRLADVVAKGLSEEEILAAVDRIVEFFKDYGENRKRLGTIIDEIGLEEFKKEVGLWEK

SEQ ID NO: 24327 - protein, 567 aa, Agrobacterium tumefaciens str. C58
MFPGKKAPVSTPRFIASLFRKAIEPMIKTIKTTPYQDQKPGTSGLRKKVPVFAQENYAENFIQSIFDALEGFEGQTLVIGGDGRYYNREVIQKAIKMAAAAGFGKVLVGQGGILSTPAASNVIRKYKAFGGIVLSASHNPGGPTEDFGIKYNIGNGGPAPEKITDAIYARSKVIDSYKISDAADIDLDKIGSFKVDELTVDVIDPVADYAALMEELFDFGAIRSLIAGGFKVVVDSMSAVTGPYAVEILEKRLGAPKGSVRNATPLPDFGGHHPDPNLVHAKELYDDVMSPEGPDFGAASDGDGDRNMVVGKGMFVTPSDSLAIIAANAKLAPGYAAGISGIARSMPTSAAADRVAEKLGLGMYETPTGWKFFGNLMDAGKVTICGEESFGTGSNHVREKDGLWAVLYWLNIVAARKESVKDIVTKHWAEYGRNYYSRHDYEEVDSDAANTLVAILREKLATLPGTSYGNLKVAAADDFAYHDPVDQSVSKNQGIRILFEGGSRIVLRLSGTGTAGATLRLYVERYEPDAARHGIETQSALADLISVADTIAGIKAHTGRSEPTVIT

SEQ ID NO: 24328 - protein, 374 aa, Methanosarcina acetivorans C2A
MFKFADELGPFKIIHVYEPSVGLKAVLVVDNVARGPAIGGVRIAPDVSTEECFRLARAMTLKNAAADLSYGGGKVVIYGDPKMPLEKKSQILRALASALRYTEEYIFAPDMGTDEVCMACIKDEIGRVVGLPCEVGGIPLDEVGATGWGLFHATEVALQYCDFELKGARVAVQGFGAVGKHAARFLTRKGAVLVGAADSQGTIHDLEGLDVDTLIRLKREGKSVLDYPGGEKLGCDEILSVPCDIWIPAARPDVINEGNVHLLKAKLVVEGANIPVTEGAEKILYEKGILYVPDFIANAGGVICAASEYQGATRCTAFGSIEEKVRGNTEQVLEAAKTKGILPREAAVELAVKRIKRAMRYRRWSIFSSAPGFV

SEQ ID NO: 24329 - protein, 484 aa, Agrobacterium tumefaciens str. C58
MHLNDPTLFCEKVPVAGRWIGCDDRETATIRNPATGKIVGQVPELGATETQAAITAAVIAQKAWARRTAGERAAILKAWHRLVMENRDDLGMILTLEQGKPLAEAKGEIAYGASFIEWFAEEARRINGETVPGHQADKRILVLRQPVGVVAAITPWNFPNAMITRKVGPALAAGCAVVLKPAPQTPFSAIALAILAERAGLPLELFSIVTGPAAEIGGVLTASPDIRLLTFTGSTRTGEHLYRQCAPTIKKLGLELGGNAPFIVFNDADLDAAVEGALIAKFRNNGQTCVCANRLYVQSGVYDAFAEKFARAVSGLKVGNGLEEGSILGPLIDGNAVAKVEAHIADALSKGAQIAAGGSRYALGGNFFEPTILRNVTADMQVAREETFGPLAPLFRFEDEEDVIAQANNTDFGLASYFYARDLSRVFRVAEALEYGMVGVNTGAISTAEAPFGGVKMSGLGREGSRHGIEEYTELKYVCIGNIL

SEQ ID NO: 24330 - protein, 112 aa, Salmonella typhimurium LT2
MTMNITSKQMEITPAIRQHVADRLAKLEKWQTHLINPHIILSKEPQGFIADATINTPNGHLVASAKHEDMYTAINELINKLERQLNKVQHKGEARRATASVKDASFVEAEEE

SEQ ID NO: 24331 - protein, 322 aa, Bacillus licheniformis ATCC 14580
MKKMKRIGVLTSGGDSPGMNAAVRAVVRKAIYHDVEVYGIYNGYSGLISGKIEKLEIGSVGDIIHRGGTKLYTARCPEFKTVEGREKGIANLKKYGIEGLVVIGGDGSYMGAKKLTEHGFPCVGVPGTIDNDIPGTDLTIGFDTALNTVIDAIDKIRDTATSHERTYVIEVMGRHAGDIALWSGLAGGAESILIPEADYDMEEIIARLKRGHERGKKHSIIIVAEGVGSGVEFGKRIEEATNLETRVSVLGHIQRGGSPTAADRVLASRLGAFAVELLLEGKGGRCVGIQNNQLVHHDIIEILEQKHTIDQSMYRLSQELSI

SEQ ID NO: 24332 - protein, 545 aa, Shewanella oneidensis MR-1
MTILTQSTTWQALSAHSQDIPHMRELFAADPARFTKMSLSSCGLFLDYSKNRATPETLNLLFALAQEAKLDAKIKAMFAGDIINTTEKRAVLHTALRNTAEQCIIAEGQDIVPEVQQTLNKMQQFVTSVTSGQWKGYTGKAITDIVSIGIGGSFLGPKIVSQALRPYWITGLNCHFVANVDGTSISEKLKLLDPETTLFIMSSKSFGTQETLTNTLTAKAWFLAKGGSQSDVAKHFAAVTSNVVKATGFGIDANNIFPMWDWVGGRYSLWSAIGLPIALLIGMDNFRALLKGAHQMDTHFANAPLTENMPVIMGLLSLWYGNFFNAQSHVVLTYDHYLRGLPAYFQQLDMESNGKSVTLNGTHVDYSTGPVIWGGEGTNGQHAYHQLLHQGTALIPADFIMPLQSHNPIGEHHDQLASNCFGQTQALMQGRTLDEALAELSKSALSNEEKLLIAKHKVMSGNKPSNTLLMDKLTPETLGALIALYEHRTFVQGAIWDINSFDQWGVELGKTLGNDVLTRIGADQEATVLDASSNGLINLYRRGKI

SEQ ID NO: 24333 - protein, 461 aa, Arabidopsis thaliana
MASSSSQRRCVFVGNIPYDATEEQLREICGEVGPVVSFRLVTDRETGKPKGYGFCEYKDEETALSARRNLQSYEINGRQLRVDFAENDKGTDKTRDQSQGGPGLPSTTTVTESQKQIGGPVDSNMHQPVGLHLATTAASVIAGALGGPQVGSQFTQSNLQVPASDPLALHLAKMSRSQLTEIISSIKLMATQNKEHARQLLVSRPQLLKAVFLAQVMLGIVSPQVLQSPNIVQAPSHMTGSSIQDAQLSGQNLLPPLAQRSQQLSRAPHSQYPVQQSSKQPFSQIPQLVAQPGPSSVNPPPRSQVKVENAPFQRQQVVPASTNIGYSSQNSVPNNAIQPSQVPHQALPNSVMQQGGQTVSLNFGKRINEGPPHQSMNRPSKMMKVEDRRTTSLPGGHVSNSMLPNQAQAPQTHISPDVQSTLLQQVMNLTPEQLRLLTPEQQQEVLKLQQALKQDHMMQPS

SEQ ID NO: 24334 - protein, 501 aa, Methanothermobacter thermautotrophicus
MGSSHHHHHHSSGLVPRGSHMQKPIKKDPNRYHGEKMTEFSEWFHNILEEAEIIDQRYPVKGMHVWMPHGFMIRKNTLKILRRILDRDHEEVLFPLLVPEDELAKEAIHVKGFEDEVYWVTHGGLSKLQRKLALRPTSETVMYPMFALWVRSHTDLPMRFYQVVNTFRYETKHTRPLIRVREITTFKEAHTIHATASEAEEQVERAVEIYKEFFNSLGIPYLITRRPPWDKFPGSEYTVAFDTLMPDGKTLQIGTVHNLGQTFARTFEIKFETPEGDHEYVHQTCYGLSDRVIASVIAIHGDESGLCLPPDVAAHQVVIVPIIFKKAAEEVMEACRELRSRLEAAGFRVHLDDRDIRAGRKYYEWEMRGVPLRVEIGPRDLEKGAAVISRRDTGEKVTADLQGIEETLRELMKDILENLRTRAWERMESEIREAETLEEASRIVDEKRGIISFMWCGEEECGMDVEEKVRVDILGIQEEGSGTCINCGREAPYRAYLARTY

SEQ ID NO: 24335 - protein, 430 aa, Frankia sp. CcI3
MAAVREFPLPDLGEGLTSAEVVRWLVGVGDVITVDQPVAEVETAKAVVEVPCPYAGVVTSLAGLAGTSVPVGTPLITVAVSEPAAGRTGSGNILVGYGTSTEPPRTRRRRRVGAPGAPPVPALTPTPGPATPLGPSAQTVVKVVSPLVRRFARENSVDLRKLVGTGPDGLILRKDVESAIAPRSAPSRPAETDSTVVPLDPLARRAAETFARSRREVPDATCWVDTDATALLAAKDTLNDTRNAGGAEPRIGLLAILARICVAALVRFPALNSAVVTDADGRATGVRHHAAVHLGFAAQTPRGLVVPVVHHAQGLTTARLAAEIARLTAAARAGTLTPAELTGGTFTLNNYGVFGVDGSTPIIHHPEAAMIGIGRIVPRPWAVDGELAVRRIVQLSFTFDHRVCDGATAGSFLRFVADAVEDPTVLLRHL

SEQ ID NO: 24336 - protein, 233 aa, Candida glabrata CBS 138
MSMITALTPNQVNDELNKMQAFIRKEAEEKAKEIQLKADQEYEIKKTGIVRAETSAIDSNFSARRKKITLQQQITKSTISNKMRLKALNCREESLNDIFDEAKSRLSELVSTGKYRDILVALVVEGMIKLLEPAVVVRLTEKDYKKFGKDSKLIDDIVKSYKDTVKGRDIEVSIAEDNFLQENAIGGCIVSDSEGRIEVNNSLTERLHILSQEALPAIRLEIFGPSKTRKFFD

SEQ ID NO: 24337 - protein, 137 aa, Oryza sativa (japonica cultivar-group)
MAMAALREASRRLVSRRESPAAYARPFLLTHSRGITYRLFIGGLSQFATEDSLAEAFSQYGQVLEATIVTDKMTNRPKGFGFVKFASEEAANKAKEEMNGKVLNGRVIYVDIAKAKMNRTTDSSPRATGPPKPPDRC

SEQ ID NO: 24338 - protein, 193 aa, Triticum aestivum
VTLQKSLYKKAGCHRSGIPGISSTHASALQAGFDSSYSDYGMLDDLSAFPCAQDKSLPTADEQFNDNYPFNEQKNVDVYGEQAYQGGAMELLSTDQICNEDGNLDMIGERYSSENALQQLEDRKFSVPSGSQLSSSQNLLKQKHHSDKTSPSNITSDCYSHRNCQFSPSGSFAQRNLMVQKQVANLQTRTAHK

SEQ ID NO: 24339 - protein, 329 aa, Frankia sp. CcI3
MSAATMVRALNAALRDSLREDARVHILGEDVGTLGGVFRVTDGLAAEFGAQRCLDTPLAEAGILGTAVGMAMYGLRPVVELQFDAFAYPAFEQLASHVAKMRNRTAGKTTLPITIRIPYGGGVGGVEHHSDSSEAYYAHTPGLHVVTPATVADGYGLLRSAIASDDPVVFLEPKRLYWSTDERSTDDFSAAEVPPIGRAVVRRTGTSATLLTYGPSLPVCLQAAAAARSEGWDLAVVDLRSLVPFDDETVCEAVRATGRAVVVHEAAGFGGVGAEIAARVSERCFHHLAAPVLRVTGFDIPYPPPMLEHHYLPSVDRILDAVARLQWEQ

SEQ ID NO: 24340 - protein, 638 aa, Vibrio angustum S14
MAIEINVPDIGADEVEVTEILVSVGDKVEEEQSLITVEGDKASMEVPASQAGIVKEIKVAEGDTVSTGSLIMIFEAEGAADAAPAAEVAPVAPAPAAAAELKEVHVPDIGGDEVECTEIMVSVGDTVEEEQSLITVEGDKASMEVPAPFAGTVKEIKIVEGDKVSTGSLIMVFEVAGSAPAAAPVAQAAAPAPAAPAASAAKEVNVPDIGGDEVEVTEIMVSVGDTVEEEQSLITVEGDKASMEVPAPFAGTVKEIKIAEGDKVSTGSLIMVFEVAGAAPAAAPVAQAAAPAPAAAPAAAPAPAAAPAAAPAKAEAPAATGDFVENNEYAHASPVVRRLAREFGVNLAKVKGTGRKNRVLKEDVQNFVKDALKRLESGAAASASGKGDGAALGLLPWPKVDFSKFGETEVKPLSRIKKISGANLHRNWVMIPHVTQWDNADITALEAFRKEQNAIEAKKDSGMKITPLVFIMKAAAKALEAFPSFNSSLSDDGESLILKKYVNIGIAVDTPNGLVVPVFKDVNKKGIYELSEELMAISKKARAGKLTASDMQGGCFTISSLGGLGGTAFTPIVNAPEVGILGVSKSEMKPVWNGKEFEPRLQLPLSLSYDHRVIDGAEGARFITYLNGCLSDIRRLVL

SEQ ID NO: 24341 - protein, 149 aa, Daucus carota
MASYGEGGYGGQKHHGSDEYGNPVRQTDEYGNPVQHTTGGTGMHGTGATTGAHGVGLSTGSDGQPRLNRSGSSSSSSSEDDGMGGRRKKVGMKQKIKGMLPGGHKEDQQTQTTTPVMGGSYGATGTGEQPEEKKGIMDKIKDKLPGGHH

SEQ ID NO: 24342 - protein, 233 aa, Oryza sativa
MPKSKRNRPVTLSKTKKKPGLERKGKVVTDIKDAVEHYANAYVFTYDNMRNQKLKDLREQLKSSSRIFLAGKKVMQIALGRSSADEAKTGLHKLSKFLQGDTGLFFTNLPRDDVERLFREFEEHDFARTGSIVTETVELKEGPLEQFTHEMEPFLRKQGLPVRLNKGAVELVADHIVCEEGKPISPEAAQTLRLLGMQMATFRLYLVCRWSSDDFEVYKEGLAQLRAEADDSS

SEQ ID NO: 24343 - protein, 426 aa, Methanosarcina mazei Go1
MEEKSDLKRDLSLVEITLTGIGNILGAGIYVLMGKAAGLAGNFVWFSFLFAGVTAALSAFSYMELSSMYPRAGAEYEFVKRAFGERTGLFAGLLVVYYVTITSSAVALGFGRYFSSLFGASSLVGVAGLFLFLSLVMVYGVKESARLAVFISLIELTGLLVIVYAGFPYIGTVNYFEAPDLAGLFEASALIFFAFLGFEDIVRLSQETKNAEKTTPRALIIAISVTVFLYVCVAIASVSVLDFRVLGLSEVPLADVAAVAFGNDAFVLLSWIALFSTMNTVLVVMLGGSRIVYGMADAGSFPRALARVHPRFRTPWAAIFGIAFISGFFVLLGDITTVANIANFMIFIVFFMVNVSLIKLRYAEPERHRPFRVPVSIGRLPLFPSLGALSAVFLFSQISLEIMAYGFFLIVIGFIIVLIRTRKIPP

SEQ ID NO: 24344 - protein, 487 aa, Hordeum vulgare subsp. vulgare
MNQSGMARSDEGSLVPREVPGSYGLPFVSAIRDRLDFYYFQGQDKYFESRVEKYGSTVVRINVPPGPFMARDPRVVAVLDAKSFPVLFDVTKVEKKNLFTGTYMPSTSLTGGFPVCSYLDPSEPTHTKVKQLLFSLLASRKDAFIPAFRSHFSSLLATVESQLLLSGKSNFNTLNDATSFEFIGDGYFGVLPSASDLGTTGPAKAAKWLIFQLHPLVTLGLPMILEEPLLHTVHLPPFLVSGDYKALYKYFFAAATKALDTAEGLGLKRDEACHNLLFATVFNSYGGLKVLLPGILARIADSGEKFHKKLVTEIRAAVAEAGGKVTIEALEKMELTKSAVWEALRLDPAVKFQYGRAKADMNIESHDAVFAVKKGEMLFGYQPCATKDPRVFGPTAREFVGDRFVGKEGSKLLKYVYWSNGRETESPSVHNKQCPGKNLVVLVGRLLVVELFLRYDTFTAKVGLDLLGTKVEFTGVTKATSGVADAV

SEQ ID NO: 24345 - protein, 490 aa, Gibberella zeae PH-1
MASPKLSDPSLIKNACYVNGQWVAAKSGKDFSVENPASLEKLGSCPEFDANDTEAAIAAADAAYKTYRKTPARQRARYLRRWYDLMMENADDIARLITLENGKVWSDAKTEAVYAANFFEWFSEEAPRIYGETIEASNPSCRLSTIKQPVGVCGLIAPWNFPAAMITRKAGPALAAGCTVVIKAPAEAPLTALALAELAHRAGIPAGVVNIITALDNTAEVGKVLTTHPKIKKVSFTGSTGVGRLLMNQSSSTVKKLSFELGGNAPFIVFEDADLEKAVKGIITSKFRNSGQTCVCANRIFVHRSIYDKFVQMVLDVVKTFVIGDGFGEKTTHGPLIHGRAVAKTAEHVEDAISKGAKLIHGGERLADLGPNFFGLTMLTDMTPDMKIFSEETFGPVAAFFAFDTEEEVIELANDSEVGLGGYFFSENVNRCYRVAEALEVGMIGVNCGVLSDPAAPFGGIKQSGFGREGSKYGIDEFTVTKMVMTNIDP

SEQ ID NO: 24346 - protein, 201 aa, Aspergillus nidulans FGSC A4
MSSRKKVMLKVIILGDSGVGKTSLMNQYVNKKFSGSYKATIGADFLTKEVLVDDRLIWDTAGQERFQSLGVAFYRGADCCVLVYDVNNSKSFEALDSWRDEFLIQASPRDPESFPFVVIGNKIDMEESKRMISSKRAMTFCQSKGNIPYFETSAKEAVNVEQAFEVIARSALAQEEAEEYGGDYTDPINIHDTTERDGCAC

SEQ ID NO: 24347 - protein, 546 aa, Photorhabdus luminescens subsp. laumondii TTO1
MVNHPRAGQIARQSDLINVAQLTSQYYTLHPQPENSEHKVKFGTSGHRGSSQRHSFNEAHILAITQAVAEVRKQRGINGPCYVGKDTHALSEAAFISVLEVLTANSVNVIVQENNGFTPTPAISHAILCYNRLGKALADGIVITPSHNPPEDGGIKYNPPDGGPADTDLTAIIERRANELLTAGLKGIKRLPFVQVLNSEYLHQQDLVEPYVSALGDVVDMAAIQRAGLKIGIDPLGGSGIAFWQRIGERYNLDLTLVNDQVDQTFRFMHLDHDGVIRMDCSSPWAMAGLLAMRDKFDLAFANDPDYDRHGIVTPAGLMNPNHYLATAINYLFRHRPQWSESVAIGKTLVSSAMIDRVVADLGRKLVEVPVGFKWFVDGLHKGELGFGGEESAGASFLRFDGTPWSTDKDGIILCLLAAEMTAVTGENPQQHYNKLAARFGTPSYSRIQAPATYQQKALLAKLSPEMVKADKLAGDPITARLTKASGNGASIGGLKVITENGWFAARPSGTEEAYKIYCESLLGPEHRQKIEQEALDIVNQVFAAG

SEQ ID NO: 24348 - protein, 410 aa, Saccharophagus degradans 2-40
MSRKRVVVTGIGMVSALGNSVDETWSRILNGESGIREITAFDASAFATRISGSVQNLDITPYLQEKEARKLDPFIQYGMAAGIQAVEDSGLVVTDENAARIGCIVGSGIGGLGSIEDTAVLIEEKGPRRISPFFVPGAIINMIAGNLSIRYGFKGINLAVSTACTSGTHSIGLAAREIFYGTADVMIAGGAEMATTKVGIGGFAAARALSRRNDEPTKASRPWDKDRDGFVLGDGAGILVLEEYEHAKARGAKIYAELTGVGTSADAYHITSPSGDGAELSMRNAIADSGMSLEEINHVNAHGTSTPAGDTAECKALKNVFGSHAPNLAVSSTKSMIGHLLGAAGAVEAIFTVLAIRDQVAPPTINLDNPDEGCDLNFVAHKAQKMEINGAMSNSFGFGGTNGTLVFKKV

SEQ ID NO: 24349 - protein, 181 aa, Zea mays
  misc_feature (101)..(101): Xaa can be any naturally occurring amino acid
MASVRLSSATMTSSLAHATMVAPFIGLKSSAAFPVTCKANTEITSITSNGGRINCMKVWPPVGKKKFETLSYLPGLTDVEIAQEIDYLIRNKWTPCIEFEXEHGFVYREHGNIPGYYDGRYWTMWNLPLFGCTDPPQVLKEVQQCKREYPNAFIRIIGSDNNRQAQCISFIPYKPPSFTDA

SEQ ID NO: 24350 - protein, 158 aa, Magnetospirillum magnetotacticum MS-1
MEQMQAQAEHVGTRFMDDTIVSVDLSKRPFTATGDSGDTYTGDTLIICTGATARWLGLESEKKFSGFGVSACATCDGFFFRGKEVAVMGGGNSAVEEAIYLAGIASKVTLIHRRDTLRAEKIAQDRLYDQSQGPGGLGQRHRRDPRRRQYPPGSTGCA

SEQ ID NO: 24351 - protein, 326 aa, Cyanidium sp. Monte Rotaro
GKTTLTAAISGCSSSSNEEIKSKQFDEIDAAPEEKARGITINTAHVEYETETRPYAHVDCPGHADYVKNMITGAAQMDGAILVVSAADGPMPQTREHILLAKQVGVPSIIVFLNKADMVDDDELLELVELEVRELLSKYDFSGENIPFVSGSALLALEQCLKNPSINKGENKWVDKIFDLMDAIDAHIPTPERAVDKTFLMAVEDVFSITGRGTVATGRVERGQVKVGDTVEVVGLKETRSTTITGLEMFQKTLDEGIAGDNIGVLLRGIQKDDIERGMVLAKPGSITPHTKFEAEVYVLTKEEGGRHAPFFPGYRPQFYVRTTDV

SEQ ID NO: 24352 - protein, 330 aa, Triticum aestivum
AYLGDTIEQVCTKKQAGTGPEFPGYRRPTRPEQRPHKVSFLVDKKNAQGVIKSLSETFEKRGVDAKIIYSGGQDLDILAQGAGKGQALAYLLKKLGSCGKTPNNTLACGDSGNDAELFSIPGVHGVMVSNAQEELLQWHAENAKDNPKIIHATERCAAGIIQAIGHFKLGPNVSPRDVEFPYIKEDPFKPTVAIVKFYVLYEKWRRADVPKADSVIQYFQNTTDANGVIIHPSGVELSIHSSIDELASCFGDKPGKKYRSWVDRLVILQTAPDSWLVRFDLWEAEGNAWACCFTTLALNVKPETPGGFVVTHIHKTWRKEYPGVEQSSKL

SEQ ID NO: 24353 - protein, 239 aa, Coccidioides immitis RS
MKLNIAYPANGSQKLIEIDDERKLRPFMEKRMGTEVPGDSLGDEFKGYLFKITGGNDKQGFPMKQGVLLPNRTRLLLSTGHSCYRPRRTGERKRKSVRGAITGYDLAVMALTVVKQGEGDIPGLTDVVNPKRLGPKRASKIRKFFGLDKKDDVRKFVIRRTVTPTKEGKKEYTKAPKIQRLVTPQRLQRKRQRIALKRRRAESAKEQANEYAKLLAARVHEEKAKREELRKRRASSMRK

SEQ ID NO: 24354 - protein, 695 aa, Aspergillus nidulans FGSC A4
MAIPAHRSLALRPIVMGLGKLLALSFSHISLVSAAPTSQFLAPRHDAHAETHALPANDATLWLYLGVAAALVLTGGAFAGLTIALMGQTSGDSPSERKNAASVLRLLKRGKHWVLVTLLLSNVITNETLPIILDRSLGGVIFGEIVPQSICVRYGLPIGAWMAPCVLGLMYLMAPVAWPVAKLLDRLLGEDHGTIYKKAGLKTLVTLHKTLGEAGEQLNSDEVTIISAVLDLKEKSVGAIMTPMEDVFTMSADTVLDEPTMDLILSQGYSRIPIHSPENPRNFIGMLLVKMLITYDPEDCKPVSHFALATLPETRPETSCLDIVNFFQEGKSHMVLVSEFPGEDRGALGVVTLEDVIEELIGEEIIDESDVFVDVHKAIRRMNPAPYSRVPKGRFVEDPPALSSQGPLVDLGGDSPSTTDQAVTRRRSSVEAPLARFQLRRSQGDKERHSMDALVTRLGSTDEIREHLKHLGPSNLASRPRQTRYQNVKIKRSSISSPAPSGQTDIDSVEHARHPSSGLTTTSDATTLKPSGLNPRDGAHAVLINSTNQKSPEPLVKTGPTLSIPEPVNEEQDSAPRSANSRRTGSAGSDVDPAYSSSYFHRGPARSGSITEHIVDVNGVRKVVLHTTSSNSSSEGEGPSSVPKTKFPIRQGSEIIDLNDTDSGATEQTKKKRRHRRHKKSKDSTNRDEETPLLP

SEQ ID NO: 24355 - protein, 171 aa, Arabidopsis thaliana
MGASASVPERSVHQFTVKDSSGKDLNMSIYQGKVLLIVNVASKCGFTETNYTQLTELYRKYKDQDFEILAFPCNQFLYQEPGTSQEAHEFACERFKAEYPVFQKVRVNGQNAAPIYKFLKASKPTFLGSRIKWNFTKFLVGKDGLVIDRYGTMVTPLSIEVSVLYISKVPM

SEQ ID NO: 24356 - protein, 175 aa, Schizosaccharomyces pombe
MSNTGLPKPWIVKISRSRNRPYFFNTETHESLWEPPAATDMAALKKFIANELQESVTPTEASNSPKIRASHLLVKHRESRRPSSWKEEHITRSKEEARKLAEHYEQLLKSGSVSMHDLAMKESDCSSARRGGELGEFGRDEMQKPFEDAAFALKPGEISGVVETSSGFHIIQRHA

SEQ ID NO: 24357 - protein, 115 aa, Citrus sinensis
MAALKLVSALVLCMLVTGPLSAQAITCGQVSGSLAPCIGFLRSGGPIPMPCCNGVRSLNAAARTTPDRQTACNCLKQAAGSIPNLNLNNAAGLPGACGVSIPYKISTSTDCSKVR

SEQ ID NO: 24358 - protein, 221 aa, Gentiana triflora
MVSSSVSSVTEVKVESYVFPPSVKPPSSTKSFLLGGAGVRGLEINGNFVKFTAIGVYLEESGVAVLSGKWKGKTAEELSDSVEFFTDIITGPFEKFTQVTLILPVTGQQYSPKVAENCAAQWKAAGIYTDADGIAIEKFLQVFQTESFTPGDSILFTHSPESLTISFGKNGAIPEVSNAVIENKKLSEAVIESIIGEKGVSPAAKKSLATRIAEILNHFDA

SEQ ID NO: 24359 - protein, 459 aa, Methanocaldococcus
GSHMLEFSEWYSDILEKAEIYDVRYPIKGCGVYLPYGFKIRRYTFEIIRNLLDESGHDEALFPMLIPEDLLAKEAEHIKGFEDEVYWVTHGGKTQLDVKLALRPTSETPIYYMMKLWVKVHTDLPIKIYQIVNTFRYETKHTRPLIRLREIMTFKEAHTAHSTKEEAENQVKEAISIYKKFFDTLGIPYLISKRPEWDKFPGAEYTMAFDTIFPDGRTMQIATVHNLGQNFSKTFEIIFETPTGDKDYAYQTCYGISDRVIASIIAIHGDEKGLILPPIVAPIQVVIVPLIFKGKEDIVMEKAKEIYEKLKGKFRVHIDDRDIRPGRKFNDWEIKGVPLRIEVGPKDIENKKITLFRRDTMEKFQVDETQLMEVVEKTLNNIMENIKNRAWEKFENFITILEDINPDEIKNILSEKRGVILVPFKEEIYNEELEEKVEATILGETEYKGNKYIAIAKTY

SEQ ID NO: 24360 - protein, 212 aa, Oenococcus oeni PSU-1
MNSSSVVKAVEALKKGKLIIVVNNSDRENEGDLLGLGAKMTPENMNFMVTNARGLVCVPITSALAKRLGLKAMVEKNTETYETAFTISLDGTNEIGGITTGVSAYDRTATINKLSDPNCEARDFVHPGHMFPLIAKDGGVLERNGHTEAAVDLAKLCGVTPVGTIVEVLRPDGHMARRDYLSQMSNEYQLPMLSIDELSEFIRENGLDPIDL

SEQ ID NO: 24361 - protein, 288 aa, Thermus aquaticus
MILVNRETRVLVQGITGREGQFHTKQMLDYGTKIVAGVTPGKGGTEVLGVPVYDTVKEAVAHHEVDASIIFVPAPAAADAALEAAHAGIPLIVLITEGIPTLDMVRAVEEIKALGSRLIGGNCPGIISAEETKIGIMPGHVFKRGRVGIISRSGTLTYEAAAALSQAGLGTTTTVGIGGDPVITGTFKDLLPLFNEDPETEAVVLIGEIGGSDEEEAAAWVKDHMKKPVVGFIGGRSAPKGKRMGHAGAIIMGNVGTPESKLRAFAEAGIPVADTIDEIVELVKKALG

SEQ ID NO: 24362 - protein, 344 aa, Triticum aestivum
  misc_feature (229)..(229): Xaa can be any naturally occurring amino acid
  misc_feature (267)..(267): Xaa can be any naturally occurring amino acid
  misc_feature (296)..(296): Xaa can be any naturally occurring amino acid
  misc_feature (310)..(310): Xaa can be any naturally occurring amino acid
  misc_feature (312)..(312): Xaa can be any naturally occurring amino acid
  misc_feature (314)..(314): Xaa can be any naturally occurring amino acid
MAAAAGGATTSTRRGPGGGGRPMDDENLTFETSAGVEVVGSFDAMGIREDLLRGIYGYGFEKPSAIQQRAVIPIITGRDVIAQAQSGTGKTSMISLSVCQVIETNVHEVQALILSPTRELATQTERVMQAVGNFMSVSVHACVGGKSIGEDIRKLESGVHVVSGTPGRVCDMIKRRTLRTRAIKLLVLDEADEMLSRGFKDQIYDVYRYLPPELQVVLISATLPHDILXEITSKFMTDPVRILVKRDELTLEGIKQFFVAVEKEEWXFDTLCDLYDTLTITQASFSCNTKEKVDWXTERMRTNNSTVSAXHXDXPQERKDAIMNDSRVHRVRNVWPRAPSTPLS

SEQ ID NO: 24363 - protein, 554 aa, Nostoc punctiforme PCC 73102
MAKPAILTVDDDPEVLQAVSRDLRHQYGDRFRIVRADSGITALDAVQQLKLRNEAVALFLVDQRMPQMGGVEFLEQAKVIFPDAKRALLTAYADTDAAIKSINSARLDYYLLKPWNPPEERLYPVLDDLLDDWLAGFRPPFEGIRVIGNRWSPFSHQVKDFLARNQIPYKWLDIELEPDAAKLLEYAQADGRQQLPLVLFPDGSRLIQPSNLEIAAKIGLQTQAERPFYDLAIVGAGPAGLAAAVYGASEGLSTVLIEREAPGGQAGTSSRIENYLGFPVGLSGSDLARRGVTQARRFGVEILTPQVVTGVKLQDPYRVLQLADGSEISCHALLVATGVSYRWLNVPGAEKLTGAGIYYGAAMTEAIACSNEEVYLIGGANSAGQAAMHFSKYASKVIMLVRGESLSLSMSQYLIDQIAATANIQVCTGCSVVEVKGDEHLEEIAIAHSKTGQTEIVPARSLFIFIGAIPKTDWLDGVIRRDTQGFIVTGPDLTQNGKSPPGWPLERSPFLLESSVPGIFAAGDVRSGSIKRVASGVGEGSIAIQFVHRYLSNV

SEQ ID NO: 24364 - protein, 599 aa, Frankia sp. CcI3
MSQVADYVLQRLTGWGVHRIFGYPGDGINGFLGAFDRAGGDPGFLQTRHEEMAAFMACAHAKFTGEVGACVATSGPGAIHLLNGLYDARLDHQPVLAIVGQQRRTSLGAHYQQEIDLISLFKDVTEYVQYCMAPPSARHLVDRAMKTALSSRAPVCLIFPEDVQEEKYTEPPHEHGAVRTSIGWTKPRILPDPDEVRRAAAVLNRGRRVAMLIGQGAAGAREEVTEAADLLGAGVAKALLGKDALPDTLPFVTGPIGLLGSEASHKMVMGADTLLLVGTSFPYSEWLPREGQAAGVQIDIDGRMIGIRYPMDVHLVGDAAETLRQLIPLLIRKEDRSWRRFIEREVATWQRVLADRARLRADPMNPQIVAYELDKRLPDNAILTADSGSATTWWARYLRIRGDMKASLSGTLATMLPGVPYAVAAKLAYPERPVIAFVGDGAFSMLGMNELFTVKRYWERMNTDPRLVFTVFVNEDLNQVSYEQRVMAGDRINVETQKIPYVPAADFARLLGFTGIRCDSPDKIGAAWEQALAADRPVVLEVVVDAKVPPLPPHVRPEQMRKTARAFLQGDPEAVGIAVQGFKGKWQEAREHLPHAARR

SEQ ID NO: 24365 - protein, 112 aa, Vibrio angustum S14
MKIINAIIKPFKLDDVREALADVGVEGMTVSEVKGFGRQKGHTELYRGAEYQVDFLPKVKIEIATQAQNLDAIVEAIGKAAQTGKIGDGKIFVYDLEHAVRIRTGEVDTEAL

SEQ ID NO: 24366 - protein, 409 aa, Vibrio angustum S14
MELSTTVIELRYALDTFFFLISGALVMWMAAGFAMLEAGLVRSKNTTEILTKNICLYAIACTMYLLVGYNIMYVDNSAGGWLPSFGALIGTQAEGADHSLESDFFFQVVFVATAMSVVSGAVAERMKLWSFLIFSVVLTAVIYPVEGYWTWGGGFLSEAGFSDFAGSGIVHMAGAAAALAGVILLGARKGKYGKNGEIYPIPGSNMPLATLGTFILWFGWFGFNGGSQLMVSDFENATAVGQIFLNTNAAAAAGAIAALAVCKTTWGKADLTMVLNGALAGLVAITADPLSPSPVAAVIIGVVAGALVVFSIIALDKVKIDDPVGAISVHGVCGLFGLMVVPFSNADASFMTQLFGAAVIFGWVFAASLAVWGVLKATIGIRVTEEEELEGMDSHDCGVDAYPEFVSVK

SEQ ID NO: 24367 - protein, 565 aa, Glycine max
MPTKTSTPSSQSPKLSHLRPQYIPNHIPDSSYVRILDTTLRDGEQSPGATMTAKEKLDIARQLVKLGVDIIQPGFPSASNSDFMAVKMIAQEVGNAVDDDGYVPVIAGFCRCVEKDISTAWEAVKYAKRPRLCTSIATSPIHMEHKLRKSKDQVIQIARDMVKFARSLGCNDIQFGAEDATRSDREFLYEILGVVIEAGATTVNIADTVGIVMPLELGKLIVDIKDNTPGIANVIISTHCHNDLGLATANTIEGARTGARQLEVTINGIGERAGNASLEEVVMALASKGDHALNGLYTRINTRHILETSKMVEEYSGMHLQPHKPLVGANAFVHASGIHQDGMLKHKGTYETISPEEIGHKRTTRIGIVLGKLSGSQALRKRLEELGYDLKEDEVDSVFWQFKAMAEKKKVVTDVDLKALVSYKAFHAESIWKLGDLQVTCGTIGLSTATVKLVNIDGSTHVACSIGIGAVDSTYKAINLIVKEPTKLLDYSLNSVTEGIGVNVTARVVICRENNHTSTYAFTEDANYPTFSGIAAEMDVVVSTVKAYLVALNKLLRWKESFRCA

SEQ ID NO: 24368 - protein, 289 aa, Mesembryanthemum crystallinum
MSNTCFTSSLHSPSILIPKSLFFSIPSKPTKIPLSLSLSSPQLSSFSLQKQTLSSTVVTYVAQTSEWDQEGTNAVLEEGSDQEPSWGNTEAQVSDFGSDEGEGFQEPPEDAKLFVGNLPFDVDSEKLAQIFEGAGVVEIAEVIYNRETDRSRGFGFVTMSTVEEAEKAVELYHKFEVNGRFLTVNKAAPRGSRPERAPREYEPSFRVYVGNLPWDVDDARLEQVFSEHGKVLSARVVSDRETGRSRGFAFVTMASESEMNEAIGALDGQTLEGRAIRVNVAEERPRRSF

SEQ ID NO: 24369 - protein, 306 aa, Daucus carota
MADLRDEKGNPIQLTDQHGNPVQLTDEYGNPVHITGVATTGATTGHHDHGVGGASHGGVGSTGLGGVAGAAGLAGATAAAATHGGSHGGTGTHGVGPTGVGAAHGGTGTTTGLGTGTGTTGQTHGMGPTGIGGTHGVGSTGIGGAHGGTGVLGQTHGMGPTGTGAAHGGLGTGQSGLGSSYATHGGLGTGIGTGSAPASAGSHSHAPEKKTALGEQLHRSNSSSSSSEDDGQGGRRKKGFTTKIKEKLGGGKHKKDEHTTVATTKTTTAAHPGGAAVAVEHHEHEKKSMLDKIKDKLPGHHSPTSH

SEQ ID NO: 24370 - protein, 480 aa, Hordeum vulgare subsp. vulgare
MNQSAIGSLVPRQAPGSYGLPFVSAIRDRLDFYYFQGEAKYFESRVEKHGSTVLRINVPPGPFMARDPRVVAVLDAKSFPVLFDVDKVEKKNLFTGTYMPSTSLTGGFRVCAYLDPSEPTHTKVKQLLFSLLASRKDAVIPAFRSHFSSLLATVESQLVLSGKSNFNTLNDFTSFEFIADTYFGVLPSASDLGTTGPAKAAKWLIFQLHPLVTFGLPMILEEPLLHTVLLPPIFVSGDYKALYKYFYAAATKALDMAESLGLNRDEACHNLLFATVFNSYGGLKVMLPGFLGRIAEAGEKFHQRLAAEVRTAVADAGGKVTIEALEKMELTKSAVWEALRLEPPVKFQYGRAKVDMNIESHDAVFAVQKGEMLFGYQPCATKDPRVFGSTAREFVGDRFVGEGSKLLQYVYWSNGRETESPSVDNKQCPGKNLVVLVGRLLVVELFLRYDTFTADVGVDLLGPKVEFTGVTKATSGPGAV

SEQ ID NO: 24371 - protein, 115 aa, Brassica napus
MALALRFFTCLVLTVCIVASVDAAVSCGTVTSSLAPCANYLSKGGDVPPPCCAGVTKLNGMAQTTPDRQQACKCLQSAAKTVSGLDPSLAAGLPGKCGVSIPYPISMSTNCDNVK

SEQ ID NO: 24372 - protein, 297 aa, Methanosarcina mazei Go1
MTDIIPENVNNSKITIICSAPDLASQNIKNHLLNLTEWKNLELPPESRFSAARESIDGKFRLVDIEEIHVFQDGLDRKLEAAGLPASLIIFASKHRSKEEINSLTVHCTGNPSGEARLGGHPKELAVSSPAAMKSILSGMKKLAGEKELKYDVTLEVTHHGPTELSVPSIYAEIGSTEKQWEDPDAGEVAAKSILAVSLEKVPVAVGFGGGHYAMRQTGLLLETKISFGHNFPKYQLEFVDEALVRQAVEKSGAEFAYFDRKSMKSEDRKKISEILEKLGLRVLKESEIRENYGLDD

SEQ ID NO: 24373 - protein, 385 aa, Nicotiana tabacum
KLKVAINGFGRIGRNFLRCWHGRKDSPLDVVVVNDSGGVKNASHLLKYDSMLGTFKADVKIVDNETISVDGKHIKVVSSRDPLKLPWAELGIDIVIEGTGVFVDGPGAGKHIQAGAKKVIITAPAKGADIPTYVVGVNEQDYSHEVADIISNASCTTNCLAPFVKVMDEELGIVKGTMTTTHSYTGDQRLLDASHRDLRRARAAALNIVPTSTGAAKAVSLVLPQLKGKLNGIALRVPTPNVSVVDLVVNVAKKGITAEDVNAAFRKAADGPLKGVLAVCDEPLVSVDFRCSDVSSTIDSSLTMVMGDDMVKVVAWYDNEWGYSQRVVDLAHLVANNWPGSCSTRKWRSHWMSFARQILLMRNAKSMNNRFCYVSSFEMDDFRSQ

SEQ ID NO: 24374 - protein, 423 aa, Candida albicans SC5314
MMNIDQHHQLQQQHQQQMLQQQAQAQAQAQAQAQQQQQQQQQAAAAAAAANAAATTSSSSPRQVSFNVSDHYQILEIVGEGAYGIVCSAIHKPSQQKVAIKKIEPFERSMLCLRTLRELKLLKHFNHENIISILAIQRPINYESFNEIYLIQELMETDLHRVIRTQNLSDDHIQYFIYQTLRALKAMHSANVLHRDLKPSNLLLNSNCDLKICDFGLARSIASQEDNYGFMTEYVATRWYRAPEIMLTFQEYTTAIDVWSVGCILAEMLSGRPLFPGRDYHNQLWLIMEVLGTPNMEDYYNIKSKRAREYIRSLPFCKKIPFSELFANTNNNTSTSTSNTGGRTNINPLALDLLEKLLIFNPAKRITVEDALKHPYLQLYHDPNDEPISDKIPEDFFDFDKMKDQLTIEDLKKLLYEEIMKPL

SEQ ID NO: 24375 - protein, 326 aa, Cyanidium sp. Sybil cave
GKTTLTAAISASLSILNEEIKSKKFDEIDAAPEEKARGITINTAHVEYETHNRHYAHVDCPGHADYVKNMITGAAQMDGAILVVSAADGPMPQTREHILLAKQVGVPSIIVFLNKADMVDDNELLDLVELEVRELLSKYDFSGDEIPFVAGSALLALEACLKNPSISKGENKWVDKIFDLMDAIDDYIPTPERAVDKSFLMAIEDIFSITGRGTVATGRIERGQVKVGDTVEIVGLKATRSTTVTGLEMFQKTLDEGMAGDNIGVLLRGIQKNDIERGMVLAKPGTITPHTRFEAEVYVLTKEEGGRHTPFFPGYRPQFYVRTTDV

SEQ ID NO: 24376 - protein, 359 aa, Lolium multiflorum
MAHGRILVLALAVLATAAVAAASFADSNPIRPVTERAASAVESTVLGALGRTRHALRFARFAVRHGKSYGSAAEVQRRFRIFSESLDEVRSTNRKGLSYKLGINRFSDMTWEEFQATKLGAAQTCSATLAGNHLMRDANALPETKDWRETGIVSPVKDQASCGSCWTFSTTGALEAAYTQATGKNISLSEQQLVDCAGAYNNFGCNGGLPSQAFEYIKYNGGIDTEESYPYKGVNGVCKYRPENAAVQVADSVNITLNAEDELKNAVGLVRPVSVAFEVIDGFKQYKSGVYTSDHCGTTPDDVNHAVLAVGYGVENGVPYWLIKNSWGADWGEDGYFKMEMGKNMCAVATCASYPILAA

SEQ ID NO: 24377 - protein, 286 aa, Galdieria maxima
AVLASIDNSVQLKKFEEIDSAPEERARGITIKSAHVEYQTDKRHYAHVDCPGHADYVKNMITGAAQMDGAILVVSAADGPMPQTREHILLAKQVGVPSIVVFLNKADMVDDAELLELVELEVRELLSKYDFPGDDIPFVTGSALLALEACNKNPKIGQGNDKWVDKIFELMDVVDEYIPTPTRDIDKSFLMAVEDVFSITGRGTVATGRIERGRVKVGESIEIVGLKNTKTTTVTGLEMFQKTLDEGMAGDNVGVLLRGVQKTDIERGMVLAKPGSITPHHKFEAE

SEQ ID NO: 24378 - protein, 332 aa, Magnetococcus sp. MC-1
MTIRIGINGFGRIGRSIFRAQRMDPAFKDIEIVALNDLTPKPSLAHLLKYDSVMGVLNAEVSATEKGVSVDGKEITVFEERDPAKLPWGELGVDYVVESTGLFRKRETAGAHLKGGAKRVIISAPAGGDIPTFVMGVNENDYNPATDDIVSNASCTTNCLAPMAKVIDDKFGIERGLMTTVHAYTNDQALLDQPHSDLRRARAAALSMIPTKTGAAAAIGLVMPNMKGRFDGLAVRVPTPNVSLVDAVMEVRAETTAEEVNAALKAATTRFLGYFDAPLVSIDMQGDPRSSIVDGGCTRVNGKQIKVMSWYDNEWGYSNRVLDLILHMASKA

SEQ ID NO: 24379 - protein, 399 aa, Chlamydia muridarum Nigg
  misc_feature (322)..(322): Xaa can be any naturally occurring amino acid
MRIFEMSKETFQRNKPHINIGTIGHVDHGKTTLTAAITRALSGDGLADFRDYSSIDNTPEEKARGITINASHVEYETPNRHYAHVDCPGHADYVKNMITGAAQMDGAILVVSATDGAMPQTKEHILLARQVGVPYIVVFLNKIDMISEEDAELVDLVEMELSELLEEKGYKGCPIIRGSALKALEGDAAYIEKVRELMQAVDDNIPTPEREIDKPFLMPIEDVFSISGRGTVVTGRIERGIVKVSDKVQLVGLRDTKETIVTGVEMFRKELPEGRAGENVGLLLRGIGKNDVERGMVVCLPNSVKPHTQFKCAVYVLQKEEXGRHKPFFTGYRPQFFFRTTDVTGVVTLPEGVEMVMPGDNVEFEVQLISPVALEEGMRFAIREGGRTIGAGTISKIIA

SEQ ID NO: 24380 - protein, 150 aa, Rubrobacter xylanophilus DSM 9941
MPVPTIAAIEGFALGGGTELALACDLRVASESAVFGFPEVALGLMPGAGGTQRLPRLVGPEVAKDMIFTGRRVTAEEAKEIGLVGRVVPKGQALKTARDLAARIAANAPLGVGYAKSAIEAAGDVDLDTGLRYETDLFALLFSTAERRRA

SEQ ID NO: 24381 - protein, 112 aa, Klebsiella pneumoniae
MKLVTVVIKPFKLEDVRERLSSMGIQGLTVTEVKGFGRQKGHAELYRGAEYSVNFLPKVKIDVAIADDQLDEVVDVISKAAYTGKIGDGKIFVAELQRVIRIRTGESDEAAL

SEQ ID NO: 24382 - protein, 526 aa, Oryza sativa (japonica cultivar-group)
MSDSELSQSTVVFGLHLWELVGIGVGAAFVLLLVLLSLLCLVASRRRRRRRGVAVATPVLHLATAVAPPKHPGKPPKDIQEVPSRAAAAAAAPKAQPAQVIQAPPPQPPPSESIQIETGKEHRITFREQQHQPPQPPPYHQRSGGPSSRGGSGESRGGGGGGGGGGAEPGVPEVSHLGWGHWYTLKELEDATAMFADEKVIGEGGYGIVYHGVLEDGTQVAVKNLLNNRGQAEREFKVEVEAIGRVRHKNLVRLLGYCAEGNQRMLVYEYVNNGNLEQWLHGDVGPVSPLTWDMRMKIILGTAKGLMYLHEGLEPKVVHRDVKSSNILLDKTWNAKLSDFGLAKLLGSERSYVTTRVMGTFGYVAPEYAGTGMLNETSDVYSFGILIMEIISGRVPVDYNRPPGEVNLVEWLKTMVSNRNSEGVLDPKMTEKPTSRALKKALLVALRCVDPEARKRPKIGHVIHMLEVDDFPYRDERRGGKAPGQVKSGEIPPVEAGDSSGNNTPKETPKGQPKDEPFKWRNQAAA

SEQ ID NO: 24383 - protein, 351 aa, Ipomoea hederacea
ERLASSGIERIPKEYIRPEEERRSIGDIFEEEKIAGGPQVPTVDLKGINSEDLEVREKCREELRKAAVDWGVMHLVNHGIPEELTGRVKAAGEGFFGQPIEEKEKYANDQAAGNVQGYGSKLANNASGQLEWEDYFFHCIFPEDKTDLSIWPKTPSDYIDATKEYAKQLRALATKVLAVLSLGLGLEEGRLEKEVGGMEELLLQMKINYYPKCPQPELALGVEAHTDVSALTFILHNMVPGLQLFYGGKWVTAKCVPNSIIMHVGDTVEILSNGKYKSILHRGVVNREKVRVSWAVFCEPPKDKILLQPLPETVSEAEPPRFPPRTFAQHIKHKLFRQSDQEAADTPKPDN

SEQ ID NO: 24384 - protein, 433 aa, Corynebacterium glutamicum ATCC 13032
MCGAMHTELSSLRPAYHVTPPQGRLNDPNGMYVDGDTLHVYYQHDPGFPFAPKRTGWAHTTTPLTGPQRLQWTHLPDALYPDASYDLDGCYSGGAVFTDGTLKLFYTGNLKIDGKRRATQNLVEVEDPTGLMGGIHRRSPKNPLIDGPASGFTPHYRDPMISPDGDGWKMVLGAQRENLTGAAVLYRSTDLENWEFSGEITFDLSDAQPGSAPDLVPGGYMWECPNLFTLRDEETGEDLDVLIFCPQGLDRIHDEVTHYASSDQCGYVVGKLEGTTFRVLRGFSELDFGHEFYAPQVAVNGSDAWLVGWMGLPAQDDHPTVAREGWVHCLTVPRKLHLRNHAIYQELLLPEGESGVIRSVLGSEPVRVDIRGNISLEWDGVRLSVDRGGDRRVAEVKPGELVIADDNTAIEITAGDGQVSFAFRAFKGDTIER

SEQ ID NO: 24385 - protein, 935 aa, Nostoc sp. PCC 7120
MWRKFQAFIQRTRSVLIITPSVALTIIVGQSLGIFNLLEWKLRDEWVRLRSCEANTLLECSHNTMADEIIVITIDEQDIQSVGKWPIPDWSLAELLEKIRAQQPRAIGLDLYRDLPEGKGYEKLAEVFRTTPNLIGVEKITGERVNPPPELKKNDQVGLADLVLDGDRHVRRALLTAVDTKEEGKIKAGLATLVALKYLKAEKISLESVDAKQQKFRLGKQIHLPLQNSSAGYTDADLGGYQILLNWYGSEAAFRTVTMRDVLAGKIPPELMRDRMVFIGSTAASTNDFFSTPFSSSLISAQKPTPGVVIHANIAHQLVRGARTGKANLRGFSGLFMASWIILWSVIGSSGSWLLASARSGRRIPGGKILWTTTSISGAFLGGGYGMFLHGVLIPVTPPLAAFIVSVIATTNAYKQQKLEEANQQLEIANSQLLDYSKTLEIKVQERTHELLEAKQAADAANQAKSEFLANMSHELRTPLNGILGFAQVLEVSPNLREKDLEGVNIIHQCGSHLLLLINDILDLSKIEARKLELVVANVHLPTFLHGVSEICSIRAAQKGIAFKVSMGDRLPTVMEVDEKRLRQVLINLLGNAVKFTDSGGVTFKVELLDTQDQDNQQSSVAKIRFQIEDTGVGMSPEQLEKIFLAFEQVGDCRRQSEGTGLGLAISQRIAELMGSQIQVQSRLGEGSIFWLDVTLPVPISHDWQTYAPMHQKVIGIQGSAPQILIVDDDDNHRSMLNSLLQEIGCQTLEASDGKQGLQMVNEHHPDLILLDLAMPNMDGFELMVQLQENPQTSSIPIIVSSASVFEENRQRSLQAGATAFLPKPLQIDELFNALRSLLQVEWIYAPSASLSLSPQPGPTTPTELVLPSQDVLQQLYHLSMMGDIPAIEGILRELIQHNSQLTPFATELSKLTTNFQTAKIRQFLKSFVITESHP

SEQ ID NO: 24386 - protein, 418 aa, Chlorobium tepidum TLS
MAGLTKENPFDIARRQLDAAAGIIGLDAEVLELLRWPMREMHVTIPVKMDDGAVRAFHGFRVQYNDARGPNKGGIRFHPDETIDTVRALAAWMTWKTAVMDIPLGGAKGGVICNPKTMSPGELERLSRSYIRQVGRLLDLEKDVPAPDVYTTPQIMAWMADEYSFMQGHNDFGVITGKPLALGGSLGRGDATARGGIICIREAAKMLGINLRGKPAAINGFGNAGAFAHKLAVELLGMKVVAVSDSKGSIYNPDGFDHQALMEYKKQHGSVADFPGSTPLTDAGLLELDVTVLIPAALEDEISCRNARNIQAKIVAELANGPTTPEADKILHERGVYLIPDLLCNAGGVTVSYFEMVQNASGWYWEEEVVHRQLEKKMAAAIKAVHQAAVQYSVDNRTAAMIVAIRRVAEAMKLRGWV

SEQ ID NO: 24387 - protein, 597 aa, Zea mays
MGMAALLLVWALLHCAGTAVTMVRASHAVYPELQSLEAEKVDETSRTGYHFQPPKHWINDPNGPMYYKGLYHLFYQYNPKGAVWGNIVWAHSVSTDLIDWTALAPGIYPSRQFDVKGCWSGSATVLPSGVPVVMYTGIDPDEHQVQNVAYPKNLSDPFLREWVKPDYNPIIAPDSGVNASAFRDPTTAWYGPDRHWRLLVGSKVGGKGLAVLYRSRDFRRWVKAHHPLHSGLTGMWECPDFFPVAVHGGGRHYRRGVDTAELHDRALAEEVKYVLKVSLDLTRYEYYTVGTYDHATDRYTPDAGFRDNDYGLRYDYGDFYASKSFYDPAKRRRVLWGWANESDTVPDDRRKGWAGIQKRMYTRRLIPRKLWLSPRGKQLIQWPVEEVKALRAKHVNVSDKVVKSGQYFEVTGFKSVQSDVEVEFAIGDLSKAERFNPRWLTDPQALCKKRGARETGEVGPFGLWVLAAGDLTERTAVFFRVFRANSNSSSSRLVVLMCNDPTNSTFEAQVYRPTFASFVNVDIARTKTIALRTLIEPSVVESFGAGGRTCILTRVYPKKALGDNAHLFVFNHGEVDVKVTRLDAWEMRTPKMNVPAQ

SEQ ID NO: 24388 - protein, 420 aa, Novosphingobium aromaticivorans DSM 12444
MRRVVVTGLGLVTPLGADVETVWKNLLAGKSGAGLITKFDTTDQKCKIACEVKPADHEYGFDAGKRVDHKIQRQVDPFIVFGIDAAGQALEDAGLADMDDDLKMRTGCSIGSGIGGLPGIESESIILHEKGPGRVSPHFVHGRLINLISGQVSIKYGLMGPNHAVVTACSTGAHSIGDAARMIKDGDADVMLAGGAESTINPLGVAGFAQARALNCSYNDRPTEASRPYDKDRDGFVMGEGAGVVVLEEYEHAKARGAKIYAEVVGYGLSGDAYHVTAPHPEGKGAELAMRMALRKAGLSAGDIDYVNAHGTSTMADTIELAAVKRVLGDDLSGASMSSTKSAIGHLLGGAGAVETIFCILAIRDQIVPPTLNLHNPDEGTEGVDLVPLKAKPRKVRAALNNSFGFGGTNASVIVKAVED

SEQ ID NO: 24389 - protein, 260 aa, Xanthomonas oryzae pv. oryzae KACC10331
MSNHVILIADHASIRTITVNRPDKLNALNQQTMQALDQAFQDAAAADDVRAVILTGAGPKAFVAGADIAEMSDLSAIQGRAFSLLGQQLMRRIERMPKPVIAMINGFALGGGLELAMACHLRIAATTARLGQPEINLGLIPGFGGTQRLLRLTGRAAALELCLFGLPIDAARALQLGLVNRVVEADALHEETLALAQRLATAAPLALRGILDALVFGGECAMEEGLQLETAQFALLFATDDMREGTRAFLDKRPAHFKNR

SEQ ID NO: 24390 - protein, 210 aa, Serratia marcescens
MKKFLIAPSILSADFARLGEDTANVLAAGGDVVHFDVMDNHYVPNLTIGPMVCEALRNYGITAPIDVHLMVKPVDRIVPDFAKAGASYISFHPEASEHVDRTIQLIKEHGCKAGLVFNPATPLSYLDYVMDKIDVILLMSVNPGFGGQSFIHGTLDKLRQVRKLIDDSGRDIRLEVDGGVKVDNIAEIAAAGADMFVAGSAIFGQPDYRK

SEQ ID NO: 24391 - protein, 237 aa, Oryza sativa
MRPQNEENPTRRRGFRVAQINGASPRRSPATSEAGLIPTRLVAFLTEPATATATATARPHPPAPMASSALAVSVAKPAASPPVAVAAVTPQRRLLPQCRGVRAAPVVRLRSGRARGVSVVCAAQGQETSFQVPDVTKSTWQSLVVESELPVLVEFWASWCGPCKMIDPVIGKLSKEYEGKLNCYKLNTDENPDIATQFGIRSIPTMMIFKNGEKKDAVIGAVPESTLVSSIDKYIGR

SEQ ID NO: 24392 - protein, 198 aa, Triticum aestivum
MLGVARRRLGSGCALGQLMQALRPAAAAAAARTYSAAAKEMTVREALNSALDEEMSADPSVFLMGEEVGEYQGAYKISKGLLDKYGPDRVLDTPITEAGFTGIGVGAAYQGLRPVVEFMTFNFSMQAIDHIINSAAKSNYMSAGQINVPIVFRGPNGAAAGVGAQHSQCYAAWYAHVPGLKVLTPYSAEDARGLLKAA

SEQ ID NO: 24393 - protein, 146 aa, Zea mays
KVQLERGQLLMVAPYLVKRKKQHFHHLEKYNVDLILGCNGFIWVGEHVVVGEKPKTTGGQQGFSTEAENFTPLETRKHICRLANSVRVLSALGFTLTVELIIETMEASASSNVEINDMLGAEFYVQTAEREAKRRADLLRKKNGAR

SEQ ID NO: 24394 - protein, 151 aa, marine gamma proteobacterium HTCC2207
MRFLHSMVRVTDLEKSLAFYCTALGLAELYRYEVPKGRFTLVFLAAPSDADNAQETKAPLIELTYNWPPEQGEPEHYGEGRNFGHLAYKVDNIYATCQRLMDAGVVINRPPRDGHMAFVRSPDNISIELLQEGEALPAQEPWASMNNTGSW

SEQ ID NO: 24395 - protein, 419 aa, Ralstonia eutropha JMP134
MAIVDVKVPQLSESVAEATMLNWKKKPGEAVAQDEILIEIETDKVVLEVPAPSAGVLSQIIKNDGDTVVADELIAKIDTEATAGAAAPAAAAPAPAAAAPAAAAAAAPAAAGAVAMPSAAKLMAEAGLSAGQVAGTGKDGRITKGDVLGASAAPAPAPAAKAAPAPAAAKPALPQVAANVDFAALGDRPEERVPMSRLRARIAERLVQSQSTNAILTTFNEVNMKPVMDLRNKYKDRFEKEHGVKLGFMSFFVKAAVHALKKYPVINASVDGNDIVYHGYFDIGIAVGSPRGLVVPILRNADQMSLADIEKKIAEFGAKARDGKLSLEELTGGTFSISNGGTFGSMLSTPIINPPQSAILGVHATKDRAVVEDGQIVIRPMNYLAMSYDHRIIDGREAVLGLVAMKEALEDPARLLLDL

SEQ ID NO: 24396 - protein, 579 aa, marine gamma proteobacterium HTCC2207
MIAENTNKGINVTIQTIVVPDLGGAETVEVIELGLNPGDSIEVEDALLVLESDKATMDIPSPAAGALVKYLVAEGATVRVGDAIAEIDVADEATAETEAEPEEVEQVTNEPLVEAAVATEQAQEQAPQVAAASSAEQMILVPDIGSDDKVELIEVCIAVGDEVNEGDTLIVLESDKATMDVPSTHSGKVLEIVVAEGAKLGTGDAVALFEVAGDAPAPVVAKPVTDKPVADKPVAPAAAPVAAPIEAAADAIQSAPGQPAQPAAVAAAEPALSSDAAQVYAGPAVRLIARELGVALTEVSGTGPRGRILKDDVSNYVKQVIKNKDAPAAAATGGSGIPVVPAVDFSQFGQIEELPMSKIQKLTAANMQRNWLNVPHVTQFDDADITDLEAFRKGLKAEGEKRGVRVTPVAFLIKAIGAALEANPEFNRSLAADGQNLIQKHYCHVGMAVDTPRGLVVPVIRDVNEKGIWDISAEISLLAGKARDGKLKPAEMQGGCFTLSSLGAIGGNGFTPIVNAPEVGILGVSKSQMKPVWDGAEFVPRLLLPMALSYDHRAINGGDAGRFMTHLVKLLSDIRYLAL

SEQ ID NO: 24397 - protein, 714 aa, Klebsiella aerogenes
DLNAIESCARRSKRGAVVGGGLLGLEAAGALKNLGVETHVIEFAPMLMAEQLDQMGGEQLRRKIESMGVKVHTSKNTKEIVQQGTEARKTMHFADGSELQVDFIVFSTGIRPRDKLATQCGLAVAQRGGIMVNDSCQTSDPDIYAIGECASWNNRVYGLVAPGYKMAQVAVDHLLGSENSFTGADLSAKLKLLGVDVGGIGDAHGRTPGARSYVYLDESKEVYKRLIVSADNKTLLGAVLVGDTSDYGNLLQLVLNAIELPENPDSLILPAHAGSGKPSIGVDKLPDSAQICSCFDVSKGDLIAAINKGCHTVAALKAETKAGTGCGGCIPLVTQVLNAELAKQGIEVNNNLCEHFAYSRQELFHLIRVEGIKTFDELLEKHGQGYGCEVCKPTVGSLLASCWNEYILKPQHTPLQDSNDNFLANIQKDGTYSVIPRSAGGEITPEGLVAVGRIAREFNLYTKITGSQRIGLFGAQKDDLPEIWRQLIEAGFETGHAYAKALRMAKTCVGSTWCRYGVGDSVGFGVELENRYKGIRTPHKMKFGVSGCTRECAEAQGKDVGIIATEKGWNLYVCGNGGMKPRHADLLAADLDRDTLIKYLDRFMMFYIRTADKLTRTAPWLDNMEGGIDYLRSVIIDDKLGLNDHLEEELARLRAAFACEWTETVNNPAAQTRFKHFINSDQRDPNVQVVPERDQHRPATPYERIPVTLVEEKA

SEQ ID NO: 24398 - protein, 244 aa, Streptomyces sp. CH7
IPGDTEVRELDLASLASVRAFAAKLTADHPSVDVLVNNAGLVHLGPRRTTADGFELHVGTNMLGPYALTGLLLDALTAGSGGRVVSLSSITHKNAHLDFGDLMSEHGYRASSAYGRSKLATTLFGLELDRRLRAAGLPVVSALAHPGLTRTNLTPRAWEHRGRFGRLIAAGGLLATQSVEQGALPQLRAATDPEVRGGQFFGPARLWETRGPVTEARLGEEAADPAVARRLWAVAEDLTGVRYP

SEQ ID NO: 24399 - protein, 416 aa, Magnetospirillum magnetotacticum MS-1
MRYLPLTESDRRAMLDVIGAKSVDDLFRDVPPSARLAGPLPLPSHQGEMEVERAFTRMAGKNLSAGCAPFFIGAGVYRHHIPAAVDQLLLRGEFLTAYTPYQPEVAQGTLQMLFEFQSQVAAITGMDVANASMYDGATATAEAAVMACRITKRAKVIVSGGVHPHYAETVETSLRYTEMEADVLPPDPLGMEDMIGRVDSQTACVIVQNPGFFGTVRDLRPLAALCHEVGALLVVMVAEPTSLGLIESPGAMGADIVVCEGQSLGMGMNFGGPGLGLFATRDKYVRQMPGRLVGQTADVDGRRGWVLTLSTREQHIRREKATSNICTNSGLCALAFSIHLTMLGGSGFGRLAELNHVAATRLEQKLRAVKGVRVLPQSYYNEFAIHLGDDADAAAVVDALADKGILAGVPASRFYP

SEQ ID NO: 24400 - protein, 401 aa, Staphylococcus aureus subsp. aureus MRSA252
MVTRSVLKFGGSSVSDFTKIKRIAEMLKERVNQDEQLIVVVSAMGNTTDQLMTNVSTLTKTPKQQELALLLTTGEQQTVSYLSMVLNDIGVNAKAMTGYQAGIKTIGHHLKSKIAQINPQTFEQAFQENDILVVAGFQGINDHQELTTLGRGGSDTTAVALAVSNQIPCEIYTDVDGVYATDPRLLPKAKRLDIVSYEEMMEMSALGAGVLETRSVELAKNYNIPLYLGKTLSNVKGTWIMSNEEILERKAVTGVALDKHMMHVTISYPLPDNQLLTQLFTELEEGAVNVDMISQIVNLDGLQLSFTIKDSDFHQISMILKTLKNQYEALAYKINEHYVKISLIGSGMRDMSGVASKAFLTLIENNIPFYQTTTSEISISYVIDDFNGQQAVEKLYDAFNI

SEQ ID NO: 24401 - protein, 97 aa, Arabidopsis thaliana
  misc_feature (89)..(89): Xaa can be any naturally occurring amino acid
  misc_feature (91)..(91): Xaa can be any naturally occurring amino acid
  misc_feature (96)..(96): Xaa can be any naturally occurring amino acid
MASSMLSSTAVVTSPAQATMVAPFTGLKSSASFPVTRKANNDITSITSNGGRGSCMKVWPPIGKKKFETLSYLPDLSDVELAKEVDYLXRXNKWIXL

SEQ ID NO: 24402 - protein, 181 aa, Spinacia oleracea
MAIENCLQLSTSASVGTVAVKSHVHHLQPSSKVNVPTFRGLKRSFPALSSSVSSSSPRQFRYSSVVCKASEAVKEVQDVNDSSWKEFVLESEVPVMVDFWAPWCGPCKLIAPVIDELAKEYSGKIAVYKLNTDEAPGIATQYNIRSIPTVLFFKNGERKESIIGAVPKSTLTDSIEKYLSP

SEQ ID NO: 24403 - protein, 629 aa, Hypocrea lixii
MLARSVYTVTRSQITSTSYLPSLSSYSKFLQPKFTFSTMPPKGSKRETASPVGKANGVETKRVKHEANQDELHQPHPFAKDAEEHGIVLRRFYPHEMSTSRAYAYNSNEIERPMEGLVAALEETAGARKQAKVRHAVVHWFKMDLRHSDNRSLALASAKAKEAGVPLICVYIISPQDFEAHLTSPVRVDFMLRTLSVLKDDLAALDIPLHVETVDKRKDIPRRILELMEEWGSNHLFANMEYEVDELRRETRMIRQFAENNMSFEVVHDTCVVPPGELHSGTGKQYAVYTPWYRAWMAHIHENLDLLEIYDRPEKNPGATRRTFKTLFDCPIPDAPKNKQLNDEEKKRFHGLWPCGEHEAMSRLEKFCDEAVTSYHDRRNIPGDNGTSCLSVHLASGTISSRTCVRTARDRNKTKRLDGGHQGIHVWISEVAWRDFYKHVLVNWPYVCMNKPFKPEYANIEWSYNMDHFEAWCEGRTGFPIVDAAMRQLNHMGYMHNRCRMIVASFLSKDLLIDWRMGEKYFMEHLVDGDFASNNGGWGFSASVGVDPQPYFRVFNPLLQSEKFDPNGEYIRKWIPELKALSDKEIHDPYNRGAGTKAKKQGYPKQIVDHKGARERALSAYKDGLERGI

SEQ ID NO: 24404 - protein, 115 aa, Glycine max
MARTAATKLVLVALVAAMILAASDAAISCGQVSSALTPCVAYAKGSGTSPSGACCSGVRKLAGLARSTADKQATCRCLKSVAGGLNPNKAAGIPSKCGVSVPYTISASVDCSKIH

SEQ ID NO: 24405 - protein, 116 aa, Rubrobacter xylanophilus DSM 9941
MSKPVAVTAQTFDGEVLGSEIPVVVDFWAAWCGPCRRVAPVMDELARDYEGSVKVVKVDVDAESELAARFGVSSIPTIAFFEPGREPKAVVGALPKGALVEAFGLDRLPRGAGRVA

SEQ ID NO: 24406 - protein, 324 aa, Pinus taeda
MTAGKQTEEGQTVCVTGAGGFIASWLVKLLLERGYTVRGTVRNPEDQKNAHLKQLEGAEERLTLVKADLMDYNSLLNAINGCQGVFHVASPVTDDPEEMVEPAVNGTKNVLDACAVAGVRRVVFTSSIGAVYMDPSRDYDALVDENCWSNLDYCKETKNWYCYGKTVAEKAAWERAKDKGLDLVVVNPCVVLGPVLQSSINSSIIHILKYLTGSAKTYANSVQAYVHVRDVAEAHILVYESPSASGRYLCAESVLHRGDVVDSLASMFPQYPIPTKVKEDGKPRVKPWKVSNQKLKDLGLEFTPAKQCLYETVISLQEKGHISK

SEQ ID NO: 24407 - protein, 177 aa, Coccidioides immitis RS
MAESGLPPGWEVRHSNSKKLPYYFNPHTKESRWEPPADTDTEKLKVYMATYHSGPPDRYTGSSQKEGQIRASHLLIKHRDSRRPTSWREANITRSKEEAIEILNGHLQRIMSGEATLGNIAMTESDCSSARKKGDLGFFGRGVMQKEFEDASFALKPGQISGIVETQSGVHLIERIE

SEQ ID NO: 24408 - protein, 350 aa, Ipomoea trifida
ERLAGSGIERIPKRYIRPEKERPSIGDIFAEEKMAGGPQVPTVDLKGINSEDLEVREKCREELRKAAVDWGVMHLVNHGIPEELTARVKAAGEGFFGQPIEEKEKYANDQAAGNVQGYGSKLANNASGQLEWEDYFFHCVFPEDKADLSIWPKTPSDYIAATREYAKQLRALTTTVYAVLSQGLGLEEERLEKKWRDGRASSTNEDNYYPKCPQPELALGVEAHTDVSALTFILHNMVPGLQLFYEGKWVTAKCVPNSIIMHVGDTVEILSNGKYKSILHRGVVNREKVRVSWAVFCEPPKEKIILQPLPETVCRADPPRFPPRTFAQHIKHKLFRLTDQEGADTPKPDE

SEQ ID NO: 24409 - protein, 414 aa, Legionella pneumophila subsp. pneumophila str. Philadelphia 1
MSVKNAIYAQSGGVTAVINASACGVIQTAKLFPEQIGKVYAAKNGIIGALNEELIDTSLESEEDIAKLMQTPSGAFGSCRYKLKDNGEEYQRLIAVFKAHNIGYFFYNGGGDSQDTAHKVSQLGKTMGYPITCIGIPKTVDNDLPFTDNCPGFGSVAKYIAISTKEAGFDVASMAASSTKVFILEVMGRHAGWIAAASGLAEQNPGEPPHIILLPEVPFEPTRFLKKVKDCVNSYGYCVIVVSEGIRNKEGKFLSEAGLRDAFGHAQLGGVAPVIAQLIKSELGFKYHWAVADYLQRAARHIASQTDLDQAYALGKAAVEYAVKGYNAIMPVVIREQDEPYQWSIGQVPLAEVANQEKAMPPEYIAEDGMGITDACKRYLSPLIQGEAYPNYKNGLPDYVRLKNQLVAKKINQD

SEQ ID NO: 24410 - protein, 133 aa, Glycine max
MAVPLLSKKIVKKRVKKFKRPQSDRKISVKTNWRRPKGIDSRVRRKFKGCTLMPNIGYGSDKKTRHYLPNGFKKFVVHNVKDLELLMMHNRTYCAEIAHNISTRKRKDIVERAAQLDVVVTNKTARLRTQEDE

SEQ ID NO: 24411 - protein, 103 aa, Escherichia coli
MKKIDAIIKPFKLDDVRERLAEVGITGMTVTEVKGFGRQKGHTELYRGAEYMVDFLPKVKIEIVVPDDIVDTCVDTIIRTETGKIGDGKIFVFDVARVIRIVP

SEQ ID NO: 24412 - protein, 75 aa, Oryza sativa
PRVRAGPSAACCSGVRSLKAAATSTADRRPGCNCLKNAARGIKGLNAGNAASIPFKCGVRVPYTISASIDCSRVS

SEQ ID NO: 24413 - protein, 112 aa, Legionella pneumophila str. Lens
MKMITAIIKPFKLDDVHEALMEIGVPGITISETRGFGRQKGHTELYRGAEYVVDFLPKIKIELALPDNMVEAAIEAICKSAYTGKIGDGKIFVYALEQVVRVRTGEVGTDAL

SEQ ID NO: 24414 - protein, 554 aa, Clostridium acetobutylicum ATCC 824
MKYNGSRIILECLKEQGVDTIFGYPGGAVLNIFDALYSFSEIRCVLTSHEQGASHAADGYARATGKVGVCLATSGPGATNLVTGIATAYMDSVPMVAITGQVATSLIGKDSFQEVDITDITMPITKHNFIVRKVEDLADTIRKAFYIAQSGRPGPVLIDIPKDVTGNECEYEPRKPEKIEKSSVRDAEVEGAIELLLESKRPVIIVGGGCNISEASKELKILQEKLKCPVCSTMMGLGAFSGKDDMFTGMVGMHGTKASNKSICESDLVIAIGCRFSDRVTSNADTFAKNAKILHIDIDEAEVSKNIKADSFIIGDVEEVLKKVNEKLTAREGNEWTEYALGLLKKDKSKVLRINKCDSVNPVYVIKKLYELTDGEAIITTEVGQNQIWATQGYIYTKPRSFITSGGLGTMGYGFGAAIGASVGKDKMTFDIAGDGSFRMNINELATVVRYKLPVKIIVLNNNVLGMVRQWQNLFYKKRYSSTTLERDTDFVKIAEGYGALGLRVDTNAGVESALKKAIDYDGPVVIDFTVGEDEMATPIVPPGADIENMVVLD

SEQ ID NO: 24415 - protein, 341 aa, Chlamydophila pneumoniae TW-183
MQCLVSLFLAKKVTVTTPAYLLANFGGPRHAKDLQEFLISLLTDRDVTGTFLPRVLHRHLFTFIAKKRVPKVLPQYQSLQNWSPIYFDTETLAKTLSEILRAPVIPFHRYLPSTHEKTLLALRTLHTRHVIGIPLFPHFTYSVTGSIVRFFMKHVPEIPISWIPQFGSDSKFVSLITCHIRDFLQKLGILEKECCFLFSVHGLPVRYISQGDPYSKQCYESFSAITTNFKQSENFLCFQSKFGPGKWLSPSTAQLCQNIDTDKPNVIVVPFGFISDHLETLYEIERDYLPLLRSRGYRALRIPAIYSSPLWVSTLVDIVKENSTVVAEELIKSGKKHTGIR

SEQ ID NO: 24416 - protein, 870 aa, Kineococcus radiotolerans SRS30216
MTETTATATVPAQRRPQRRLVVVGNGMAGIRAVEELLERGGSDQFAITVFGDEPYGNYNRIMLSHVLSGEETEEGIFLNTLPWYAENGIDLRAGVRVDRIDRFAKVVHDADGGQTLYDVLLLATGSTPFFPTMEGLHRPDGTVLDGVFGFRTLDDARSLLTAARTHRRAVVIGGGLLGLEAAHGLATHGLEVHLVHSPQHLMNQQLGPEAGRVLRRKIEELGIRVHTGVRTRGLRGTDRVTGVELPDGTVLDADFVVVAAGIRPNTDVALRSGLEVQRGVVVDDRMQCSAGEEGEEGTADGIYAVGECVQHRGQTYGLVAPLWDQAGVLADHLTGSRPDAAYHGSRTSTKLKVAGVDVVAMGLAGPERDDDEFVVFSEPHRGVYLNVVIRDGRLVGATLLGDVRKTAFLTQAFDQGLPLPEERMSLLFDLGSPDEATSVAELADDVQVCNCNGVTKGKIVDAVAGGCTSVNAVMGKTKAGKGCGSCKTLVEQVTEWAAGGNLTVDESANWYVPAIPLAKPELMAAIRERRLKSVSAVFRELAPGGVEDAKSKMGLTSLLRMMWPEGLDQDERDGRFINDRVHANIQRDGTFSVVPQMKGGVTTAEQLRKIADVADKYDVGMIKVTGGQRVDLLGIRKEDLPKVWADLGMPSGYAYGKSFRTVKTCVGTDFCRFGLGDSTQLGIDLETRFQGVETPAKLKLGVVGCPRNCAEAYVKDIGVVAIGAGKWEVYVGGAAGASVRKGDLLATVDSPEEVITLTGRFIQFYREWGNWLERTYEFVPRLGLDRVKKVLLEDSDGLVAGLDERMQATVDNYRDPWLEGREPVTEGQFRPALPLVDLPLVPGRPAGAPGGTTVALPLPTARPDSLRVPR

SEQ ID NO: 24417 - protein, 112 aa, Novosphingobium aromaticivorans DSM 12444
MKFIIAIIKPFKLDEVREALSGLGVAGMTVSEVKGFGRQKGQTEIYRGAEYSTNMLPKVKIEIAASDDLAPQIVETIQQAASTEAIGDGKVFVLDLASATRIRTGETGDTAL

SEQ ID NO: 24418 - protein, 589 aa, Phaseolus vulgaris
MSSISLKENGGEVSVKKDYSNGGGVRDLYGEDSATEDHLITPWTFSVASGCSLLRDPRYNKGLAFTEGERDAHYLRGLLPPSVFNQELQEKRLMHNLRQYEVPLHRYMALMDLQERNERLFYKLLIDNVAELLPVVYTPTVGEACQKYGSIFRRPQGLYISLKEKGKILEVLKNWPEKSIQVIVVTDGERILGLGDLGCQGMGIPVGKLSLYTALGGVRPSSCLPVTIDVGTNNEKLLNDEFYIGLRQRRATGQEYATFLDEFMRAVKQNYGEKVLVQFEDFANHNAFDLLEKYSSSHLVFNDDIQGTASVVLAGLLASLKLVGGTLADHTFLFLGAGEAGTGIAELIAVEVSKQTKAPVEETRKKIWLVDSKGLIVSSRLESLQQFKKPWAHEHEPVKGLLEAVKAIKPTVLIGSSGAGKTFTKEVVETMASLNEKPLILALSNPTSQSECTAEEAYTWSKGRAIFASGSPFDPVEYEGKLFVPGQANNAYIFPGFGLGLIMSGAIRVRDEMLLAASEALAAQVSEENYDKGLIYPPFTNIRKISANIAAKVAAKAYDLGLASHLKRPKDLVKYAESCMYSPGYRSYR

SEQ ID NO: 24419 - protein, 151 aa, Nectria haematococca
MSTAARRRLMRDFKRMQTDPPAGVSASPVPDNVMTWNAVIIGPADTPFEDGTFRLVMQFEEQYPNKPPQVKFISEMFHPNVYATGELCLDILQNRWSPTYDVAAVLTSIQSLLNDPNTGSPANVEASNLYKDNRKEYTKRVRETVEKSWED

SEQ ID NO: 24420 - protein, 70 aa, Zea mays
MSDWGPVVIGLVLFVLLSPGLLVQLPGRHHLVEFGNLKTSAVSILVHSIIYFALITLFVIVIGVHITTGD

SEQ ID NO: 24421 - protein, 968 aa, Lupinus luteus
MANNRNMEKMASIDAQLRQLAPAKVSEDDKLIEYDALLLDRFLDILQDLHGEGLKDTVQEVYELSSEYEGKHDPKKLEEIGNVITSLDAGDSIVVAKSFSHMLNLANLAEEVQISHRRRNKLKKGNFADETNATTESDIEETLKRLVFDLKKSPQEVFDALKSQTVDLVLTAHPTQSIRRSLLQSMLGYEIAYLICMPKISLLMMKEELDEALQREIQAAFRTDEIKRTPPTPQDEMRAGMSYFHETIWKGVPKFLRRVDTALKNIGINECIPHNAPVIQFSSWMGGDRDGNPRVTPEVTRDVCLLARMMAANMYYSQIEDLMFELSMWRCSDELRNRAEELHRSSNKDEVAKHYIEFWKKIPPNEPYRVVLGEVRDRLYQTRERSRHLLAHGYSDIPEEATFTNVDEFLEPLEVCYRSLCACGDRPIADGSLLDFLRQVSTFGLSLVRLDIRQESDRHTDVMDAITKHLEIGSYLEWSEEKRQEWLLSELSGKRPLFGPDLPKTEEIRDVLDTFHVLAELPSDNFGAYIISMATAPSDVLAVELLQRECHIKHPLRVVPLFEKLADLDAAPAALARLFSIDWYRNRIDGKQEVMIGYSDSGKDAGRFSAAWQLYKAQEELIKVAKEFGVKLTMFHGRGGTVGRGGGPTHLAILSQPPDTIHGSLRVTVQGEVIEQSFGEQHLCFRTLQRYTAATLEHGMNPPISPKPEWRALMDQMAVIATEEYRSIVFKEPRFVEYFRLATPELEYGRMNIGSRPAKRRPTGGIETLRAIPWIFAWTQTRFHLPVWLGFGAAFKQVIEKDVRNLHMLQEMYNQWPFFRVTIDLVEMVFAKGDPGIAALNDRLLVSKDLWPFGEQLRKKYEETKNLLLQVATHKDLLEGDPYLKQRLRLRHSYITTLNVFQAYTLKRIRDPNFNVPPRPHISKDSLEKSTSATELVSLNPTSEYAPGLEDSLILTMKGIAAGMQNTG

SEQ ID NO: 24422 - protein, 291 aa, Nicotiana sylvestris
MASSSVSSLQFLFVTPQTPSSLKPNSTLSFFSLPSSSLNLSLSSSSTGLCSIKPFESSFSTRVALSGFDQLEDDVEVAEQPRFSEDLKLFVGNLPFSVDSAALAGLFERAGNVEMVEVIYDKLTGRSRGFGFVTMSTKEEVEAAEQQFNGYEIDGRAIRVNAGPAPAKRENSSFGGGRGGNSSYGGGRDGNSSFGGARGGRSVDSSNRVYVGNLSWGVDDLALKELFSEQGNVVDAKVVYDRDSGRSRGFGFVTYSSSKEVNDAIDSLNGVDLDGRSIRVSAAEERPRRQF

SEQ ID NO: 24423 - protein, 341 aa, Fragaria x ananassa
MGLGAESGSVCVTGASGFVGSWLVMRLLEHGYTVRATVRDPANLKKVRHLLELPQAATRLTLWKADLDVEGSFDEAIKGCTGVFHVATPMDFESEDPENEVIKPTINGMLDIMKACLKAKTVRRVVFTSSAGAVAIEEHRKEVYSENNWSDVVFCRKVKMTGWMYFVSKTLAEQAAWKFAKENNIDFITIIPTLVIGPFLAPSMPPSLISGLSPLTGNEAHYGIIKQCQYVHLDDLCQSHIFLYEHPKAEGRYICSSHDATIHDIAKLLNEKYPKYNVPKKFKGIEENLTNIHFSSKKLKEMGFEFKHSLEDMFTGAVDACREKGLLPLPQEEETEKRRAG

SEQ ID NO: 24424 - protein, 181 aa, Spinacia oleracea
MAIENCLQLSTSASVGTVAVKSHVYHLQPSSKLNVPSFRGLKRSFPALSSSVSSSSPRQFRYSSVVCKASEAVKEVQDVNDSSWKEFVLESEVPVMVDFWAPWCGPCKLIAPVIDELAKEYSGKIAVYKLNTDEAPGIATQYNIRSIPTVLFFKNGERKESIIGAVPKSTLTDSIEKYLSP

SEQ ID NO: 24425 - protein, 342 aa, Fragaria x ananassa
MGLRAESGSVCVTGASGFVIGSWLVMRLLERGYTVRATVRDPANLKKVRHLLELPQAATRLTLWKADLDIEGSFDEAIKGCTGVFHVATPMDFESEDPENEVIKPTINGMLDIMKACLKAKTVRRVVFTSSAGAVAIEEHRKEVYSENNWSDVVFCRKVKMTGWMYFVSKTLAEQAAWKFAKENNIDFITIIPTLVIGPFLAPSMPPSLISGLSPLTGNEAHYGIIKQCQYVHLDDLCQSHIFLYEHPKAEGRYICSSHDATIHDIVKLLNENYPKYNVPKKFKGIEENLTNIHFSSKKLKEMGFEFKHSLEDMFTGAVDACREKGLLPLPQEEETEKRRAG

SEQ ID NO: 24426 - protein, 343 aa, Oryza sativa
MFNCAAREKAMVINLEFIRAIVTADEILLLDPLTIDVIPFVARGTHHLPLKNLVCGNGQPGGDDHGEKHDDSHGDQVPRLNEATGAEHELPFEFQVLELALETVCSSFDVNVSGLERRATPVLEELTKNVSTRNLDRVRTLKSDLTRLLAHVQKVRDEIEHLLDDNEDMAHLYLTRKQLQNQQVEALISSAASNSIVPGGTSLSRLNNSFRRSVSIATSMHLDNDVEDLEMLLEAYFMQLDGIRNRILSVREYIDDTEDYVNIQLDNQRNELIQLQLTLTIASFGIAVNTFIAGAFAMNIQSKLYSIDDGSFFWPFVGGTSSGCFMICIVLLWYARWKKLLGP

SEQ ID NO: 24427 - protein, 321 aa, Triticum aestivum
MAASLLHAAASSPLAGPSPAARAAFRPLASSPFLRLARSSPDRRARLDAPLRALSGGARLAAPRSRRFVAALAGEEPMSSELGDDKEKETEKIEIEPEEAQEVWREMLKQFKAEAIRMQALTTQAYDVYSKRAREVLLEASEKLRIQADKAQKDLTIIAAEVGEEGQEYLQLAAKNSPDSIKDITETINAVGNLNGPSDYKDYHVGISFGTFLTVGGFLNFMLTGSTSAIRFGFVLGFALLALGISSLRSQRAGGRQPRLLLKGQAAIASVIFFKDLSVFFRYGWFPNVFAVLLSGMVATFYIHRIVTGGHNGRTESSSDN

SEQ ID NO: 24428 - protein, 405 aa, Saccharophagus degradans 2-40
MKRVVVTGMGIASCIGTDLDTVLAALREGKSGIRFNESYKEQGFRSHVSGSVDMDLSEHIDRKMYRFMGDAAGYAYVSMKQAIEDSGLTEEQVSNERTGIIMGSGGASTKSVVECADTIRDRGVKRAGPYRVTQTMGSTASACLATPFKIKGINYSISSACATSAHCIGNAMELIQLGKQDVVFAGGGEEEHWTLTGMFDAMGALSSKYNDTPEKASRAYDADRDGFVIAGGGGCMVIESLDHALARGAKIYGELVGYGATSDGYDMVAPSGEGAARCMRQAMAQAGVSTIDYINSHGTSTPVGDLAELKAVKEVFGENVPAISSTKSLTGHSLGATGVQEAIYTMLMMNNNFIAGSANVETIDPAAEGMPIVTASKDANIESAMSNSFGFGGTNATLVFKKYSA

SEQ ID NO: 24429 - protein, 552 aa, Bdellovibrio bacteriovorus HD100
MFELEENINIGANIKVVGVGGGGSNAVATMIESGMNGVEFIVANTDIQALNASKSPNKIQLGLDLTKGLGAGANPDVGRRAAIESYNEIVEKLEGADMVFVTAGMGGGTGTGGAPIVAKIARELGALTIGVVTKPFLFEGKKRGKHAEGGLADLKENVDTLIVIPNQKLLSIAAERTPLLETFKKADEVLLQAVKGISDLINIRGLINLDFADIRTVMSSKGIAIMGTGAAKGDNRAVEAATAAISSPLLENVKIDGATGIIINVTGGSDLSLYEVNEASTLITEAAHEDAEIIFGAVIDESMGDEVRVTVIATGFDSHEVKLVNDMAQVNQMQNFLNQNAAHFGGMNMQMPQMPQQMAQMPQMTQMPQMPQFPQMPVMPTMPQMPVMPQMPAVELPPITAVQTQVQSFTHQPQQTEAAPQVTETVVVPPVAAVTPQMAQQAAQNMMPQMPVQAQQVPVQQEVATPIQPQVESSLSPRDMLLAKARAFKESQDLKSKHANPEQLSMNVDHEQQSLEEARRMAREVLSSPFSSQNLEVPAFIRKKQGFDLNKE

SEQ ID NO: 24430 - protein, 662 aa, Magnetococcus sp. MC-1
MKSTNQSDKTIKGLPKNPRQSAYIYIIQLLFIFLLFSFFSFSGLELMSGLRGWVKAEGTWSKNQKSAVIQLISYSATGDALDYEKFQQALIPIMYMRKARNALQESPPNFEIASHNLKASGVHSNDIRTMSLIIVHLSWLEQIKEAIRIWELGDKEIFKLQDLAEKIQYTHNINGKNTVSPNILKQIKLIDNNATKLENNFSLVLGELGRLAKSLLNTLFATSFIFSSLISISLFKIVYSKFSKAAIAQEKLNREILIEKESQIIAAEILNKEKSLFIANISHEIRTPLNAIIGLGELLQEEITDFEHKRQLNILTSAGDNLLLLINDILHLSKIESGSMLIEENIFSLQNLLNNTVGMFEQGASKKGLYLKVEVKNALPSFVKGDIHRLRQVLFNLLGNAVKFTSCGGVTLTVSALENDRLSFSVSDTGIGIPSSLQEKIFLPFQQADSSITRKFGGTGLGLAITQSLIVQMQGNLSVESHEGTGSTFTFDLPLPETDPPQNHLLNSSSDNSIASPAVDRRQWERQKICADSTANKPAKRILLVDDSEDNRSLIQAYLRRYPHALTTAENGKEALTLVKEKHFDIIFMDIQMPVMDGLSATRAIRAWELTQQSNRNVPIIALTAHVMLEDEKKSIDAGCNFHLTKPIKKARLIDIIDNHAL

SEQ ID NO: 24431 - protein, 941 aa, Arabidopsis thaliana
MAARNLEKMASIDAQLRLLAPGKVSEDDKLIEYDALLLDRFLDILQDLHGEDVREFVQECYEVAADYDGNRNTEKLEELGNMLTSLDPGDSIVVTKSFSNMLSLANLAEEVQIAYRRRIKKLKKGDFADEASATTESDIEETLKRLLQLNKTPEEVFDALKNQTVDLVLTAHPTQSVRRSLLQKFGRIRDCLTQLYAKDITPDDKQELDEALQREIQAAFRTDEIRRTPPTPQDEMRAGMSYFHETIWKGVPKFLRRVDTALKNIGINERVPYNAPLIQFSSWMGGDRDGNPRVTPEVTRDVCLLARMMAANLYFSQIEDLMFEMSMWRCNEELRVRAERQRCAKRDAKHYIEFWKQIPANEPYRAILGDVRDKLYNTRERARQLLSSGVSDVPEDAVFTSVDQFLEPLELCYRSLCDCGDRPIADGSLLDFLRQVSTFGLALVKLDIRQESERHSDVLDAITTHLGIGSYKEWSEDKRQEWLLSELSGKRPLFGPDLPKTEEVADVLDTFKVISELPSDSFGAYIISMATAPSDVLAVELLQRECGITDPLRVVPLFEKLADLESAPAAVARLFSIEWYRNRINGKQEVMIGYSDSGKDAGRLSAAWQLYKTQEELVKVAKEYGVKLTMFHGRGGTVGRGGGPTHLAILSQPPDTIHGQLRVTVQGEVIEQSFGEEHLCFRTLQRFTAATLEHGMHPPVSPKPEWRVLMDEMAIIATEEYRSVVFKEPRFVEYFRLRRNRVAACNPVDLCVDSDEVHLPVWLGFGGAFKRVIQKDSKNLNMLKEMYNQWPFFRVTIDLVEMVFAKGDPGIAALYDRLLVSEELQPFGEQLRVNYQETRRLLLQVAGHKDILEGDPYLRQRLQLRDPYITTLNVCQAYTLKQIRDPSFHVKVRPHLSKDYMESSPAAELVKLNPKSEYAPGLEDTVILTMKGIAAGMQNTG

SEQ ID NO: 24432 - protein, 458 aa, Gloeobacter violaceus PCC 7421
MLRSLTLAWGGDQCFCNIEYSCLNPFVKGRSMVTSLNDSPSPAYICPNDMACSNLDRAAQILRLDPGVVEVLGTPHRVLTVSVPVRMDNGRIRVFAGHRVQHCNVLGPYKGGMRYHPDVTLREVSTLAMLMTWKCALMGIPYGGAKGGIAVNPTTLSVGELERLTRRFTSELVRDIGPQIDIPAPDVGTGPREMAWMMDTYSMSIGHASPGVVTGKPLSIGGSKGRDAATGRGVVIATREALDTAGLALRGATIAIQGFGKVGKAAALIFQQHGARVIALSDGSGGIYNPDGLDIEQAADFVRDGSRLAQYPFPGVKPIANPELLTLPCDVLVPAALEHQITEANAARVRARLVVEAANAPTTMEADRILEERGVTVLPDILANAGGVVVSYLEWVQGLSYLFWDEEKVNLELEKLMVGAYARVLQQATQFRLPLRPAAYTLAVGRVVEAFNHRGLYP

SEQ ID NO: 24433 - protein, 578 aa, Psychrobacter arcticus 273-4
MEIKAPDLGVDSAEVSEIMVAVGDVIAKDDNIILLESDKASVEVPSSAAGKVTKISVAVGDQVSEGMVLIELESETENQDDSQSTEAAVADTQDKSRDTEQEETQKEEQSDKVTAESNTAQPAQQAATATTHALPDLGVDEAQVSEIMVSVGDMVTADQSILLIESDKASVEVPAPQAGKVEKILVQTGDMVANGQDFIVIIGQSSDNTNITSEAKAEDAQSQDPKPAATDEKADASQKADKQVTTAPKQAANATTSASNKLTEAQVNEKMVDVYAGPAVRKLARQLGVDISEVAGSALNARILKEDLFAHVKQSLTTQQASPATATGASRASLPSLPDMSNVEIWGETETQDLTRLQKVSIPQLNYNTYLPQVTQFDLSDITETEQLRSELKGGMKAEGIGLTILAFIVKATAYALTQHPRFNSHLSDDNTQVILRKSVNMGIAVATDDGLIVPVIKNAHEKGIKQIAIEIGELAIKARDKKLSTKDLQGASFTISSQGILGGTAFTPLVNWPQVGILGASEATMQPKWNAAKQAFEPRLMLPLSLSYDHRVINGADAAVFTRYVATLLADPRRILL

SEQ ID NO: 24434 - protein, 547 aa, Clostridium acetobutylicum ATCC 824
MGKEKKVYIFDSILRDGSQAQGVSFSVADKIKIVKKLDELGIDYIEAGNPSSNPKDREFFEEIRSLKLKHSKLCAFGSTRRAGAKAEEDEGIKKLVDSGVNVFSIFGKAWDFHVTDIIKTSIEENLNMIRDSIKYLVSLNKEVVFDAEHFFDGFKSNKEYAIEVLNTARLAGAKWIVLCDTNGGTMPNEVSDIVKYLVRDLNFDNLGVHFHDDSGMAVANSVVAVHYGVNHVQGTFTGVGERCGNANLSNIIANLSLKMGYNTIKNDKLEYLTVAFRYICEACNMTPNERVAYVGNCAFSHKGGMHIDAVRKNPKSFEHIDPSRVGNSRRILVSEVSGRSTILPALKRINPKIDKDSPETKAVVKRIKDLEYLGYQFEGAEGSFELLMRKELNVFRPSFELVEYKVIAERPYLSDLSATAIVKIMVNGKLETTAADGKGPVNALDKALRKALGVFYKELANVYLTDYKVRVISGTKATSAKIRVLIESTDGVSTWTTVGVSYDIIEASWLALVDSVEYKLIQCNKEENNNEKTDDYDTKNTCEPCRA

SEQ ID NO: 24435 - protein, 869 aa, Oceanospirillum sp. MED92
MTDLHEALRDDVRMLGTSLGETIKSDLGEAFLSKIESVRKLAKEGRTEEQPEHEQLLQALIDLGDDDVLPLARAFNQFLNLANIAEEHHRVRRHLEVTDVCTPDSLCTLFAQLRKKGFTPKQVADTLSETQIDLVLTAHPTEVNRRTLIQKYDDIADCLRRLDRGDSEAQIRLDELIRQIWHTDEIRKQRPTPVDEAKWGFAVIENSLWTAVPKFLRRLDAQLDETLGERLPLSCSPIRFASWMGGDRDGNPNVKAKVTEEVLLLSRWMAADLYLKDVDALRAELSMYQASKELRDHVGEVSEPYRALLGEVREKLLATKNWVARQLNGQVEQDCDIYVHEEELLEPLQLCYRSLQACGMGIIAESALEDIIRRIACFGLTLVKLDIRQSSDRHAQVFEELSQFYGLGSYNGWTEEGRQSFLLKELQSKRPLLPNEWVPSEEVQEVLDTCEVVAKAEKSALGSYVISMASHPSDVLAVILLLREMGISHNMRVAPLFETLNDLENARDCIDALLSVDWYKAYTQGHQEVMIGYSDSSKDAGQLAAAWGQYKAQEGLTALCKEHDVHLTLFHGRGGTVGRGGGPSHTAILAQPPGSVDRSLRLTEQGEMIRFKYGMPDLAVRNLELCTGAVLEATLDPSPGPEEAWREQMESITKVSLAEYRAIVREDPMFVPYFRAATPEQELAKLPLGSRPAKRRQDGGVESLRAIPWIFAWTQIRLMLPAWLGSDKALCSAMEGSSAVLIKQMYQQWPFFRSTIDMLEMVLAKSDRNISAYYDERLVSQELGILGSSLRNRLGDIVDVINLIKEQDGLLQGNPVIRQSIDVRNPYIDPLHFLQAELLNRDRNQPDQRLEQALMVTMAGISAGMRNTG

SEQ ID NO: 24436 - protein, 312 aa, Chlorobium tepidum TLS
MKKELIIGTRSSPLALWQAEFTKAELSRHFPELNITLKLVKTTGDVLLDSPLSKIGDMGLFTKDIEKHLLAKEIDLAVHSLKDVPTGTPEGLVISSFTKREDTRDVIISKSGKGLKDLPPNARMATSSLRRMSQLLSMRPDLQILDIRGNLNTRFKKFDDGEFDAMMLAYAGVYRLEFSDRISEILPHDVMLPAVGQGALGIETRTDDAETIEIVRVMNDSNTEICCRAERALLRHLQGGCQIPIGCYGSYISGTLKLLAFVGSVDGKTALRNELTKPVNTPEEAEAVGIELAEVLLSMGAEKILADIRKTR

SEQ ID NO: 24437 - protein, 482 aa, Legionella pneumophila str. Lens
MAKSSEQLNSLLDREYQHGFITDIEVETFPPGLDEDVIRRLSAIKGEPEFLLEWRLKAFRHWLTMPHPEWSSVHYSPIDYQSISYYSAPKSKKDAPKSLDEVDPELLKTYEKLGIPLREQEMLAGVAVDAVFDSVSVATTFKAKLAEKGVIFCPLSEAVHQYPDLVKKYLGSVVPYRDNFYAALNSAVFSDGSFVYVPKGVRCPMELSTYFRINAASTGQFERTLIVADVDSYVSYLEGCTAPMRDENQLHAAVVELIALDGAQIKYSTVQNWYPGDKEGKGGIYNFVTKRGACRGKKSKISWTQIETGSAITWKYPSVILQGDDSVGEFYSVALTNNFQQADTGTKMIHLGKNTRSTIISKGISAGRAHNAYRGLVRIAPTATNARNYTQCDSMLMGSQCSAHTFPYIEVKNPTAQVEHEATTSKISEEQLFYCQQRGIDTEDAVSMIVNGFCKQVLKELPMEFAVEATKLLGISLEGAVG

SEQ ID NO: 24438 - protein, 990 aa, Oryza sativa
MAAAAGKAAMERHQSIDAQLRLLAPGKVSEDDKLVEYDALLVDRFLDILQDLHGPHLREFVTYLLPRSCCSCPPPVRSIAHTVQECYELSAEYENDRDEARLDELGRKLTSLPPGDSIVVSSSFSHMLNLANLAEEVQIAHRRRIKLKRGDFADEASAPTESDIEETLKRLVTQLGKSREEVFDALKNQTVDLVFTAHPTQSVRRSLLQKHGRIRNCLRQLYAKDITADDKQELDEALQREIQAAFRTDEIRRTPPTPQDEMRAGMSYFHETIWKGVPKFLRRIDTALKNIGINERLPYNAPLIQFSSWMGGDRDGNPRVTPEVTRDVCLLARMMAANLYFSQIEDLMFELSMWRCSDELRIRADDLHCSSRKAAKHYIEFWKQIPPNEPYRVILGGVRDKLYYTRERTRHLLTTGVSEIPEEATFTNVEEFLEPLELCYRSLCACGDKPIADGSLLDFLRQVSTFGLALVKLDIRQESDRHTDVLDAITTYLGIGSYAEWSEEKRQDWLLSELRGKRPLFGPDLPQTEEIADVLGTFHVLAELPADCFGAYIISMATAPSDVLAVELLQRECHIKQPLRVVPLFEKLADLEAAPAAVARLFSIDWYMNRINGKQEVMIGYSDSGKDAGRLSAAWQMYKAQEELVKVAKHYGVKLTMFHGRGGTVGRGGGPSHLAILSQPPDTIHGSLRVTVQGEVIEHSFGEEHLCFRTLQRFTAATLEHGMHPPISPKPEWRALMDEMAVVATKEYRSIVFKEPRFVEYFRSATPETEYGRMNIGSRPSKRKPSGGIESLRAIPWIFAWTQTRFHLPVWLGFGGAFKHIMQKDIRNIHTLKEMYNEWPFFRVTLDLLEMVFAKGDPGIAALYDKLLVAGDLQSFGEQLRNNFEETKQLLLQVAGHKDILEGDPYLKQRLRLRESYITTLNVCQAYTLKRIRDPSFEVMSQPALSKEFVDSNQPAELVQLNAASEYAPGLEDTLILTMKGIAAGMQNTG

SEQ ID NO: 24439 - protein, 944 aa, Arabidopsis thaliana
MAEKDQIEGRCPACRTPYDKEKIVGMTVNCDSLASEGNMERKKIQKSKSKSSEGRKQQLTSVRVIQRNLVYIVGLPLNLADEDLLQHKEYFGQYGKVLKVSMSRTASVKLSDNDFLHRRYITYGKEEEAVRCIQAVHGFILDGKPLKACFGTTKYCHAWLRNVACVNPDCLYLHEVGSQDDSFTKDEIISAYTRSRVQQITGATNILQHHSGNMLPPPLDAYCSDSSSAKPIIKVPSTNATSVPRYSPPSGSGSSSRSTALPAAASWGTHQSLATSVTSNGSSDIQRSTSVNGTLPFSAVVANAAHGPVSSNDILKRPSRKEESQIVMDKVKPSVLKPLQHNVVVSGSERITAPDRDPTSNRLSSSVDSAYGGRDIDQPSAYSGRDIDKPSSTVSSFDAANEAVEDVPTVSNLLDGVACMRITMNCRDERPDITMAIGSQSDQGSIRQPGSEVSKLPDLEQCRIDSSINTDKKAISLEDRIPRTRPGWDWISDLQSQMQGSSKLQVEDISTLDSQRPHPEEDIIHSRLLSNLSSSSLDTNHMASRSSLPCEVRGSDRLHLPNGFGEKSMSSVEHSLFANEGRNKVNNAEDAILSNILSLDFDPWDESLTSPHNLAELLGEVDQRSSTLKPSNFLKQHNNQSRFSFARYEESSNQAYDSENYSIYGQLSRDKPIQESAMSRDIYRNNLGSVNGFASNFAGGLDNFAASPLFSSHKNPVSRPQVSAPPGFSAPNRLPPPGFSSHERVGLSSDTTLGNRFLDSTSLRNAYQVPPPVGNSNGASDIDFVDPAILAVGRGMVNADLDMRSGFSSQLNSFENETGLHMLRQQSLSSAQQVNGFHHDLRNLSPSLNDPYGFSSRLMDQTQGSSLSPFSQLPRQQPSANSILSNGHHWDKWNEGQSVNNIGMAELLRNERLGFNGSLYNNGYEEPKFRIPSPGDVYNRTYGI

SEQ ID NO: 24440 - protein, 754 aa, Pisum sativum
MGFSLTHTPHTTASPNLQLRFHSLLPPSFTSQPFLSLHSTFPPKRTVPKLRAQSENGAVLQASEEKLDASNYGRQYFPLAAVIGQDAIKTALLLGATDPRIGGIAISGRRGTAKTIMARGMHAILPPIEVVQGSIANADPSCPEEWEDGLYKRVEYDSDGNVKTHIIKSPFVQIPLGVTEDRLIGSVDVEESVKTGTTVFQPGLLAEAHRGVLYVDEINLLDEGISNLLLNVLTEGVNIVEREGISFRHPCRPLLIATYNPDEGSVREHLLDRIAINLSADLPMSFENRVEAVGIATEFQDNCGQVFKMVDEDTDNAKTQIILAREYLKDVTISKEQLKYLVIEALRGGVQGHRAELYAARVAKCLAALEGREKVYVDDLKKAVELVILPRSIITDTPPEQQNQPPPPPPPPQNQESNEEQNEEEEQEEEEEDDNDEENEQQQDQLPEEFIFDAEGGLVDEKLLFFAQQAQRRRGKAGRAKNVIFSEDRGRYIKPMLPKGPVKRLAVDATLRAAAPYQKLRREKDTENRRKVYVEKTDMRAKRMARKAGALVIFVVDASGSMALNRMQNAKGAALKLLAESYTSRDQVSIIPFRGDSAEVLLPPSRSIAMARKRLERLPCGGGSPLAHGLTTAVRVGLNAEKSGDVGRIMIVAITDGRANISLKRSNDPEAAAASDAPKPTSQELKDEIIEVAAKIYKTGMSLLVIDTENKFVSTGFAKEIARVAQGKYYYLPNASDAVVSLATREALAALKSS

SEQ ID NO: 24441 - protein, 157 aa, Lactococcus lactis
MNFYDFSAVKMNGETVSMSDYKGKVVIVVNTASKCGFTPQFEGLEKLYETYKDQGLEILGFPCNQFANQDAGENTEINEFCQLNYGVTFTMFQKIKVNGKEAHPLYQFLKKEAKGALSGTIKWNFTKFLIDRDGQVIERFAPKTEPEEMEEEIKKLL

SEQ ID NO: 24442 - protein, 314 aa, Arabidopsis thaliana
MEMMKIDPLFDRASELKAFDETKTGVKGLVDSGVSQVPRIFHHPTVKLSTPKPLPSDLLHLKTIPTIDLGGRDFQDAIKRNNAIEEIKEAAAKWGFFQVINHGVSLELLEKMKKGVRDFHEQSQEVRKEFYSRDFSRRFLYLSNFDLFSSPAANWRDTFSCTMAPDTPKPQDLPEICRDIMMEYSKQVMNLGKFLFELLSEALGLEPNHLNDMDCSKGLLMLSHYYPPCPEPDLTLGTSQHSDNSFLTVLLPDQIEGLQVRREGHWFDVPHVSGALIINIGDLLQFGAQSIGEQSNKSSSVCRMFLYHWSKTES

SEQ ID NO: 24443 - protein, 347 aa, Exiguobacterium sibiricum 255-15
MGVKVAVNGFGRIGRMVFRRLIAEGKSEVVAINASYPVETLAHLIKYDTVHGKFAYPVDIIDGALMVNGRQIQIVSERDPEQLPWGQLGIDIVVEATGKFNSKTGAEKHLTAGAKKVVITAPAKGDLRTIVMGVNDEMYDHETDAIVSNASCTTNCLAPVVQVIDRAFGIESGLVTTIHAFTNDQNNIDNPHKDLRRARACGSSIIPTSTGAAKAISLVLPHLEGKLNGLALRVPTPNVSLVDLVVEVSRDTTVAEVNEAFVKAADGALDGILGLTMEPLVSIDFNGEEKSTVVDGLSTMVMGGRQVKVLAWYDNEWGYSCRVVDLVHLVGAHIEATGNEAKQLELK

SEQ ID NO: 24444 - protein, 122 aa, Zea mays
MAAVLNSRKTPQVVAVLVVVALLASSASAAITCGQVGSSLAPCIPYATGRASALPSSCCSGVKSLNSAARTSADRQAACRCLKSLANSVKSVNMGTVATIPGKCGVSVGFPISMSTDCNKIS

SEQ ID NO: 24445 - protein, 359 aa, Arabidopsis thaliana
MESSLPQVAALDRSTLLKAFDETKTGVKGLIDAGITEIPSIFRAPPATLTSPKPPSSSDFSIPTIDLKGGGTDSITRRSLVEKIGDAAEKWGFFQVINHGIPMDVLEKMIDGIREFHEQDTEVKKGFYSRDPASKMVYSSNFDLFSSPAANWRDTLGCYTAPDPPRPEDLPATCGEMMIEYSKEVMKLGKLLFELLSEALGLNTNHLKDMDCTNSLLLLGHYYPPCPQPDLTLGLTKHSDNSFLTILLQDHIGGLQVLHDQYWVDVPPVPGALVVNLITNDKFISVEHRVLANVAGPRISVACFFSSYLMANPRVYGPIKEILSEENPPNYRDTTITEYAKFYRSKGFDGTSGLLYLKI

SEQ ID NO: 24446 - protein, 789 aa, Burkholderia thailandensis E264
MSTTPSSASSEAGHAEAAAPSHARQYIDAVLEQSFRHLFGPTATPEQPRKHGVVSIAKLTAALADYLSPEEIKEVKAAFHFSDEAHLGQYRQSGEPYITHPVAVAEICAGWKLDAQAIMAALLHDVMEDQGVTKSELAERFGPKVAELVDGLSKLDKMEFRSREEAQAENFRKMLLAMARDVRVILVKLADRLHNMRTLGAVPMEKRRRVARETLDIYAPIAHRLGLNNTYRELQDMSFANFNPHRYATLEKAVKAARGNRREVIGKILESVQRAMADAKIDAEITGREKTIYSIYKKMRDKQLSFSQVLDVYGFRIVVEHPLDCYTCIGVLHALYKPVPGKFKDYIAIPKVNGYQSLHTTLVGPFGAPIEFQVRTRKMHEIAEAGVAAHWLYKNGGADLNDVQKRAHQWLKSLLDIQSEAGDSSEFLEHVKIDLFPDAVYVFTPKSKIMALPRGATALDFAYSIHSDLGNQCVAVKINNELLPLRTELKSGDIVEVITAPYSKPNPAWLGFVRTGKARSAIRHYLKTMRLNESVQLGERLVDQSLKGYGLALADVTPEVWEKLVQWTGNKSRQEIFADIGLGRRVAAVMAKRIEVLMSGRDADDDLPRAERQATNHAPPVVITGTEGMSVQLSACCRPIPGDDIMGYIGIGLGMAIHTTACRVAQRIHRRDPGRWIDVAWAPQPGRLFDVAVKALVKNTKGIFARVAADITSADANIVHIAMDEDLTQESTVLRFVIQVSDRVHLANVMRRVRTNPDVMRIMRERSSDDVVHARHDGGMRIDRERQDY

SEQ ID NO: 24447 - protein, 498 aa, Bradyrhizobium japonicum USDA 110
MPAVQETVERVKRIDVDQYRYGFETLIESDKAPKGLSEETVKFISEKKNEPAWMLQWRLEAYRRWLTMTEPTWARVDYPKIDFQDLYYYSAPKPKKSITSLDEIDPEILKTYEKLGIPLREVAMLEGVEPKVGEEDPARRKIAVDAVFDSVSVATTFKAELKKAGVIFMPISEAIREHPELVQKYLGSVVPTSDNFYATLNSAVFSDGSFVYVPPGVRCPMELSTYFRINERNTGQFERTLIIADKGSYVSYLEGCTAPQRDENQLHAAVVELVAHDDAEIKYSTVQNWYPGNSEGKGGIYNFVTKRGDCRGDRSKISWTQVETGSAITWKYPSCILRGDNSSGEFYSIAISNGFQQVDSGTKMIHLGKNTSSRIISKGIAAGKSQNTYRGLVTAHRKATGARNFTACDSLLIGDKCGAHTVPYIEAKNSSATFEHEATTSKISEDVLFYCIQRGLSQEEAVGLVVNGFVKDVLQQLPMEFAVEAQKLISISLEGSVG

SEQ ID NO: 24448 - protein, 547 aa, Saccharophagus degradans 2-40
MQAKTLADLYSDWDKVQAHAQAWQKRTLKDAFDADRNRAARYSVGAAGLELDFSKNHIDDETLQLLMGVADQANLKAAIKKLLRGDHVNNTEDRPALHSALRFQGKPQTAEHQEVKATLDKMAKLIKSVHSGEWKGYKGEKITDVVNIGIGGSDLGPRMITKALTPFHTGDVKVHFVANIDGAEIHDLTRGLNPSTTLFLVASKSFSTLETLENSLTARKWMLDNGCAQDQLAKHFVAISSKVEKAVEFGIAAENVYPIWDWVGGRYSLWSAIGMPIAFAIGMDNFNKLRAGAAAMDDHFAEAPLERNIPALMGLLMFWYSSCLGTDTQAILPYAYHLQLLPAYLQQLEMESNGKSVTKSGERVDYQTGSIVWGTEGTNGQHSFHQLLHQGTTMVPIDFIATLQAHHPLDHQHKFLFANCVAQSQALMTGRDQATSEAEMRAQGMSDEQIAELAPHKVHPGNRPSNTILMDKLTPETLGALIAAYEHKVYTLGVLWNINSFDQWGVELGKLLGTHVATAIDTTDIPSDWDSSTQTLVKKFTEANKNL

SEQ ID NO: 24449 - protein, 457 aa, Staphylococcus aureus subsp. aureus MRSA252
MAIAVLLNRMFRMEHNPLFEYIYQQKEDIDACYFIIPEEDMSSASDLKAQFYRGTLQRFYQSLHAEKLTPYVMSYDDIISFCKENNISEVVIAGDIMSYHLEEYDILHQRSLFNEARIAVTLIRGNHYFKASKTMNQQGEPYKVFTSFSKKWRPYLRHRDVYHYDLKSFEDFVIASPDDLVFDDIAFGSSQIIEQNKWQHFLDQDIQNYESGRDYLPEVLTSQLSVALAYGLLDIIEIFNDLLARYDEDEANYEAFIRELIFREFYYVLMTQYPETSYQAFKSKYRQIKWSQNEADFNAWCEGQTGFPIIDAAIMELTQTGFMHNRMRMVVSQFLTKDLFIDWTWGEKFFRKHLIDYDAASNIHGWQWSASTGTDAVPYFRMFNPIRQSERFDPKALYIKTYLPIFNQIDAKYLHDTQRNESNLFELGIELGRHYPRQMVDHQEKRTQVLAAFKALD

SEQ ID NO: 24450 - protein, 418 aa, Colletotrichum lagenarium
MGDLQGRKVFKVFNQDFIVDERYTVTKELGQGAYGIVCAAVNNQTQEGVAIKKVTNVFSKKILAKRALREIKLLQHFRGHRNITCLYDMDIPRPDNFNETYLYEELMECDLAAIIRSGQPLTDAHFQSFIYQILCGLKYIHSANVLHRDLKPGNLLVNADCELKICDFGLARGFSVDPEENAGYMTEYVATRWYRAPEIMLSFQSYTKAIDVWSVGCILAELLGGRPFFKGRDYVDQLNQILHILGTPNEETLSRIGSPRAQEYVRNLPFMPKKPFPQLFAQANPDALDLLDRMLAFDPSSRISVEQALEHPYLHIWHDASDEPDCPTTFNFDFEVVEDVGDMRKMILEEVYRFRQLVRTVPGSTQAGAQAAGQAGAGQVPIPSGNPGWTSSDPRPQEYVGQGGGLEADLAGGLDHRR

SEQ ID NO: 24451 - protein, 403 aa, Thiomicrospira crunogena XCL-2
MKPKLILVGTGMAGTRFLEHLLEEAPNRYEIEVFNKEPVGGYNRIMLSPVLAGEKTIPDIMTHDEAWFEERRIRLHTGKTVSAIDSVGQVLTTFCGETYFYDKLVIATGSNPFKLEIPGADLPGVVTFRDIRDVENMLSVSQNHNKAVVIGGGLLGLEAAHGLIKRGMDVTVIHRSEVLMNMQMDEESGQLLKSHLEQGSSHALGMKFRLGVNTTEILGQHQVEGVRLDDGSEIATDLVVMSIGIRPNTQLAKQANLDVNRGILVNDFLETSAENIYALGECNEHRGQTYGLVAPLYEQAKILAKRLAGQSVSYTGSITSTMLKVTGVQLFSAGEFKGENGADVIVFRDLAKNIYRKIVLKNNQVIGALLFGDTTGATWLFELLRQKQNISPMRDTLVFGPGY

SEQ ID NO: 24452 - protein, 846 aa, Thiomicrospira crunogena XCL-2
MKQRIVVIGNGMVGHSFLEKLIASEGFENFEVTVFGEEPRKAYDRVYLSSYFSGKTAEDLSLVKPGLYEENGIQLYLKDKVIDIDRTQKTITSESGQKISYDKLILATGSYPFVPPIKGNDRDNCLVYRTIEDLEAIKAAASNGKTGVVVGGGLLGLEAAKALKDLGLDTHVVEFAPRLMPVQLDEGGAGLLKRKIENMGVHVHVSKATQEITDGENCFNKMVFSDGESLETDIVLFSAGIRPRDDLAKQAELAIGPRGGVEINDQCLTSDPNIYAIGECALHNGVIYGLVAPGYAMAQAVVDQLNLTSASFEGADMSTKLKLMGVDVGSIGDPHGNDESALSYVYENGPEEVYKKIVVSSDGQTLLGAVLVGDAEDFSNLLQIMLNDMTLPEHPDSLILPNRDGGGSDLFGPDALPETAQLCSCYDVSKGDIIQAVEAGCCTVSDVKASTQAGTGCGGCVQLVTNVLNNELEKRGVEVNTDLCEHFSHTRQELFHICQVEEIKTFEDLIQKHGRGHGCDICKQTTGNIFASLWNSYALEPDKIPLQDTNDNYLGNMQKDGTYSVIPRVPGGEITPQKLIVLGQVATKYKLYTKVNGGQRIVLFGAQMNDLPAIWKELIDAGFESGQAYAKALRTVKSCVGSTWCRYGLDDSVTMAIDMENRYKGLRSPHKIKMGVSGCTRECAEAQAKDIGLISTEEGWNLYVCGNGGMKPRHADLFATKLTQEEVFRYVDRLLMFYIKTADRLQRTASWLDNLEGGLTYLQEVVIQDSLGIGESLEDQMKRLRETYECDWKRAIANPSFTKRFRSFVNVDNKAEQLFVQERGQIRPATEQDKLNGIAVQVKEIA

SEQ ID NO: 24453 - protein, 505 aa, Rubrobacter xylanophilus DSM 9941
MQTQKRSFEVKNLIGGRWEERDGLDTEPVYDPATGEVIAETPLSTREDVDKAVGAASAAFPDWAATPVVERARVLFRFKMLLEERFEELAALVTLENGKDTKDAAGEVRRGIEVVEFACGMPTLLMGETVRDVARGIDNVSWRYPLGVVAAITPFNFPFMVPLWTAPIAIGAGNTYILKPSERTPLSAQRIGELLAEAGLPEGVFNIVNGAREVVDALCSHPEIKAVSFVGSQPVARHVYELGCAHGKRVQALAGAKNSMIAMPDAVLEKAVPNIISSAYGNAGERCLAGSVLVAVGTEEEQDRLVAAVKEAAARMRVGPGYEEGSELTPLIRDSHRERVRSYVDLAEEEGAEVVLDGREPPREEGFFFGPTILDKVTGEMRVAREEIFGPVLSVVRVGTLEEAIEFTNASPFGNACSIYTESGAAVRHWRERIEAGMLGVNIGVAAPMAFFPFNGIKNSFYGDLHATGKDGVRFFTENKVEIVRFYSDPDDVSAAASYPTEAGA

SEQ ID NO: 24454 - protein, 336 aa, Oceanospirillum sp. MED92
MTQPSKTAVVLVNLGTPDKAEKGAVRRYLKEFLSDDRVVEGKGLRRLLWLSVLNGIILNVRPGKVAKAYASIWEEDSPMRIILDKQVSELQLVLQSHHGEHSPDVFAAMTYGKPGLTPLLHKLSDTGYEKVLLIPMYPQYSATTTAPVYDQVAKFQLQQRRVLDVRIVNSYYDHPKYVEALANQVANFRAENESVDKLILSYHGIPKEYADKGDPYPLQCHKTSELLAEKLGLADTEWMTTFQSRFGPAEWLQPYTDKTLEKLPEQGVKKLQIACPAFSADCLETLEEIAEENREVFMDAGGESYDYIPALNANDGFIELLASLVREQAGDWVGVR

SEQ ID NO: 24455 - protein, 460 aa, Cytophaga hutchinsonii
MALVELVMPKMGESVMEGTILNWLKKPGDRIQQDESVLEVATDKVDTEVPSPFNGILKEIKANQGDVVQVGTAIALIETDVNQAANSEPATTAPAANTNSGTATTQTVQQTAVAEKIPVSTPQTHIPAHTAGAKGGRFYSPLVLNIARQENISLAEVETIAGTGKDGRVTKNDLFDYLQAKKEGKVTAVTQETVVNETPQATEQKAPVAEPVYVNKPASSQSGNVEIIQMDRMRKMIADRMVESKRISPHVTSFVEADVTNIVYWRNRWKNDFMERENVALTFTPIFIEAVVKAIKDYPMVNISIEDDKIIVKKDINIGIAVALPNGNLIVPVIKNADQLNIVGLTKKVNDLAKRARQNKLTADDLSGGTYTVSNVGSFGNLMGTPIIVQPQAAILALGAVVKKPAVIETPQGDTLGIRHMMFLSHSYDHRAIDGSLGGMFVRRVADFLENFDVNRKIFV

SEQ ID NO: 24456 - protein, 1221 aa, Chlamydomonas reinhardtii
MTDSTYDFGAVRDDLTPLEDDCKLLGSLLDDCLRVEIGETMFKKIERIRALAQCASNLSIKGDAGASDMLSHRLAEELMNLDMDEAVPLTRACGHYLNLSGIAELHHGVRRDRATREPNPNSCDAVFARLITEGVDPEELYRAVSEQNVEVVLTAHPTQVNRRTLQYKHTRIAALLQQHDRSDLTAEERRNMVSELQREVAALWQTDELRRQKPTPLDEARGGLHIVEQSLWAAVPQYMRRLSAALKKHTGHDLPLQATPFRFGSWMGGDRDGNPNVTAKVTAHVTALARWMAADLYLREIDTLRFELSMNQCSAAVWKMARRIIAEGHTKRAGVVRAKAAAALHQTATDAASHGGSAASAAAAAAAGGDVVADGTSGGGAAAAAGPAAAAAADDAFTFSRLGRPRPERPSTDVRSVGVLAGGEGAAFPGGMILGTQPVSAHTAAEVSVPHELPGQDVEGGSEMDFNESRRASDAGDLGASQHPMLGGPSAGASAEPTAHGYTTTATAAAAAADGTQPEPEVPGTPSYADPGTPDRLGALPGPFTPGPTPFREAANAAMSTAASGGAGGGGGGGANRAASGLGGDPTFTRRSLMAQRLGTSSVQFARAHEHPGFHPYRIVLGHVRDRLAATRRRMEDLLSGREPAGEAHGGVGAGGGGGGGAAPWYESEDELAEPLMACYWSLWECGGGVIADGRLLDLIRRVYTFGMCLMKLDLRQESTRHAEALDAVTSYLGLGSYLEWSEDQKIEWLTKELQGRRPLIPADMPMSAEVREVLDTFKVAAHLGRDNLGAYVISMTKGASDVMAVELLQREARMQVGAEAGGRGGGGPEDGGSLRVVPLFETLEDLDAAEDVMTRLLTNPWYREHLRAVHGDAQEVMLGYSDSGKDAGRLAANWALYKCQERLVAITKANNVKLTLFHGRGGTVGRGGGPTHIAIQSQPPGSVEGTFRITEQGEMVQAKFGISGVALSQLETYTTAVLLATMRPPSPPRREEWRAVMEMLSRVSCESYRNIVHHSPLFLRYFKHATPEAELGNLYIGSRPARRRNKDASISTLRAIPWIFAWTQNRLILPSWLGIGAALTAAMTQGHLPTLQAMYREWPFFGSTVDLIEMILAKTDPRIAALYEEVLVNDPEEKKLGAELRERLQRCQGAILKVTGHENLLSNNPTLSKLISMRSPFVDPINILQVEVLRRLRQDPNNMRLRDALLISINGIAAGMRNTG

SEQ ID NO: 24457 - protein, 637 aa, Caulobacter crescentus CB15
MAATDCLRSGWGGHLSLLLGRHRDSDDLRSPAINPAAIRVRILRAVPAVCLIVGVAMAMDYIVTILLLNEPAAYVPIATLVISTIIAVPLAYWLAGQRLRLETMHAELKASLDAKQDAIEDAEVALAKYREVDRLYRLLGDNLTDHVALWSPLGERLYSSPSIERITGYTLEEFMALPPAALVGEADFRRVQGIIRSLEPGGEPVSADYESLCKDGSRIWVESTYSLLGDGSGILLVTSRDITERKRLELDIAKALQMAEAASAAKSDFLANMTHELRTPLTAIIGFAEVLRRSRNLNKTAARQVGHILDASNTLLSVVNDVLDFSRLEAGGLELDPAPFDPAAMASSCAGLVAERAEAKGLAVEVRAPRGLKPMNLDGPRLSQVLLNFLSNAVKFTSHGAITVALRQTIDGDQAVLRGEVTDTGIGIAPEHRENIFDRFSQADAAVSRRFGGTGLGLAISRRIIERMDGRIGVDSVEGQGSTFWFEVRGPLADLPTQEAVETSPLDADAGVRLLLVEDNAVNRELICAILEPFGVAIETANDGVAGVEAMRQGHYDLVLMDVQMPMMDGLTATREIRAMEGARGASTPIIAMTANVLPEQVANCMAAGMDDHLGKPISPAKLLEAVARWSGRSHAA

SEQ ID NO: 24458 - protein, 974 aa, Chlamydomonas reinhardtii
MQLSATSGRTSFRVSQDLRTGPANFLSGLRDDDSLLRQVFFSILRHHHPNLAAKVDVIYALSQAWCTSQSDNDFELMVKYVSDLKPEERILVASSFSHMLNLHNLTEEVNSSQIGRAVRLGEMDSPTRDTNHSLLKLTTTNGFTPQQVYDTLCSQTVELVLTAHPTQALRASLLKKYAIVRRELDTLHSKRMSEYEKIETLEAIRAAVQAAWRTDEIRRSKPTPQDEMRSGLSYFSTVIFDVVPVFHRRVDTALEKLGLPRLPLDRALFKFGSWMGGDRDGNPNVTAETTRDVVVLARLEAVNVYFRQVEGLMFDLSIWRCSPEMKELAERLAAAESRDAARVAEERKRRNYVDFWAPIPPTEPFRVVLAHMRDRLYNTRQVLHQCLIHTHMSVRGALEEAGAYVDIEDMARPLKLMYDSLMSTGDESVANARLLDLLRQIRTFGLCMMGLDVRQESTRHTEVMDAVTTYLGLGSYASWDEPKRLAFLLGELQGKRPLMPPGMDMSPEVKEVVRTLRILSELPGDSLGAYIISMAKTASDVLAVVLLQRETGVRPALRVVPLFETLDDLHNAPGTMTTLLGNDWYRGHINGVQECMIGYSDSGKDAGRLAAAWALYETQEKLVEVAAGCGVRLVLFHGRGGTVGRGGGPTHMAIRSQPSGTINGHLRVTVQGEIIEQQFGEKEVCFRTLDLYTSAVLEAALDPPPAPAQEWRDLMSLLATESCDMYRSVVYRTPEFYDYFMQSTAASELGRLNIGSRPSSRKSGGIETLRAIPWIFAWTQQRLHLPVWLGIGEALEAAIDKGYGPVLQDMYANWPFFTSTLDLVEMVLAKADSRLSAFYERTLVDSSLAPLGQRLRELLAKTQQNILIVVRKSVLLEGNTPSQMSTPNLDEKIRLRSPYVAPLNVLQALSLQGLRKFRDGGDTEYNPSDPEIIDLLSRDPHKKGEGAQHPFVSAMDDCLMITIKGIAAGMQNTG

SEQ ID NO: 24459 - protein, 433 aa, Solibacter usitatus Ellin6076
MALVVIGGTAAGMSAAARARRIDPRLEIIVLEKGPVISLGACGLPYFVEGKIREAKDLTVFTPERFRKERNVDVRTGARVISIAHPRREVLLESGARVAYEKLVIATGARSESLGIAGDTQEHVFHMQTLEDAQRMRGFVRERKPKRAVVVGAGYIGVEAADALRRNGLQVTILEFSPYALLRADDAFTAEVRKQLERHRVELKTGVRVTAIEPDSIAGVPCDMVVIAAGFRPAATLAADAGVELGRSGAIRTDDRMETNVRGIFAAGDCAEVQHLVSGRPTWIPLGTTANKCGRVAGANAAGARERFPGIVGTSIVGIFGMGFATTGFSAAEARAEGFTPVTARIEALSRPRYYQGVKTIVELVADKATRRLLGGSIIGEDGTAGRINVLATALTARLRVDDFEQLDLAYSPPFAPVWDPVLIAAQQLIKEL

SEQ ID NO: 24460 - protein, 385 aa, Streptococcus pyogenes M49 591
MKFTEFNLSQDIQSAVVTAGFEKASPIQEMTIPLALEGKDVIGQAQTGTGKTAAFGLPTLNKIRTNENIIQALVIAPTRELAVQSQEELFRFGREKGVKVRSVYGGSSIEKQIKALKSGAHIVVGTPGRLLDLIKRKALILDHVETLILDEADEMLNMGFLEDIEAIISRVPADRQTLLFSATMPAPIKQIGVKFMKDPEHVQIKNKELTNVNVDQYYVRVKEQEKFDTMTRLMDVNQPELSIVFGRTKRRVDEITRGLKLRGFRAEGIHGDLDQNKRLRVIRDFKNDQIDILVATDVAARGLDISGVTHVYNYDITQDPESYVHRIGRTGRAGKSGESITFVSPNEMGYLSMIENLTKKQMKPLRPATAEEAFQAKKKVALKNH

SEQ ID NO: 24461 - protein, 277 aa, Exiguobacterium sibiricum 255-15
MAVVIDGKQVAQSYRLKLKEEVARLKEERIQPKLTVILIGEDPASQSYVRGKEKAAQEIGMDSDLIRLPEETKESELLHLIERLNADASVHGILVQLPLPKHIDESKVIFAIAPEKDVDGFHPVSVGKMMIGEPTFLPCTPNGILHLVKEMNVPIAGRHVVVVGRSQIVGKPVGMLFLNESATVTYCHSKTADLGAMTRQADILIVAVGVPKLITADMVKPEAVVIDVGVNRVDGKLVGDVEFEAVKEVASMITPVPGGVGPMTITMLLHNTIEAAK

SEQ ID NO: 24462 - protein, 447 aa, Corynebacterium efficiens
MTVDEQVSNYYDMLLKRNAGEPEFHQAVAEVLESLKIVLEKDPHYADYGLIQRLCEPERQLIFRVPWVDDNGQVHVNRGFRVQFNSALGPYKGGLRFHPSVNLGIVKFLGFEQIFKNSLTGLPIGGGKGGSDFDPKGKSELEIMRFCQSFMTELHRHIGEYRDVPAGDIGVGGREIGYLFGHYRRLANQHESGVLTGKGLTWGGSLVRTEATGFGTVYFVQEMIKAEGETLEGKKVIVSGSGNVATYAIQKVQELGAVVVGFSDSSGWVSTPNGVDVAKLREIKEVRRARVSSYADEVEGAEYHTDGSIWDLTADIALPCATQNELDGDNARTLADNGCRFVAEGANMPSTPEAIDVFRERGVLFGPGKAANAGGVATSALEMQQNASRDSWSFEYTDERLHRIMKNIFKSCADTAKEYGHEKNYVVGANIAGFKKVADAMLAQGVI

SEQ ID NO: 24463 - protein, 482 aa, Flavobacteria bacterium BBFL7
MSKYTEEELEKELQNKEYEYGFYTDIKSDTIPIGLSEDVIRIISAKKNEPQWMLDWRLQAYRVFIEMEEPDWANVNYEKPDLQAISYYSAPNSKPKYDSLDEVDPELLETFKKLGISIDEQKKLAGVAMDIVVDSVSVATTFKKTLAEKGIIFCPISEAIQEHPELVKKYLGTIIPQSDNYYAALNSAVFSDGSFCYIPKGVKCPMELSTYFRINEGGTGQFERTLVIADEGSYVSYLEGCTAPSRDENQLHAACVELIALDDAEIKYSTVQNWYPGNAEGKGGVFNFVTKRGLCENNAKISWTQVETGSAVTWKYPSCVLKGDNSVGEFYSIAVTNNFQQADTGTKMVHLGKNTKSTIISKGISAGKSQNSYRGLVKINSRATNARNFSQCDSLLMGNECGAHTFPYIENSNSTSKVEHEATTSKIGEDQIFYCNQRGIDTEKAIALIVNGFSKEVLNKLPMEFAVEAQKLLEISLEGSVG

SEQ ID NO: 24464 - protein, 496 aa, Apium graveolens
MAGSGVYADIIEGDVFKYYSDGEWKKSSSGKSVAIINPTTRMTQFKVQACTQEEVNKAMETAKKVQKQWAKTPLWKRAELLHKAAAILKEHKAAIADCLVKEIAKPAKDSVTEVVRSGDLVSYCAEEGVRLLGEGKFLVSDSFPGNERTKYCLTSKIPLGVILAIPPFNYPVNLAVSKIGPALIAGNALVLKPPTQGAVACLHMVHCFHLAGFPKGLISCITGKGSEIGDFLTMHPGVNCISFTGGDTGIAISKKAGMVPLQMELGGKDACIVLEDADLDLVASNVIKGGFSYSGQRCTAIKVILVMQSVADTLVEKVNAKVAKLTVGPPEDNSDITPVVSESSANFIEGLVKDAKEKGATFCQEYKREGNLIWPLLLDNVKPDMRIAWEEPFGPILPVIRINSAEEGIHHCNASNFGLQGCVFTRDINKAMLISDAMESGTIQINSAPARGPDHFPFQGLKDSGIGSQGITNSINMMTKIKTTVINLPSPSYTMG

SEQ ID NO: 24465 - protein, 642 aa, Glycine max
MSSATKLVSKSPLDKCENQIKGFASGIGAANSTVLPAMSSWVRCVSGNLPQDTISSCSGNLANRKVEASNDPQALVSGVACTERSISTRSGEAENSSDVCSNGAFVPSETNNHNIGGNSKTSFMGNDQDTAAPSVNTGFLELSRQHDFNIDTAVGINSNGDVHGLCLGLSSISINDHLEDSYFTPDSDRLPFTLNSINSSLGQHLQQDNEYSTEQSSTPAFWEDIIVDDILNIDSEQQKFSKDINCLSSSGLHSTCLPQNVNQSSHQPFKQDQICSQNHFRKPSTESFNELLETGHVKHVESKDNGTGVDNMVASDMGENNIISDILSLELDAWEGSLVNLLGERDELYRPFKAATLRKVQDKNQSRFSFARQDDFMNEASNLQQPFAVTGHGPEGNFSSGGLIGNKDTVTGKYPHVFPSGNSVSSDKFVGSQSFVPSNFSMSKAHSSGPPGFSLSSRIPPGFSCGRVEQDSNTSVKHLQQQYVSSTGNIGSMGDEFNNLAVLNFGKGMLAERLNNASFDMRQTSLPQFIPGEDDPRLKLLMQQSTPTQNLRFPDHVGNRFLPQNDSYRISSRFLDQFPPNSPSIYEQLHSQQFSSNTLPSNNQWGGWNDAKNFSDLSISEVLNNERVGFSNFMPNYENIKF

SEQ ID NO: 24466 - protein, 196 aa, Pisum sativum
MAVSSCQSIMSNSMTNISSRSRVNQFTNIPSVYIPTLRRNVSLKVRSMAEGEPKEQSKVAVDPTTPTASTPTPQPAYTRPPKMSTKFSDLMAFSGPAPERINGRLAMIGFVAAMGVEIAKGQGLSEQLSGGGVAWFLGTSVLLSLASLIPFFQGVSVESKSKSIMSSDAEFWNGRIAMLGLVALAFTEFVKGTSLV

SEQ ID NO: 24467 - protein, 393 aa, Neisseria meningitidis MC58
MIIDVKVPMLSESVSEGTLLEWKKKVGEAVARDEILIDIETDKVVLEVPSPQAGVLVEIVAQDGETVVADQVLARVDTAATAAAEAPAAAPAEAAPAAAPAATQNNAAMPAAAKLAAETGVDVNALQGSGRDGRVLKEDVQNAAAKPAGAAAPAVALPAGARPEERVPMSRLRARVAERLLASQQENAILTTFNEVNMKPIMDLRAKYKEKFEKEHGVKLGFMSFFVKAAVAALKKYPVVNASVDGKDIVYHGYFDIGIAIGSPRGLVVPILRDADQMSIADIEQAIVDYAKKAKDGKIAIEDLTGGTFSITNGGTFGSMMSTPIINPPQSAILGMHATKERAVVENGQVVVRPMMYLALSYDHRIIDGREAVLTLVAIKDALEDPARLLLDL

SEQ ID NO: 24468 - protein, 444 aa, Oryza sativa
MPEGGIPACFRGAPGGGAGGGGGGGVGVAGQSSGGVGTSLATSVYETRLGVAALSWSRAALGLSLRVVLRVAGGAGAGAWAAASSSAASDYGCYDEGAECYGGEEEEEEEEATVAVRVRPWLLWRRRGSKRFRVRDRRVDLAWDLTRARFACPGSPEPSSGYFVAVVVDGEMALVAGDMAEEAYRKTKARRGPGPDAVLISRREHVSMRDAGHGRGHKTFVNVRGKEREISVDLVSRGHGKDRDKDKDKERDKADVGMSVTVDGERVLHIRRLRWKFRGTEKVDLGGGDGVQVSWDLHHWLFPNRDTAPADASAVTPPPQPAHAVFIFRFELADIAGDDRDSAEVKDEHLLENAGSGGGGGAWAGYLGRWGRGDWSESSSNGENRRKRGQARRLAKASSSSSASVASSSASWASGSTVMDWASPEEAELQRGHGFSLLVYAWKC

SEQ ID NO: 24469 - protein, 261 aa, Rhodopseudomonas palustris CGA009
MTDTPYVLRADDDGVTTLTLNRPQARNALSQGMLEALRAALAEIAADASVQVLIIAGSGPAFCAGHDLKELRAGNYAPDYVDALFAACAEVMQAIVDLPKPVIARVHGVATAAGAQLVASADLAFAADDARFATPGVNIGLFCSTPMVALSRNLTRKHAMQMLLSGDLIDADTAFRFGLINEVVPAAELEQRTLAFARQIAGKSPLTLAIGKEAFYRQAELSLADAYAYTSQVMAKNLQAEDAKEGIDAFLGKRQPVWCGR

SEQ ID NO: 24470 - protein, 72 aa, Oryza sativa
LREKIVAGERKFEDVATEESDCNSAKRGGDLGPFERGKMQKAFEKAVLALKVGEISDVVDTDSGVHIILRTA

SEQ ID NO: 24471 - protein, 188 aa, Zea mays
PRVRENCRKRSKHIAFYTIDCKDSCGEIFVDLQKHSYVQKKPGGATEQQELTYSSLQEAISVPWNSLPKKTAKLYFAMRVLEDYELSEGRSPGETTLSDIDAVLARRKDMCDKMSLNESRIPTTLVERLLAAGKKEHPPVCAILGGILGQEVIKSISCKGDPVKNFFYFDVADGKGVIEDIPPPPPAK

SEQ ID NO: 24472 - protein, 540 aa, Zea mays
MPDWRVREFEGKFTDEFAHSNNNKHESGVEAPGVTSSKKLKHAVAGEKIQGVIPGINSSDPQKCNSENIQHENRIVSQNINSAGDCIGDCKDSSNAFSSREENTIAETRCPTDDWNSCQFALSNGSSILNNHIAPQDSLTYGDNDLNYIDWPGIDNFEDVDTLFRRSDFTYDPQQLENTDGLSWLPSSDAVYSSDVALQQGFDSSYSDYDILDDLSAFQCAEDKSLPSVGPSSDLCDNQFNDTYLFSEQKNANAYGEQIYQEDVMELLPTDQICSGHENIDMLQGGNQYSSEHTIQGIEDKKFSIASTSQLSSSQNLLKQRHHLDSNSPSNITYEAYEEKFGPSSGSFAQRNSKVQKKTMNMQPTQPTNDNVMNRHPQTLTRSASYPCENNESERRGLGKRTLGDPQVTMGTSMVVDGSFVSSMSSDISVEESSFRQLQNAVSQLDVQTKLCIRDGLYRLARSAQHRQVIPNMMSSNEDNPDIKDLQNAETLRKFVDPRSIETQTNPIDRSIALLLFHQSSDHAAVAVDDASSLKPPAGV

SEQ ID NO: 24473 - protein, 365 aa, Pythium irregulare
DNGSGMCKAGFAGDDAPRAVFPSIVGRPKHLGIMVGMDQKDAYVGDEAQSKRGVLTLKYPIEHGIVTNWDDMEKIWHHTFYNELRVAPEEHPVLLTEAPLNPKANRERMTQIMFETFNVPAMYVNIQAVLSLYASGRTTGCVLDSGDGVSHTVPIYEGYALPHAIVRLDLAGRDLTDYMMKILTERGYSFTTTAEREIVRDIKEKLTYIALDFDQEMKTAAESSGLEKSYELPDGNVIVIGNERFRTPEVLFQPSLIGKEALGIHDCTFQTIMKCDVDIRKDLYCNIVLSGGTTMYPGIGERMTKELTALAPSTMKIKVVAPPERKYSVWIGGSILSSLSTFQQMWISKAEYDESGPSIVHRKCF

SEQ ID NO: 24474 - protein, 139 aa, Xerophyta humilis
MAASMMSSLALKPATPVFERSSVKGLPSLVRSSSSFKVQASGGKKIKTATPYGPGGGMNLPAGLDASGRKQKGKGVYQFVDKYGANVDGYSPIYSPDEWSPSGDVYVGGTTGLIVWAITLAGLLGGGALLVYSTSALAQ

SEQ ID NO: 24475 - protein, 306 aa, Staphylococcus aureus subsp. aureus MRSA252
MIYTVTFNPSIDYVIFTNDFKIDGLNRATATYKFAGGKGINVSRVLKTLDVESTALGFAGGFPGKFIIDTLNNSAIQSNFIEVDEDTRINVKLKTGQETEINAPGPHITSTQFEQLLQQIKNTTSEDIVIVAGSVPSSIPSDAYAQIAQITAQTGAKLVVDAEKELAESVLPYHPLFIKPNKDELEVMFNTTVNSDADVIKYGRLLVDKGAQSVIVSLGGDGAIYIDKEISIKAVNPQGKVVNTVGSGDSTVAGMVAGIASGLSIEKAFQQAVACGTATAFDEDLATRDAIEKIKSQVTICVLDGE

SEQ ID NO: 24476 - protein, 148 aa, Sesbania rostrata
MGFTEKQEALVNASYEAFKQNLPGNSVLFYSFILEKAPAAKGMFSFLKDFDEVPQNNPSLQAHAEKVFGLVRDSAAQLRATGVVVLADASLGSVHVQKGVLDPHFVVVKEALLKTLKEAGGATWSDEVSNAWEVAYDELSAAIKKAMS

SEQ ID NO: 24477 - protein, 169 aa, Arabidopsis thaliana
  misc_feature (108)..(108): Xaa can be any naturally occurring amino acid
  misc_feature (114)..(114): Xaa can be any naturally occurring amino acid
  misc_feature (120)..(120): Xaa can be any naturally occurring amino acid
  misc_feature (127)..(127): Xaa can be any naturally occurring amino acid
  misc_feature (130)..(130): Xaa can be any naturally occurring amino acid
  misc_feature (136)..(137): Xaa can be any naturally occurring amino acid
  misc_feature (140)..(140): Xaa can be any naturally occurring amino acid
  misc_feature (143)..(143): Xaa can be any naturally occurring amino acid
  misc_feature (148)..(148): Xaa can be any naturally occurring amino acid
  misc_feature (150)..(150): Xaa can be any naturally occurring amino acid
  misc_feature (162)..(162): Xaa can be any naturally occurring amino acid
  misc_feature (164)..(164): Xaa can be any naturally occurring amino acid
  misc_feature (167)..(167): Xaa can be any naturally occurring amino acid
MASSMLSSAAVVTSPAQATMVAPFTGLKSSASFPVTRKANNDITSITSNGGRVSCMKVWPPIGKKKFETLSYLPDLTDVELAKEVDYLLRNKWIPCVEFELEHGFVYXREHGNXTPGYYXWTGTWTXWKXSIVRIXXDFXLKXFKGSXKXSKKGFPGAFIRXNXFCXNR

SEQ ID NO: 24478 - protein, 459 aa, Methylococcus capsulatus str. Bath
MSIPRLGFLLMALPLAAPAAPPQVHEFTLANGLRVLVQEDHRAPVAVSQVWYKVGSSYEYGGITGVSHMLEHMMFKGTKKHPPGEFSRIIAANGGSENAFTGQDYTAYFQTLERSRLPVSLELEADRMRNLRLLQDEFVKEQQVVIEERRLRTEDQPHARMEEHFHAVAFTDSPYRNPVIGWPEDVAGLTLDDLSAWYQRWYAPNNATLVVVGDVAPGEVFELARKHFGPLKPAKLPALKPQGEVPQLGLRRMVVKVPAKLPHLEMGYKVPSLKTAAAEWEAYALEVAAGILDGGNSARLTSRLVRGRQIAAGVGAGYDLYARLSPLFSLEGTPAQGKTVAELEAALLEEVRRLREEPVAEDELARVKAQVLASNVYQRDSVFYQAMQLGMAETVGLGWRKVEEYVDKINAVTAEQVREVARKYLIDDGLTIAHLEPQPIPEGAKIQEGPEGMGGGHVR

SEQ ID NO: 24479 - protein, 363 aa, Salmonella enterica subsp. enterica serovar Paratyphi A str.
MSKNYHIAVLPGDGIGPEVMAQALKVMDAVRSRFDMRITTSRYDVGGIAIDNHGHPLPKATVEGCEQADAILFGSVGGPKWENLPPESQPERGALLPLRKHFKLFSNLRPAKLYQGLEAFCPLRADIAANGFDILCVRELTGGIYFGQPKGREGSGQYEKAFDTEVYHRFEIERIARIAFESARKRRRKVTSIDKANVLQSSILWREIVNDVAKTYPDVELAHMYIDNATMQLIKDPSQFDVLLCSNLFGDILSDECAMITGSMGMLPSASLNEQGFGLYEPAGGSAPDIAGKNIANPIAQILSLALLLRYSLDANDAATAIEQAINRALEEGVRTGDLARGAAAVSTDEMGDIIARYVAEGV

SEQ ID NO: 24480 - protein, 495 aa, Candidatus Kuenenia stuttgartiensis
MSIKRYQHLIICVVCFVCVFSINNFRTLCAEHQKEVPPSSGKPKSEGARILSKFKFAPLGFNPPKAERLVLDNGVILYLLENHDLPIINVTARIRTGAIYEPAEKAGLASLTGDVMRSGGTVSMPPDKMNEELEFIAASVETFIGRESGGASLSVLKKDMDKGLRIFADVLRNPAFPEDKIRMEKDETIESIRRENDRPQQIAGREFRKILYESSHPYSRRVDGTLESIEKITRNDMIAFHKKFFRPNNIIIGISGDFDRKAMISKLNEVFKGWEKGKNIIPDIPKVKYELNKSVNYVYKDINQANVIMGHLGIHRRSPDYFPIEIMNFILGGGGFNARITSRIRSDEGLAYSAFSSFQTSQDLGMFYVMCQTKLESTNRAISIALEEIERMRTTPVDNEELTHAKETFLNQFVFRFTTSASIVAQMVDIEYEGLPLDYLETYENNIQAVSVEDIKRVAQKYLHPDKICILVVGNKDKFDKPLDTFGKVNEVLLE

SEQ ID NO: 24481 - protein, 550 aa, Oryza sativa (japonica cultivar-group)
MALLLRHSPKLRRAHAILGCERGTVVRHFSSSTCSSLVKEDTVSSSNLHPEYAKKIGGSDFSHDRQSGKELQNFKVSPQEASRASNFMRASKYGMPITANGVHSLFSCGQVVPSRCFSSGADLPPHQEIGMPSLSPTMTEGNIARWVKKEGDKVSPGEVLCEVETDKATVEMECMEEGYLAKIIHGDGAKEIKVGEIIAVTVEEEEDIGKFKDYKAPSSAESAAPAESKPQSEPTEPKKEKEQPKAPEPKATKTEESFLSEDRTFSSPIARKLAEDNNVPLSSIKGTGPDGRILKADIEDYLASVAKGAKKETAAAPGLGYVDLPNTQIRKVTANRLLHSKQTIPHYYLTVDTRVDKLIKLRSELNPLQDTSGGKKISINDLVIKAAALALRNVPECNSSWMNDFIRQYHNVNINVAVQTEDGLFVPVIRDADKKGLATIADEVKQLAQRARDNSLKPEDYEGGTFTVSNLGGPFGIKQFCAIVNPPQSAILAIGSAEKRVIPGAEGQFEVGSFMSATLSCDHRVIDGAIGAEWMKAFKGYIENPTTMLL

SEQ ID NO: 24482 - protein, 523 aa, Salmonella enterica subsp. enterica serovar Paratyphi A str.
MSQQVIIFDTTLRDGEQALQASLSAKEKLQIALALERMGVDVMEVGFPVSSPGDFESVQTIARTIKNSRVCALARCVEKDIDVAAQALKVADAFRIHTFIATSPMHIATKLRSTLDEVIERAVYMVKRARNYTDDVEFSCEDAGRTPVDDLARVVEAAINAGARTINIPDTVGYTMPFEFAGIISGLYERVPNIDKAIISVHTHDDLGIAVGNSLAAVHAGARQVEGAMNGIGERAGNCALEEVIMAIKVRKDIMNVHTNINHHEIWRTSQTVSQICNMPIPANKAIVGSGAFAHSSGIHQDGVLKNRENYEIMTPESIGLNQIQLNLTSRSGRAAVKHRMEEMGYKDTDYNMDHLYDAFLKLADKKGQVFDYDLEALAFINKQQEEPEHFRLDYFSVQSGSSDIATASVKLACGEEIKAEAANGNGPVDAIYQAINRITGYDVELVKYDLNAKGQGKDALGQVDIVVNHHGRRFHGVGLATDIVESSAKAMMHVLNNIWRAAEVEKELQRKAQNKENNKETV

SEQ ID NO: 24483 - protein, 132 aa, Arabidopsis thaliana
  misc_feature (118)..(118): Xaa can be any naturally occurring amino acid
  misc_feature (122)..(122): Xaa can be any naturally occurring amino acid
  misc_feature (128)..(129): Xaa can be any naturally occurring amino acid
MASSMFSSTAVVTSPAQATMVAPFTGLKSSASFPVTRKANNDITSITSNGGRVSCMKVWPPIGKKKFETLSYLPDLSDVELAKEVDYLLRNKWIPCVEFELEHGFVYREHGNNSRILXMDGXWTMWEXXLFG

SEQ ID NO: 24484 - protein, 627 aa, Pseudomonas aeruginosa
MCGIAGFWNITGTLLGDNARVARQMAAAIHHRGPDESGIWYEAPRAPILVHARLAVLELSPAGSQPMHSDCGRYVLIYNGEIYNHLALRARLSEAGVTHSWRGGSDTETLLACFAQWGVESTLKLTVGMFALALWDRQEKTITLARDRMGEKPLYWGWQNGVLFFASELKALKEHPLFRGDIDRDALALFLRYGYVPAPYSIYKGIGKLRAGSYLVLSERSLNETCEPAAYWSANAAIEEALSNPFQGTDAEAVDLLESQLRTSISDQMVSDVPLGAFLSGGVDSSTVVALMQQQSSRPIRTFSIGFDEPGYDEAVYAKAVAEHIGTDHTELYVNSKDALDVIPSLPKIYCEPFGDSSQIPTLIVSGLARQQVTVALSGDGGDELFGGYNPYQFTPRVWRMLERFPHSMRRFASAFAQDLPLPDKLGKLRDVFASRTAEELFYRLNSHWRNHEYPVIGAKGHTALLDTPERWPRVDSFQHWMMAMDVQGYMPDDILVKVDRAAMANSLETRVPLIDHRVFELAWRMPLHMKIRNGKGKWLLREVLYRHVSRELIERPKKGFSVPVSDWLRGPLKEWAESLLDERRLQQEGYLDSRLIRRIWNDHLAGRRDHSRRLWSVLMFQAWLES

SEQ ID NO: 24485 - protein, 468 aa, Nostoc sp. PCC 7120
MKYQIQRPNPLKTHPFLQKLQWIADPVEYMKKASLQHPDMFTAEVIGFGDTVVFVSHPQGIQTLFANDRKKLVAVGEANRILYPLVGNNSMFLLEGVKHKQRRQLLMPSFHGERMREYGHLIRNITENLFSQLQQDVTFSALTAMREISMQVILQAVFGFYEGERCQQFKHLLPIFLSELFQSPLASSILFFPSLQKDLGNLTPWGRFVRQREKIDKLLYAEIAERRQEINSDRIDILSLLISARDETGDSMSDKELRDELITLMISGHETTGTAMAWSLYWILQTPEVFQRLIQELDSLGDSPDPMSIFRLPYLTAVCNETLRINPVAMLTLPRVVKEPIELLGNRLETSTTVVGCIYLTHHREDLYPESKLFKPERFLKREFSQYEFMPFGGGVRGCIGQALAMFEMKIVLATVLSRYQLALADRKPERPQRQGFTLTPTNGVKMLITGQHKRQNYSMAASTTFNA

SEQ ID NO: 24486 - protein, 301 aa, Prosthecochloris aestuarii DSM 271
MRNDKWDAGRIARQDGRIALISGANSGIGFDTAVVLAGKGAEVVLAVRDIGKGEEACKAIRKDFPDAALQVMLLDLADLSSVRRFAYAFLARYSRLDLLINNAGVMVPPQRCVTVDGFELQFGTNHLGHFALTLLLSGLLKQTPSSRVVTVSSGAHYFGKLDFSDLNWQRRPYRKWQAYGDSKLANLYFTRQLQRRLAEDHASTIAVAAHPGWSGTNLQRYEPLAMLMNRFFAQTSAMGALPELYAATARDVAGAEYFGPGGIGGLRGYPVRCSSSRLSEDQGVGQRLWEVSEVLTGVFWQ

SEQ ID NO: 24487 - protein, 1000 aa, Methanosarcina acetivorans C2A
MCGLKKRLFIDCYEGESIEEIRGKKRADREETEVQEKSHLEEKLVRLEWQADSAVTGLITMDFDGTLSYVNPFFVRMWGYGSAEEPPGRQVSELWASPAEFLQAERECREKGEWIGELQARRRDGTFFYVHTSLSLIRNREGLPLGISGSFVDITRLKQVEEELRNRTLELSEAKARLDLALEATEMGTWDWDVLTNGMTWDDNLFRLVGISREEFLQTHDSLLELSNRILSPEDNRRMLEVMQAVADGKTDSYEFEHDVLRPDGTVRHFLVKGRAHRDSEGKLLRVTGTTTDITDQKIAEDALRRSEANLARSQAMAHLGSYSFDAHTGEIYWSEELKTIWDYDPGPNYSFETVISRIHPEDRKRILEALKNAGQGKHPFNSEYGILKPDGSIRYVHDQGEISLDGNGVPVRMFGTLQDITHRKLMEEQLLKAKEAAESANKAKGDFLANMSHEIRTPMNAVLGMLEMLLETSLTDEQREYLQLAHASAESLLSIIDDVLDFSKIEQNKLELEQISFELESLISHIINLLSGKAGSKGLKLAFHIEKDLPSTFIGDPVRLKQVLFNILGNAIKFTKKGEIALSVEVYMPSERNSGLSNSDFPEEVALLFKVKDTGIGIPPEKLSQIFDPFIQADASVTREYGGTGLGLAISSQLVELMEGRIWVESEVGKGCTFYFTVRVKRGESSENYGQGNNIPEESLLVCMEAKESYGNGITSGESLNVLFAEDHPINQKLILGLLEKKGHKLTLVTSGKDALDALSRRDFDAVLMDIQMPGMDGLEATRRIRDPSSGVRRHNIPIIAFTARALKEDREKCFEAGMNYYISKPLKKEKLLNILEDIRVGKNTREKTARERTVQDRIVQEKNIQERAATPLDLESIAFDFPEDQVFNLEEVLERTEGDEVLLKEMVKIFLGMAPELLDSINSALRKGEAEALRENAHILKSAAGSIGANRVFRVAYYLEQVGRRDRMELASDKFEEIKARFKELEPVLVRYLEKQIC

SEQ ID NO: 24488 - protein, 310 aa, Bacillus clausii KSM-K16
MIYTCTMNTAIDLYVQLEKLMPDKVNRTMDEDYQPNGKGVNVSIMLKRYGIESVATGFIAGFTGEFIQDSLQKLNIKTDFVHVDGITRINVFMNADKEYKIVNQGPSISKEKQRLLIEKIGQLEAGSTLIVSGSLPVGVSEAILAEIGAICKMNGVHYVLDTSISSLDGVLASQPYLLKPNEEELAGFFQVKHRLSEKELVYYGYELIKRGAQQVLISRGKDGSIYLNKDTCLFATSPKGKVLNTACAGDALLATFIGHIQQGTPVEDALAKATATGASTAFSKGLSDLKDVPMLLDQVQITRRGFTWQK

SEQ ID NO: 24489 - protein, 153 aa, Lupinus luteus
GALTESQAALVKSSWEEFNANIPKHTHRFFILVLEIAPAAKDLFSFLKGTSEVPQNNPELQAHAGKVFKLVYEAAIQLEVTGVVVTDATLKNLGSVHVSKGVADAHFPVVKEAILKTIKEVVGAKWSEELNSAWTIAYDELAIVIKKEMDDAA

SEQ ID NO: 24490 - protein, 552 aa, Coccidioides immitis RS
MVDSVLIVLSNRLGLTQLALKSTAIDKFLYLSAIRKNNVHLFYRLVVDHLKALTPLIYTPVVGEACLKWSEIYQQPEGMYISYEDRGNIAGVIQNWPQPNVEITCITDGSRILGLGDLGINGMGIPIGKLALYTACAGIRPEVTLPLTLDLGTSNKSLREDPLYMGSRREKVTPEQELEFLDELMTALTERWPGIVIQFEDFKNPFPALARYRHNYTCFNDDIQGTGAVILAGVMNAVKKSGIPPQNHKAVFLGAGSAGVGVAKQIVDFFVREGMTEDEARACFYLVDTKGLVTADRGDKLAAHKVYFARTDNGGRQYKTLEEVVDYVRPTMLMGLSTLGGVFTPQILKKMSDWNKKPIIFPLSNPSANSECNFESAVVNTDGRCLFASGSPFQPFSYTNHAGETKTHYPGQGNNMYVFPGIGLGTILSKAVEITDTMIYASAQALSTALTSEEIEQGLLYPDITRIREVSVLVARGVIRAAQEAKVDRETGIRTFSDSDLDAWIKSRMYNPHGEVQSLEREVGLLLSSIGRLNVNREEGSAAHEVNGDSKL

SEQ ID NO: 24491 - protein, 61 aa, Oryza sativa (japonica cultivar-group)
MAARGQKAVAALPHLVKSLRSEPVSNAPRLRHLPSLRRTFSLYDQINLIDSVPEDQLRFQS

SEQ ID NO: 24492 - protein, 354 aa, Exiguobacterium sibiricum 255-15
MKHRIEALQTALKERDLPGLLVTKAENIRYISGFTGSSGACLVTAEQAYFVTDFRYTEQAADQVKGMEIVQIERSIPETMGELMAGARVRAVGVEKDAMTLGAFEAFDQASSVELVPTTGIVENLRLIKDSSEIKMIKEAVDLADATFHHILTYIQAGRTELEVSNELEFFMRKHGATSSSFDTIVASGYRSALPHGVASSKVIQSGELVTLDFGALLNGYVSDITRTVAVGPISPELQTIYDTVLKAQLAGVDGLRPGITGIEADALTRDIIKDAGYGEYFGHSTGHGIGLEVHEGPGLSFRSETKLQPGMIVTVEPGIYVPQVGGCRIEDDVLITESGREILSSSPKELITL

SEQ ID NO: 24493 - protein, 373 aa, Oceanospirillum sp. MED92
MKYFKLPDLGEGLPEAEILEWHVQEGDKVQTDQIVVSVETAKAIIEVPSPQSGVIAHLFGQAGDTIHTGEPLLEFSGEDEEDTGTVVGKIPVASQQTQSGDDFIIGSPTSGTVSESVKATPAVRALAKRLNIDLAQVRGSGRNGSVTPADIEKASKMDQLHGKAEPLRGVRKQMALAMSRSHAEVVPVTINEDANIHAWPKGTDITLRLIHAIAYACAKEPAFNAWFDGQSLSRRIHQKIDLGVAVDTEQGLFVPVLRDIGSRDLTDIRSGLDNLRNDVKARTIPPQELQGATITLSNFGTIAGRYANPIVVPPQVAIIGAGVIREKILAIDNEMKIQKILPLSLTFDHRALTGGEAARFLQALLTDLSLSEV

SEQ ID NO: 24494 - protein, 118 aa, Oryza sativa
  misc_feature (73)..(73): Xaa can be any naturally occurring amino acid
EPWPVHSWCWSAVVAALLLAAPHAAVAITCGQVNSAVGPCLTYARGGAGPSAACCSGVRSLKAAASNTADRRXACNCLKNAARGIKGLNAGNAASIPSKCGVSVPYTISASIHCSRVS

SEQ ID NO: 24495 - protein, 82 aa, Oryza sativa
MAAEKGSPLLKFGEWDVNDPASAEGFTVIFNKARDEKKTGGNSQGQDLPAKSEHPSGQGLYPAKPNSSKKWFCCIHPTAAES

SEQ ID NO: 24496 - protein, 132 aa, Solibacter usitatus Ellin6076
MKNIFVGNLDFNASEEGVRSLFERYGQVNSARIMTDRETGRSRGFAFVEMENEGEADQAISALNGYTLDGRALNVNEARPKPDRGFGGGGGGGRGFGGGGGGGRPGGGGGGGGRRPGGGGGGGGGNRREPRW

SEQ ID NO: 24497 - protein, 483 aa, Rhodopseudomonas palustris CGA009
MLMPSDPGLLAERCLIGGKWCGEPVDAVFNPATGERIGAVPRFGTDEAEEAVRAAEIAFRQWSKLLAKQRATMLRAWFDQIIANRDDLALLLTREQGKPLAEALGEIDYAASFVEFYAEEARRIYGETIPSHRADARTMVIRQPVGVVAAITPWNFPAAMITRKVAPALAAGCTVVIKPAPETPLTALALGVLAQRAGFPPGVLNIITGDAPAIGKAWTEHPTVRAISFTGSTEVGKILMRQAASTVKKVALELGGNAPFIVFDDADLDAAVEGVIASKFRNMGQTCVCANRIYAQDGIYDAFVEKLTAKVATLQVGNGVDAGVTQGPLITTEAIAKVERHVSDAVAKGAKVVLGGKRHKLGRTFFEPTVLAGVTTAMLITREETFGPVAPVYRFTDEADVIAQANDSPFGLASYFYARDLGRVFRVAEALESGMVGVNSALLGADVVPFGGVKQSGLGREGSRHGIEEYVETKYILLGGLDR

SEQ ID NO: 24498 - protein, 106 aa, Triticum aestivum
MPLLPPAAPPLPLSSHRLGLPFLTLPSPAGRPLRRGDLAIRMGGGPRTFPGGVSKWQWKRMQARKAKQLLKARLARERQLYEMRKRAELRDAVVHLERPWDPDSAP

SEQ ID NO: 24499 - protein, 395 aa, Solibacter usitatus Ellin6076
MAKEKFDRSKPHVNIGTIGHIDHGKTTLTAAITKVLAKHNPKNKFRSFDSIDNAPEEKARGITIAVAHVEYETAKRHYAHVDCPGHADYIKNMITGAAQMDGAIVVVAATDGPMPQTREHILLARQVGVPYIVVAMNKVDMVDDSELLDLVELEVRELLKSYQFPGDDLPVVRVSALGALNGEPQWEKTVDELMEAVDSYIPMPERAIDKPFIMPIEDIFSIQGRGTVVTGRIERGICKVGEEMEIVGFRDTRKTVVTGVEMFKKLLDEGRAGDNVGLLLRGVEKDMVERGQVIAKPGSITPHTKFKGEVYVLSKEEGGRHTPFFKGYRPQFYFRTTDVTGVAQLPEGTEMVMPGDNVSLEVELITPVAMDKGLRFAIREGGRTVGAGTVTEILK

SEQ ID NO: 24500 - protein, 148 aa, Sesbania rostrata
MGFTEKQEALVNASYEAFKQNLPGNSVLFYSFILEKAPAAKGMFSFLKDSDGVPQNNPSLQAHAEKVFGLVRDSAAQLRATGVVVLADASLGSVHVQKGVLDPHFVVVKEALLKTLKEAAGATWSDEVSNAWEVAYDGLSAAIKKAMS

SEQ ID NO: 24501 - protein, 112 aa, Parvularcula bermudensis HTCC2503
MKKVEALIKPFKLDDVKEALQALGLKGMTVSEARGFGRQKGHTELYRGAEYVVDFLPKLKIEIVIEDSLVDDVLRAITEAAQSGRIGDGKIFVTTVERAVRIRTGETDAAAL

SEQ ID NO: 24502 - protein, 418 aa, Frankia sp. EAN1pec
MILGTGSAWDTACVQLADAAQHLGLDDGMHDLLRTPRRSITVSVPLLRDDGQLLVLSGYRVQHNLARGPAKGGLRYHPACDLDEVKALAMWMTWKCALMGIPYGGAKGGIAVEPGLLSRQERERMTRRYAAELVPLIGPDKDIPAPDVGTDEQTMAWIMDTYSTHTGHTAPGVVTGKPLSIGGSAGRAGATSRGVQLAAFAALRELGRDPRETTVAVQGFGKVGALAAQYLHDAGCRLVAVSDVKGGIHNRAGLNPSALIRHLARGADTVVGYPGTDTITNTELLELNVDMLVPAALEGVINTGNADRVRAPLIVEGANGPVTAEADHVLTGKGTVIVPDILANGGGVAVSYFEWVQDIQAYFWTEDQVNDRLRALMQRSYQEVSALARERRVSLRTAAHIIGVARVAEAHRTRGLYP

SEQ ID NO: 24503 - protein, 571 aa, Bacillus licheniformis ATCC 14580
MKGRRRVSHNKLNEQVIETRLRGFEVLATPLLNKGVAFPPEERDALGLTGLLPPKVLTLEEQAKRAYKQFQSQPDDLSKNVYLTALHDRNEVLFYRLLNDHMTEMLPIVYTPTVGTAIQQYSHEYRKPRGLFLSVNDPEGMKTAFENLAAKRSRIDLIVATDAEGILGIGDWGVGGIAISIGKLAVYTAAAGIDPNRVLPVVIDAGTNQERLLNDPLYVGNQHSRIRGERYESFIDQYVQIATETFPGVLLHWEDFGTQNARQILKKYKDKICTFNDDIQGTGAVTLAAVLAAVKISKMPLKDHKVVIFGAGTAGIGNAEQIRAALVQEGVSEEESYRRFWCVDRNGLLTDDMNDLQDIQQPYARPADEVKDFSRNGPGDAIDLLEVVKRVQPTILIGTSTVSGAFTEEIVKEMAKHVKRPAIFPMSNPTPLSEARPEDLINWTEGRALVATGSPFAPVEYSGTRYAIGQANNAFVFPGLGLGTLVSKARLITDNMFYASAAAIAGMVDTGRPGAALLPEVEDLRTVSATVATAVIKAAIEDGVAENEPDDVIQAVQDAMWHPVYRPIRAI

SEQ ID NO: 24504 - protein, 305 aa, Magnaporthe grisea 70-15
MSSKPPSRVVFVGNIPYGLSEEQITDIFSRAGKVLNFRLVYDRETGKPKGFGFAEYPDNDSAASAVRNLNDTEIMGRKLRVDFSNEKPSTNDPDDGPPGGANGSGAPSYQQQQEVPSLPPLPPGKDIPAGVSATDAISRTLRTLPPAQLLDILQQMKTMSGADPARATELLTQAPQLSYAIFQALLLMDLVSPDAIHSVVDPGAAVPPPAAAPAHAPAPYGAPPAAAAVYQQHPVANTPPVPMPYAPPAAPTAATPTPAPAAAPQDTDALMQQVLALPQATIDQLPEAERAQIMALRASLMGQAR

SEQ ID NO: 24505 - protein, 437 aa, Chlamydia muridarum Nigg
MFKEKKAPLVCKFGGTSVGTSSSIQRVCEIIRKEKPSFVVVSAVAGVTDLLEEFCRAPVGQKSQFTAMIREKHESIAKELGIDVAIEPFLGPLKQFEGAGHLQQEDQAKILAIGEDLSASLICSYCRANSLQLEQLEARQVILTDSQFLRAEPDLALMQTMWGELVLKENTIYLMQGFLGATASGATTVLGRGGSDFSASLVGELCEARELRIYTDVRGVHTADPKILKDTQLIDFLTFEEMQELASSGSKVLHQDMLKPCIRAKVPIFVTSTFDLTKEGTWICASLNEGVEGPEIKALSLKANQALWFVEYHSPLMRLENVLRCVRGLGSIPGVVMAQNSGVYFTVDWEENNQSMTEALREFGAVSCEGPVSLVALVGAKLTSWSMTGVFDALQGTPVLYWSQTDTVINLIINEESGVVVTKLLHDYVLGLNRSGL

SEQ ID NO: 24506 - protein, 1193 aa, Magnetospirillum magnetotacticum MS-1
MPGVSADDRITSQEDGPGGRWRFGIRAKLVVAVGTVAGMIMVASLLTWFSYSEIERLLAAVTRTNLPSLSNALKLSEATARLAAAAPALDGSQSQFQRQSNFVALQQQTERLLVLVDHLAGSIADTGRVEELRSMIAAFADNVVDRNILVDKRLQLAERSRAQAEIISNLDVEVHRAMGGLIGDPALATVVLASNYLREAVVAGNLEKVGDLRSAYEEQVRYLAELVDAAGSRPPRTRELTRRVLALGTGPENVFELRTLQMLTIARLAAANDEGRDLVARTSSSVGRLVSAAEAEAAENERRTEAAVSSGRTTMLVVAMLTFFGPLLFIWLYLGRSVVARLAGLASSMHAIAEGDFQAPIPGQGNDEITDMAAELAVFRDAMAKLQESSEALIESERRLRRILDTSPLALAISRVSDSAILLVNPRWSELYRVPKARALGMTVASCYSDPANRLRLVELVKKRGFVGGFECRMRASDGHEFWAMLSAAEIEMDGEPAVIVSSTDITRHKEEEAALAEAKKVAEEASQAKSLFLATMSHEIRTPMNGVLTMAQLLEDMPLPAEQREMARVIRDSATSLLTIINDILDFSKIEADKLQLELVELSLSELVEGVADLLTIRAQEKGISLITFIDPALTDMVIGDPIRLRQIITNLAGNAIKFTDKGYVRISVRALDPRERPLRLEFNITDTGIGLDSEQQARLFEPFMQADVTISRRYGGTGLGLSICRRLVAMMDGEIGVRSNMGQGSTFWFQVPLEPADVAPEETPDLSGIAVLVLAEGPVAAECLRQYLGHLGAQVAVVVGAEGAVAAVRAAALAGWTYDVALLDDGQDFRMRLGVAGALMTAAGPDLELKVALLVAKEAFAAVASEIKAAGLYAALPKPIRRRQLWRNVAVAVGRAMPEAESADGVGAEEGWRPPTTEEAAAAGALILVAEDNPTNKVVIRHLMERLGYAIEVVGNGAEAWERMQIRDYGLLLTDCHMPEMDGYELTQRIREWEVETGHLLPIVALTADALAGTARRCLDCGMNAFLAKPIDLIQLDATIRRLLPVAVGLRRRRSGGEEAVAPPLAAVGVPLLGPVAADPSLPPVLDLTPMRQIFGDIGNEVRELLALFVDTTRPLVVDLGIALEAADALAAREAAHSAKGAGNSAGAFRFAKLCAQAEAACAASDLATVSALYPALEVAFDEAAAAIAAI

SEQ ID NO: 24507 - protein, 264 aa, Burkholderia pseudomallei K96243
MIEEKQMAYENILVETRGRVGLITLNRPKALNALNDALMDELGLALKAFDADEGIGAIVLTGSEKAFAAGADIGMMATYSYMDVFKGDYITRNWETVRQIRKPIIAAVAGFALGGGCELAMMCDIIFAADTAKFGQPEIKLGVLPGAGGTQRLPRAVSKAKAMDMCLTARFMDAEEAERAGLVSRILPADKLLDEAIAAATTIAEFSLPAVMMVKEAVNRAYETTLSEGVHFERRLFHSAFATEDQKEGMAAFVEKRKPVFKHR

SEQ ID NO: 24508 - protein, 109 aa, Methylococcus capsulatus str. Bath
MSSDKILHVTDAEFEDKVLKAPGPVLVDYWAEWCGPCKMIAPILDEIAGEYEGRLTVAKLNIDDNPATPQRYGVRGIPTLMVFKGGEVVASKVGALTKSQLAAFLEGNM

SEQ ID NO: 24509 - protein, 329 aa, Oceanospirillum sp. MED92
MIMKHSVCLLEAVNLALASEMRRDDSIVLLGEDIGVNGGVFRATASLREEFGLKRVMDTPLAETMIAGLTVGMSTQGLKPVAEIQFMGFIFPALEHIICHAARMRNRTRSRLSCPMVIRAPFGGGIHAPEHHSESTETLLAHIPGLKVVIPSSPARAYGLLLAAMRDPDPVIFLEPKRIYRSVQQEIEDNGVELPIGKCFTLREGSDITLLSWGAMITETLEAAAALKEQGIHCEVIDVASISPLDTETILTSVRKTGRLVIIHEAPRNLGLGAEIAATVAEKALLELQAPIARVTGYDTVMPYFRLENHYLPNTQDIIDAVTQTLEFS

SEQ ID NO: 24510 - protein, 574 aa, Legionella pneumophila subsp. pneumophila str. Philadelphia 1
MLDFSLNRDPQTGELYIETSLCGKPLLTTPQLNKGTAFTQEERKDFGLLGKLPHRVETLDEQVKRAYLQYSSYTTRLQQHIYLNNLHDKNQIVFYKLLSRHLGEMLPIIYTPIVGAAAKRFSHEYRQPRGLYIAHSDKNQLEEIINNRSNPDIDLVVVTDGEGVLGIGDQGIGGMDIPVAKLMVYSLCGGIDPTRTLPIFLDVGTNNQELLNDPMYLGCRHPRIKSSEYDDFIKTFVNEIHKQFPNAFLHWEDFGRGNARRILDQFQDELCTFNDDIQGTGAVTLAAILAACDVTGLPLHEHRIVVFGAGSAGTGISDQIVDAMVKSGLSLTDAYDRFWLIDKQGLLLATDQELTDAQKPYARNPIDIQSWEINNKQHPSFTDTIRHVKPTILIGCSAQTGAFSQDIVETMSTSCERPIIFPLSNPDEKCEAQPSDILAWSKGRALIATGTAFAPIEYQNRMVQIAQCNNALVFPGIGLGVLAVSASRLTKDMILAAAQTLSKFAPSKKDSFLPLLPSLDNAQIVAKEIAIAVAQCAIDSGYAQKNQDKELPRLIDELFWEPRYLPFRKKGWSE

SEQ ID NO: 24511 - protein, 498 aa, Idiomarina baltica OS145
MSKKVPLYIDGEFRASKAESWIPVTNPATQEVIAEAPCATQDEMEAAVASAREAFKTWKEVPVSERARVMMRYQALLKEHQEEIAEILAQETGKTFEDAKGDVWRGIEVVEQAANIPSLMMGETVENVARSIDSYSYIQPLGICAGITPFNFPAMIPLWMFPMAIACGNTFILKPSEQDPLTPTRLVELFEQAGAPKGVLQVIHGGKDQVDFVLDHPEIHALSFVGSVPVAEYIYRRGTENGKRVQAFAGAKNHCVIMPDANKQQVINNLVGASVGAAGQRCMAISVAVFVGAAKEWIPEVAEAIAKVRPGAWNDENAAYGPVISPQAKERIEQMITDGENEGAKLLVDGRGCTVEGLPDGNWVGATVFSEVTADMDIYKKEVFGPVLSMMEVEDLDDALTLVNNNPYGNGTSIFTSNGAAARKYQHEVTVGQVGINIPIPVPLPFFSFTGWKRSFFGDLHAYGKQAIRFYTETKTVTARWFESDIEASGPNMSIHLK

SEQ ID NO: 24512 - protein, 358 aa, Burkholderia sp. 383
MTDPTTHRARAVFPFAALVAQDALQQALLLAAIDPSLGGVLVSGPRGTAKSTAARGLAELLPEGQFVTLPLSASDEQVTGTLDLAHALAENGVRFRPGLLARAHLGVLYVDEVNLLADGLVDTLLDVAASGVNIVERDGVSHAHDARFVLIGTMNPEEGELRPQLLDRFGLMVELENCFDAAQRERIVKARLAFDLDPDAFRTRHASAQRELGDRIHAARARLAALDFDDAVHARVSALCIDAAVDGLRADLVMLRAARALAALEQADAVTVSHVERVADAVLRHRRHAGTPPSSRAPQQDDERNGHTPPDARERPDDSSGTAKNDATASQGDWGYLPPEPAGLRNVKGVVPLPLKKR

SEQ ID NO: 24513 - protein, 376 aa, Phytophthora brassicae
MADEDVQALVVDNGSGMCKAGFAGDDAPRAVFPSIVGRPKHLGIMVGMDQKDAYVGDEAQSKRGVLTLKYPIEHGIVTNWDDMEKIWHHTFYNELRVAPEEHPVLLTEAPLNPKANRERMTQIMFETFNVPAMYVNIQAVLSLYASGRTTGCVLDSGDGVSHTVPIYEGYALPHAIVRLDLAGRDLTDYMMKILTERGYSFTTTAEREIVRDIKEKLTYIALDFDQEMKTAAESSGLEKSYELPDGNVIVIGNERFRTPEVLFQPSLIGKEASGIHDCTFQTIMKCDVDIRKDLYCNIVLSGGTTMYPGVGERMTKELTALAPSTMKIKVVAPPERKYSVWIGGSILSSLSTFQQMWISKAEYDESGPSIVHRKCF

SEQ ID NO: 24514 - protein, 492 aa, Exiguobacterium sibiricum 255-15
MHKTSEQTLIFEISKAGRVAYSLPLPTVDEVAAEELLPAHLLRQEDVELPEVSELDLVRHYTALSNRNHGVDSGFYPLGSCTMKYNPKINEDMARLPGFAHIHPLQPVESVQGALGLMYDLQEKLAVITGMDEVTLQPAAGAHGEWTGLMLIKAYHHARGDFKRTKVLVPDSAHGTNPASASVAGFDTVTVLSDERGLVDLADLKSKVGEDTAALMLTNPNTLGLFESDIVEIAKAVHEAGGKLYYDGANSNAIMGIARPGDMGFDVVHLNLHKTFTGPHGGGGPGSGPVGVKKDLIPYLPKPIVAKTAEGFVLDYDRPESIGRVKPFYGNFGINVRAYSYIRTMGGAGLARVSKEAVLNANYMLARLKGAYDAPYDVYCKHEFVLSGRRQKALGVRTLDIAKRLLDFGYHPPTIYFPLNVEECIMIEPTETESKETLDDFCDAMLQIAKEVEETPDVVLNAPHTTVVKRMDETLAARKPILRYQPKQEVHV

SEQ ID NO: 24515 - protein, 350 aa, Aspergillus nidulans FGSC A4
MTTQTPPPSADPASQKIFTIGTRKSKLALLQTDLVLAALKERFPDYTFKIHSRETAGDQNTTIALRDFTTKNLWTQELEDLLEAGSVDLIVHSLKGISYVPTLLPTSCTLGPMMKREDSRDGLVIKKGLPNMSLAEMPAGSVVGTSSIRRTAQLARKYPHLKVMDVRGNIGTRLAKLDAEDSPYTCLILAAAGLLRLGLGDRIYQYLDSRNAGMLYAVGQGALGIEIRKGDKAMEDILNTIGHKETTFACLAERSLLRTLEGGCSAPLGVETEWIQDTNGSSKLRMRSVVVSVDGSEHAEVEIDGTVDSPQSAEEFGVTVAKALVNEGAGKILSEIQQNRQLKVPVSEST

SEQ ID NO: 24516 - protein, 448 aa, Exiguobacterium sibiricum 255-15
MDFRYLPMTQEDEKEMLQTIGADSIEDLLADIPASVRDQGTLEEVGIPLPETDLIRTLSKLADQNMNTKQYPSFLGAGIYDHYAPAVVNHMLLRSEFYTAYTPYQPEISQGELQAIFEYQTMICELTGMDVANSSMYDGITALAEAAMLACAHKKKKTIVLSDGVHPEAHDVVRTYANGPGLEVETLPLVNGETAIANLDALEDVACVIVQYPNFYGRVEDLQALADATHAKGGLFIVSANPLALGLLEAPGKLGADITIGDCQPFGIPQSFGGPTCGYFTTTKALMRKIPGRLVGQTVDEDGKRGFVLTLQAREQHIRRDKATSNICSNQALNALAASIAMSALGKRGIRELATRNLQTAYALKKSLIQAGFHIVDDGPSFNEFVVELPIDATEAGKQLLQAGIIGGLPLGTFDESRSNQMLVCATELRTKEELDQFVTALGGLTHA

SEQ ID NO: 24517 - protein, 171 aa, Chlamydomonas eugametos
MMRTVQLRTLRPCIRAQQQPVRAPTSVAAATATTPAPTKKCPFSLFAKLGGREAVEAAVDKFYNKVVADPTVSVFFSKTDMKVQRSKQFAFLAYALGGAAEWKGKDMRTAHKDLVPHLTDVHFQAVVRHLSDTLAELGVTPGDIADAMAVVASTKTEVLNMPRQQGAESNR

SEQ ID NO: 24518 - protein, 164 aa, Chlamydomonas eugametos
MMRTVQLRTLRPCIRAQQQPVRPSTSATAAAATAPAPARKCPSSLFAKLGGREAVEAAVDKFYNKIVADPTVSTYFSNTDMKVQRSKQFAFLAYALGGASEWKGKDMRTAHKDLVPHLSDVHFQAVARHLSDTLTELGVPPEDITDAMAVVASTRTEVLNMPQQ

SEQ ID NO: 24519 - protein, 501 aa, Xanthomonas oryzae pv. oryzae KACC10331
MRESVPRVSLLIDGELVVSAGTHWQDVVNPADQSVLAQVPFATADEVAAAVAAASRAFVTWRKTPIGTRARIFLKYQQLIREHMPELAALLSAEQGKTLADAEGDVFRGLEVVEHAAAIGNLQLGELANNVANGVDTYSLLQPLGVCAGITPFNFPAMIPLWMFPMAIATGNTFVLKPSEQDPMVTMRLVELALEAGIPKGVLNVVHGGEDVVNALCDHPDIKALSFVGSTKVGTHVYQRASLAGKRVQCMMGAKNHAVVLPDANRGQTLNAMVGAAFGAAGQRCMAASTLVLVGDARAWIPELVAKAKRLKIGAGNAPGTEVGPLISCAARARVEALIASGVEQGAMLELDGRAPQVPGFEQGNFVGPTIFSGVTPGMRIYDEEIFGPVLVILEAATLDEAIALINANPNGNGTALFTQSGAAARRFQEDIDVGQVGINVPIPVPVPLFSFTGSRASKLGDLGPYGKQVVMFYTQTKTVTARWFDDETLGHGVNTTISLK

SEQ ID NO: 24520 - protein, 952 aa, Candidatus Pelagibacter ubique HTCC1002
MLKNAQKDFIQRHIGPSIDEQNVMLKELGYQNLDDLIKDTVPEKILLKDDLDIGDPNSEYKALRKLKDISKKNKIYSSFIGMGYYGTYTPYVILRNILENPGWYTSYTPYQPEVAQGRLEMLLNFQQMIIDFTGMDIANASLLDEGTAAAEAMGLSYRISKSESKKVFVSKNCHPQTIDVIKTRAEPLGLEIIVGDEDKDIKEDIICGIIQYPGTLGDIKDPSEAISKIHKFNGKAVLACDLLALAKLKTPAELGADIAVGSSQRFGIPMGYGGPHAAFFATKDEYKRSMPGRIVGVSVDRHGKKAYRLALQTREQHIRRDKATSNICTAQALLAIVSAAYAVYHGPQGIKKIAESVSQLTKNFADKLKQSGYELYSNEFFDTVTIKTLDKTEKIYKNALDQGVNIRKVNSEMLAVSFDERKNLYRANQLLKIFNCSETIKESMNESLSNIPKNLLRTSTYLDHPVFNSYHSETEMLRYLKKLEDSDIALNKSMIALGSCTMKLNAVAEMIPVTWKEFSQPHPFSPVEQMDGYRELFTDLKNWLRSITGFSGVSLQPNAGAQGEFAGLMVIRKFHEKNGETNRNVCLIPSSAHGTNPASAQMVGMKVVVVKCDQYGNVDYEDLKNKAEEHSENLAALMVTYPSTHGVFEEKITDICELIHNHGGQVYMDGANLNALVGIAKPGNFGPDVCHINLHKTFCIPHGGGGPGMGPIACKKHLEIFLPKHSVIKDCGPVTGMGAVSAAPWGSSSILSISWMYIKMMGSEGLRKASQVAILNANYIAHKLKDSFPILYKGKSGNVAHECIIDIRTIKSETGITEEDIAKRLIDFGYHAPTMSWPVAGTMMIEPTESESLSEIDKFCSTLIKIKQEIDKIQSGEYDKTDNPLKNAPHTHVELTSNKWDHKYEREEAAYPSEFLRTNKYWPPVGRVDNVYGDKNLFCTCPSMEEYEDTAA

SEQ ID NO: 24521 - protein, 547 aa, Neisseria meningitidis MC58
MNAFTRAWYALERHYQDTRHVLLRDRFACEPDRFERMHERLDGMLFDYSKNRLGEDTLQLLCNLADAADLEGKMRALRTGAKVNGSEGRAALHTALRLPDGADAVYVDGRDVLPEIRRELNRALKFAHSLDDGSYQGITGKRITDFVHIGIGGSDLGPAMCVQALEPFRRHITVHFAANADPACLDAVLCRLNPETTVFCVASKSFKTPETLLNAQAVKAWYRGAGFSESETACHFCAVSADTAAAAAFGIAAERVFAMYDWVGGRYSVWSPVGLPVMVAVGGARFRELLAGAHAMDRHFFSTPTRHNIPVLMALIAVWYNNFQHADGQTAVPYSHNLRLLPAWLNQLDMESLGKSRASDGSPAVCKTGGIVFGGEGVNCQHAYFQLLHQGTRLIPCDFIVPMTAQGREDGRSRFTVANAFAQAEALMKGKTLDEARAELADLPEAERERLAPHKEFPGNRPSNSILIDRLTPYNLGMLMAAYEHKTFVQGAIWNVNPFDQWGVEYGKQLAKTIIGELEGGTSVHDASTEGLMAFYRECRLKGGGAA

SEQ ID NO: 24522 - protein, 242 aa, Salvia miltiorrhiza
HEAQLPIIHSSLKMSEELKYTSHEPAKPANEPCETATPVAVESTDRGLFGFGAKKEEETAISAEFEEKVKVCEEEKKEEAPEEKKHEGFIEKLRRSDSSSSSSDEEEVGEDGLKKKKKKKGLKEKVVEKVSGDKEEEEVKCVDTSVPVEKYDDVVPTQEHEEKKGFLDKIKDKLPGGKKTEEVVSAPPPPAPVAHEYGATPEAEGKEKKGFLDKIKEKLPGYHPKTDEEKEKEKEKEKEAAC

SEQ ID NO: 24523 - protein, 447 aa, Pisum sativum
AALASTRIPTNTRFPSKTSHSFPSQCASKRLEVGEFSGLKSTSCISYVHSARDSSFYDVVAAQLTSKANGSTAVKGVTVAKLKVAINGFGRIGRNFLRCWHGRKDSPLEVIVVNDSGGVKNASHLLKYDSMLGTFKAEVKILNNETITVDGKPIKVVSSRDPLKLPWAELGIDIVIEGTGVFVDGPGAGKHIQAGAKKVIITAPAKGADIPTYVIGVNEQDYGHEVADIISNASCTTNCLAPFAKVLDEESGIVKGTMTTTHSYTGDQRLLDASHRDLRRARAAALNIVPTSTGAAKAVSLVLPQLKGKLNGIALRVPTPNVSVVDLVVNVAKKGISAEDVNAAFRKAAEGPLKGILDVCDVPLVSVDFRCSDVSTTIDSSLTMVMGDDMVKVVAWYDNEWGYSQRVVDLAHLVANKWPGTPKVGSGDPLEDFCETNPADEECKVYE

SEQ ID NO: 24524 - protein, 219 aa, Capsicum annuum
MADQYEHNKPSVEETTTGANVESTDRGLFDFLGKKEEEKPTHAHEEQAISSEFGEKVKVGEEEHKEEEKKKEEKKLHRSSSSSSSSSDEEEEVVGEDGQKIKKKKKKGLKDKMKDKISGDHKEEDKKTEDTSVPVEKYEETEEKKGFLDKIKDKLPGGGQKKTEEAAAPPSPPPPPAVAEHEAEGKEKKGFLDKIKEKLPGYHSKTEEEKEKEKEAASH

SEQ ID NO: 24525 - protein, 127 aa, Betula pubescens
IRVDQYGNTVRTDEYGNPIRTDEYGNPIHHTAGTTAGYGAGGFDTTTPQGMRHDVTGTRGVSGKLHRSSEDDGHGGRRKKKGLAEKIKEKIPGVGNKDHRSNTSATTTQAYDEGELRQHEKKGVMEK

SEQ ID NO: 24526 - protein, 121 aa, Setaria italica
MAPMRKMQAVFALAMVFAAAALVASAAAAITCGQVASSLAPCIPYATGNANVMPSGCCGGVRSLNNAARTSADRQAACRCLKSLAGTIKKLNMGTVAGIPGKCGVSVPFRISMSTDCNKVS

SEQ ID NO: 24527 - protein, 297 aa, Antithamnion sp.
SATFSHGSFCYIPPDTHCPLELSTYFRINNKESGQFERTLIIADKNSYVSYLEGCTAPQFDNNQLHAAVVELVALENATIKYSTVQNWYAGNEKGQGGIYNFVTKRGICIGNNSKILWTQVETGSAITWKYPSCILAGHNSIGEFSSIALTNNYQQADTGSKMIHIGKNTKSRILSKGISAGYSANSYRGLVKIGPKAHYSRNYSQCDSLLLSNTSKANTFPYIQAQNPYTKIEHEASTSKIGEEQIFYFLQRGINLENAISLMISGFCKEVLNELPMEFAVEADRLLNLKLEGTVG

SEQ ID NO: 24528 - protein, 112 aa, Xylella fastidiosa Dixon
MKLITAIIRPFKLDEVREALSQVGVSGITVTEVKGFGQQKGHTELYRGTEYVIDFLPKIKIEMVVTDERLDAVIEVIRIAAVTGKIGDGKIFVTKIEQVVRIRTGEIDIDAL

SEQ ID NO: 24529 - protein, 602 aa, Pseudomonas syringae pv. syringae B728a
MSTQSNASSDVAERLAQTRALMSRERIDAYLVPSADPHLSEYLPGYWQGRQWLSGFHGSVGTLIITQDFAGIWADSRYWEQATKELAGSGIELVKLVPGQQGPLEWLADEAKAESVVAVDGAVLAVASSRTLASKLYERGARLRTDIDLLTELWQDRPALPSHPIYEHLPPQASLDRSAKLARVRQIIAERKADWHFIATLDDIAWLFNLRGADVSYNPVFIAFALIGPQSVTLFVDSKKVPDPVRARLERDGINLMEYTQIGAALRELPKDARLLVDPARVTCGLLDYLDSEVTLVEGLNPSTLLKSQKTEADTAHIRQAMEQDGAALCEFFAWLDSALGREPVSELTIDEKLTQARERRPGYVSPSFATIAGFNANGAMPHYRATEAEHARIEGDGLLLIDSGGQYLGGTTDITRMVAIGTPSAEQKQDCTRVLKGVIALSRAHFPKGILSPLLDAIARAPIWSEGVNYGHGTGHGVGYFLNVHEGPQVIAYQAPATPQTAMLPGMITSIEPGTYRPGRWGVRIENLVINQEAGKTEFGEFLRFETLTLCPIDTRCLEVSMLNAEERAWLNDYHVQVLKRLSPLLQGTALLWLQARTIPV

SEQ ID NO: 24530 - protein, 118 aa, Arabidopsis thaliana
MAKSYGAIFLLTLIVLFMLQTMVMASSGSNVKWSQKRYGPGSLKRTQCPSECDRRCKKTQYHKACITFCNKCCRKCLCVPPGYYGDKQVCSCYNNWKTQEGGAKMPLKKISLRFPFYN

SEQ ID NO: 24531 - protein, 290 aa, Idiomarina loihiensis L2TR
MSILIDKNTKVICQGFTGGQGTFHSEQAIAYGTQMVGGVTPGKGGQEHLGLPVFNTVREAVEATGATASVIYVPAPFCKDSIIEAADAGIELIVCITEGIPTLDMLYVKEYLTHKGVRMIGPNCPGVITPDECKIGIMPGHIHKKGKVGIVSRSGTLTYEAVKQTTDAGFGQSSCVGIGGDPIPGSNFIDILELFEKDPETEAIVMIGEIGGTAEEEAAEYIKNNVSKPVVSYIAGVTAPPGKRMGHAGAIIAGGKGTADEKFAALEAAGVKTVRSLADIGKAVAEKTGW

SEQ ID NO: 24532 - protein, 520 aa, Idiomarina loihiensis L2TR
MAIDIKVPQLPESVADATIATWHVKPGDKVSRDQNLVDIETDKVVLEVVAEADGVLGEITAEEGTTVTAEEVIGKIEEGDGASASDDKSDNKDSDDDKKSEKKESDSSEDKGSDKKGSGEKMEVKVPQLPESVSDATVSTWHVKAGDAVKRDQNLVDIETDKVVLEVVAPADGVLAEIKHEEGATVGADDVIGIVEAGGSAGGSSSKSDDSKSESSSESKDDDGDNEVAGPAVRRLLGEHGLKPSDVKGTGKGGRVTKEDVEKHVKAQSSKSSDSSKQQSSQPAVSGDRDQKRVPMTRLRKRIAERLLQAKNDTAMLTTFNEINMKPIMDLRKKYKDVFEETHGTRLGFMGFYVKAVTEALKRFPDVNASIDGDDIVYHNFFDISIAVSTPRGLVTPVLRDTDRLSIADMENGIRDLAIKGRDGKLTMDEMQGGNFTITNGGVFGSLLSTPILNPPQSAILGMHKIQERAMVVDGKIEILPMMYLALSYDHRIIDGKQSVGFLVTVKELLEDPQRLILDI

SEQ ID NO: 24533 - protein, 392 aa, Frankia sp. EAN1pec
MPPEPPSPVFDVVVLGAGPAGTSAARAAAEAGARVCVLERMAVPRYKTCGGGLVGLSVDHAGIDLAPLVRSRVDVLTMTLDGRYPVTRCRKDGRPLLSMVMRSELDAALLDSAKAAGAEVRTGVHVTGLREEGTAEPGRGEVAVQVRSGPAVRARVVVGADGTSGRAGTHVGVTCDQVDVGLEGEFEVPAPVAGEWSGRMLLDWGPVPGSYGWVFPKGDVLTVGVIGAREHGPALRRYYDALVERLGLTAAPRLHDSGHLTRVRAAGSPLRRGRVLLAGDAAGLLDPWTREGISFALRSGRLAGISAAAGAAGDPTALDRYPARIEGVFGPEIAAGRSVLAVFTRRPALMHTMMTRVPGTFGLFGRIIEGRSTIARQLRRPGVAAAIAALGR

SEQ ID NO: 24534 - protein, 348 aa, Prosthecochloris aestuarii DSM 271
MAQHPIVCVTGATGFIAAHLIKKLLQQGYAVRGTVRKLSKHSSYRFLENLDGAAERLELIEADLLSPGSFDAAIGGTQYVMHTASPYLINVRDPQKNLVEPALEGTRSVLESCRKASSVKRVVLTSSIAAITGAPDSNRVFTENDWNTTSSLKENPYHYSKTLAERAAWEFMQEQPGFDLVVINPFMVIGPSLGASLNTTNQMIRDIITGVYPGILDVNWGFVDVRDVALAHIRAIEKPAAHGRYLCSAEALDMRNVVAILRKAGYGNDYKLPSLDLSGKAATTLMKLVSWSQPRDTGAYLRTHLGRRMRYDNDKIRKELDIQFRNIESSLLETVEDLISWGHLKKKS

SEQ ID NO: 24535 - protein, 524 aa, Chlamydia muridarum Nigg
MGKSFLDCESLIALQEIATNPVDLTLPGTLSQDRIQQYALSAEGFTYSYATERVDDRSLNALRMLAEERELIKQMESMQQGAVMNYIEGFQSESRSVLHTATRAWVRDHDLKDEAASIANHSEREAHRLAEFLYAARSKFSTLVQIGIGGSELGPKAMYFAMQGICPSDKRIFFVSNIDPDNAAEVLKEVDLKQTLIVVVSKSGTTLEPSVNEELFKRAYQDKGLSVADHFVAVTAEGSPMDDKTHYLEVFHLWDSVGGRFSATSMVGGVVLGFAFGYEVFFEFLQGAASMDAHALTPIMEKNLPLLSAMLGIWNRNVLKYPTTAVIPYATGLKYFTAHLQQCGMESNGKSISRQGKEVHFATSPIIWGDVGTNCQHSFFQSLHQGTDIVPVEFIGFLQNQRGIDCVLSGSSSSQKLFANLVAQSLALAQGRDNDNPNKRFKGNRPSSILVAQQLSPRIAGGLLAFYEHKFAFQGFCWGINSFDQEGVSLGKELATQIIGLMSGAAPIEFPEARELLRLFNVLQ

SEQ ID NO: 24536 - protein, 372 aa, Medicago truncatula
MASLGNPKAWVPYMNSKDCSQGFCSVYCPQWCYAIYPPPSPSPFEFPDEDSSPNFSPLVIAIIGILASAFLLVTYYTIISKYCGRRESSASESREANDEFEDDHHHHHNPSIHEPWHVSTNGLDETLIKSITVCKYKKNDGLVDVTDCSVCLNEFQDDESIRLLPKCSHAFHLPCIDTWLKSHSNCPLCRATIFAFNSSNSSAATLHLPAPVIENPSTNEVSLETQHPNEVLDVERDNELDVVEEVPIPKTEFRALSDLGNLRGRHSVIEIRDHNEDYHESIRRSFSMDHSFQSGVLNVDDVNVMHMNQEQDCSQGEGSSKRLRGESESSKCSYRRKVLHCVLSPIAMKRSFSSGRFFLSRSGRGRLGVLPL

SEQ ID NO: 24537 - protein, 428 aa, Streptomyces resistomycificus
MREVVVTGLGVISPAGIGKEAFWDTVSAGKSVTKSLSDITSSSLFKSFEFASDAIAEVPGFEEQIPSLPPEVQRLDRYVQFAVAAALQAVRDAGLQDGGHDAERTGISLSTAICGTPRMEEEFLAVTDEGRRPIDPAKAGRDLYLAAMSNTPGTVLSALLGAQGPCVTLSTGCIGGIDAVGHAYESIAHGDADVMIAGASEAPITPVTVASFEIINCLSRAHRGHPEAASRPYDADRDGFVLGEGCGIVVLEEKEHALRRGATPYLQISGFSHTSNAIHMTDLLSDGEDLTRAMSQAIEVSGVAPGAIDHVSSHGSSTRQNDTCETSALKLALGERAREIPVNSAKSMLGHALAAASAMEIVLCALAGRHSFVHPTANYETPDPTCDLDYVPGTGRPWDGEVILKDASGFAGLHAAMVARTVRDGGRS

SEQ ID NO: 24538 - protein, 442 aa, Oryza sativa (japonica cultivar-group)
MAFVAAGNILLEYCIGGAAVARAWTSYFATLLNHHPNDFRIHAASLAADYSRLDPIAVAVIAIICLLSVLSTKASSRFNYVLSVLHVAVIAFIIVAGLTKADAANLTRDFMPYGPRGVFAASAVLFFAYIGFDAVSTMAEETRDPARDIPVGLVGAMALTTALYCALAVTLCLMVPYGEIDPDAPFSVAFADRGMGWAKYVVAFGALKGMTTVLLVSAVGQARYLTHIARTHMMPPWLARVHPGTGTPVNATVAMLLATAVIAFFTDLNVLSNLLSISTLFIFMLVAVALLVRRYYVSGETSRADRNRLAACIAAILASSVATATCWGLDRGGWVPYAVTVPAWLAATASLWALVPQARAPKLWGVPMVPWLPSASIAINVFLLGSIDSKSFMRFGIWTAALLVYYLFVGLHASYDTAKALAADAVAGKVEDGDAKTSAPPM

SEQ ID NO: 24539 - protein, 275 aa, Rubrobacter xylanophilus DSM 9941
MEREMEAGNTKTALVTGSTDGLGRGVARELARRGYAVILHGRSEARCEEAAAELPGGAAGYLVADLSSLGEVRKMAREVLAGRERLDLLVNNAGVISRERRESREGFELTFAVNYLSHFLLTLLLLPLLRRSAPARVVNVASAAQSPIDFEDPMMERSYSPMEAYARSKLAQVMFSFALAGRLSGTGVCVNALHPASLMDTKMVRESFGRPMSSVEEGVRAVVRLAASSELEGVSGRYFEGTREARAHPQAYDPAARERLWELSEGLCGALDAGR

SEQ ID NO: 24540 - protein, 320 aa, Escherichia coli
MRQTKTGILLANLGTPDAPTPEAVKRYLKQFLSDRRVVDTSRLLWWPLLRGVIFPLRSPRVAKLYASVWMEGGSPLMVYSRQQQQALAQRLPEMPVALGMSYGSPSLESAVDELLAEHVDHIVVLPLYPQFSCSTVGAVWDELARILARKRSIPGISFIRDYADNHDYINALANSVRASFAKHGEPDLLLLSYHGIPQRYADEGDDYPQRCRTTTRELASALGMAPEKVMMTFQSRFGREPWLMPYTDETLKMLGEKGVGHIQVMCPGFAADCLETLEEIAEQNREVFLGAGGKKYEYIPALNATPEHIEMMANLVAAYR

SEQ ID NO: 24541 - protein, 642 aa, Vitis vinifera
MDTHHATSHDLLHDEAYAPLPYSPLPDHPVPAGAPALGQRRPLKVCVTLSLMFLVSLVSFIRVHVTVDNDGPSMEREGRGVAQGVSEKSFLGFSGRRLSYNWTTAMLAWQRTAFHFQPEKNWMNDPDGPLFHMGWYHLFYQYNPDSAVWGNITWGHAVSRDMIHWLYLPLAMVPDRWFDLNGVWTGSATILPNGQIIMLYTGDTNDSVQVQNLAYPANLSDPLLLHWIKYENNPVMVPPAGIGSDDFRDPTTMWVGADGNWRVAVGSLVNTTGIVLVFQTTNFTDFELFDGELHGVPGTGMWECVDFYPVSINGVYGLDTSAHGPGIKHVLKASMDDNRHDYYALGEYDPMTDTWTPDDPELDVGIGLRLDYERYYASKTFYDQVKKRRILYGWISEGDIESDDLKKGWASLQSIPRTVLHDNKTGTYLLLWPIEEVESLRTNSTEFEDVLLEPGSIVPLDIGSASQLDIVAEFEVDNETLEAMVEADVIYNCSTSAGAAGRGALGPFGLLVLADDTLSELTPIYFYIAKDTDGSYKTFFCTDLSRSSLAVDDVDQRIYGSIVPALDDEKPTMRVLVDHSIVEGFSQGGRSCITTRVYPTEAIYGAARLFLFNNATGVNVTASIKIWEMASADIHPYPLDQP

SEQ ID NO: 24542 - protein, 664 aa, Vitis vinifera
MADPNPARTFADPEDPIIAATVPDHYTPLLDVDPPAGENSRRPLKGFLVILSGLVLVGLLMALISENGPSVSQDSQQNDLTLNAPAESTNISAQFLEPASRGPSTGVSEKSFRLHSGVRAPFPWSNTMLTWQRTGYHFQPEKNWMNDPNGPMFYGGWYHFFYQYNPDAAVWGNIVWGHAVSKDLIEWLHLPLAMVADQWYDTNGVWTGSATLLSDGQVIMLYTGATNESVQVQNLAYPADLSDPLLVDWVKYPGNPVLVPPPGIDDKDFRDPTTAWYWPDGKWRIAIGSKVNKTGISLVYNTEDFKKYELIEGVLHAVPGTGMWECVDLYPVSLKEDNGLDTSFNGPGVKHVLKASLDDDKNDYYAIGTYSLESGNWTPDNPNLDVGIGLRYDYGKFYASKTFYDQNKQRRILWGWIGETDGESADIKKGWASVQSIPRTVVFDKKTGTNILQWPVAEIKSLRKSSKKFDKLEVGPGSVVTLEVEKATQMDITAEFEIDKEALKRIGESDVEYSCRTSGGSAQRGELGPFGLLLLADEGRCEQTPVYFYVAKGTDGQLKTFFCTDESRSSLANDVDKRIFGSTVPVIKGEKLSMRILVDHSIIESFAQGGRTCITSRVYPTKAIYGAAQLYVFNNATSASITASIQTWAMKSAYIRPYSSHQES

SEQ ID NO: 24543 - protein, 284 aa, Legionella pneumophila subsp. pneumophila str. Philadelphia 1
MPASLIDGREISALRRAELKQRVLYHVEQGQRAPGLAVVLIGNDPASVIYVSNKRKACEEVGITSHSYDLPAETTQEKLIELINELNQSDKIDGILIQLPLPKHINERTIIEYIKPEKDVDGFHPYNLGRLAQRNPFLRPCTPLGIMNLLHHYELNVKRKHAVVIGASNIVGRPMSLELLLAGATVTICHKFTQQLQKFVEIADFLIVATGKMDVIATDWLREHQVVIDVGMHRLPDGSIRGDIDFKKAVEKVAWITPVPGGVGPMTIVTLLENTMMSAARLRE

SEQ ID NO: 24544 - protein, 144 aa, Zea mays
MVCFGMKLLRKRDVPDEKYTNAFLGFGPENTNFAVELTYNYGVDKYDIGTGFGHFAIANDDVYKLAENIKSKGGKITREPGPVKGGSTVIAFAQDPDGYMLRVGDLERSIKFYEKALGMKLLKKKDVPDYQYTIAMLGYADEDK

SEQ ID NO: 24545 - protein, 883 aa, Escherichia coli O157:H7 EDL933
  misc_feature (345)..(345): Xaa can be any naturally occurring amino acid
MNEQYSALRSNVSMLGKVLGETIKDALGEHILERVETIRKLSKSSRAGNDANRQELLTTLQNLSNDELLPVARAFSQFLNLANTAEQYHSISPKGEAASNPEVIARTLRKLKNQPELSEDTIKKAVESLSLELVLTAHPTEITRRTLIHKMVEVNACLKQLDNKDIADYEHNQLMRRLRQLIAQSWHTDEIRKLRPSPVDEAKWGFAVVENSLWQGVPNYLRELNEQLEENLGYKLPVEFVPVRFTSWMGGDRDGNPNVTADITRHVLLLSRWKATDLFLKDIQVLVSELSMVEATPELLALVGEEGAAEPYRYLMKNLRSRLMATQAWLEARLKGEELPKPEGXLTQNEELWEPLYACYQSLQACGMGIIANGDLLDTLRRVKCFGVPLVRIDIRQESTRHTEALGELTRYLGIGDYESWSEADKQAFLIRELNSKRPLLPRNWQPSAETREVLDTCQVIAEAPQGSIAAYVISMAKTPSDVLAVHLLLKEAGIGFAMPVAPLFETLDDLNNANDVMTQLLNIDWYRGLIQGKQMVMIGYSDSAKDAGVMAASWAQYQAQDALIKTCEKAGIELTLFHGRGGSIGRGGAPAHAALLSQPPGSLKGGLRVTEQGEMIRFKYGLPEITVSSLSLYTGAILEANLLPPPEPKESWRRIMDELSVISCDLYRGYVRENKDFVPYFRSATPEQELGKLPLGSRPAKRRPTGGVESLRAIPWIFAWTQNRLMLPAWLGAGTALQKVVEDGKQSELEAMCRDWPFFSTRLGMLEMVFAKADLWLAEYYDQRLVDKTLWPLGKELRNLQEEDIKVVLAIANDSHLMADLPWIAESIQLRNIYTDPLNVLQAELLHRSRQAEKEGQEPDPRVEQALMVTIAGIAAGMRNTG

SEQ ID NO: 24546 - protein, 537 aa, Oryza sativa
  misc_feature (145)..(145): Xaa can be any naturally occurring amino acid
  misc_feature (359)..(359): Xaa can be any naturally occurring amino acid
  misc_feature (463)..(463): Xaa can be any naturally occurring amino acid
MEQAAGLVYQLFQNEMFPWILALFPFLLLALHYLATNHRTPTTCKETRNHHPPPPSPPRLPIIGHLHLIGGLLHVSLRELAHRYGPDLMLLHLGQVPNLIVSSPRAAEAVLRTHDLVFASRPYSLIADILLYGPSDVGLSPYGEXWRRRIITTHLLTNKKVRSYRVAREEEVHKVMAKVHELSTKGMAVDMTELFSTFSNDLICRLVSGKNFQGEGRNKLFRQLFKANSVLLAGFNLKDYYPGLARLKAVSMVMCAKARNTRKLWDELLDEIINDRMSKQPCEHDRGNDDQDEMDFVDVLLLQERGITRDHLKAILVDMFQAGTETTSVVLVFAMAELMQKPHLMAKLQAELRTNIPKXGRELITECDQTNMTYLKAVIKETLRLHPPSPLLVPHLAMADCDIDGYTVRSGTRVIVNAWAIGRNSESWEAAEEFLPERFVDGGSAANVDFIGTDFQFLPFGAXRRICPGINFASASMEIILANLLYHFDWDVSAEAAIDKDGIDMAEAFGLSVQLKEKLLLVPVEYKGSVQDSAVIL

SEQ ID NO: 24547 - protein, 101 aa, Phaseolus vulgaris
MASSMISSPAVTTVNRAGAGAGMVAPFTGLKSLGGFPSRKMNNDITSVANNGGRVQCIQVWPTVGKKKFETLSYLPPLTKQQLAKEVDYLLRKGWVPCLEF

SEQ ID NO: 24548 - protein, 411 aa, Corynebacterium glutamicum ATCC 13032
MSTPQSIVIIGGGLAGAKTAEALRVNGYEGSITLIAAEDYLPYERPPLSKEYMAGKVGFDKAIVHPAEWYKENNVTLRQGVRATAIDAGSRQVTVDDGGNTETINYDKLVLATGSAVRKLPIPGADASNVHYLRTVEDSDAIKATFGEGKKLVLIGGGWIGLEVASAARGAGTDVTVLEGGKLPLLKVLGETVAQVFADLHVANGVDLRTEVKITDIVTEDGRAVGVRLDDGEVVPADAVVIGIGVTPVIDLAETAGLEIDNGVLVDAALRTSDPDIYAVGDIANHDHPVLGHRIRVEHWATALNQPAAAVKSLLGKDAEFTNLPYFFTDQFDLGCEYVGHATGSQEKVFIRGNLETREFVAFWVDTENRILAAMNVNVWDVPDQIKPLIASGKSVDTEKLVDPEVPYSEL

SEQ ID NO: 24549 - protein, 103 aa, Exiguobacterium sibiricum 255-15
MAIVHATSQSFKEDTQEGLVLVDFWATWCGPCRMLAPVLEELDADMENVKIVKVDVDANPEVAGAFQVQSIPTLVLFKDGQPVNKTMGFMPKDALKEFVETSN

SEQ ID NO: 24550 - protein, 515 aa, Aspergillus nidulans FGSC A4
MVHLASIKKDDDFEPVVNRVDSIKLDTIEEDDYSATVYGTRFATQQLPHAEMPDREMPREVAYRMIKDELSLDGNPMLNLASFVTTYMEDEAEKLMAESFSKNFIDYEEYPQSAEIQNRCVNMIARLFNAPTDSDTDHPMGTSTVGSSEAIMLGTLAMKKRWQNKRKAEGKDYSRPNIVMNSAVQVCWEKAARYFDVEERYVYCTEERYVIDPQQAVDLVDENTIGICAILGTTYTGEYEDVKAINDLLVERGLDCPIHVDAASGGFVAPFIHPTLQWDFRLEKVVSINVSGHKYGLVYPGVGWVVWRSPEFLPKELIFNINYLGAEQASFTLNFSKGASHVIGQYYQMIRLGKRGYRSVMVNITRIADYLADQLEQLGFIIMSQRRGRGLPLVAFRLPADRADETFDEFAIAHQLRERGWIVPAYTMAPHSNNLKLMRVVVREDFSMSRCDQLLSDIKLALKSLREMDQAMLERYTQHVRSHTTKSHRAKHTHPHYKNETHSLQGRTGKTHGVC

SEQ ID NO: 24551 - protein, 139 aa, Candidatus Pelagibacter ubique HTCC1002
MKYLHTMIRISDVEKSLDFYCKGLGLIETRRMENEQGRFTLIFLAAPGDEKAELELTYNWDGDELGDGSRNFGHLAYRVENIYQICERLQDMGYTINRPPRDGHMAFVRSPDNISIEILQEGNLEIKEPWASMKNEGVW

SEQ ID NO: 24552 - protein, 863 aa, Rhodopseudomonas palustris CGA009
MLPPTRPNLKRSLVALRVTTIVLIATIVGTNLIFLGNLRESTLQTAETNLERYTLTLAEEADRSLKSMDLLLSSVRDYVSRAGVTDSESYRRLMSQQSVYSLLSEKITGMPQVDAVTMIDETGKLINFSRYWPIPDVNISDRDYFRALSSDSTLSTFVSAPTRNRGSGTWNIYLAQRLNDTRGGFIGLLLGAISVQYFENFFAATSPGAGTEIALLRSDGTLLVNYPHSDKLGTVVTDAGRLALAAGSRQREAGNSNKQIRVTRMLPNYPIVVRVTQPEDSALQNWQDMAVLMIAMSVISALVIITGSVAIARWWGKQHLYAEAAEAASAAKSSFVAMMSHEIRTPMNAVIGLATNLLETRLDAEQRQAVTSIHDAGDNLLQILDDILDFSKLEAGRLSLEPIPFAPRNIVDNTLSVIGPRAIAKGLVIRLEARGDIPEALTGDAGRIRQVLLNLISNAVKFTTAGEIVITTECISRDTTNARMRWIVTDTGIGIAADKIDSLFKDFVQADSSISRRFGGSGLGLAISKRLIEQMGGKIGVSSAPGRGSEFHFSLTLPIADHAAPPEQDDQDVYAQFRARIEAAGRPLRILVVDDNPTNRAIATQMLGEFRVQTNTACDGTEAVTAATRFGYDVVLMDVRMPEMDGLDATRAIRSHGGALANVPIIAFTANAFAEDAAACRAAGMNDHVAKPVRKKALIEAILRALPPLPAAESPRIVPVPAPLAPPPADNSDQTEVPSDVAGAGQIYVGRKAFGHLVEEIGEDATLAVLSVFARDTEARIALFDTLDIANERRRIEREAHSLKSAAATFGLDTLSGLARELEHAAPHLTQAEYVAMTRQIKAAFSAARRVPADDNQLVELAG

SEQ ID NO: 24553 - protein, 255 aa, Flavobacteria bacterium BBFL7
MNNILVATANKITTITINRPNKLNALNKETIAELSQAIDTAEDDENTRVIILTGSGEKAFVAGADIAEFADFSPEQGKELAAHGQEILFNKVENCSKPVIAAVNGFALGGGLELAMSAHFRIASDNARVGLPEVSLGVIPGYGGTQRLPQLVGKGRAMEMIMTAGMIDAATAHSYGLVNHVVTQDELISTCEKIAGKIMRNSPVAIGAAIDAVNAGYIDGVDGYQAEIDCFGASFGTDDFKEGTTAFLEKRKAEF

SEQ ID NO: 24554 - protein, 124 aa, Oryza sativa
MASTLTNVGLSTPAAAASSLVRPVAGAGRVVFPRVGRGGFAAVRASGPATPPDISDKMSESIDKAKEACAEDTASGECAAAWDEVEELSAAASHARDKLKETSDPLEAYCKDNPETDECRTYDN

SEQ ID NO: 24555 - protein, 1057 aa, Pisum sativum
MERARRLANRATLKRLLSEAKQNRKTESTSTTTTTPLPFSLSGSSSRYVSSVSNSILRGRGSKPDNNVSRRVGGFLGVGYPSQSRSISVEALKPSDTFPRRHNSATPDEQTKMAESVGFDTLDSLVDATVPKSIRLKEMKFNKFDGGLTEGQMIEHMKDLASKNKVFKSFIGMGYYNTHVPPVILRNIMENPAWYTQYTPYQAEISQGRLESLLNFQTMITDLTGLPMSNASLLDEGTAAAEAMSMCNNIQKGKKKTFIIASNCHPQTIDICQTRADGFELKVVVKDLKDIDYKSGDVCGVLVQYPGTEGEVLDYGEFIKKAHANEVKVVMASDLLALTVLKPPGEFGADIVVGSAQRFGVPMGYGGPHAAFLATSQEYKRMMPGRIIGVSVDSSGKQALRMAMQTREQHIRRDKATSNICTAQALLANMAAMYAVYHGPEGLKAIAQRVHGLAGVFALGLKKLGLEVQDLGFFDTVKVKTSNAKAIADAAIKSEINLRVVDGNTITAAFDETTTLEDVDKLFKVFAGGKPVSFTAASLAPEFQNAIPSGLVRESPYLTHPIFNTYQTEHELLRYIHRLQSKDLSLCHSMIPLGSCTMKLNATTEMMPVTWPSFTDLHPFAPTEQAQGYQEMFNNLGDLLCTITGFDSFSLQPNAGAAGEYAGLMVIRAYHLSRGDHHRNVCIIPASAHGTNPASAAMVGMKIVTIGTDAKGNINIEELKKAAEKHKDNLSAFMVTYPSTHGVYEEGIDDICKIIHDNGGQVYMDGANMNAQVGLTSPGWIGADVCHLNLHKTFCIPHGGGGPGMGPIGVKKHLAPFLPSHPVVPTGGIPAPENPQPLGSISAAPWGSALILPISYTYIAMMGSQGLTDASKIAILNANYMAKRLESYYPVLFRGVNGTVAHEFIIDLRGFKNTAGIEPEDVAKRLMDYGFHGPTMSWPVAGTLMIEPTESESKAELDRFCDALISIRKEIAEVEKGNADVHNNVLKGAPHPPSLLMADAWTKPYSREYAAFPAAWLRGAKFWPTTGRVDNVYGDRNLVCTLLPASQAVEEQAAATA

SEQ ID NO: 24556 - protein, 420 aa, Arabidopsis thaliana
  misc_feature (336)..(336): Xaa can be any naturally occurring amino acid
LKRTRGKTMESTKIAPSFDRASELKAFDETKTGVKGLVDSGISKIPRIFHHSSVELANPKPLPSDLLHLKTIPTIDLGGRDFQDAIKHKNAIEGIKEAAAKWGFFQVINHGVSLELLEKMKDGVRDFHEQPPEVRKDLYSRDFGRKFIYLSNFDLYTAAAANWRDTFYCYMAPDPPEPQDLPEICRDVMMEYSKQVMILGEFLFELLSEALGLNPNHLKDMECLKGLRMLCHYFPPCPEPDLTFGTSKHSDGSFLTVLLPDNIEGLQVCREGYWFDVPHVPGALIINIGDLLQASLRNQYMFASSDFTSLFTMLDLFKKSSSWFKAFFFFNCVGCXLITNDKFISLKHRVLANRATRARVSVACFFHTHVKPNPRVYGPIKELVSEENPPKYRETTIRDYATYFNGKGLGGTSALLDFKV

SEQ ID NO: 24557 - protein, 184 aa, Parvularcula bermudensis HTCC2503
MTLALWQKITLVLGSAALMEGFAWWAHRYIMHGWGWAWHRDHHEPHDKVFEKNDLFAVVFGSFAFGLFIVGYLYWPPVWYVAAGITLYGLLYAFVHDGLVHQRWPWHFMPKRGYLRRLVQAHKLHHAVTTQGGNVSFGFVLAPDPRHLREKLRQFRAERHRALAAEGASSSDPRVPPFRKVQDV

SEQ ID NO: 24558 - protein, 913 aa, Staphylococcus aureus
MKKRIDYLSNKQNKYSIRRFTVGTTSVIVGATILFGIGNHQAQASEQSNDTTQSSKNNASADSEKNNMIETPQLNTTANDTSDISANTNSANVDSTTKPMSTQTSNTTTTEPASTNETPQPTAIKNQATAAKMQDQTVPQEGNSQVDNKTTNDANSIATNSELKNSQTLDLPQSSPQTISNAQGTSKPSVRTRAVRSLAVAEPVVNAADAKGTNVNDKVTASNFKLEKTTFDPNQSGNTFMAANFTVTDKVKSGDYFTAKLPDSLTGNGDVDYSNSNNTMPIADIKSTNGDVVAKATYDILTKTYTFVFTDYVNNKENINGQFSLPLFTDRAKAPKSGTYDANINIADEMFNNKITYNYSSPIAGIDKPNGANISSQIIGVDTASGQNTYKQTVFVNPKQRVLGNTWVYIKGYQDKIEESSGKVSATDTKLRIFEVNDTSKLSDSYYADPNDSNLKEVTDQFKNRIYYEHPNVASIKFGDITKTYVVLVEGHYDNTGKNLKTQVIQENVDPVTNRDYSIFGWNNENVVRYGGGSADGDSAVNPKDPTPGPPVDPEPSPDPEPEPTPDPEPSPDPEPEPSPDPDPDSDSDSDSGSDSDSGSDSDSESDSDSDSDSDSDSDSDSESDSDSESDSDSDSDSDSDSDSDSDSDSDSDSDSDSDSDSDSESDSDSESDSESDSDSDSDSDSDSDSDSDSDSDSDSDSDSDSDSDSDSDSDSDSDSDSDSDSDSDSDSDSDSDSDSDSDSDSDSDSDSDSDSDSDSDSDSDSDSDSDSDSDSDSDSDSDSDSDSDSDSDSDSDSDSDSDSDSDSDSDSDSDSDSDSDSDSDSDSDSDSDSDSDSDSRVTPPNNEQKAPSNPKGEVNHSNKVSKQHKTDALPETGDKSENTNATLFGAMMALLGSLLLFRKRKQDHKEKA

SEQ ID NO: 24559 - protein, 522 aa, Bradyrhizobium japonicum USDA 110
MSGLIDIKVPDIGDFKDVPVIEVFVKPGDKVKAEDPLVALESDKATMEVPSPRDGVVKSVVVKVGDKVSEGAVIVQFEGAGAEQAETRPVVSAPPSPVSAPAGVAEVRVPDIGDFKDVPVIEIFVKPGDSVKAEDPLIALESDKATMEVPAPLSGTVREIKVKTGDKVSEGAIILVLATGDASAAANAAAPALAPASQATAAALAVQAAGVDEQAFALAYAGPAVRKLAREMGVDLGKIKGSGNHGRIVREDVEASAKGGAPAAKPQAAAASGGGVGSIDLLPWPKIDFAKFGPVERKELGRIKKISAANLHRNWVVIPHVTTHDEADITELEQFRVKMNKELEKSGVKLSLLPFMVKAAVAALKKFPEFNASLDGDTLVYKNYWHIGFAADTPNGLMVPVIRDADKKSLPEIANEMNALAKLAREGKIKPDQMQGGTFSISSLGGIGGIYFTPIINAPEVAIMGVCKGYWKQHSPDGKTWASRLTLPLSLSWDHRVIDGAAAARFNVYFASVLADLRRVLF

SEQ ID NO: 24560 - protein, 140 aa, Campylobacter jejuni subsp. jejuni NCTC 11168
MTKEQIQIIKDCVPILQKNGEDLTNEFYKIMFNDYPEVKPMFNMEKQISGEQPKALAMAILMAAKNIENLENMRSFVDKVAITHVNLGVKEEHYPIVGACLLKAIKNLLNPDEATLKAWEVAYGKIAKFYIDIEKKLYDK

SEQ ID NO: 24561 - protein, 371 aa, Schizosaccharomyces pombe
MCAKKIVVLPGDHIGPEIVASALEVLKVVEKKRPELKLEFEEHKIGGASIDAYGTPLTDETVKACLEADGVLLGAVGGPEWTNPNCRPEQGLLKLRKSMGVWANLRPCNFASKSLVKYSPLKPEIVEGVDFCVVRELTGGCYFGERTEDNGSGYAMDTWPYSLEEVSRIARLAAWLAETSNPPAPVTLLDKANVLATSRLWRKTVAKIFKEEYPHLTLKNQLIDSAAMLLVKSPRTLNGVVLTDNLFGDIISDEASVIPGSLGLLPSASLSGVVGKSEEKVHCLVEPIHGSAPDIAGKGIVNPVGTILSASLLLRYGLNAPKEAEAIEAAVRKVLDDTSIGGRGLYTRDLGGEASTADITKAVVEELEKIL

SEQ ID NO: 24562 - protein, 339 aa, Arabidopsis thaliana
MATATSHQSVVSFASLRSSPSSTISQCGFKIDSSLSFTSKKTNFCKIKAMASSVSYDNTLLSPSKTIPDNSQKKSNEAALILIRHGESLWNEKNLFTGCVDVPLTEKGVEEAIEAGKRISNIPVDVIFTSSLIRAQMTAMLAMIQHRRKKVPIILHDESEQAKTWSQVFSDETKNQSIPVIPAWQLNERMYKYIWYGELQGLNKQETAERYGKEQVHEWRRSYDIPPPKGESLEMCAERAVAYFQDNIEPKLAAGKNVMIAAHGNSLRSIIMYLDKLTCQEVISLELSTGIPLLYIFKEGKFMKRGSPVGPTEAGVYAYTKRLAQYRQKLEDDSEVLCA

SEQ ID NO: 24563 - protein, 148 aa, Gossypium hirsutum
MASKRILKELKDLQKDPPTSCSAGPVAEDMFHWQATLMGPSDSPYAGGVFLVSIHFPPDYPFKPPKVAFRTKVFHPNINSNGSICLDILKEQWSPALTISKVLLSICSLLTDPNPDDPLVPEIAHMYKTDRAKYEATACGWTQKYAMG

SEQ ID NO: 24564 - protein, 334 aa, Idiomarina baltica OS145
MSRKITVIPGDGIGPDIVKSALAILEKAGCEFDYEFVDAGLTALEKTGELLPQATLDAIAKNGVTLKGPLTTPVGEGFTSINVSLRKRFGLYANLRPVKSFKGTQARYDNIDIITVRENTEGMYSGLGQKVSEDGSEAEAMSKITRAGAERIVRFAYDLARREGRKKVTAVHKANILKSTSGLFLKVAREIADEYPDIESAEMIVDAACMRLVMNPEDFDVLVTTNLFGDILSDLCAGLVGGLGMAPGANIGKDCAIFEAVHGSAPDIAGKNLANPSSVILAAVQMLEYLEMPEPAEKITRALAEVIESGDRTTRDLGGSHGTTDFTDAIIERL

SEQ ID NO: 24565 - protein, 112 aa, Caulobacter crescentus CB15
MKKIEAVIKPFKLDEVKEALQDMGVQGMTVLEAKGYGRQKGHTELYRGAEYVVDFLPKIKVEVVVEDSQLEPALEAITRAARTGRIGDGKIFVSEIAEVIRIRTGENGPAAV

SEQ ID NO: 24566 - protein, 118 aa, Zea mays
MRDFTAKTMLLFVITLLVVIAYHEGEAISCSQVNMFLAPCLSYLRGVGNPSQPCCAGLNSLKAAAPGKAERQTACQCLKSVSNTIPGINDDNAKQLPSKCGVDLGVPFSKSVDCNSIN

SEQ ID NO: 24567 - protein, 148 aa, Gossypium hirsutum
MASKRILKELKDLQKDPPTSCSAGPVAEDMFHWQATIMGPSDSPYAGGVFLVSIHFPPDYPFKPPKVAFRTKVFHPNINSNGSICLDILKEQWSPALTISKVLLSICSLLTDPNPDDPLVLEIAHMYKTDRAKYEATARGWTQKYAMG

SEQ ID NO: 24568 - protein, 190 aa, Triticum aestivum
MSSSSSFPGPRFPGAGAGASGGGGGGGGGSGSSVRPWGSSGGTSVSSSGKRIQKELLDLNASDCSAGPKGDNLYHWLSTIIGPQGSPYEGGIFFLDVVFPLDYPFKPPMVTFKTRIYHCNVDSTGAVSLEILKDGWSPALTISKVLLAIKAIITNPDPYNPLVESIARLYLTDRAKHDEIAAEWTLRFAR

SEQ ID NO: 24569 - protein, 148 aa, Gossypium arboreum
MASKRILKELKDLQKDPPTSCSAGPVAEDMFHWQATLMGPSDSPYAGGVFLVSIHFPPDYPFKPPKVAFRTKVFHPNINSNGSICLDILKEQWSPALTISKVLLSICSLLTDPNPDDPLVPEIAHMYKTDRAKYEATARGWTQKYAMG

SEQ ID NO: 24570 - protein, 322 aa, Spirodela polyrrhiza
MAMGEEREPAPETVVVKANGRSAIRSLVATMLWVCPIALTAFLCLVALYCRSTASLWIIGFLLLLVFVPVSDKSKYGRAIGSFVGRYSPGYFHVNVHFEDVKAFDDSRSYVIAAEPHSIFPIGAVSLLNITGLMPLTKSKVLASTAIFCTPFLRQVTTWMGLVPATRKNFVNYLKAGYSCIVIPGGVQEIIYMNKDYEVAYLKKRHGFVRVAIETGSPLVPVFCFGQNEAFSWWKPGGRLYVRLSRAIRFAPLVFWGVLGSPIPYRSPIDVVVGKPMEVKQNPNPSAEEVAELHAQFLSNVETLFSKYRESTGNAGAELRIL

SEQ ID NO: 24571 - protein, 433 aa, uncultured archaeon GZfos26F9
MRDLWGLMREYDIVVVGGGPAGCMAAKYAAKAGASTLIIEENSAIGEPVQCAGLISKRAIEESELKNIGSFVNCELKGAIVHSQSHELRIESPSPDKSAFAIRRDIFDKELAKAAMDEGADLILNSKVKHVKRGRERDGAKLTILAAATTTNAGVNLEENEIKANVVIGADGWRSGIARMAGVGDGLTVTKNFLNCVQIEGQYEIHEPVADIFVGKTIAPGFFAWVIPIGETTARIGLCIDKRFSPHPNPLPFLKRILSEHPVIAKKYKFGAQSQFTAGAIPIPTERQKTVKTEEGTGILLVGDAAAQVKPITGGGVYYGMKCGKIAGEAAARACLERNMELLNGYEKRWQEEIGAEMAFGLKIHRLRCVFSDKDFDRMCQALSKYDMIQRITNRGDMDYPSFVFRELLKNPGIIMLMAKNIIKYLYAERKIR

SEQ ID NO: 24572 - protein, 368 aa, Zea mays
MDRELLETFDAAKKAADAAAGQGNSPEAGRCLDALRRLRDIRVNTDILVSTQVGKRLRPLTKHPHSGIQAVAADLFGYWKKVVLEESGKKNGGSENERSSDSSGKVEKVRPVKIEKNSASASMKLEKRDVDVRGQKPNNVKVEKTTSNGSKAQSVKVERVSKEVIRTPDAKRPASVPNGHPKLTSLVKCNDPTRDKIRELLAEAFVRVSRETSDDDRDEVRNILDEVEACDPYRVAVTVESALFERLGPSTGTHRAKYRSIMFNLRAENNTDFRRRVLIGLVAPERLPDIPPDEMASDARKQENMQIKEKALFDCERGAAPKATTDQFKCARCGQRKTTYYQLQTRSADEPMTTFVTCVNCNNHWKFC

SEQ ID NO: 24573 - protein, 127 aa, Medicago truncatula
MPSRRRTLLKVIILGDSGYVNKKFSNQYKATIGADFLTKEVQFEDRLFTLQIWDTAGQERFQSLGVAFYRGADCCVLVYDVNSMKSFDNLNNWREEFLIQANPSDPENFPFVVIGNKIDIDGGNSRV

SEQ ID NO: 24574 - protein, 476 aa, Mycobacterium tuberculosis H37Rv
MPTTSMSLRELMLRRRPVSGAPVASGASGNLKRSFGTFQLTMFGVGATIGTGIFFVLAQAVPEAGPGVIVSFIIAGIAAGLAAICYAELASAVPISGSAYSYAYTTLGEAVAMVVAACLLLEYGVATAAVAVGWSGYVNKLLSNLFGFQMPHVLSAAPWDTHPGWVNLPAVILIGLCALLLIRGASESARVNAIMVLIKLGVLGMFMIIAFSAYSADHLKDFVPFGVAGIGSAAGTIFFSYIGLDAVSTAGDEVKDPQKTMPRALIAALVVVTGVYVLVALAALGTQPWQDFAEQETAGLAIILDNVTHGEWASTILAAGAVVSIFTVTLVTMYGQTRILFAMGRDGLLPARFAKVNPRTMTPVHNTVIVAIFASTLAAFIPLDSLADMVSIGTLTAFSVVAVGVIVLRVREPDLPRGFKVPGYPVTPVLSVLACGYILASLHWYTWLAFSGWVAVAVIFYLMWGRHHSALNEEVP

SEQ ID NO: 24575 - protein, 584 aa, Triticum aestivum
MASAAAPLIVSLLCCTALAVHAAHVVYPELQSLEATEVDKELRTGYHFQPPKHWINDPNGPMYYKGLYHLFYQYNPKGAVWGNIIWAHSVSTDLVDWVALEPGIYPSKPFDINGCWSGSATILPNGVPVIMYTGIEPKETPSAERRVPGQPLRPFLRKWVKPDYNPIINPDHGINASAFRDPTTAWYGPDGHWRLVVGSKENMRGIAVLYRSRDFRRWIKAHHSLHAGLTGMWECPDFYPVAVAGGRRHHRSGVDTRELHDSTVAAEVKYVLKVSLDVTRYEYYTIGWYDHAKDRYTPDLDFPDNDYGLRYDYGDFYASKSFYDPVKKRRVLWGWANESDTVPDDRNKGWAGIQAIPRKIFLSRSGRQLIQWPVEEIKSLRAKHVNVSNKAVKGGEYFKIDGFKSVQSDVEAAFVIKNLEKAEKFDTAWQTDAQGLCKKLNSHVKGGVGPFGLWLLASDDLKERTAVFFRVFKNNDTSYVVLMCNDPTRSSYESLIYRPTFAGFVNVDITKTKKIALRTLIDQSVVESFGAGGKTCILTRVYPRKAVGDNAHLFVFNNGESDIKLTNLRAWEMKTPTMNKRLGQ

SEQ ID NO: 24576 - protein, 335 aa, Xanthomonas oryzae pv. oryzae KACC10331
MNMAIKVGINGFGRIGRNVLRSAVQNFANDIEIVAINDLLEPDYLAYMLQYDSVHGRFKADVSVDGNTLIVNGKKIRLTQERDPANLKWDAVGADVVIESTGLFLTKDTAQKHIDAGAKKVILSAPSKDDTPMFVYGVNDKTYKGEAIVSNASCTTNCLAPLAKVINDKWGIKRGLMTTVHAATATQKTVDGPSNKDWRGGRGILENIIPSSTGAAKAVGVVIPALNKKLTGMSFRVPTSDVSVVDLTVELEKPATYAEICAEVKAQSEGALKGVLGYTEDKVVATDFRGETCTSVFDADAGIALDSTFVKLVSWYDNEWGYSNKCLEMVRVVAK

SEQ ID NO: 24577 - protein, 239 aa, Oryza sativa
MESRKPPPSALVDNHVVPGDVVLDLTEMTNQTIKLGAGLRQDCDTIQATSAGRLRLSKPNKYWVESSQKRYIPSVEDTVLGVVVDTKPDNFLVDIKGPNLAFLPVLAFEGGTRRNIPKFEIGTLIYARVVKANSIMNPELSCMDATGKAAEFGQLKDGYMFATSTGLSRMLLSSPTCPVLGALGKKLSFEIAVALNGRVWVNAPSPSNVIVVSNAIIKSEFLSGIGQRSMVESFLGRLF

SEQ ID NO: 24578 - protein, 157 aa, Oryza sativa
  misc_feature (18)..(18): Xaa can be any naturally occurring amino acid
  misc_feature (75)..(75): Xaa can be any naturally occurring amino acid
  misc_feature (82)..(82): Xaa can be any naturally occurring amino acid
  misc_feature (88)..(88): Xaa can be any naturally occurring amino acid
MATTAAAYGCPAAAAAAXFAASVSRRRAPLSCVSLASSSSRRRTAEFPGLRVSCLRKILAVSACSGEADSDAGSXAPAESTXFDLNLXPRRSLLGQFTCNACGERTKRLINRVAYERGTIFLQCAGCQVYHKFVDNLGLVVEYDLREENGMNTDTET

SEQ ID NO: 24579 - protein, 438 aa, Symbiobacterium thermophilum IAM 14863
MRGVTNGGKEMGGAQNPFLIAQQQVRNAVAALGESEELFELLKAPAHFIEVQIPVRMDDGSLRVFTGYRSQHLTTLGPAKGGIRFHPAVTADEVKALSMWMTFKTSVVGLPYGGGKGGVVVDPRKLSLGELERLSRGYVRAIWPYLGPDKDIPAPDVNTNAQIMGWMTDEYETIVGASCPAVFTGKPLSMGGSLGREEATGRGTVITIREALAYLGLPVAGARVAVQGFGNAGQHAARLLEELGAVLVAASDSRGGIVCPGGMRVADLIAYKQATGSVVGFPGSRATDQFGVLTADCDILVPAALENQIDAEVARSIRARVVAEAANGPTTPDGDHVLAQRKIFLIPDILANAGGVTVSYFEWVQNRNQYYWTAEEVNARLEQRMVASFRDVVAMAERHGAYTRTAAYMYAIHRIAESLRMRGLLRAPARQALRAAAG

SEQ ID NO: 24580 - protein, 93 aa, Arabidopsis thaliana
RFAAITSGSVNINLGTSIGYLLECGVIPPTRCSSVKAPNSIPKTTPHRQHACNCIQGAARALRSGLNAGRAAGIPKACGVNIPYKISTSTNCK

SEQ ID NO: 24581 - protein, 145 aa, Vigna unguiculata
MVAFSDKQEGLVNGAYEAFKADIPKYSVVFYTTILEKAPAAKNLFSFLANGVDATNPKLTGHAEKLFGLVRDSAAQLRASGGVVADAALGAVHSQKAVNDAQFVVVKEALVKTLKEAVGDKWSDELGTAVELAYDELAAAIKKAY

SEQ ID NO: 24582 - protein, 955 aa, Chloris gayana
MATKAEKHHSIDAQLRLLAPGKVSEDDKLVEYDALLIDRFLDILQNLHGSALRELVQECYEMSAEYDVKRDETRLDELGAKLSGLDPADAITVASSFSHMLNLANLAEEVQIAQRRRSKLKHGDFSDEGSATTESDIEETLKRLVSEIGKSPQEVFDALKNQTVELVLTAHPTQSLRRSLLQKHTKIRNCLTQLYAKDITEDEKKELDEALQAEIQAAFRTDEIRRSQPTPQDEMRYGMSYFHETIWKGVPKFLRRVDTALKSIGINERLPYDAPVIKFSSWMGGDRDGNPRVTPEVTRDVCLLARMMAANLYVSSIEDLMFELSMWRCNDELRARADEHLASRETKKHYIEFWRAIPESEPYRVLLGYVRDKLYNTRERALHMLTKGYSEIKEEATITSVEEFMEPLEVCYKSLCDCGDKTIADGLLLDFMRQVNTFGLSLAKLDIRQESERHTDAVDAITTHLGIGSYKEWPEEKRQEWLLSELQGKRPLLVPDLPVTEEVEAVLGCFKVLAELPRDSFGPYIISMATAPSDVLAVELLQRECGVRQPLPVVPLFERLADLQNAPASVERLFSIDWYLNRIGGKQQIMVGYSDSGKDAGRLSAAWQLYQAQELVAQVAKKYDVKVTFFHGRGGTVGRGGGPTHLAILSQPPETINGSLRVTIQGEVIEHSFGEEHLCFRTLQRFTAATLEHGMHPPISPKPEWRKLMDEMAVVATDAYRSVVVKEPRFVEYFRSATPETEYGRMNIGSRPAKRRPGGGITTLRAIPWIFSWTQTRFHLPVWLGVGSAFKSAIDKDIKNFQLLKDMYREWPFFRVTLDLLEMVFAKGDPGIAALYDKLLVTDELKPFGEQLRSKYAETEQLLLQIAGHKEILEADPYLKQRLRLRDPYITTLNVFQAYTLKQIRDPNFKVKTQPPLNKEQDLVKLNPASEYAPGLEDTLIITMKGIAAGMQNTG

SEQ ID NO: 24583 - protein, 123 aa, Arabidopsis thaliana
  misc_feature (7)..(7): Xaa can be any naturally occurring amino acid
  misc_feature (48)..(48): Xaa can be any naturally occurring amino acid
MASSMLXSAAVVTSPAQATMVAPFTGLKSSAAFPVTRKTNKDITSIAXNGGRVSCIKGGPPIGKKKVGTLSYLPDLNGLELAKGGDYLLRNKGIPWVEIQLKHGFLYREHGNTPGYYDGRYWT

SEQ ID NO: 24584 - protein, 206 aa, Pisum sativum
MPSRRRTLLKVIILGDSGVGKTSLMNQYVNKKFSNQYKATIGADFLTKEVQFEDRLFTLQIWDTAGQERFQSLGVAFYRGADCCVLVYDVNSVKSFDNLNNWREEFLIQANPSDPENFPFVVIGNKIDIDGGNSRVVSEKKARAWCAAKGNIPYFETSAKEGINVEEAFQTIAKDALKSGEEEELYLPDTIDVGNSSQPRSTGCEC

SEQ ID NO: 24585 - protein, 540 aa, Lactococcus lactis subsp. lactis
MRAHEILNNPFLNKGTAFTMKERQELGLIGLLPPTVQTIEEQAEQTYEQYLTKPSDLEKRHFLMEIFNTNRTLFYYLFNKHIVEFNPVVYDPTIADTIENYSHLFVDPQYAAYLDINHPENITETLKNAAGDRDIRLIVVTDAEGILGIGDWGTQGVDISVGKLMIYTAAAGIDPASVLPVVIDAGTNRKELLEDHLYLGNHQERIYGDQYYSFVDQFVETAESIFPKLYLHWEDFGRSNAATILNNYKTKIPTFNDDIQGTGIVVLGGIFGSLDITGEKLTDQVYLCYGGGSAGAGIAGRVHAEMVSEGLSEEEAYKHFFMIDQQGLLFDDMDDLTPAQKPFAKKRADYKDAGDMTDLLNIVKTVKPTILVGTSTNPGAFTKEVVEAMCANTERPVIFPISNPTKKMEATAEQVIEWSDGKAFVATGVPSGTINYKGVDYQIGQANNSLIYPGLGLGMLASEAKLLTDEMIGAAAHSLSGLVDPGKPGAPVLPPFEFVADVSIKVAEAVAKKAQEQGLTESKETDMAKAVRDLKWYPEY

SEQ ID NO: 24586 - protein, 521 aa, Gibberella zeae PH-1
MEKFPDFVDTPLGESPSDSPSNTPGWANGAPPRPSDRWLPVSKHDSNWSTASRGHTRQKSLTDAIRTIRGRNGSVSQNAQEIADALRAPVSPKLIILCLMWYASSALTNTSSKSILIAFDKPATLTLVQFAFVSSLCIFMAWLATIFPVLRTKVAALKYPIRKPTRDVIRTTLPLAAFQIGGHLLSSTATSKIPVSLVHTIKGLSPLFTVLAYRFVYDIRYPKTTYLSLIPLTFGVMLACSGKTTYGGELIGVIHALLATVIFVTQNIFSKKLFNEAAKAEAESPHSMSKKLDKLNLLCYSSGMAFLLTLPIWLWSEGFTLLMNLYHEGSIDLNEQPNSMDHGRLTLEFIFNGVFHFGQNILAFILLSIVSPVTYSVASLIKRVFVIVLALVWFRSPTTPIQGVGIALTFLGLYLYDRTKSSNKADQKAQSMQVKRSSLLPTTNGGLRPTPITESPQSTDLNPYPYREGYFGRPTAAEDSKKSDDGGARSRTPATSNGWLPPGTKQEDTWQPGDRVAGVAR

SEQ ID NO: 24587 - protein, 442 aa, Saccharomyces cerevisiae
MSRRVVITGLGCVTPLGRSLSESWGNLLSSKNGLTPITSLPNYNEDYKLREKSIPSTITVGKIPENFQNENSAINKLLFTSQDERRTSSFIKLALRTTYEALHNAGLLNPNDITINTSLCNLDHFGCLIGSGIGSIQDIYQTSLQFHNDNKRINPYFVPKILTNMAAGNVSIKFNLRGLSHSVSTACATGNNSIGDAFNFIRLGMQDICVAGASETSLHPLSLAGFIRAKSITTNGISRPFDTQRSGFVLGEGCGMIVMESLEHAQKRNANIISELVGYGLSSDACHITSPPADGNGAKRAIEMALKMARLEPTDVDYVNAHATSTLLGDKAECLAVASALLPGRSKSKPLYISSNKGAIGHLLGARGAVESIFTICSLKDDKMPHTLNLDNVLTLENNEADKLHFIRDKPIVGANPKYALCNSFGFGGVNTSLLFKKWEGS

SEQ ID NO: 24588 - protein, 232 aa, Debaryomyces hansenii CBS767
MVKSIIAPSILASDFANLGCNCHRMYDSGADWLHIDVMDGHFVPNISMGPPIIDSLRKEIPRSETKASFFDCHMMVSEPEKWVPEIAKAGGDQYTFHYESTKDPVALVKLIKSHGMKAACAVKPGTPVDVLYPLAEDLDMALVMTVEPGFGGQKFMPEMMPKVESLRQKFPELNIQVDGGLGHETIPAAAEAGANVIVAGTAVFKAQDPKEMIQLLRNAVNKNLKSRGLLDE

SEQ ID NO: 24589 - protein, 542 aa, Pediococcus damnosus
MAKSPVEILNDPFLNKGTAFTKEERQSLGLVGLLPPYVQTLDEQAAQTYAQVESKTSSLEKRIFLMEIFNENRVLFYKLFSQHVVEFMPIVYDPTIADTIENYSELFVQPQNATFLSIDDPDSMKDSLKNAADGRDIRLIVVTDAEGILGIGDWGTNGVDISVGKLMVYTAAAGIDPSQVMPVALDTGTNNQDLLKDPMYLGNRHERVTGDRYYKFVDQFVNTAEDLFPKLYLHFEDFARDNDANILNTYKDKITTFNDDIQGTGIIVLAGILGALNISKQKMTDQVYLSFGAGTAGAGITKRIYDEFLQQGLSADEAKKHFYLVDKQGLLFDDDKTLTPEQKPFARSRSEFANADDLTTLEAAVKAIHPTILVGTSTQPGTFTESIVKEMAAHTDRPIIFPLSNPTKLAEAKAEDLIKWSDGKALVATGIPADDVEYNGVTYQIGQANNALVYPGLGLGVIASTAKVLNDEMISKAAHSLGGIVDGNKAGAAVLPPVSKLDQFSYTVAKAAAQSAVDQKLNQEPISDVDKAITDMKWEPKY

SEQ ID NO: 24590 - protein, 488 aa, Zea mays
  misc_feature (46)..(46): Xaa can be any naturally occurring amino acid
MGGHQLHLSSPTAVLGHVTPALCDLYAVGRKLGQGQFGTTYLCTEXSTGAAFGCKSIAKRKLLTPEDVDDVRREIQIMHHLAGHKSMVTIKGAYEDPLYVHIVMELCEGGELFDRIVNRGYFSERKAAEIARVIGGVVEACHSLGVIHRDLKPENFLFANKSEDSQLKVIDFGLSVFFSPGDRFTEVVGSAYYMAPEVLKRNYGPEVDVWSAGVILYILLCGVPPFWGDNDEKIAQAVLRGNIDFNREPWPRVSANAKDLIRRMLDPNPSTRLTARQVLEHPWLKNADTAPNVSLGEAVRARLQQFSAMNKFKKKALGVVARNLPVEELDKYVQMFHLMDKDHNGNLTLEELMDGLHINGQPVPESEIRMLLEAADTDGNGTLDCDEFVTVSLHLKKMSNDEYLASAFRYFDKDGSGFIEPEELRDELGPNDQAILDIIRDVDTDRDGRISYQEFELMMKSGTDWRNGSRQYSRANFSSLSRRLCKDM

SEQ ID NO: 24591 - protein, 222 aa, Mesembryanthemum crystallinum
WLVDSKGLIVSSRKNSLQEFKKPWAHEHEPLGDLSSAVKAIKPTVLIGSSGVGRTFTKEVIEAMASFNEKPLIMALSNPTTQSECTAEEAYTWSKGRAIFASGSPFNSVEYEGKTFVPGQSNNAYIFPGFGLGLVISGAIRVHEDMLLAASEALAGQVTQENYDKGMIYPPFSNIRKISAAIAANVAAKAYDLGLATRLPRPENLVKYAENCMYSPVYRSFR

SEQ ID NO: 24592 - protein, 572 aa, Saccharomyces cerevisiae
MCGIFAAFKHEDIHNFKPKALQLSKKIRHRGPDWSGNAVMNSTIFVHERLAIVGLDSGAQPITSADGEYMLGVNGEIYNHIQLREMCSDYKFQTFSDCEPIIPLYLEHDIDAPKYLDGMFAFCLYDSKKDRIVAARDPIGVVTLYMGRSSQSPETVYFASELKCLTDVCDSIISFPPGHVYDSETDKITRYFTPDWLDEKRIPSTPVDYHAIRHSLEKAVRKRLMAEVPYGVLLSGGLDSSLIAAIAARETEKANADANEDNNVDEKQLAGIDDQGHLHTSGWSRLHSFAIGLPNAPDLQAARKVAKFIGSIHHEHTFTLQEGLDALDDVIYHLETYDVTTIRASTPMFLLSRKIKAQGVKMVLSGEGSDEIFGGYLYFAQAPSAAEFHTESVQRVKNLHLADCLRANKSTMAWGLEARVPFLDKDFLQLCMNIDPNEKMIKPKEGRIEKYILRKAFDTTDEPDVKPYLPEEILWRQKEQFSDGVGYSWIDGLRDTAERAISDAMFANPKADWGDDIPTTKEAYWYRLKFDAWFPQKTAADTVMRWIPKADWGCAEDPSGRYAKIHEKHVSA

SEQ ID NO: 24593 - protein, 827 aa, Magnetospirillum magnetotacticum MS-1
MSLTRRDFIKANAVAATAAAAGLATPAIAQPAKANIRWDKGVCRFCGTGCSVLVGVQDGRVVATQGDPDSPVNRGLNCIKGYFLSKIMYGEDRLTRPLLRMKDGKFDKNGEFQPISWDQAFDIMAEKWKEQLKKPDGVTRVGMFGSGQWTIWEGYAASKLYKAGFRSNNLDPNARHCMASAVAGFMRTFGIDEPMGCYDDIEQTDAFVLWGSNMAEMHPILWSRVTDRRLTHEGCKVAVLSTFEHRSFELADIPMVFTPQTDLAILNYICHYIISKNAYNKEFIDKHVNFKKGATDIGYGLRPTHALEKDQANAATPDKADPMTFDEFKAFVAEYTVEKVSKLSGVPADKLEALAKLYADPKVKVVSFWTMGFNQHTRGTWVNNMIYNVHLLMGKISEPGNSPFSLTGQPSACGTAREVGTFAHRLPADMVVMNDKHREIAEGLWKLPAGTINPKIGYHAVLQHRMLKDGKLNAYWVMCTNNMQTAPNMNEEGYPGYRNPANFIVVSDPYPTVTALAADLILPTAMWMEKEGAYGNAERRTQFWRQQVKAPGEARSDLWQIMEFSKRFKIEEVWPEELIAKKPELRGKTLFEVLYKNGQVDKFPLTELQAGFENDEAKAFGFYPQKGLFEEYASFGRGHAHDLAPFESYHKARGLRWPVVDGKETLWRFREGYDPYVKAGEGVKFYGKPDGKAWIFALPYAPAAESPDKDFDLWLSTGRVLEHWHSGSMTRRVPELHKSVPNAVLYMHPNDAAKRNLRNGDVVKVASRRGEVTTRIDTRGRNKPPEGLVFMPFFDESQLVNKLTLDATCPISKETDYKKCAVKVSKA

SEQ ID NO: 24594 - protein, 425 aa, Streptomyces coelicolor A3(2)
MGLVVQKYGGSSVADAEGIKRVAKRIVEAKKNGNQVVAVVSAMGDTTDELIDLAEQVSPIPAGRELDMLLTAGERISMALLAMAIKNLGHEAQSFTGSQAGVITDSVHNKARIIDVTPGRIRTSVDEGNVAIVAGFQGVSQDSKDITTLGRGGSDTTAVALAAALDADVCEIYTDVDGVFTADPRVVPKAKKIDWISFEDMLELAASGSKVLLHRCVEYARRYNIPIHVRSSFSGLQGTWVSSEPIKQGEKHVEQALISGVAHDTSEAKVTVVGVPDKPGEAAAIFRAIADAQVNIDMVVQNVSAASTGLTDISFTLPKSEGRKAIDALEKNRPGIGFDSLRYDDQIGKISLVGAGMKSNPGVTADFFTALSDAGVNIELISTSEIRISVVTRKDDVNEAVRAVHTAFGLDSDSDEAVVYGGTGR

SEQ ID NO: 24595 - protein, 105 aa, Zea mays
FLNFMLAGSTSALRFGIILGLALLALGISSLRSQRDGGRRPRLLVKGQAAIASVIFFREFSVLLQNGWFPKIFMVLLSGVVAGFYFYRIAAGSPKELSSNSDSVN

SEQ ID NO: 24596 - protein, 247 aa, Zea mays
  misc_feature (205)..(205): Xaa can be any naturally occurring amino acid
  misc_feature (239)..(239): Xaa can be any naturally occurring amino acid
MYLDYPVTNGATDLCIMSDKDLDDARSCDSDIIKTTPDMGSWEEKVRQFLLDEEEDDDELFFVILPAIIPYLSEEKEPIHTSSLTGAKKVREILEGHESWCKSEFRMEPAIFKTTTNFLRRENLLRDTRGVTIEEQLGMFMYMISHNASNQMLQKAFQHSGETIHKKISEVFDIVPTLTQRFVKLPSSIQTHTKIATDSRFMPFXNCIGAIDDTHIPTHIAEHRPPHIEHERTLSHMVXVACDFDLN

SEQ ID NO: 24597 - protein, 136 aa, Zea mays
  misc_feature (95)..(95): Xaa can be any naturally occurring amino acid
  misc_feature (106)..(106): Xaa can be any naturally occurring amino acid
  misc_feature (132)..(132): Xaa can be any naturally occurring amino acid
PVTSACANSPSELELAERQAPPSSRNGARTQQLEVVATAEEALVLLAAAETSEAGISCGQVATGKAPWIPYSRGQSSGPFAGWCRGGRSLNNAAXPTGDRRAVCNXLKNADAGLSGLDAGNAASIPSKCGVXIPYT

SEQ ID NO: 24598 - protein, 148 aa, Gossypium raimondii
MASKRILKELKDLQKDPPTSCSAGPVAEDMFHWQATIMGPSDSPYAGGVFLVSIHFPPDYPFKPPKVAFRTKVFHPNINSNGSICLDILKEQWSPALTISKVLLSICSLLTDPNPDDPLVPEIAHMYKTDRAKYEATARGWTQKYAMG

SEQ ID NO: 24599 - protein, 297 aa, Methanosarcina acetivorans C2A
MTDTNPENVNNSKITIICSAPDLASQNIKKHLLALREWKPLELPENSGFSAVLESADGKFRLVDIEEIHVFQDGLDKKLEAAGLPAELIIFASKHRSKEEVKSLTVHCTGNSSNEARLGGHPKELAVSSPPAMKSILMEMKRLAKVKGLDYDVTLEVTHHGPTELNVPSLYAEIGSTEGQWEEPVPGEIVARAILTVSLEKVPTAVGFGGGHYAMRQTGLLLETAISFGHNFPKYQLEFVDEALIRQAVEKSNAEFAYFDRKSMKSADRKRISQILEKLGLKVLKESEIREKYGREE

SEQ ID NO: 24600 - protein, 478 aa, Anabaena variabilis ATCC 29413
MPVIASSIKFGTDGWRGVIGDEFTFERLALVAPVAAKVLYDTYYSTVGSRTIIVGYDRRFMAEDFARAVADAVTSVGFDVLLSEGYAPTPAFSWAAKQLNALGALVITASHNPGAYLGLKVKGYFGGSVSPEVTKDIEALLSTGVPPAATPGKLETFDPWPSYTQGLEGKVDIAKIRKAIASGELTVFADVMHGAAATGLGRLLGERVQEINSDRDPLFGGGAPEPLPKYLSLLFETIRKHRETNPSSLSVGLVFDGDCDRIAAVDGNANFLSSQILIPILIDHLTQRRNFTGEIVKTVSGSDLIPKVAALHNLAIFETAVGYKYIADRMLAAPVLLGGEESGGIGYGSHIPERDALLSALYVLEAIVESGLDLGDYYRQLQEQTGFSSAYDRIDLPLASMDVRARLLQQLQSQPLTEIAGKAVIDCNTTDGYKFRLADNSWLMIRFSGTEPVLRLYCEASTLEQVHQTLAWAKHWAE

SEQ ID NO: 24601 - protein, 199 aa, Zea mays
  misc_feature (100)..(100): Xaa can be any naturally occurring amino acid
MASRKLLVGLTARRQLQSRTQQLFWATSLPEATTSRSLMVAAAMARLSDRSPAPFILSSRAISLTQPVMQSTGDVSGSSPSAVDHKFVSRPCSLSTLAHXCILDLLEKLEEYGDSIQMDGFDIEYGNQVLTLRLGDLGTYVINKQTPNKQIWLSSPVSGPSRFDWDATANGWIYKRTGVNLVRLLEKEIGELCGTPVEL

SEQ ID NO: 24602 - protein, 629 aa, Salmonella enterica subsp. enterica serovar Paratyphi A str.
MAIEIKVPDIGTDEVEITEILVKVGDKVEAEQSLITVEGDKASMEVPSPQAGVVKEIKVSVGDKTETGALIMIFDSADGAADAAPAKAEEKKEAAPAAAPAAAAAKDVHVPDIGSDEVEVTEVMVKVGDTVEAEQSLITVEGDKASMEVPAPFAGTVKEIKVNTGDKVSTGSLIMVFEVAGEAGAAAPAKAEAAPAAAAPAAATGVKDVNVPDIGGDEVEVTEVMVKVGDKVAAEQSLITVEGDKASMEVPAPFAGTVKEIKISTGDKVKTGSLIMVFEVEGAAPAAAPAKQEAAAPAPAAKAEKPAAPAAKAEGKSEFAENDAYVHATPLIRRLAREFGVNLAKVKGTGRKGRILREDVQAYVKDAIKRAEAAPAAAGGGIPGMLPWPKVDFSKFGEVEEVELGRIQKISGANLSRNWVMIPHVTHFDKTDITDLEAFRKQQNAEAEKRKLDVKYTPVVFIMKAVAAALEQMPRFNSSLSEDGQRLTLKKYINIGVAVDTPNGLVVPVFKDVNKKSVTELSRELTTISKKARDGKLTAGEMQGGCFTISSIGGLGTTHFAPIVNAPEVAILGVSKSAMEPVWNGKEFVPRLMMPISLSFDHRVIDGADGARFITIINNMLSDIRRLVM

SEQ ID NO: 24603 - protein, 577 aa, Lactobacillus sakei subsp. sakei 23K
MVTQKINAADAMLKVMADWGIDHIFGLPGGSFDSTMNALHNQKAIMRYIQVRHEEVGALAASGEAKATGKIAATFGSAGPGAVHLLNGLYDAKYDHVPVLALVGQVATGVMNTDYFQEMNENPMFADVAVYNRTVMTAEQLPLVVDQAIQQAYKNSGVAVVTIPTDLGWQPIEDHFEATANLFQMGNYPEPRSTDIQQTLQLIKEAKQPIIYFGQGAKAAGDELVALSDKLSIPMMSSALSKGIVADENPAYMVSAGRVATKPGVDLAEAADLILFVGSNYEFGQYFFKPDAKFIQIDIDPTKLGHRHHVDVGILADAKTALAALLEASEPVSEKTAFYRAAVANKANWDQWTASFEDDPQTPLRVEPVFKEINQMATNDAIFNLDVGNVTIDGVRFLKMKPGQKTTISAWYATMGAALPAAIGTQAAFPNRQVWSISGDGGFTMVMQDLITQVKYQMPIINVVLSNDSFGFIEAEQDDKGQPHSGVAIQGADYGAAATALGAQGFTVRTLDELKAAFAAAQKRQGPVVIDVKIANERPLPVEQLVIDDQTQDPKAVAQFVEKYRAQGLKPFRTFLG

SEQ ID NO: 24604 - protein, 411 aa, Zea mays
MDHPDPTVRKLLDAMALMENRLTEALAGRGGEQTPASSFASLFDSFEGTTTSSTTALQYVDDVFSSSVGAAYAASPCARTRSPSYDDDEPVFDAWPLFDEEPVDSATTQALFSDDADHCFGDELDTDRTMEFCFPTSEFDIKQVVAVVSNTKDTLEFARARRVEIRTRVTMACEDWVVDHNVDAATVADMAHLAHDYFTLPPEDKPPLGPYIDTAPSPASFIPQLVDTEEEDEVFHTSPSTCSTMVPNRDATTSMLAMVEATWSDNEYALVDLQSICYYSTSKGICEYPDLVRHYLGSVVLPGDNYYVALNSVVFSDGSFSFVPKDTVCPMEISTYFRINDKETNQFERTLIVADERCTYVLLIELCLQVDGVKVWLPPWPPPVWTFWLLYDVCSGMHYNCRDCAWFKGIW

SEQ ID NO: 24605 - protein, 330 aa, Rubrobacter xylanophilus DSM 9941
MPGTISYTEALREALDEELGRDERTFFMGEDVGAFGGIFGEAAGLQQKYGKERVFDTPISETFIVGGGVGAAITGLRPIVELQFADFVSVAMDEIYNKAAKWRYMHGGLFKVPLVIIAPEGAMGGAGPEHSQCPEALFWSAAGLYVLTPATPADAKGLLKSAIRDDNPVLFLPHKALGNTTGEVPEGEHLVPLGEAVVRRQGGDVTLVAWSAMVLKALEAADRLAEEGIEVEVIDPRGIRPFDFETVLRSVEKTGRVVLAHEAPLPGGPGSEVAAVIAERAIASLEAPVRRVGAPDVPVPQSAHLERFVVPQTEDIVNAVREVAGSAVTV

SEQ ID NO: 24606 - protein, 292 aa, Dianthus caryophyllus
MATSTATNHFLKTLAISITTQKPTSIFPPKSLVLEKPTTNNSQFHYKTHHLCCMCCLQTSDFEQESSPNAVIDEEENVEKTEAAVNWEDASEPQPSSGFGSEDGFSEPSEDVKLYVGNLPFDVDSEKLANMFDAAGVVEIAEVIYNRETDRSRGFGFVTMSTVEEADKAVEMFHSYELNGRLLTVNKAAPRGSRPEKAPREFCPLLSESYVGNLPWDVDNDRLEQLSSEHGKVLSARVVSDRETERSRGFGFVTMASETEMNDATLGALDGESLEGRPIRVNVAEERPRRTF

SEQ ID NO: 24607 - protein, 394 aa, Borrelia burgdorferi
MAKEVFQRTKPHMNVGTIGHVDHGKTTLTAAISIYCSKLNKDAKALKYEDIDNAPEEKARGITINARHIEYETANRHYAHVDCPGHADYIKNMITGAAQMDAAILLVAADSGAEPQTKEHLLLAQRMGIKKIIVFLNKLDLADPELVELVEVEVLELVEKYGFSADTPIIKGSAFGAMSNPEDPESTKCVKELLESMDNYFDLPERDIDKPFLLAVEDVFSISGRGTVATGRIERGIIKVGQEVEIVGIKETRKTTVTGVEMFQKILEQGQAGDNVGLLLRGVDKKDIERGQVLSAPGTITPHKKFKASIYCLTKEEGGRHKPFFPGYRPQFFFRTTDVTGVVALEGKEMVMPGDNVDIIVELISSIAMDKNVEFAVREGGRTVASGRILEILE

SEQ ID NO: 24608 - protein, 536 aa, Zea mays
MALGAAYHHYLQLAGDHGTATHALLLGVLIFLVIRLVSARRTGTTSANKRKQQQRLPLPPWPPGKLPIIGHLHLIGAETHISIRDLDAKHGRNGLLLLRIGAVPTLFVSSPSAADAVLRTQDHIFASRPPWMAAEIIRYGPSDVAFVPYGEYGRQGRKLLTTHMLSTKKVQSFRHGRQEEVRLVMDKIRAAATAAPPAAVDLSDLLSGYTNDVVSRAVLGASHRNQGRNRLFSELTEINVSLLAGFNLEDYFPPNMAMADVLLRLVSVKARRLNQRWNDVFDELIQEHVQSRPSGESEESEADFIHVLLSIQQEYGLTTDNLKAILVDMFEAGIETSYLTLEYGMAELINNRHVMEKLQTEVRTTMGSPDGKKLDMLAEEDLGSMPYLKATIKETLRLHPPAPFLLPHYSTADSEIDGYFVPAGTRVLVHAWALGRDRTTWEKPEEFMPERFVQEPGAVDVHMKGKDLRFIPFGSGRRICPGMNFGFATMEVMLANLMYHFDWEVPGSGAGVSMEESFGLTLRRKEKLLLVPRIAS

SEQ ID NO: 24609 - protein, 202 aa, Pinus pinaster
MTTEYDYLFKLLLIGDSGVGKSCLLLRFADDSYVGSYISTIGVDFKIRTIELDGKAIKLQIWDTAGQERFRTITSSYYRGAHGIIIVYDVTDMDSFNNVKQWLSEIDKYASDNVSKLLVGNKCDLTEKQAVDQQMAKSFADELGIPFLETSAKDASNVEQAFLTMAGEVKRRMASQLTEGNRKANTVEMKGQPLQQKGGCCS

SEQ ID NO: 24610 - protein, 334 aa, Chlorobium tepidum TLS
MAKVKVGINGFGRIGRLVFRQAMENPEIEIVGINDLTDVKTLAHLLKYDSSHKKFNGEVTIEGDNLIVNGRTIAICAQKDPAQLPWASLGATLVVESTGIFTSREAASKHLAAGAKKVIISAPAKDKIDATIVIGVNDKSITGKEEIISNASCTTNCLAPMTKVLNDNFGIVKGFMTTVHAYTNDQNILDLPHKDLRRARAAACSIIPTSTGAAKAIGEVLPELAGKLDGFAMRVPIPDGSVTDLSVIIEKSATKEEINAVMKAAAEGPMKGILEYNVDPIVSCDIVGNAHSCIFDSPLTMSSGNMVKIVGWYDNELGYATRVVDLLGIYSKFV

SEQ ID NO: 24611 - protein, 275 aa, Solibacter usitatus Ellin6076
MLVIASRGSQLALWQAHWVEAQLQAAGHECRIEIIKTTGDKITDVPLAKVGTKGLFTKEIEEALLDGRAQLAVHSLKDLPTELPEGLVLGAVPKREDPRDAVIGKTLAELPLGAKVGTSSLRRSAQLKRLRPDLVVESIRGNLDTRLRKLDEGQYDAILLAAAGMKRLGWGARIAEILPPDLMCPAVGQGALAIETRAGFVLPAVLNHADTHTAVLAERGLLGALGGGCQVPIGAHATVAGGRVRLLGLVAAPDGSEIVRAEAEGASGEAAEIGK

SEQ ID NO: 24612 - protein, 120 aa, Glycine max
MAAPRGAALVLAMVLAAMLVAPPATVHAISCSTVYSTLMPCLQYVQQGGSPARGCCTGIQNLLAEANNSPDRRTICGCLKNVANGASGGPYITRAAALPSKCNVALPYKISPSVDCNSIH

SEQ ID NO: 24613 - protein, 123 aa, Triticum aestivum
HYRTSLYKKAGWYRSGIPGISSTHASGEATALSCGQVDSKLAPCVSYVTGKAPSISKECCSGVQGLNGLARSSPDRKIACRCLKSLATSIKSINMDKVSGVPGKCGVSVPFPISMSTNCNNVN

SEQ ID NO: 24614 - protein, 334 aa, Geobacillus stearothermophilus
AVKVGINGFGRIGRNVFRAALKNPDIEVVAVNDTGGANTLAHLLKYDSVHGRLDAEVSVNGNNLVVNGKEIIVKAERDPENLAWGEIGVDIVVESTGRFTKREDAAKHLEAGAKKVIISAPAKNEDITIVMGVNQDKYDPKAHHVISNASCTTNCLAPFAKVLHEQFGIVRGMMTTVHSYTNDQRILDASHKDLRRARAAAESIIPTTTGAAKAVALVLPELKGKLNGMAMRVPTPNVSVVDLVAELEKEVTVEEVNAALKAAAEGELKGILAYSEEPLVSRDYNGSTVSSTIDALSTMVIDGKMVKVVSWYDNETGYSHRVVDLAAYIASKGL

SEQ ID NO: 24615 - protein, 211 aa, Pichia angusta
MSAIYRALKRDKDTSKPQSDNRESKVRQNRQRCLLISSRGVIQRHRHFINDLQSMLPQSRKEPKLDTKKNLFELNELAELHNCNNIMYFESRKHQDLYMWLSKTPNGPSIKFHIQNLHTMEELNFTGNCLKGSRPILSFDRAFDSDIHLKILKEMFIHQFGVPPRARKSKPFIDHLMTFAILDGKIWIRNYQISEPVGAEAAEANLEEMKL

SEQ ID NO: 24616 - protein, 137 aa, Triticum aestivum
SIHLPFWVQDDRALYLDPHEVQLAVNIASDNLEADTSSYHCSTVRDMPLDLIDPSLTRPPTRPDKDDFDDFCSRASELAEQANGAPLFTVVQSVQPSKQMYNQDDGSGCSGYGVSDNIDTEDLDGSGETGEDEWQIL

SEQ ID NO: 24617 - protein, 346 aa, Burkholderia vietnamiensis G4
MTAYRSTQTVRRALSRTPRPPFTDSHMSTPKHAKVLILGSGPAGYTAAVYAARANLSPVLITGIAQGGQLMTTTDVENWPADAKGVQGPELMARFQEHAERFNTEIVFDHIHTAKLHEKPIRLIGDAGEYTCDALIIATGASAQYLGLPSEEAFMGKGVSACATCDGFFYRNQEVAVIGGGNTAVEEALYLTGIAKKVTVIHRRDKFRAEPILIDRLLEKEKEGVVDIKWDHVLDEVTGEESGVTGLRIKNVKTGATQDLTVQGVFVAIGHKPNTDLFQGQLEMKDGYILTKSGLQGNATSTSVPGVFAAGDVQDNVYRQAITSAGTGCMAALDAQRYLETLHDKK

SEQ ID NO: 24618 - protein, 349 aa, Bacillus thuringiensis serovar konkukian str. 97-27
MNREELFDVTVIGGGPAGLYSAFYSGLREMKTKIIEFQPQLGGKIHVYPEKMIWDIGGLLPVTGEKLIEQLVQQGLTFQPEVVLNTKIESIIRNKDGIFTLKTSTGEEHFSKTVIVATGSGILNPQKLSIEGAERFEVSNLNYTVKSLKRFKNKTVIISGGGNSAIDWANELEPIAKKVYLTYRKEELSGHEAQVKQLMNSSAECFFNTSITTLIAGDNHEAIEYVELTNHETGEVSQLAIDEVIINHGYERDITLLENSELDVAIIDNYYIAGNANSESSVDGLYAAGDILKHEGKLHLIAGAFQDAGNAVNKAKQFIQPDASEYGMVSSHNEVFKKRNRELIKQMMK

SEQ ID NO: 24619 - protein, 427 aa, Triticum aestivum
MASSAPGGGSGKIERLSSIDAQLRLLVPAKVSEDDKLIEYDALLLDRFLDVLQGLHGDDLREMVQECYEVAAEYETKHDLEKLDELGEMITSLDPGDSIVIAKAFSHMLNLANLAEEVQIAYRRRVKLKKGDFADENSAITESDIEETLKRLVFDMKKSPAEVFDALKNQTVDLVLTAHPTQSVRRSLLQKHSRIRNCLVQLYSKDITPDDKQELDEALQREIQAAFRTDEIRRTQPTPQDEMRAGMSYFHETIWKGVPKFLRRVDTALKNIGINERVPYNAPLIQFSSWMGGDRDGNPRVTPEVTRDVCLLARMMAANLYCAQIEDLMFELSMWRCNDELRSRADELHRSSKKDAKHYIEFWKKVPPNEPYRVILGDVRDNLYNTRERSRELLSSGHSDIPEEATLTNLEQLLEPLELCYRSLCAC

SEQ ID NO: 24620 - protein, 120 aa, Glycine max
MTNITSKTWTMLLFVITLLMVIAYHEGEAISCSQVNMFLAPCLSYLRGGGNPSQPCCAGLNSLKAAAPGKAERQTACQCLKSVSNTIPGINDDNAKQLPSKCGVDLGVPFSKSVDCNSIN

SEQ ID NO: 24621 - protein, 365 aa, Arabidopsis thaliana
MESSLPQVAALDRSTLLKAFDETKTGVKGLIDAGITEIPSIFRAPPATLTSPKPPSSSDFSIPTIDLKGGGTDSITRRSLVEKIGDAAEKWGFFQVINHGIPMDVLEKMIDGIREFHEQDTEVKKGFYSRDPASKMVYSSNFDLFSSPAANWRDTLGCYTAPDPPRPEDLPATCGEMMIEYSKEVMKLGKLLFELLSEALGLNTNHLKDMDCTNSLLLLGHYYPPCPQPDLTLGLTKHSDNSFLTILLQDHIGGLQVLHDQYWVDVPPVPGALVVNVGDLLQLITNDKFISVEHRVLANVAGPRISVACFFSSYLMANPRVYGPIKEILSEENPPNYRDTTITEYAKFYRSKGFDGTSGLLYLKI

SEQ ID NO: 24622 - protein, 492 aa, Oryza sativa
MVLSKAVSESDMSVHSTFASRYVRASLPRYRMPENSIPKEAAYQIINDELMLDGNPRLNLASFVTTWMEPECDKLIMAAINKNYVDMDEYPVTTELQNRCVNMIAHLFHAPLGEDETAVGVGTVGSSEAIMLAGLAFKRRWQNKRKAEGKPFDKPNIITGANVQVCWEKFARYFEVELKEVKLRDGYYVMDPEKAVDMVDENTICVAAILGSTLNGEFEDVKLLNDLLDKKNKETGWETPIHVDAASGGFIAPFLYPELEWDFRLPWVKSINVSGHKYGLVYAGIGWCIWRNKEDLPEELIFHINYLGTDQPTFTLNFSKGSSQVIAQYYQLIRHGFEGYRNIMENCHENAMVLKEGLVKTGRFDIVSKDEGVPLVAFSLKDRSRHDEFEISDMLRRFGWIVPAYTMPPDAQHVTVLRVVIREEFSRTLAERLVLDIEKVMYQLDALPSRLMPPVPPAPLLVVAKKSELETQRSVTEAWKKFVLAKRTNGVC

SEQ ID NO: 24623 - protein, 327 aa, Synechococcus sp. CC9605
MAGTLLFNALREAIDEEMGRDPHVCVMGEDVGHYGGSYKVTKDLAEKYGDLRVLDTPIAENGFTGMAVGAAMTGLRPIVEGMNMGFLLLAFNQISNNMGMLRYTSGGNFTIPTVVRGPGGVGRQLGAEHSQRLEAYFHAVPGIKIVACSTPTNAKGLMKAAIRDNNPVLFFEHVLLYNLSEELPEGDYTCALDQADLVKEGTDVTILTYSRMRHHCLKAVEQLEAEGVSVELIDLISLKPFDMETISRSIRKTNKVIVVEECMKTGGIGAELIALITEQCFDDLDARPVRLSSQDIPTPYNGSLENLTIIQPHQIVEAAQALVNKGI

SEQ ID NO: 24624 - protein, 422 aa, Streptomyces venezuelae
MTARRVVITGIEVLAPGGTGSKAFWNLLSEGRTATRGITFFDPTPFRSRVAAEIDFDPEAHGLSPQEIRRMDRAAQFAVVAARAVADSGIDLAAHDPYRVGVTVGSAVGATMGLDEEYRVVSDGGRLDLVDHAYAVPHLYDYMVPSSFSAEVAWAVGAEGPNTVVSTGCTSGLDSVGYARGELIREGSADVMIAGSSDAPISPITMACFDAIKATTNRYDDPAHASRPFDGTRNGFVLGEGAAVFVLEELESARARGAHIYAEIAGYATRSNAYHMTGLRPDGAEMAEAIRVALDEARMNPTEIDYINAHGSGTKQNDRHETAAFKKSLGDHAYRTPVSSIKSMVGHSLGAIGSIEIAASALAMEHNVVPPTGNLHTPDPECDLDYVRSCREQLTDSVLTVGSGFGGFQSAMVLARPERKIA

SEQ ID NO: 24625 - protein, 377 aa, Desulfitobacterium hafniense DCB-2
MKDSVWLCDTTLRDGEQTPGIAFRFKEKARIATCLAEAGIDEIEVGVPSVGADEMEIIKGLVDLRLPVRLATWNRTSKEDLEASFRTGVGAVSICIPVSDQHIERKLRKSRTWAMDSMGEAVELAKKEGKYVCVGFEDASRADVDFMIKMAKVAEGLRADRIRLADTLGILDPLELARRFAPLPQRTALPLEFHAHNDLGMATANALTALRIGFKAVSVTVGGLGERAGNAPLEEISVAIHHILQRPTAFDIQKVNDISLLVSDITQREVPRSKPVVGSDVFTHTSAVHLDGIRKDVENYQPFPPESISRKHSMVFGKYSGIKELVRLLEEERVPYTQEQLTELLIRVRLHSSIKKIPLQAEDVLSLARSLNQLRNA

SEQ ID NO: 24626 - protein, 129 aa, Galdieria sulphuraria
MLGFVQTFPIRVTRCKRDISFCSNTVKHREWKPRQSRFCQQPIQRVDLLTMSSSDSSDGWKQQIQESIKKAEEATKKFGRDSKEAAAAWDAVEELDAEASHQRVRQKTDPLETFCDESPEAEECRVYDN

SEQ ID NO: 24627 - protein, 391 aa, Parvularcula bermudensis HTCC2503
MAKEKFERTKPHANIGTIGHVDHGKTTLTAAITKYFGDFRAYDEIDGAPEEKARGITISTAHVEYETDERHYAHVDCPGHADYVKNMITGAAQMDGAILVVNAADGPMPQTREHILLARQVGVPAIVVFLNKVDQVDDEELLELVEMEVRELLSSYDFPGDDIPIVKGSALAAMEGRDPEIGENAIRELMKEVDAYIPTPERPIDQSFLMPIEDVFSISGRGTVVTGRVERGVINVGDEIEIVGVRDTKKTTCTGVEMFRKLLDRGEAGDNVGVLLRGVEREGVERGQVLCKPGSVTPHTKFVAEAYILTKEEGGRHTPFFNNYRPQFYFRTTDVTGICTLPEGTEMVMPGDNVNLNVELIVPIAMEEKLRFAIREGGRTVGAGIVSSIIE

SEQ ID NO: 24628 - protein, 248 aa, Solibacter usitatus Ellin6076
MKKLVLIRHGESTWNKENRFTGWTDVDLSDEGRQQATEAAEVLKREGYVFDVAYTSVLKRAIRTLWTVLDGMDLMWIPVHRSWRLNERHYGALQGLNKAETAAKFGEDQVKIWRRSYDIPPPVLTADDPRFPGHDPRYQSLTKEELPLTECLKDTVARFLPLWHDTIAPAIRSGQRVIIAAHGNSLRALVKYLDGVSEADIVELNIPTGMPLVYELDDDLKPLNRYYLGDPEKVKAAMEAVAAQGKKK

SEQ ID NO: 24629 - protein, 587 aa, Saccharomyces cerevisiae
MMNPHVQENLQAIHNALSNFDTSFLSEDEEDYCPLCIEPMDITDKNFFPCPCGYQICQFCYNNIRQNPELNGRCPACRRKYDDENVRYVTLSPEELKMERAKLARKEKERKHREKERKENEYTNRKHLSGTRVIQKNLVYVVGINPPVPYEEVAPTLKSEKYFGQYGKINKIVVNRKTPHSNNTTSEHYHHHSPGYGVYITFGSKDDAARCIAQVDGTYMDGRLIKAAYGTTKYCSSYLRGLPCPNPNCMFLHEPGEEADSFNKRELHNKQQAQQQSGGTAFTRSGIHNNISTSTAGSNTNLLSENFTGTPSPAAMRAQLHHDSHTNAGTPVLTPAPVPAGSNPWGVTQSATPVTSINLSKNSSSINLPTLNDSLGHHTTPTTENTITSTTTTTNTNATSHSHGSKKKQSLAAEEYKDPYDALGNAVDFLDARLHSLSNYQKRPISIKSNIIDEETYKKYPSLFSWDKIEASKKSDNTLANKLVEILAIKPIDYTASVVQFLQSVNVGVNDNITITDNTKTPTQPIRLQTVSQQIQPPLNVSTPPPGIFGPQHKVPIQQQQMGDTSSRNSSDLLNQLINGRKIIAGN

SEQ ID NO: 24630 - protein, 625 aa, Oryza sativa
MAKSLLVSSLLAVVAAVVVGAGPNPQYCPPSSCGHLGNISYPFRLQGDSRDCVATPRPWYNLSCSSGRAAIQINTGTYYVSSINYTGEVFSVVDATLQDDDTNSSCPLPRSDHLPFPDWYRDYRPADSYGFFDLATASGTWACFVNCSRAITDIMPWYKPVTCLLPNNSFVFVSFVNCAVGELQPSCRYLAMIPFESRHISDNSSQLQNASYTDIIGFIRKGFSVRFPYRPDQYQSPRMSARECLKDSNRLVLGSLVVFIFLAHKYWKTRITIDAVEKFLRMQQMIGPTRFAYTDIIAITSHFRDKLGQGGYGSVYKGVLLPGNVHIAVKMLTGSSSCNGDEFISEVSTIGRIHHVNVVRLVGFCSEEMRRALVYEYMPRGSLDKYIFSSEKSFSWDKLNEIALGIARGINYLHQGCEMQILHFDIKPHNILLDDNFVPKVADFGLAKLYPRDKSFVPVSAARGTVGYIAPEMISRSFGVISSKSDVYSFGMLLLEMAGGRRNADPNAANSSQAYYPSRVYRELTRRETSEISDIADMHELEKKLCIVGLWCIQMRSCDRPTMSEVIEMLEGGTDELQVPPRPFFCDDEQLPGVESYNMPSDLTAISEEHEDDDDDSICLFESYQ

SEQ ID NO: 24631 - protein, 671 aa, Idiomarina loihiensis L2TR
MCGIAGVFHHQTERAIEPQTLVNMAAIMHHRGPDGFGYEVQQDYGVGFSHARLSIIDLDEKRGRQPFISADKRLMLTHNGEFYDFKRIRADLTARGARFNSKSDSEIVLHLFERYGLEDTLKELRGEFAFGLFDAKDESLYLVRDRFGIKPLYWTETEHGVVFGSELKVLFAHPDVKREFSAEGLYHQLIQVMVPGSTAFEGINQVQPGYVVKLQRKNGKVVATEHKYWDVDFPPEESYPGADVDEESYIEGVRAKLLEAVQHRMTADVPVGCYLSGGIDSCAILGLASASTQTSVKAFTIGFDSADYDETPIAEEMAAATKADHHIMRLKADDLYDHFVKTLWHTERTIYNTLGVAKYLMSKEVHEAGYKVVMTGEGSDELFAGYPAFRKDMFLHGLDHLPEVERVEWQELLEKNNKLFKGAMLAREEFVSEAFNQKMGFTPSCVQPWLSCSSVALPLMSENKRKQVEGYDPSLAIANTLDKDMLDGRHPLDRAQYVWIKTMLEGQILTWGGDRVDMANSMEARPAFLDHHLAEYAFTVPPHLRIKGNKEKYVLREAMKGLLPETLYKREKFAFMAPPAHTDPEKWKAVEKLAEQFLNAEAVKSAGLLDYDEVVRTFERHQDENVPNEERVQLDAVINHMLGVQVLHHHFVATDVPAQAQQRATELGWTA

SEQ ID NO: 24632 - protein, 189 aa, Arabidopsis thaliana
  misc_feature (48)..(48): Xaa can be any naturally occurring amino acid
  misc_feature (62)..(62): Xaa can be any naturally occurring amino acid
  misc_feature (114)..(114): Xaa can be any naturally occurring amino acid
  misc_feature (120)..(120): Xaa can be any naturally occurring amino acid
  misc_feature (134)..(134): Xaa can be any naturally occurring amino acid
  misc_feature (159)..(159): Xaa can be any naturally occurring amino acid
  misc_feature (172)..(172): Xaa can be any naturally occurring amino acid
  misc_feature (180)..(180): Xaa can be any naturally occurring amino acid
MAFSMLSSAAVVTSPAQATMVAPFTGLKSSAAFPVTRKTNKDITSIAXTGERVSCMKVWPPXIGKKKFETLSYLPDLSDVELAKEVDYLLRNKWIPCVEFELEHGFCVTREHGXNTPGYXDGRYWTMWKLPLFXGCTDSGSSVERKLKNARREYPGAFXIRIIGFDNTRQVXQCISFICXYSPPSFTEA

SEQ ID NO: 24633 - protein, 520 aa, Saccharomyces cerevisiae
MLSRTRAAAPNSRIFTRSLLRLYSQAPLRVPITLPNGFTYEQPTGLFINGEFVASKQKKTFDVINPSNEEKITTVYKAMEDDVDEAVAAAKKAFETKWSIVEPEVRAKALFNLADLVEKHQETLAAIESMDNGKSLFCARGDVALVSKYLRSCGGWADKIYGNVIDTGKNHFTYSIKEPLGVCGQIIPWNFPLLMWSWKIGPALATGNTVVLKPAETTPLSALFASQLCQEAGIPAGVVNILPGSGRVVGERLSAHPDVKKIAFTGSTATGRHIMKVAADTVKKVTLELGGKSPNIVFADADLDKAVKNIAFGIFYNSGEVCCAGSRIYIQDTVYEEVLQKLKDYTESLKVGDPFDEEVFQGAQTSDKQLHKILDYVDVAKSEGARLVTGGARHGSKGYFVKPTVFADVKGDMRIVKEEVFGPIVTVSKFSTVDEVIAMANDSQYGLAAGIHTNDINKAVDVSKRVKAGTVWINTYNNFHQNVPFGGFGQSGIGREMGEAALSNYTQTKSVRIAIDKPIR

SEQ ID NO: 24634 - protein, 309 aa, Gibberella zeae PH-1
MAAVYKSISKTSAPKAEASSNGIKKNKQRVLILSSRGVTYRHRHLLNDIASMLPHSRKDAKFDSKTKLYELNELAELYNCNNVLFFEARKGKDLYVWLSKVPNGPTIKFHLQNLHTMEELHFTGNCLKGSRPVLSFDGAFDKQPHLRLIKELFLHTFGVPQGARKSKPFIDHVMGFSFVDGKIWVRNYQVNEVEAEAKGEEEEDEDSKSKSRSGKPDTDINLVEIGPRFVLTPIVIQEGSFGGPIIYENKEFVSPNQVRADLRRTKASRHNARTEQQVERRVRKGDLGLRSAGGQRPAKSELDTKMLFA

SEQ ID NO: 24635 - protein, 293 aa, Burkholderia xenovorans LB400
MSILINKDTKVITQGITGKTGQFHTRACREYANGREAYVAGVNPKRAGEDFEGIPIYASVAEAKAETGATVSVIYVPPAGAAAAIWEAVEADLDLAICITEGIPVRDMIELKARMRAENRKTLLLGPNCPGTITPDELKIGIMPGHIHRKGRIGVVSRSGTLTYEAVGQLTAIGLGQSSAVGIGGDPINGLKHIDVMKMFNDDPETDAVIMIGEIGGPDEANAAYWIKDNMKKPVVGFIAGVTAPPGKRMGHAGALISGGADTAEAKLEIMDACGITVTKNPSEMARLLKAML

SEQ ID NO: 24636 - protein, 573 aa, Prosthecochloris aestuarii DSM 271
MVTSGQTMNGSEILFECLRREHVEYIFGYPGGALLQVYETLYDVKDIKHILVRHEQGAAHMAEGYARATGKPGIVLVTSGPGATNTVTGITNAYMDSSPMVVFTGQVPSNLIGNDAFQEADIVGITRPITKHNFLVKDVKDLALTIRKAFYLATHGRPGPVLVDLPKDVMNSECIFDWPKTIDIRGFKPTIKTHENQVKKAAKMIAKAKKPLLYVGGGVIAAEASEELRKLAIAQNIPVTMTLQGLGAFPGNDPLSMGMLGMHGTYWANQAVNNCDLLISVGARFDDRVTGKTETFATHAYKIHNDIDPTNIDKNIKVDLPVVGDAKQFLQGILDALPKTKENRKPWLAEIEKWRSQCPLTYTIDDDSLKTEFVIEEVSRQTHGDAVITTDVGQHQMWTSQYYSFRNPRSILTSGGLGTMGYGLPAAIGAAFGVHDRPVVLFCGDGGFMMNIQELVTAVYYKLPIKIFLINNNFLGMVRQWQELFHQEKYSFTDLEDSNPDFIRVVEAFGCKARRAENPEEARQAISEALAYNDGPCFVEFRVVKKDMVFPMVPAGASISDMLLDRLNPKTMV

SEQ ID NO: 24637 - protein, 420 aa, Burkholderia mallei ATCC 23344
MPHRAGSLTILQGAALYIGAVLGTGVIALPALAAEVAGPASLLAWAALVMLSIPLAATFAALGARYPDAGGVSTYVRKAFGPKAAAVVGWCFYFAVPAGAPAAAMFGGAYVAAVTGGAHATMIASAAVLIALVAAANAFGVTVSGRMQLVLSALLVALLVAAVLASAPHARAANLHPFAPHGWLAVGEAAALLVWSFAGWEAITHLAAEFRRPARDLPRSTGIAVAVVGLLYLSVAAASVLVLGPAAGESGAPLAALIARGIGGNAQLIATAAALLFTLGTMNAYFAGAAKLGAALGRDGALPRWFAQGSQTGGVPRRSLAVVAALAGCALVAAVATGMGPKPLVLATSGNFVMVYVLGAAAATRLLPRGGLAHRASIVALLSALLLLATTGWYLLWPLLLTASAIGYLFITGRRAAAKR

SEQ ID NO: 24638 - protein, 353 aa, Prosthecochloris aestuarii DSM 271
MFKIVSIPGDGIGPEVVASAIRVINTLARQHGLEITIEEHLFGGASYDVHGEMLTQETLEACRKCDAVLLGAVGGPKWENLPHEKKPEAALLGIRKELGLFANFRPAKVYDALVNASSLKPEILAGTDFMVIRELTGGIYFGEPRGYDDTRGWNTMVYEHYEVERIARLAFDAAMKRKKQLVSIDKANVLESSQFWRNIVHEVHKDFPEVELIDMYVDNAAMQIVRDPKQFDVIVTKNLFGDILSDISGMITGSLGMLPSASIGSSHALYEPIHGSAPDIAGQNKANPIATIASAAMMFEHSFCMKNVADEIYSAIEKTLASGFRTADIANPEDTIVSTTEMTDAIVANLEAS

SEQ ID NO: 24639 - protein, 433 aa, Lophopyrum elongatum
MQCFRFASWEKEREEELQGPARSQSALSNSSMSTDRDARRSGSECCSLTVSSEISVDSFGRYRQLSLPHRPNNDLRIFTFQELKSATRSFSRALMIGEGGFGCVYRGTIQSTLEPRRSLDVAIKQLGRKGLQGHKEWVTEVNFLGVVDHPNLVKLIGYCAEDDERGIQLLLVYEFMPHGSLADHLSTRSPKPASWAMRLRVALDTARGLKYLHEDSEFKIIFRDLKPSNILLDENWNAKLSDFGLARLGPQEGSHVSTAVVGTIGYAAPEYIHTGRLSSKNDIWSYGVVLYELLTGRRPLDRNRPRGEQNLVEWVKPYSSDTKKFETIMDPRLEGNYNLKSAARIASLANKCLVRHARYRPKMSEVLEMVQKIVDSSDLGTPERPLISHSKKLASDEKKRKGLNLKRRIADIKAGDGRWFRWHKWTPKLVRTQ

SEQ ID NO: 24640 - protein, 544 aa, Thermosynechococcus elongatus BP-1
MGIQVIATTPFKDQKPGTSGLRKPVPVFQQPHYLENFIQAIFDTIEAPQGQTLVLGGDGRYFNAEAIQVILKMAAAKGFARVKVGQNGILSTPAASCVIRKYGAVGGIILSASHNPAGPQGDFGVKFNIANGGPAPEKVTNAIYERSLALTHYSIYTAPDVNLHTLGEFPLGEMIVEVIDPVADYQALLETLFDFDRIAEVIRTGKLRLVFDAMHAVTGPYAQQILEKCLGAPPGTVQNGVPLPDFGGGHPDPNLVYAHDLVQQLFGEQPPDFGAASDGDGDRNMILGANCFVTPSDSLAILAANAQLVPGYRDGLAGIARSMPTSQAADRVAAKLGIDCYETPTGWKFFGNLLDAGKVTLCGEESFGTGSNHVREKDGLWAVLFWLNILAVRQTPVAEIVKDHWRTYGRNYYSRHDYEGIEGDRAHTLMSQLEQKLPSLVGQTLGAYTVATADNFSYSDPVDHSVSQNQGIRLIFEDGSRIVYRLSGTGTQGATLRVYLERFEPHPSQQHLDAQVALADLIQLANDVANIQSLTGRDRPTVIT

SEQ ID NO: 24641 - protein, 524 aa, Prosthecochloris aestuarii DSM 271
MSQKEKVLIFDTTLRDGEQSPGASLNVQEKIEIARQLEKLNVDVIEAGFPASSPLQLEAVRRVGEESSRIVAALARAVEHDISTAWKALQSARHPRIHTFISTSDIHIMGKFGHERYGKTLAEKQKTILRMAVDAVLYAKTFCHDIEFSAEDAGRTDPGYLAEVIEAVIDAGATTVNIPDTTGYTWPSEFGKKIADLKERVTNIDQAVISVHCHNDLGLAVANTLSAIENGARQAECSINGIGERAGNASLEEIVMALKVRSDLHDYSTGITTREIYNTSRMVSSFTGLIVQPNKAIVGDNAFSHESGIHQDGMLKNRQTYEVMTPQSVGVPETHIVLGRHSGKHGLQSRLLVLGYKVEGEELDKVYQRFLSVADKKKEIYDDDLRVLMGDEFNRPAEPIELDYLHINSGTASIPTATVRIKTRGRTFEESSTGDGPVDACFRAIERALKLDSLLNSYSVRSTSAGRQALGEATVRLRDGDNFYTGRGVSTDIIEASAKAYLQALSFHEDALQNDNNNSIDNGI

SEQ ID NO: 24642 - protein, 134 aa, Oryza sativa
  misc_feature (63)..(63): Xaa can be any naturally occurring amino acid
VWFPSPKRTNQGRVLIGTTAPPEPEKTEEQELLHPLQEPVEGDVSGGGGADRTCGIATWALIXSIVGEAALPTASVTGPRAALGPEGPLAVEVRDYMRWYTLYARTGSTESAHTMATTIVEMTKNPVTVTLIVA

SEQ ID NO: 24643 - protein, 563 aa, Prosthecochloris aestuarii DSM 271
MFLKSSRQAAFLPMPGRKTLWLELDMKERNAIELYDTTLRDGTQGEKINLSVQDKLLIAEKLDEFGADYIEGGWPSSNPKDEEFFRKALGLRLSNAKICAFGSTARKPDNIANDPNLAGLLASETPVITIFGKTWKAHSAVSLGLCDEENAELIYRSVEHLKKEGREVLFDAEHFFDGYKDNPAFAIKMLLSAEEAGADRLVLCDTNGGTLPNEIYEIVKDVASSTTVPLGIHSHNDGDLAVANALSALRAGAMHVQGTINGIGERCGNANLISIIPNVVLKMNGRFRHKLQLNQLTPLSKFVYEILNMPPDNRAPFVGRSAFAHKGGIHVSAVMKESSLYEHIDPKSVGNRQRVLVSELSGQSNIRYKANELGINLPADNAALFKTLVQRIKTLEHEGFQFDVAEASFELLLRHQLGQFKPFFTVLESKLHIESGKNRESVDQAVLKIEVCDEIELTAADGDGPVNALDKALRKSLRGFYPEIRSMRLVDYKVRVLEEKKGTSAKVRVLIESSDGQNSWSTVGVSPNIIDASLQALSDSINYYLFTYRTEKANRLSTAQSAS

SEQ ID NO: 24644 - protein, 158 aa, Guillardia theta
MDQEQYNIINDNGASETTPIKAGNCKKGGLLVIKGNPCKIIDISTSKTGKHGHAKAIITAVDIFTGKKYQESAPTSHNLDQPNLTKTEYQLIHIEEDGFVSLMDEDGNIREDLSLDLKNDEIHVKIKNEFDQSKEIVVTVMKCLQKEKIISFKENNKI

SEQ ID NO: 24645 - protein, 463 aa, Legionella pneumophila str. Lens
MDLFRKKDIKGSPDSESHLAKCLSVFDLTFLGVGAIIGAGIFVLTGIVAATISGPAVIFSYVVAGFACAFAALSYAELAASIGGCGSAYGYAYAGFGELIAWIVGWDLLLEYSIAVSAVSIGWSGYANDFLMALKIFIPTHLLHGPADGGDLNILAILIIAVLTTLLIVGVKSSSRFNNIMVLVKLLVIFIFIAIAFGEVKVENWSSFMPYGWAGVMKGASIIFFAYVGFDAVSTAAEEAINPQRDLPIGIIASLAICTVIYILVSGLLTGIAHYTTLNVSSPISHVLLVLGYKTAAGLVGVGAIAGLTTVMLVLFYGLTRVFLAMSRDGLLPRFLSKTNEHTKTPIRIILLCGILMASLASVTPIGTLAELVNIGTLFAFIVVCGGVLYLRRTHPDMERPFKTPFMPYVPILGIISCFYLILNLPWVTILRFIIWMLVGIAVYFAFSRTNSALSVEGDCAAE

SEQ ID NO: 24646 - protein, 217 aa, Legionella pneumophila str. Lens
MTFQILPSLLSADMTRLGEEVDAVMKAGSDFIHFDVMDNHYVPNLTFGPAFCDALIKKFPNLPIDVHLMTTPVDTLIEAFAKAGAKRISIHPDATIHLDRSLQLINNLGCEAGLVLNPATSIDTLTWCAHNLKFVLVMTVNPGFGGQKLIPEVIPKLSKIRQQHPNLDLCVDGGVTPQNIASLAHAGANQFVAGSAIFNSSNYSETIKHMREQLASI

SEQ ID NO: 24647 - protein, 191 aa, Arabidopsis thaliana
MGGTKRKIEMKRIEDKNVRAVAFTKRKSGLFHKASELCLLSPGTQIAILATPLSSHSHASFYSFGHSSVDHVVSSLLHNQHPSLPTNQDNRSGLGFWWEDQAFDRLENVDELKEAVDAVSRMLNNVRLRLDDAVKSNQRDGSLVIHQEDEEVLQLGYKDTNQITKLEGETSASASLLKNVVDNLHIDDRYY

SEQ ID NO: 24648 - protein, 328 aa, Pseudomonas fluorescens
MKLLIQPNNRLISFSPGANLLEVLREDGVAISYSCMSGRCGTCRCRVTDGSVIDSGTGSGLPHLVDEHYVLACRSVLTNNCAIEIPEADEICHHPARIIKGTVVAIESPTHDIRRLRVRLAKPFEFSPGQYATLQFSPEHARPYSMAGLPDDQEMEFHIRKVPGGRVTEYVFEHVREGTSIKLSGPLGTAYLRQNHTGPMLCVGGGTGLAPVLSIIRGALKLGMTNPILLYFGVRSQQDLYDAERLHNLAADHPQLTVHTVIAMGPINESQRAGLVTDAIEKDISSLAGWRAYLCGAPAMVEALCTVTKHLGISPEHIYADAFYPGEI

SEQ ID NO: 24649 - protein, 403 aa, Rhizobium leguminosarum
MDRRVVITGLGGLCGLGTDASSIWTENARRPSAIGPISNSEIHELKGMIGTEIKVLPQHDIDRKQLISMDRFSLLAVLAAKQAMLQAGLSCNEGNAHRFGATVGVGFGGWDATEKAYRTLLLGGATRTELFTGVKAMPSAAACQVSMNLGLRGPVFGATSACASANHAIASAVDQIKLGRADVMLAGGSDAPLVWIVLKAWEAMRVLAPDTCRPFSADRKGLVLGEGAGMAVLESYEHAAARGATMLAEVAGIGLSADAYHIAAPAVHGPEAAMRACLVDASLNAEDVDYLNAHGTGTKANDQIETTAIKRVFGDHARSMSISSTKSTHAHCLGAASALEMIACVMAIQEGVVPPTANYREPDPDCDLDVTPNVPRERKVRVAMSNAFAMGGMNAVLAFKQVP

SEQ ID NO: 24650 - protein, 339 aa, Pyrenomonas salina
MSIPIGINGFGRIGRLVTRAAFTNEGANCKVVAVNDPFIDLDYMVYMFKYDSTHGIWKGQVEKKGDKLVINGTEVTCFTERDPTAIKWGDAGAKYVVESTGVFTTIEKASAHVAGGAKKVVISAPSADAPMFVMGVNNKTYDGTPQIVSNASCTTNCLAPLAKVIDTNFGIVEGLMSTIHAITATQKTVDGPSGKDWRGGRGAAQNIIPASTGAAKAVGKVLPQLNGKLTGMSFRVPTPDVSVVDLTCKLAKPASYQAICDAVKKAESDPEYCGVIQYCDEEVVSTDFQGNSKSSIFDAKAGIALNETFVKLVSWYDNEWGYSNRVVDLIAHMQTVDKL

SEQ ID NO: 24651 - protein, 502 aa, Zea mays
MLPSFVSPTASAAASVTPPPRPIPGSYGPPVLGPLRDRLDYFWFQSQDEFFRKRAAAHRSTVFRTNIPPTFPFFVGVDPRVVAIVDAAAFTALFDPDLVDKRDILIGPYNPGAGFTGGTRVGVYLDTQEEEHARVKTFAMDLLHRSARTWSADFRASVGAMLDAVDAEFGKDDGSDKKPSASYLVPLQQCIFRFLCKAFVGADPSADWLVDNFGFTILDIWLALQILPTQKIGLVQPLEELLIHSFPLPSFLIWPGYYVLYRFIEKHGAEAVAYAEAQHGIGKKDAINNILFVLGFNAFGGFSVFLPFLVAKVGGAPALRERLRDEVRRAMVGKDGEFGFATVREGMPLVRSTVYEMLRMQPPVPLQFGRARRDFVLRSHGGAAYQVSAGEVLCGYQPLAMRDPEVFERPEEFVPERFLGDEGARLLQHLFWSNGPETAQPGPGNKQCAAKEVVVDTACMLLAELFRRYDDFEVEGTSFTKLVKRQASPSVAQAAAAAGAQQ

SEQ ID NO: 24652 - protein, 481 aa, Chlorobium tepidum TLS
MADKITSRQEDYSQWYIDLVRSAKLADYSDVRGCMVIRPNGYAIWEKMQAALDGMFKQTGHVNAYFPMFIPESFIAKEAEHIEGFAPECAVVTHGGGEELAEKLYVRPTSETIIWSSYKKWIQSYRDLPILINQWANVVRWEMRTRLFLRTTEFLWQEGHTAHATPEEAQEEVIRMINIYRTFAEEYMAMPVIVGKKSESEKFAGADATYCIEAMMQDGKALQAGTSHNLGQNFAKAFDCQFQTKDGVLDYVWATSWGVSTRLIGALIMAHSDDKGLVLPPKLASRQVVIIPILKGNKDEVRARARFIAKTLNRHGIPTFVDDSENNSPGWKFAEYELQGIPVRIELGPRDLEQGKCIVARRDTFEKTELLLDDELTINIEEILNNIQQNLYDRALQFRLDNTVEATTWEEFKASVEKGFVIAHWDGTHETEALIKEETKATIRVIPTDEEYRQQYNMDEPGTCIRSGKPAAQKVVFAKAY

SEQ ID NO: 24653 - protein, 483 aa, Nocardia farcinica IFM 10152
MVSVPELLESVPTQLWIGGPVDATGGATFPVHDPATGEVLTHVADATPEDAVRALDAAVAVQDEWAATPARTRGEILRAVFDAITARAEDFALLMTLEMGKALGESRNEVRYGAEFFRWFSEEAVRVHGRYQHAPSGTGRIIVHKQPVGPCLAITPWNFPLAMGTRKIGPALAAGCTMIVKPASETPLTMLLLARLCSEAGLPDGVLSVITTKHSSAVTKPLLDDPRLRKLTFTGSTEVGKKLVEQSANKLLRTSMELGGNAPFVVFDDADVDAAVQGAMLAKLRNGGEACTAANRFHVQRGVAEEFTDKLVEAMRSSVRLGPGTDPETTLGPLVNADQLATVTELVDDAVSAGARVRLGGEAPGGPGWFYPATVLSDVPDRARILNEEVFGPVAPVVTFDTEEQGLAAANDTRFGLVSYIYTRDLDRALRVAEGLESGMVGINRGVISDPAAPFGGVKESGFGREGGFEGIEEYLSTKYIAL

SEQ ID NO: 24654 - protein, 507 aa, Staphylococcus epidermidis ATCC 12228
MLNADLKQQLQQLLELMEGDVEFVASLGSDDKSNELKELLNEIAEMSAHITITEKSLKRTPSFSVNRPGEETGITFAGIPLGHEFNSLVLAILQVSGRAPKEKQSIIDQIKGLEGPFHFETFVSLTCQKCPDVVQALNLMSVINPNITHTMIDGAVFREESENIMAVPAVFLDGQEFGNGRMTVQDILTKLGSTQDASEFNDKDPYDVLIVGGGPASGSAAIYTARKGLRTGIVADRIGGQVNDTAGIENFITVKETTGSEFSSNLAEHIAQYDIDTMTGIRATNIEKTDSAIRVTLENDAVLESKTVIISTGASWRKLNIPGEDRLINKGVAFCPHCDGPLFENKDVAVIGGGNSGVEAAIDLAGIVKHVTLFEYASELKADSVLQERLRSLPNVDIKTSAKTTEVIGDDYVTGISYEDMTTGESQVVNLDGIFVQIGLVPNTSWLQNAVELNERGEVMINRDNATNVPGIFAAGDVTDQKNKQIIISMGAGANAALNAFDYIIRN

SEQ ID NO: 24655 - protein, 175 aa, Triticum aestivum
MAPAVMASSATSVAPFQGLKSTAGLPVSRRSSSAGLSSVSNGGRIRCMQVWPIEGIKKFETLSYLPPLSTEALLKQVDYLIRSKWVPCLEFSKVGFVFREHNSSPGYYDGRYWTMWKLPMFGCTDATQVLNEVEEVKKEYPDAYVRVIGFDNLRQVQCVSFIAFRPPGCEESGKA

SEQ ID NO: 24656 - protein, 480 aa, Xylella fastidiosa Ann-1
MSFLPSFLKRKSIDLITVHEEGRRLVPTLSWPHLIAFGIGAIVGTGIYTLIGVGAEKAGPAVLLSFVIAGVICACAALAYAEMATMMPVAGSTYTYSYVALGEGIAWIVGWSLILEYSLVVSTVAVGWSGYMTGFLKSVGVDMPLALTAGPYAGGIINLPAAVITCVVAGLLIVGTKESTTVNAVLVVVKIIALSVFVVIALPHFDMAHLKPFMPYGFTKSIDTGGVERGVMAAAAIIFFAFYGFDAISTAAEETKNPSRDLSIGIIGSMIGCTLIYVLVALAAIGAMHYTVFGPSTEPLALILRQLDQGNTARLIGAAAIIALPTVLLAFLYGQSRILFVMSRDGLLPRVLSTVNERTGTPIATTLFTAILVATAAGLVPLGEIAALANAGTLTAFIAVALCLLVLRVREPQRVRAFRTPLAWVVGPIAIAGCLYLFWSLPKMTQSLFLLWNALGLCVYLVYGRHTSLLSKAVSIDTPR

SEQ ID NO: 24657 - protein, 112 aa, Bradyrhizobium japonicum USDA 110
MKKIEAIIKPFKLDEVKEALQEVGLQGITVTEAKGFGRQKGHAELYRGAEYIVDFLPKVKIEIVIGDDLVERAIDAIRRAAQTGRIGDGKIFVSNIEEAIRIRTGESGLDAI

SEQ ID NO: 24658 - protein, 378 aa, Glycine max
MSRAMCNPSMVSRSVLGSQTSSKSVTETMSGSHEFVIKGYSLTKGMGIGKYIVSETFIVGGFQWAIYFFPDGRDPKDNAAYVSVFVALHSKSTNVRALFDLTLLDLCKKGEHKVHSHFSHSLTIGPYTLINHGSMWGYTRFFKRRHLETSNFLKDDCLKINCTIAVLVSSIDSSQLNTIQVPESDIGEHFGMLLEDEESFDVTFSVGGERFHAHKLVLAARSTMFETQFFNAMKKDDQEIVVIDMEPKVFKALLHFVYRDTLLEDEELFMLDSSFFPSFSESFIAKLLAAGEKYGLPRLMLMCESILCKDISVDSVAYIFALADHYCATHLKSICQKFSAENFDAVMHSDGFEYLKKNCPLLQSELLKTGVGCEKEFS

SEQ ID NO: 24659 - protein, 632 aa, Solibacter usitatus Ellin6076
MCGIVAVYDAEGAGASAEVAAGLKTLRHRGPDAQHVWLSPDGAICLGHARLSIIDLAHGDQPLANEDESIHCVVNGEFYDFERIRRGLEGRGHRFRTHSDSEILLHLYEDLGVECLRELRGEFAFVLWDGRRRVLMAARDRFGIKPLFYSRTGERLLFASEVKALHAAGVPAAWDEQGFLETFSAMYASSPTLFRHVSAIPPGHYLLSRDLGCSLHKYWDFEFPAEGNLPERRDEECVAEFGAVLDEAVRLRLRADVPVGCYLSGGIDSCSVLALMAKHAPGRVRAFSLSFDHELYDEGPIAREMAQRTGAEFTMIPVSHAGMAADLSDALWHNESFFLNAGSAAKFALSRAVRDAGYKVVLTGEGSDEVLAGYAFFRQDMIRHASNNGGAAEAIERLRAANPASGGLMFTTKQVTPVAGYVDRLGYFPSFLEARKAGLEALRALLTIAYETDEVLTRLLNRVDIAGQLTGRHVLNQSLYLNNKTILPGYILSALGDRVEMAHSIEARLPFLDHHVVEYTRRIPVDLKIRGTVEKYILREAMKPMLTTTVYKRQKHPFLSPPALLKPDEPLHALLQDTLRGRALDRVPYLRRTEVAGFLDRAGGLDVAGKIAAEFPLMMMLSACLVAERFGL

SEQ ID NO: 24660 - protein, 309 aa, Escherichia coli K12; identical to SEQ ID NO: 505

SEQ ID NO: 24661 - protein, 283 aa, Arabidopsis thaliana
MAEASDLLEWPKKDNRRFLHVVYRVGDLDRTIEFYTEVFGMKLLWKRDIPEEKYSNAFLGFGPETSNFVVELTYNYGVSSYDIGTGFGHFAISTQDVSKLVENVRAKGGNVTREPGPVKGGGSVIAFVKDPDGYTFELIQRGPTPEPFCQVMLRVGDLDRAIKFYEKALGMRLLRKIERPEYKYTIGMMGYAEEYESIVLELTYNYDVTEYTKGNAYAQIAIGTDDVYKSGEVIKIVNQELGGKITREAGPLPGLGTKIVSFLDPDGWKTVLVDNKDFLKELE

SEQ ID NO: 24662 - protein, 492 aa, Flavobacteria bacterium BBFL7
MGKNLTSRSEDYSKWYNELVVKADLAENSAVRGCMVIKPYGYAIWEKMQAELDRMFKETGHQNAYFPLFVPKSLFEAEEKNAEGFAKECAVVTHYRLQNDPDNPGKLRVDPEAKLEEELVVRPTSEAIIWNTYKGWIQSYRDLPLLINQWANVVRWEMRTRLFLRTAEFLWQEGHTAHSTKKEAIAEAEQMNDIYADFAQNFMAIPVVKGLKTESERFAGADETYCIEALMQDGKALQAGTSHFLGQNFAKAFDVKFTSKEGKQEYVWATSWGVSTRLMGALIMTHSDDKGLVLPPNLAPNQVVIVPIFKTDEQFEEITTVVNELMKSLRLKGVTVKYDKRDTLRPGAKFAQHELQGVPLRIAIGARDLENGTVELARRDTLSKVTTAIDGIEDKVVALLEEIQSSLFEKALDYKNTHTTKVDTFEEFKEVLNTKGGFISAHWDGTIETEDKIKEITKATIRCIPLDSENEEGMCVFSGNKSSKRVLFAKAY

SEQ ID NO: 24663 - protein, 397 aa, Solibacter usitatus Ellin6076
IQMGGVGGVGNLGGAPPLNTEHVITLFGKGFGLYGQHGMFLTQGGTYDVAVMVIFLFQMVFMDTALTIVTGSAAERWKFAAFLVSSFMLGAFIYPLFGNWAWGGGWLATLGTNFGLGKGYCDFAGSGVVHAVGGLTALALSIIVGPRLGKYNRNGKPNAIVGHDIVLVLTGCFILAFGWFGFNPGSTLGASGSGSLRIGSIAVNTMLAGMAGGFGAMFYMWMRYGKPDASMSGNGLLAGLVAITAPSGFVNTVGAVIIGLIAGVLVCLSVEFIDRVMRVDDPVGAISVHGVNGIWGVIAVGLFADGKSNYGGSWNGVNGSVTGLFYGDPSQLVAQLIGVSTLVGGVFVLSFVVNLAIDAVVGQRVSAKAELEGLDLPEMGQVGYPEFELKARTVGVQ

SEQ ID NO: 24664 - protein, 139 aa, Magnetospirillum magnetotacticum MS-1
MTNSMQGSKDRVVIFDTTLRDGEQSPGATMTFDEKLAVAETLDAMGVDIIEAGFPIASNGDFEAVSEIARRAKRATIAGLARAIPADIARAGEAVRHAQRGRIHTFVSTSEIHLTHQMRKTQDEVVEIILKTVAQAPTS

SEQ ID NO: 24665 - protein, 407 aa, Oceanobacter sp. RED65
MALYVHKYGGTSVGSIERIEGVAQKIKHFKEDGHDVVVAVSAMSGETNRLIGLAKEITDTPSAREMDVLVSTGEQVTIALLSMALEKIGVPAKSYTGSQIRMLTDSAFGKARIEHIDTDSIRSDLDEGKVVVVAGFQGVDAQGNITTLGRGGSDTTGVALAAALKADECQIYTDVDGVYTTDPRVVEKARRMEKITFEEMLEMASLGSKVLQIRSVEFAGKYQVPLRVLHSSKEGNGTLITIEDDNAVEKPVISGIAFNRDEAKLTVMGVPDIPGVASKILGPVGAANIEVDMIVQNVAADRTTDFTFTVHRNDFAKAQGVLNEVAQELGAREVAATDDIAKVSLVGVGMRSHAGVASKMFEILANENINIQIISTSEIKISVVIEEKYLELAVRALHTGFDLDDEK

SEQ ID NO: 24666 - protein, 395 aa, Loofah witches'-broom phytoplasma
MADVFLRNKVNVGTIGHVDHGKTTLTDALTSYSSKFKGFAKKIRYDEIDKAPERKKRGITINTSHVEYETEKRHYAHIDCPVHADYIKNMITGAAQMDVAILVVSAESGVMPQTQEHILLAKQVGVPQLVVFLNKCDQADSEEMFELVESEVRDVLAKYKYKDPDNIPIIRGSALMAIQGDPKYTESIQKLLDTLDSYVDDPVRALDKPFLMPIEQVVNVKGRGAVATGRVERGQIKLSEEVEIVGIKEKRKSTVIGLQMFHKNLDKESALAGDSIGILLRGISHTDVQRGQVISKVGSLQPHRKFVAKIYFLTAEEGGRKTCFGDNYRPQFFITTADVTGVIQLKDGNKIVNPGDTAELIITLINYIAIETETNFSVREGGRTIGTGTVIEILE

SEQ ID NO: 24667 - protein, 397 aa, Bacillus cereus ATCC 10987
MFHRIEEALEDLKQGKVVIVCDDENRENEGDFIALAEYITPETINFMITHGRGLVCVPITEGYAERLQLEPMVAHNTDSHHTAFTVSIDHVSTTTGISAHERATTIREMLNPASKGADFNRPGHIFPLIAKEGGVLRRAGHTEAAVDLAQLCGAEPAGVICEIINEDGTMARVPDLLQCAKQFDIKMITIEDLIAYRRHHETLVTREVEITLPTDFGTFHAIGYSNSLDTKEHIALVKGDISTGEPVLVRVHSECLTGDVFGSCRCDCGPQLHAALAQIEREGKGVLLYMRQEGRGIGLLNKLRAYKLQEEGFDTVEANEKLGFPADLRDYGIGAQILKDLGLQHLRLLTNNPRKIAGLQGYDLEVIERVPLQMPAKEENKTYLQTKVNKLGHLLNL

SEQ ID NO: 24668 - protein, 924 aa, Idiomarina loihiensis L2TR
MKMMKTLTAVAVATVLLGGCQTTQSANNGQAVSQSQFPEVKVNYETFTLDNGLTVVVHEDRKAPIVAVNVWYAVGSKDEKMGQTGFAHLFEHLMFNGTENYDDEYFGPFERAGATEMNGTTNNDRTNYFENVPTPALDMALWMESDRMGHLLGAITQDKLDEQRGVVQNEKRQGEAQPYGKAWSYIAEQTFPEGHPYSWSVIGSMEDLNAASLDDVHQWFEDYYGAANAVLVLAGDIDVETAKEKVTKYFADIGPGKPLQKQEAWVAKRDEQKRSTMEDRVPAPRIYKVWNTAQMGTADSEYLNLLADILANGKNSRLYERLVYNEQIASSVGAFQYGRKLSGQFFITADAKPGVELEQIEKIIDEELERLITEGPTAAELQRTKFSTTANFVRRAEKVGGFGGKSDILASGAVYHDNPGFYQQEMEWTKQASVNDLQNAAEQWLSSGDFVLNVVPQPEYITQETNADRSQLPDVGDLPQLELPEVKTFTLSNGLEVYLAQRSDTPTIEMSLVFDSGYASDVGGKLGTASYTMSMLKEGTENLSALELNERLESLGTNLNASASLDSSRISMDTLSVNFAESLALMNDVLQNPAFSDEEIERKRSNWIEGIRKEEARPQTQALRVLPGLMFGEGHAYSQPLTGSGTPESIKSLTREDLVQHAQTWLRPDNAKLVIVGDTNVEQAQSLLEEQFASWQAPASDKPEKTLDTSMASETSRVFLIDKPGNPQSVIIAGQLAPSGQVDNADTIDVMNTILGGSFTSRLNMNLREDKGWSYGARSIWLDNEGPGLLIALAPVQTDKTKESIQEIMKEFTQYEGDKPATADELAKVKANKTAKLPGAYETKGSLLSGLVSTFNKGKNVEYLENYGQRINAITLNDIQDNADKVLKPDAMTWVIVGDLAEIEEKVRSLNLGEVTILKESDVK

SEQ ID NO: 24669 - protein, 455 aa, Cryptococcus neoformans var. neoformans JEC21
MPPNASKTVFVANIPYDVSEEQLANVFSEAGPVANVEIKFDANTGRSKGYAFVQFYDEATALSAVRNLQDAPVNGRNLRVELSTDEPGPRRRGPGPGAVGVGAAPGAGGPGVGGPSASLGGPRPMVPAPGPGGAPPFTSTGAGAPGYPPRAPFDPRYPQAHSQSHENTPPPAGVGARRQGGDDIDLRMAPQGIDLLPGQKAVDTISKTLAGIAPGQMGDVMTSMKSLIQTNPDQARQLLSQQPQLAYALFQAMLLLNLVDPSVLSSIQPLAASASAAASGGAASVAPGPGGAGARAPNYPPYPPPTQTQGPPGGQQAFRPPPQALYGGAPPLPNQNQNQNQNQNPPYPPYPSGPGVPGGVSGAGAGIPPPTSTPVPPTPHPAHAVPVGPPGGPAPPAPGLASLPPAAQAALSTLPPDQQQMLLQVLQLSPAQIAALDPTQKASVMQLRQQFLGTA

SEQ ID NO: 24670 - protein, 611 aa, Lactobacillus sakei subsp. sakei 23K
MTGTNTETQKTIPASVAMLRVLESWGVDHVFGYPGGSFNSTMRALTVEQDRLKYIQVRHEQVGALAAAADAKLTGKIGAAFGSAGPGATNLLTGLYDAKEDHAPVLALVGQVPSTNMNYNYFQEFNENPMFDDVSVYNRLVMTPESLPYVVDKAIREAYKHKGVAVVIIPNNFGYVEIPDTPYSSSSPTDRKQVAGPVATDEEVDQFLAMVKDAKRPVIHVGRGIKDGGDKLVELSKKLQIPIVMTGLAKGLVPDSYEGNLGMANRAASKAADEIMAVSDLVIAIGADFPFANLIYRTHDFKFVQIDNDEAQFGRHHFLDFGIWSDATTLVEKVVARSQAAAPSPFFKAAVADMKNWQAYLDALTNRPSDPLEFEPIYKEINRIADPDAVFSIDVGDNIINSFRHLHLTPKNKWVISALFASMGSGVPGALAGQLSYPDRQVFNIAGDGAFSMVMQDLITEKKYLLPIINIITSNASLNFIKSEQDDLPMDYSGIFIEDQDFAMIAQAMGVESITVRSSKELPAAFDKALEVTKAGRPFLIDAKITDKRSIPVEELELTIKDGKLTESISASYDASRPTGKEYSVADFFAEYDGQSLKTLPELFAENGVKL

SEQ ID NO: 24671 - protein, 556 aa, Phytophthora erythroseptica
MINDTPAWKALAEHAAEIKSTHLRELLNDDARNAAMRTEQQGIYLDFSRQNATSKTLDSLFELAETAELKKKLQAIASGEHVNATEDRAVMHMALRAPKTEKIVVDGHDVVPDVHEVLDAIRAFTSNVRDGKFVGATGKQLKNVISIGIGGSHLGSEFVFESLRYEPVAKAAAEGRILRLLANVDPVDVARATSGLNPEETLVVVVSKTFTTAETMLNARTLRKWLVDDLTKKGSSEAGAVAKHMVAASSAVPLVQQFGIDRANIFGFWDWVGGRYSVTSAVGILPLALQYGFDITEKFLAGAHATDKHLLETPLRNNLPVIMGLLGVWNSSFLGHSSRALLPYSQALLRFAAHIQQVDMESNGKRVTVEGVDLPFQAGEVNFGEPGTNGQHSFYQLIHQGRVVPCDFLGFCESQNPVQLAGEPVSNHDELMSNFFAQPDALARGKSIEDLRAEGVPEKLQNHKLFPGNRPSISLLFKKLDAFSTGQLLALYEHRTVVQGAIWGINSFDQWGVELGKVLAKQVRAQLSASRTENAPVKGFNSATTSMLEAYLAHKA

SEQ ID NO: 24672 - protein, 821 aa, Saccharomyces cerevisiae
MENITQPTQQSTQATQRFLIEKFSQEQIGENIVCRVICTTGQIPIRDLSADISQVLKEKRSIKKVWTFGRNPACDYHLGNISRLSNKHFQILLGEDGNLLLNDISTNGTWLNGQKVEKNSNQLLSQGDEITVGVGVESDILSLVIFINDKFKQCLEQNKVDRIRSNLKNTSKIASPGLTSSTASSMVANKTGIFKDFSIIDEVAGQGAFATVKKAIERTTGKTFAVKIISKRKVIGNMDGVTRELEVLQKLNHPRIVRLKGFYEDTESYYMVMEFVSGGDLMDFVAAHGAVGEDAGREISRQILTAIKYIHSMGISHRDLKPDNILIEQDDPVLVKITDFGLAKVQGNGSFMKTFCGTLAYVAPEVIRGKDTSVSPDEYEERNEYSSLVDMWSMGCLVYVILTGHLPFSGSTQDQLYKQIGRGSYHEGPLKDFRISEEARDFIDSLLQVDPNNRSTAAKALNHPWIKMSPLGSQSYGDFSQISLSQSLSQQKLLENMDDAQYEFVKAQRKLQMEQQLQEQDQEDQDGKIQGFKIPAHAPIRYTQPKSIEAETREQKLLHSNNTENVKSSKKKGNGRFLTLKPLPDSIIQESLEIQQGVNPFFIGRSEDCNCKIEDNRLSRVHCFIFKKRHAVGKSMYESPAQGLDDIWYCHTGTNVSYLNNNRMIQGTKFLLQDGDEIKIIWDKNNKFVIGFKVEINDTTGLFNEGLGMLQEQRVVLKQTAEEKDLVKKLTQMMAAQRANQPSASSSSMSAKKPPVSDTNNNGNNSVLNDLVESPINANTGNILKRIHSVSLSQSQIDPSKKVKRAKLDQTSKGPENLQFS

SEQ ID NO: 24673 - protein, 556 aa, Phytophthora erythroseptica
MINDTPAWKALAERAAEIKSTHLRELLNDDARNAAMRTEQQGIYLDFSRQNATSKTLDLLFELAETAELKKKLQAIASGEHVNATEDRAVMHMALRAPKTEKIVVDGHDVVPDVREVLDAIRAFTSNVRDGKFVGATGKQLKNVISIGIGGSHLGSEFVFESLRYEPVAKAAAEGRILRLLANVDPVDVARATSGLNPEETLVVVVSKTFTTAETMLNARTLRKWLVDDLTKKGSSEAGAVAKHMVAASSAVPLVQQFGIDRANTFGFWDWVGGRYSVTSAVGILPLALQYGFDITEKFLAGAHAMDKHLLETPLRNNLPVIMGLLGVWNSSFLGHSSRALLPYSQALLRFAAHIQQVDMESNGKRVTVEGVDLPFQAGEVNFGEPGTNGQHSFYQLIHQGRVVPCDFLGFCESQNPVQLAGEPVSNHDELMSNFFAQPDALARGKSIEDLKAEGVPEKLQNHKLFPGNRPSISLLFKKLDAFSTGQLLALYEHRTVVQGAIWGINSFDQWGVELGKVLAKQVRAQLSASRTENAPVKGFNSATTSMLEAYLAHKA

SEQ ID NO: 24674 - protein, 481 aa, Thermosynechococcus elongatus BP-1
MKAMSKLKLKRARRQKRPLLNLDWQPNFRWRSPALVACIPLALIIVAVWGVAAQAQDKPLTPEDVQGVLNTIWVLVAAILVIFMNAGFGMLETGFCRQKNAVNILAKNLIVFALATLAYWAIGYSFMFGTEGNAFIGWGGFFLSSEDPATYGLNPFPKGLPISVAFLFQAAFAGTAATIVSGAVAERIKFVDFLIFSLLLTGISYPITGHWVWGGGLLSSIGFLGENVAFKDFAGSTVVHAVGGWSALMGAAFLGPRIGKYAADGTPQALPGHNMGFAMLGCLILWIGWFGFNPGSQLAADEAVPYIAVTTNLAAAAGGVAATITAWLAIGKPDLSMIINGILAGLVSITAGCAGVSYWSAVIIGTIGGVIVVYSVLFFDRIKIDDPVGATSVHLVCGTWGTLAVGLFDKELGLFSGYGVTQLIAQIIGILTIGGFTVLLTSIFWLALKQTLGIRVSEEEEIKGLDIGEHGMEAYSGFLKE

SEQ ID NO: 24675 - protein, 90 aa, Prosthecochloris aestuarii DSM 271
MNIYIGNLDYGVTEEDLREAFGEFGDVSSANIITDKFTGRSKGFGFVEMSSSDDANEAIESLNDTDLNGRTIKVNEAKPRAERPARRYQY

SEQ ID NO: 24676 - protein, 551 aa, Nocardia farcinica IFM 10152
MSTLADVSSDITASAAWRKLHDHHGALAQRHLREIFAEDPERGRELTLQVADLHIDYSKHRATRETLQLLVELAREAGVEAHRDAMFAGEHINTSEDRAVGHVALRLPAGRTMTIDGADAGAQVHEVLRRMGEFTDALRSGQWRGATGERIETVVNIGIGGSDLGPVMVHQALRHYADAGITARFVSNVDPADLVAELTGLNPATTLFIVASKTFSTLETLTNATAARRWLVAALGEDAVAKHFVAVSTNAERVSAFGIDTANMFGFWDWVGGRYSVDSAIGLSVMATIGKERFAEFLAGMHAVDTHFATAPLEANAPVLLGLLGIWYANFFGAESRAVLPYSNDLARFPAYLQQLTMESNGKSVRADGTPVTTATGEIFWGEPGTNGQHAFYQLLHQGTRLIPADFIGFARPTDDLPTADGTGSMHDVLMSNLFAQTKVLAFGKTAEEIAAEGTAPNLVPHKVMPGNRPSTTILAPQLTPAVVGQLIALYEHQVFVEGVIWGIDSFDQWGVELGKQQALALAALLTAAEDPAPQDDSSTDALIRWYRAHR

SEQ ID NO: 24677 - protein, 556 aa, Phytophthora erythroseptica
MINDTPAWKALAEHAAEIKSTHLRELLNDDARNAAMRTEQQGIYLDFSRQNATSKTLDLLFELAETAELKKKLQAIASGEHVNATEDRAVMHMALRAPKTEKIVVDGHDVVPDVHEVLDAIRAFTSNVRDGKLVGATGKQLKNVISIGIGGSYLGPEFVFESLRYEPVAKAAAEGRNLRFLANVDPVDVARATSGLNPEETPVVVVSKTFTTAETMLNARTLRKWLVDGLTKKGSSEADAVAKHMVAASSAVPLVQQFGIDRANIFGFWDWVGGRYSVTSAVGILPLALQYGFDITEKFLAGAHAMDKHLLETPLRNNLPVIMGLLGVWNSSFLGHSSRALLPYSQALLRFAAHIQQVDMESNGKRVTVEGVDLPFQAGEVNFGEPGTNGQHSSYQLIHQGRVVPCDFLGFCESQNPVQLAGEPVSNHDELMSNFFAQPDALARGKSIEDLKAEGVPEKLQNHKLFPGNRPSISLLFKKLDAFSTGQLLALYEHRTVVQGAIWGINSFDQWGVELGKVLAKQVRAQLSASRTENAPVKGFNSATTSMLEAYLAHKA

SEQ ID NO: 24678 - protein, 417 aa, Malus micromalus
MAAKESNSAAAAASSDGKIKRMLTHGGRYAQYNVFGNLFEVSSKYVPPIRPIGRGAYGIVCAAVNAEAREEVAIKKIGNAFDNRIDAKRTLREIKLLRHMDHENVIATKDIIRPPQKENFNDVYIVYELMDTDLHQIIRSNQPLNDDHCRYFLYQLLRGLKYVHSAGVLHRDLKPSNLFMNANCDLKIGDFGLARTTSETDFMTEYVVTRWYRAPELLLNCSEYTAAIDIWSVCCILGEIMTRKPLFPGKDYVHQLRLITELLGSPDDSSLGFLRSDNARRYVRELPQYPKRSFSLGFPNMSPSSIDLLEKMLIFDPNRRITVDEALSHPYLAPLHDINEEPVCPMPFNFDFEQPSFTEENIKELIWRESVRFNPESHFSMDHDIICCILLQTNLKTDCNDMFVDTVIVECVKGVDS

SEQ ID NO: 24679 - protein, 326 aa, Nocardia farcinica IFM 10152
MTRAPAEPGRRGFRRVPARRPPLWHGGLYESVADMKTILITGATSGIGSAAAEQLGARGEHLILVGRNPEKLAATEQRVRAAGAGAVDTLRCDVGSQAAIRELAEQVRQRYDRLDVLANNAGGHFPDRALTEDGVETTFAVNYLGPFLLTELLLDLLLDSAPARVVFTSSVLHFGARLDLDDLPFEHGYTGEKAYSRSKLALILYTRELARRLDGTGVTVNAFHPGAVATGIWDTMPWYGKPLAAIAKRIFMISPEQGAEALTYLATDPEVADTTGCYFQRNRPKQPGRRATDDELGARLVEVSARLCGLPTPLKAGDARGGTPPA

SEQ ID NO: 24680 - protein, 556 aa, Phytophthora infestans
MINDTPAWKALAEHAAEIKSTHLRELLNDDARNAAMRTEQQGIYLDFSRQNATSKTLDLLFELAETAELKKKLQAIASGEHVNATEDRAVMHMALRAPKTEKIVVDGHDVVPDVHEVLDAIRAFTSNVRDGKLVGATGKQLKNVISIGIGGSYLGPEFVFESLRYEPVAKAAAEGRNLRFLANVDPVDVARATSGLNPEETLVVVVSKTFTTAETMLNARTLRKWLVDDLTKKGSSEADAVAKHMVAASSAVPLVQQFGIDRANIFGFWDWVGGRYSVTSAVGILPLALQYGFDITEKFLAGAHAMDKHLLETPLRNNLPVIMGLLGVWNSSFLGHSSRALLPYSQALLRFAAHIQQVDMESNGKRVTVEGVDLPFQAGEVNFGEPGTNGQHSFYQLIHQGRVVPCDFLGFCESQNPVQLAGEPVSNHDELMSNFFAQPDALARGKSIEDLKAEGVPEKLQNHKLFPGNRPSISLLFKKLDAFSTGQLLALYEHRTVVQGAIWGINSFDQWGVELGKVLAKQVRAQLSASRTENAPVKGFNSATTSMLEAYLAHKA

SEQ ID NO: 24681 - protein, 556 aa, Phytophthora infestans
MINDTPAWKALAEHAAEIKSTHLRELLNDDARNAAMRTEQQGIYLDFSRQNATSKTLDLLFELAETAELKKKLQAIASGEHVNATEDRAVMHMALRAPKTEKIVVDGHDVVPDVHEVLDAIRAFTSNVRDGKLVGATGKQLKNVISIGIGGSYLGPEFVFESLRYEPVAKAAAEGRNLRFLANVDPVDVARATSGLNPEETLVVVVSKTFTTAETMLNARTLRKWLVDDLTKKGSSEADAVAKHMVAASSAVPLVQQFGIDRANIFGFWDWVGGRYSVTSAVGILPLALQYGFDITEKFLAGAHAMDKHLLETPLRNNLPVIMGLLGVWNSSFLGHSSRALLPYSQALLRFAAHIQQVDMESNGKRVTVEGVDLPFQAGEVNFGEPGTNGQHSFYQLIHQGRVVPCDFLGFCESQNPVQLAGEPVSNHDELMSNFFAQPDALARGKSIEDLKAEGVPEKLQNHKLFPGNRPSISLLFKKLDAFSTGQLLALYEHRTVVQGAIWGINSFDQWGVELGKVLAKQVRAHLSASRTENAPVKGFNSATTSMLEAYLAHKA

SEQ ID NO: 24682 - protein, 267 aa, Rubrobacter xylanophilus DSM 9941
MRRREGGGSLEHVRVEREGGGVAVVTIDRQEKLNALNARVQREITEVFEQALPGETRAAVITGAGERAFVAGADAGEMGSLSALEIREFGRIGTRMMEAIEQAPFPVIAAINGYALGGGLELALACDIRVAAENAVFGFPEVTIGIMPGAGGTQRLPRVIGSGIARELVFTGRMVSAREAKEIGLVNRVVGEGEALGAAREMARQIAGNAPLAVRSAKIAMNVARNTDLASGIEHEGDLFALLFTTEDAREGLSAFAGRRKPEFKGR

SEQ ID NO: 24683 - protein, 470 aa, Pseudomonas putida KT2440
MSCIPFQELAMHTTTSTAHSPAPHAPSQPGTSTGRFRKSMSMTALVLFGLAYMVPLAVFTTYGLVTQMTKGHLPTAYLLTLAAMLLTAYSYGRMVQAHPYSGSVYTYTRKAFGSHIGFITGWTLLLDYIFLPLLSYLLIGIYMSEYFPTIHAWVWVAGSIALVTFLNLIGIESITRVNWILVVVQLVFIIVFVALSILKLSGQAEPVSLLAPLHHDGFSVPLIMTGAAVLCLSFLGFDAVSTMAEETSNPTYRIPVAILAVSLIGGLLFLVVSYCAQMVFPDWGSFADPDSASVDVMRRVGGELLVTAFTATYVAGCFASAMVSQASVSRVLFAMGRDGALPRAFGQLVTKKRVPATAILVVSLLSLIALVITLDTVANMISFGALFAFSAVNLAVVKHYLVDQKLRGCRNCLLYGAIPGLGFLSTLWLWSSLTSLSFTIGLCWMGLGLLVLLGLTRALRVKLPELQMAE

SEQ ID NO: 24684 - protein, 582 aa, Pisum sativum
MALFTVSRIQTTPFDGQKPGTSGLRKKVKVFVQPHYLENFVQASFNALTEGKVRGATLVVSGDGRYYSEQAIQIITKMAAANGVRRIWIGQNGLLSTPAVSAVIRERVGVDGSKATGSFILTASHNPGGPNEDFGIKYNMENGGPAPEGITNKIYENTTTIKEYLIAPDLPNVDITTVGVTNFTGPEGPFDIEVFDSASDYIKLMKSIFDFESIRKLLTSPKFSFCYDALHGVAGAYAKRIFVDELGAQENSLINCVPKEDFGGGHPDPNLTYAKELVARMGLGKSEPEGEVPEFGAAADGDADRNMVLGKRFFVTPSDSVAIIAANAVEAIPYFSAGLKGVARSMPTSAALDVVAKHLNLKFFEVPTGWKFFGNLMDAGLCSVCGEESFGTGSDHIREKDGIWAVLAWLSILAYKTKDNLESKLVSVEDIVRQHWATYGRHYYTRYDYENVDAGAAKELMAHLVKLQSSLPEVNEIIKGASSDVSKVVHGDEFEYNDPVDGSISSHQGIRYLFEDGSRLIFRLSGTGSEGATIRLYIEQYEKDPSKIGRLSHEALAPLVEAALKLSKMEEFTGRSAPTVIT

SEQ ID NO: 24685 - protein, 415 aa, Ralstonia eutropha JMP134
MMPSSTVVIVGAGQAGLQAATSLRQAGFDGRIRLVGDEPCIPYERPPLSKSYLAGETGLDGLWLRPEMFYGKERIELELGQTATAIDRQTRQVELASGRKVAYDRLVLATGARFRPLSVPGAELDGVLPLRTLADADALRPRLAEAREVVVIGAGFIGLEFAAVARKAGVAVHIIEMTQRLMGRVVSEQTSRFYTRAHRDWGSAFLFGTGVARILGNRRVSGVETSDGRTLPADLVLIGIGVVPNTEIAAAAGLAIDNGIIVDQNLASTDPTIFAIGDCANYPSRFGRCRLESVQNAVDQGQAVAAAIVGESIPYDKVPWFWTDQADLKLQIAGITAGHDRSVLRGDPESRSFSVFFFRDGTLIGVESINRPADHVVARRLLLADPRLSPEQAVDPDFDLRAHAIRFSRRERAQT

SEQ ID NO: 24686 - protein, 414 aa, Triticum aestivum
  misc_feature (164)..(164): Xaa can be any naturally occurring amino acid
MPNAIPAFFRASPAAASGSGAGAGPSLATSVYETRLGLAALSWSRAAFGLSLRAVLRVGALASSSSASDYGCYDDGPEFDEEATIAVRVRPWLFWRRRGSKRFHVHDRRIDLAWDLTRARFASPGSPEPSSGYFVAVVVDGEMAVVAGDMTEEAYRKTKAQRAXGPGHVLISRREHVSMRDGGHGRGHKTCVKVRGKEREISLDLVSRGHGKDREMDKEKDKAEVGLSVSVDGERVLHIRRLRWKFRGSEKVDLGGGDRVQVSWDLHNWLFSAREPALTDAASVLAAASPPAHAVFVFRFELGDTAGGEERDSAEAKEKELLDKARRGGAGVLSGYLGRWGRGDWSETSSNGENRRKRGQARRLAKASSSSSASIASSSASWASSSTVMDWASPEEAELHRGDGFSLLVYAWKS

SEQ ID NO: 24687 - protein, 415 aa, Zea mays
MASTFSPTSAARALLPGSTSRPLFLAASASSGRIQPSRKGLDFRRGRFTVCNVAAPTAAEQEATATASAAKETQRPVYPFAAIVGQDEMKLCLLLNVIDPKIGGVMIMGDRGTGKSTTVRSLVDLLPDIRVVVGDPFNSDPDDPEVMGPEVRQRVLQGDTGLPVTTAKITMVDLPLGATEDRVCGTIDIEKALTEGVKAFEPGLLAKANRGILYVDEVNLLDDHLVDVLLDSAASGWNTVEREGISISHPARFILIGSGNPEEGELRPQLLDRFGMHAQVGTVRDAELRVKIVEERARFDRDPKTFRESYHDEQEKLQQQISSARSNLGAVQIDHDLRVKISKVCSELNVDGLRGDIVTNRAAKALAALKGRDSVTVEDIATVIPNCLRHRLRKDPLESIDSGLLVIEKFYEVFS

SEQ ID NO: 24688 - protein, 507 aa, Glycine max
MCGVSLLAFLLLLSLCAEASVHDYRGEKFAAKGNAFVVHGGSEGIYASAPNLTDAYPPPNPDSYIRFERITFRRNKELSNFSSWPIQAVVFEVEDRETIGGSAYGGQRAVCCTGDLAKLGVCAEGQVIYRPSVENPDWPQVFGVSFEMDDEVAVLPLKSIQITKTGMYNLYFIHCDTRLKELVVEGKTVWKNPSGYLPGRMAPMKVFYQFMSFAYVLLGIFWFSQYARFWKEVFPLQNCITAVITLGMFEMALWYFDYAEFSETGIRPTGTTIWAVTFGTVKRTFARLVILLVSMGYGVVRPTLGGLTSKVVMLGGTFFIASEVLELVENVGAVSDLSGKAKLFLVLPAAVLDVFFILWIFTSLSATLTKLQTRRMMIKLDIYRKFTNALAAAVLVSVGWICYELYFKSNDVYNEQWQNAWIIPAFWQVLSYSLLCVICILWAPSQSATRYAYRDDGSDEFDRDETTLTLIKPSPISSKDVRSVPDARPVQSSNGNSNDDLEEDKRE

SEQ ID NO: 24689 - protein, 397 aa, Solibacter usitatus Ellin6076
MHPCRKDTLIRNRVLTPDEVEAFRASIKSEVDQAAAEADSHPQPATSNLLAHIYSERTAPAIVRPTYLAEKPVTMIDAINHGLREEMERNPKIVMWGEDIADPKGGVFGVTRGLSSALPGRVFNAPLAEASIAGVAAGMAIAGYKPIIEIQFADYTWPAFMQLRNEIATVRWRSQGTWNCPVVVRIAAGAYIKGGPWHSACVEGVFAHIPGWRVLFPSCAEDAKGLIKMAARLEDPVIFLEHKGLYRKVQAQTNEPDSDFVIPFGKGRIARAGTDLTIVAWGYTVHLAQEAARQLEAQGKSVEVIDLRSISPLDEDLISRSVRKTNRVIVAHEDSLTMGFGAEVAARIAENCFEYLDAPVRRIAAADSFVPTAPNLEALTLPSVADLRVAAEELLGW

SEQ ID NO: 24690 - protein, 124 aa, Arabidopsis thaliana
MSGVWVFNKNGVMRLVENPYNQSAGDSSESSSSGGNQQQRMRRKILVHLPSSEVVSSYGSLEKILKNLGWERYYSGDNTDHLLQFHKRTSIDLISLPRDFSKFNSIHMYDIVVKNPNVFHVRDM

SEQ ID NO: 24691 - protein, 62 aa, Zea mays
SRCTLRARYKPEVGDIIVGRVIEIAPKRWRLEINFSQDAVLMLSSMNLPDGIQRRRTAVDEL

SEQ ID NO: 24692 - protein, 430 aa, Onion yellows phytoplasma OY-M
MFFLMNPIVILIILIALNAFFAACEISFISTNESKIELDIKKGNKNALRVKKIKAKPTTFLSVIQIMIHIITFFQGNIVTSCWLRETEGHFSLHNIGIEALIITLSIIFGELIPKRIAMHAPSKIAYLFSGSISLIAWLITPLVWILTQVSDLFLIVFGLNPNKNSIQVSEDELRLMLTSSYQKGIIDKDENKMIQNIFEFDHTNISEVMRHRTEVVAIDVEINKKELIKTIQNEKYTRFPVYENSIDNIIGILHVKDIFNYLMSSNPNKIFDLKKFIRKPYLVPDTKNTNEFFREMKKTKTHMAIVIDEYGGTAGIITFEDLIEEILGEISDEYDNEELMIKEVAKNEYIVNGFADLEEVAEAIKLEFSTEDYDTLSGFLIGQLGRFPKPNDKNTEIIYKNFKFTILKHNDKVISQIKITKIDLKEEIK

SEQ ID NO: 24693 - protein, 481 aa, Ralstonia eutropha JMP134
MSRLYSNLIAGEFVEGANISRNINPSNTNDVVGEYAQGSVADVNKAVDAAKAAFPAWSRATSQERFDILRKASDEIIARKEELGRLLSREEGKTLAEGIGEVARAGQIFAFAAGECLRAGGEAIPSVRAGVGVEITREPVGIVGMITPWNFPIAIPAWKIAPALAWGNCVVIKPADLVPGSAWALVDIIQRAGLPKGVLNLVMGRGSVVGQALLEHKDVHAISFTGSVATGRKVAATCIASNPMKKVQIEMGGKNPLVVLDDADLNTAVEVAVNGAFFSTGQRCTASSRLVVQAGIHDRFVEACIERLKSIVVDDALKQGTQIGPVVDQSQIDQDLRYIQIAKDEGGKLVFGGELLKRATPGFYLQPALFTETTNAMRISREEVFGPVANIVRVRDYDEALALANDTEFGLSAGICTTSLKYATHFKRSSEAGMVMVNLPTAGVDYHVPFGGRKGSSYGSREQGTYAKEHYTTIKTAYTMA

SEQ ID NO: 24694 - protein, 317 aa, Shewanella oneidensis MR-1
MSQVRHSNLLILGSGPAGYTAAVYAARANLKPVMITGMQQGGQLTTTTEVENWPGDAEDLTGPALMERMQKHAEKFDTEILFDHINEVTLTERPFRLKGDNGEYTCDALIIATGASARYLGLESEEAFKGRGVSACATCDGFFYRNQKVAVIGGGNTAVEEALYLSNIAAEVHLIHRRDTFRSEKILIDRLMDKVANGNIILHLNQTMDEVVGDAMGVTGLKMKSTKDGAITDLAVAGVFVAIGHSPNTGIFEGQLEMNNGYLKVQSGLQGNATQTSIEGVFAAGDVMDQHYRQAITSAGTGCMAALDAERYLDAKK

SEQ ID NO: 24695 - protein, 350 aa, Arabidopsis thaliana
MVRIIPMAASSIRPSLACFSDSPRFPISLLSRNLSRTLHVPQSQLFGLTSHKLLRRSVNCLGVAESGKAAQSTTQDDLLTWVKNDKRRMLHVVYRVGDMDRTIKFYTECLGMKLLRKRDIPEEKYTNAFLGYGPEDSHFVIELTYNYGVDKYDIGAGFGHFGIAVDDVAKTVELVKAKGGKVSREPGPVKGGKTVIAFIEDPDGYKFELLERGPTPEPLCQVMLRVGDLDRAIKFYEKAFGMELLRTRDNPEYKYTIAMMGYGPEDKFPVLELTYNYGVTEYDKGNAYAQISIGTDDVYKTAEAIKLFGGKITREPGPLPGISTKITACLDPDGWKSVFVDNIDFLKELE

SEQ ID NO: 24696 - protein, 318 aa, Triticum aestivum
  misc_feature (151)..(151): Xaa can be any naturally occurring amino acid
  misc_feature (157)..(157): Xaa can be any naturally occurring amino acid
  misc_feature (212)..(212): Xaa can be any naturally occurring amino acid
  misc_feature (268)..(268): Xaa can be any naturally occurring amino acid
  misc_feature (279)..(279): Xaa can be any naturally occurring amino acid
  misc_feature (289)..(289): Xaa can be any naturally occurring amino acid
  misc_feature (308)..(308): Xaa can be any naturally occurring amino acid
  misc_feature (313)..(313): Xaa can be any naturally occurring amino acid
MCGILAVLGCADDTQGKRVRVLELSRRLKHRGPDWSGMHQVGDCYLSHQRLAIIDPASGDQPLYNEDKSIVVTVNGEIYNHEKLRAQLSSHTFRTGSDCEVIAHLYEELGRLHRLLMGFSSLVIHATQFLCRDAGSTPLWIAVEAKPLYIXWGIDGXSVGISSEVKGLNDDCGHFEIFPPGHLFSQQAGKASRDGDPPTLGSPEVIPSGAYXPTCSQEGFRKGLSPRGLMTDLPCGVLPSGGPGSSLVAAVTVRHLAGTKAAKRWGTXLHSFCVGLEGXPDLKAAKEVXNYLGTMPMSSPSCSDGIDXIEDVXYHPNI

SEQ ID NO: 24697 - protein, 210 aa, Xenorhabdus nematophila
SRSGRAAVKHRMTEMGYQENDYDLDILYQAFLKLADKKGQVFDYDLEALVFINQQQQEYEHYRLDYFSIQSGTNVVPTATVRLACGDEITSEAATGNGTVDAIYQAIGRITGYPLKLISYQLSGKGHGKDALGQVDIIVECFGRRFHGMGLETDIIESSARAMIHVLNNIWQAEQVEKEKQRISHCNTQGNTPNDIQGNTDSHGNTKETA

SEQ ID NO: 24698 - protein, 527 aa, Triticum aestivum
  misc_feature (423)..(423): Xaa can be any naturally occurring amino acid
MSMEDSTPPAGAGASAGEGASSPSPSRRLPDFLQSVRLKYVKLGYHYLITHGMYLLLTPLIVLIAVHLSTLSPGDVADLWTHLRFNLLSVIACSTLLVFLSTVYFLTRPRSVYLVDFGCYKPGPERRCSRETFMRCSKLTGNFTEANLDFQRKILERSGLGEDTYIPPALVTVPPNPSMELARQEAQVCMFGAIDNMLAKTGVKPKDIGILVVNCSLFNPTPSLSAMVVNHYKLRGNIVSYNLGGMGCSAGLLSIDLAKDLLQVHPNSYAMVVSTENITLNWYFGNNRSMLVSNCLFRMGCAAILLSNKRSDRRRSKYELVHTVRTHKGADDKCFSCVTQEEDDSGKVGVALSKDLMAVAGDALKTNITTLGPLVLPFSEQLLFMVTLVGKKLFKMKIKPYIPDFKLAFEHFCIHAGGRAVLXDEIEKNMDLNRLGNNGAVPRMTLFRFGNTSSSSLWYELAYSEAKGRIRRRDRIWQIAFGSGFKCNSAVWKALRSVNPAKEQNNPWMDEIDTFPVDVPKVSKVAE

SEQ ID NO: 24699 - protein, 469 aa, Zea mays
MVFPAILPKVAARWLFTFYRAARKLRRHAFQLYYRNTTAGVRVMAFVTFAGLRPRDVDLVARAVLPKHYMEQLNALVYGSLWLPARRKVAVTSAPRVMSEWFLKEYMAADAVVGLELQHVNVGRRRYFTGLLSSSGHATGPELRQKAIREALLGAEDDPIAVVGIINDSSPLDDELFVPYCKEVYVVSRESAKNDKLSREKYPKPLIFHDGRLAFLPTPAAMLAFFLFLPLGVVLSVIRINIGIVLPYKINFATAAIFGVRFRASGLRAPPADGKRRSGVLYVCTHRTLVDPIMLTTALQKPVPALTYSLSRLSELIAPIKTVRLTRDRARDAETMSRLLAQGDLAVCPEGTTCREPYLLRFSPLFAELADDMEPVALDAQVTTLYGTTASGHKWLDPVAFFANPVPSYRVEFLGAVPREWTRAGGRTGVEVANWVQRRLGQALDFECTGLSRRDKYMMLAGNDGVVAK

SEQ ID NO: 24700 - protein, 556 aa, Phytophthora infestans
MINDTPAWKALAEHAAEIKSTHLRELLNDDARNAAMRTEQQGIYLDFSRQNATSKTLDLLFELAETAELKKKLQAIASGEHVNATEDRAVMHMALRAPKTEKIVVDGHDVVPDVHEVLDAIRAFTSNVRDGKLVGATGKQLKNVISIGIGGSYLGPEFVFESLRYEPVAKAAAEGRNLRFLANVDPVDVARATSGLNPEETLVVVVSKTFTTAETMLNARTLRKWLVDGLTKKGSSEADAVAKHMVAASSAVPLVQQFGIDRANIFGFWDWVGGRYSVTSAVGILPLALQYGFDITEKFLAGAHAMDKHLLETPLRNNLPVIMGLLGVWNSSFLGHSSRALLPYSQALLRFAAHIQQVDMESNGKRVTVEGVDLPFQAGEVNFGEPGTNGQHSFYQLIHQGRVVPCDFLGFCESQNPVQLAGEPVSNHDELMSNFFAQPDALARGKSIEDLKAEGVPEKLQNHKLFPGNRPSISLLFKKLDAFSTGQLLALYEHRTVVQGAIWGINSFDQWGVELGKVLAKQVRAQLSASRTENAPVKGFNSATTSMLEAYLAHKA

SEQ ID NO: 24701 - protein, 607 aa, Prosthecochloris aestuarii DSM 271
MFSSPGFPPPLFFFHFTEIMMTMMTKQDVPDSFRDLELAAPVIEALDKVGYENPTPIQLQTIPYILQGRDVLGQAQTGTGKTAAFALPILSRIDCDKNYPQALVLTPTRELAIQVAEAFQRYAACMPDFHVLPIYGGQDYAGQLKRLKRGVHVVVGTPGRVIDHIKRSSLKLDKLHTLVLDEADEMLRMGFVDDVEWILEQTPASRQVALFSATMPSVILRIARKHLSDPAEITIKSKSSTVDAITQRFLTVGAHHKLEALTRILEAEPFDGVIIFVRTRTATQDLSEKLRARGYAAAALSGEMVQHQREKTIDQLKNGKLNIIVATDVAARGLDVERVTHVINYDIPSDTESYVHRIGRTGRAGRSGDAILFVTSREMSMLRTIERAVRRSIDRMELPSAEMINDKRIAKFKQQISDVISTEDLEVFSDLVEQYCRDHDSTMLQAAAALAFMVQGTTPLLVSAEPLHDTSRSQSQGRQKRTDRRSSSRGDSLPFSQQDGTETFRIEVGKVHGVKPGNIAGAIINETGLPADSVGRISIQEEYSTVDLPQGMPKDLFRELKRVWVCGQQLQISHFEGSSSGFRSSSSNFKKAKRSVARTSRSKRKGR

SEQ ID NO: 24702 - protein, 587 aa, Bradyrhizobium japonicum USDA 110
MMARLLSVNVGLPRDVAWQGKTVHTGIWKAPVEGPRRVRRLNIDGDGQGDTAGHGGEQRAVFVYQDESYRYWQEHLGRPDLVHGQFGENFTVEGLADTNVCIGDRYRIGSALFEVTQPRVTCYRLGIRMDEPDMPALLVRHGRPGFYFRVIEEGDVEAGDEITLLANGPESMSVFEINALLYLPPHPRDRLERALRIPALSRGWNRSFASLLEQQRTSKIAAGNAGLGPAASPPPAWRGFRPFRVSRKIAESGTVTSLILEPTDGHRAAPALPGQFVVVRLGPSEAQAMTRSYSLSSRSDAPPYRISIKREAHGAASLYIADSLRVGDVVEVGAPRGSFTLRQDARPVVLLSAGIGVTPVLAMLHALVAEGSTRDVWWLHGARNGREHAFAAETRGLLAGLAHYHSHVCFSAPDPADRPGADFDSAGHLDQHLIERLNMPRDGDFYLCGPAAFMSDLTAGLAALGVAPDRIHTELFGARPSLTPGIAASPRTPAHAPVGAPGPGPMVSFARSGLNVRWGPSYASLLELAEACDVPVRWSCRTGVCHNCESGLVAGEVSYAPDPLDPPADGNVLICCSQPKADVVIDL

SEQ ID NO: 24703 - protein, 525 aa, Aspergillus nidulans FGSC A4
MNGQLQSNPDILSTLKDIPSASHNGNWVVQKFGGTSVGKFAHNIIDQVVLPSLSHNKVAVVCSARSSSTKAEGTTNRLLRAARDAENSQSKQYLSFVEAVRLEHVDVVESQINSAELRTQLTSAINAECERVLKVLEAAQTLGEISARCVDKVISTGEKLSCRLMAAFLQDRGVDSEYVDLSEIVDFHISGQGLDQEFYDNLAAALGRKVHACENKVPVITGYFGTIPGGLLDQIGRGYTDLCAALVAVGVQAGELQVWKEVDGIFTADPRKVPTARLLPAITPAEAAELTFYGSEVIHPFTMEQVIRAKIPIRIKNVMNPKGDGTVIFPDSTYELERTTPGHDPRLFRTRSPSLLQRPKRPTAVTIKHNILVINVHSNKRSLSHGFFAGIFSVLDRWKLSIDLISTSEVHVSMALHSERPLLNGVGRDEYQIIDEDLKGALSDLQRYGTVDIIPGMAILSLVGKQMKNMVGVAGRMFSTLGENNVNIEMISQGASEINISCVIEERDADRALNIIHTSLFTFLD

SEQ ID NO: 24704 - protein, 393 aa, Mycobacterium bovis AF2122/97
MSGEDSIRSFPVPDLGEGLQEVTVTCWSVAVGDDVEINQTLCSVETAKAEVEIPSPYAGRIVELGGAEGDVLKVGAELVRIDTGPTAVAQPNGEGAVPTLVGYGADAAIETSRRTSRPLAAPVVRKLAKELAVDLAALQRGSGAGGVITRADVLAAARGGVGAGPDVRPVHGVHARMAEKMTLSHKEIPTAKASVEVICAELLRLRDWFVSAAPEITPFALTLRLLVIALKHNVILNSTWVDSGEGPQVHVHRGVHLGFGAATERGLLVPVVTDAQDKNTRELASRVAELITGAREGTLTPAELRGSTFTVSNFGALGVDDGVPVINHPEAAILGLGAIKPRPVVVGGEVVARPTMTLTCVFDHRVVDGAQVAQFMCELRDLIESPETALLDL

SEQ ID NO: 24705 - protein, 460 aa, Lactobacillus sakei subsp. sakei 23K
MTQAKKIPSSFIYFFGSFGGILFGYDIGVMTGALPFLQHDWHLENNAGVVGWITSAVMFGAIFGGALAGQLSDKWGRRKMILLSSLIFAIGSLLSAFSPNDGQVYLIAVRVFLGLAVGAASALVPAYMSEMAPARLRGRLTGINQTMIVSGMLLSYIVDYLLKGLPEQLAWRLMLGLAAVPAIILYFGVLRLPESPRFLVKHNRLDEARQVLGYIRSKDEVETELTNIQTTAGMESNVQQSTSMKTLLSGKYRYLVIAGIGVAGFQQFQGANAIFYYIPLIVEKATGKAASSALMWPIIQGVILVLGSLLFLVIADKFKRRTLLTLGGTVMGLSFILPAIMNALIPNFNPMMIVVFLCLYVAFYAFTWAPLTWVLVGEIFPLAIRGKASGLASSFNWIGSFLVGLLFPMMIASMPQEGVFAIFGVICLLGVLFIRTCVPETMGHTLEEIEAQGTNKAHKA

SEQ ID NO: 24706 - protein, 348 aa, Mycobacterium bovis AF2122/97
MTQIADRPARPDETLAVAVSDITQSLTMVQAINRALYDAMAADERVLVFGEDVAVEGGVFRVTEGLADTFGADRCFDTPLAESAIIGIAVGLALRGFVPVPEIQFDGFSYPAFDQVVSHLAKYRTRTRGEVDMPVTVRIPSFGGIGAAEHHSDSTESYWVHTAGLKVVVPSTPGDAYWLLRHAIACPDPVMYLEPKRRYHSRGMVDTSRPEPPIGHAMVRRSGTDVTVVTYGNLVSTALSSADTAEQQHDWSLEVIDLRSLAPLDFDTIAASIQRTGRCVVMHEGPRSLGYGAGLAARIQEEMFYQLEAPVLRACGFDTPYPPARLEKLWLPGPDRLLDCVERVLRQP

SEQ ID NO: 24707 - protein, 962 aa, Idiomarina loihiensis L2TR
MSSTTLTQLEHHDEFISRHIGPSADEQKAMLAELGVDSLEALTKDTVPGAILREPFLQTGEPQTEREALARLKNIAKKNQICTSYIGMGYYDTVVPNVILRNVLENPGWYTAYTPYQPEIAQGRLEALLNFQQMTMDLTGLDLASASLLDEATAAAEAMAMAKRVSKNKKSNAFFIADNVYTQTIDVVKTRAEYFGFDIIVGPAREASDHDVFGALLQYPDKQGQLHNIEQLIGELQEKKAIVAVASDLMSLLMVKSPGEMGADMVFGNAQRFGVPMGYGGPHAAFFATRDKFKRSLPGRIIGVSKDSRGRPALRMAMQTREQHIRREKANSNICTAQVLLANMASFYAVYHGPDGLRRIANRIHRLTDIVALGMQDKGVKLVNSHWFDTLTFEMKENAADVLARSKALGLNLRVDGEGMFGISLDEAKTRDDVESLFAALFGDNHGLDIDVLDSRVAGGDVESIPADLVRQSQYLQHPVFNEYHSETEMLRYIKKLENKDLALNHSMISLGSCTMKLNATAEMIPVTWPEFGQLHPFCPAEQAQGYYELVSTLSEWLIDVTGYDAMSMQPNSGAQGEYAGLLAIQKYHESRGDGHRNICLIPSSAHGTNPASAQMMNMKVVVVDCDKHGNVDMDDLKAKAEEAGENLSCIMVTYPSTHGVYEEGIKDICDLVHNYGGQVYMDGANMNAQVGVTSPGYIGSDVSHLNLHKTFCIPHGGGGPGMGPIGVKQHLAEFLPNHSIVNIDGPKAGNGAVSAAQFGSASILTISWMYIAMMGGRGLREASETAILNANYLAEKLSKHFKILYRGRNNRVAHECIIDLRPMKDAAGIAEIDVAKRLQDYGFHSPTMSFPVAGTIMVEPTESESKAELDRFIEALVSIKAEAEKVAAGEWPKDNNPLVNAPHTLADITDAEWDRPYDRKTATYPVEAVGYDKFWPTVNRIDDVFGDRNLMCSCPSIEEYR

SEQ ID NO: 24708 - protein, 258 aa, Burkholderia thailandensis E264
MAYENILVETRGRVGLITLNRPKALNALNDALMDELGAALKVFDADEGIGAIVLTGSEKAFAAGADIGMMATYSYMDVFKGDYITRNWEAVRQVRKPVIAAVAGFALGGGCELAMMCDIIFAADTAKFGQPEIKLGVLPGAGGTQRLPRAVSKAKAMDMCLTARFMDAEEAERAGLVSRILPADKLLDEAIAAASTIAEFSLPAVMMVKEAVNRAYETTLSEGVHFERRLFHSAFATEDQKEGMAAFVEKRKPVFKHR

SEQ ID NO: 24709 - protein, 377 aa, uncultured archaeon GZfos26G2
MEDIFRFADELGPAKVIHVYEPSVGLKAVLVVDNVARGPAIGGLRIAPDVSAEECFRLARAMTLKNAAADLPHGGAKSVIYGDPKMPTKEKESLIRAFASSLREIQEYIFAPDMGTDEECMAWVKDEIGRVVGLPSDFGGIPLDEIGATGWGLSHATEVALEYCDFDMEGARVVVQGFGAVGKHTARFLTEKGAMLVGVADSRGTIYNPQGLDVLALIELKTAGKSVADYPDGKKLDRDAVINIECDVWIPAAQPDVIDENNVNLLKTKLVIEAANIPITEGAEKYLHENGVLYVPDFIANAGGVICAAMEYQGADQSAAFEAIEEKLCRNTRLVLEEAASRGILPREAAVDLAVQRLKKSMSYRRWSLFSSAPGFV

SEQ ID NO: 24710 - protein, 60 aa, Nicotiana tabacum
TVVSIPNGPSALAVKEAAWGLARYAAISQDSGLVPIVEPEILLDGEHGIDRTFEVAQKVW

SEQ ID NO: 24711 - protein, 302 aa, Triticum aestivum
  misc_feature (125)..(125): Xaa can be any naturally occurring amino acid
  misc_feature (137)..(137): Xaa can be any naturally occurring amino acid
  misc_feature (147)..(147): Xaa can be any naturally occurring amino acid
  misc_feature (167)..(167): Xaa can be any naturally occurring amino acid
  misc_feature (173)..(173): Xaa can be any naturally occurring amino acid
  misc_feature (185)..(185): Xaa can be any naturally occurring amino acid
  misc_feature (210)..(210): Xaa can be any naturally occurring amino acid
MGNASGREEDAAAPGEADAADVDVEDGGDDSSARGFPPYGGGANHVRRACSVGVVGASAGPGSPPGSPGRSLSPRMFVPQTPVPPLQRPADVTPVFDEILMNEQEEEFDGPPQKEIPAWFVWTLXGGKNVSVEGSWXDTWKSRKPMXKSGKDHSLLWILPSGVYRYXSVVDGXERRCFPDLPCEXEPMGHAVNLLDVHDFVPESVESVSXFEAPPSPESSYRFQSPEEKDFAKEPPALPSQLHLGVLNSQNSEEICARPQHIVLNHLFIEKGWGAHPLVALGVTHRFESKYVTVVLYKPIER

SEQ ID NO: 24712 - protein, 340 aa, Glycine max
MFFLSSPFSSCFRASQRTNHDPTNLTTYIYHTEYGTVSLTWSRSLLGRSLHVNLHNRSSFHLLLKPWKKNGSKKLSHNTVFLWNLSNARFESGLEPRSRFYLAIEVEHGLSLLIGDLSPRSSKAKKPSKTNQLLVLKRDNVHVAPHRSRVYQTKAKLGGKVREIEIDCDVYNCCGYGYENENSSRLLFSVDGEKVLEVARLKWKFRGSERVEIDGVHVQISWDVHDWLFEKDKDIVNHRSSNNNNSNNNGIEGHAVFMFKFEEDEVRGSGGGKEEEQQWSMGSGGEWRNGKSWSSSSLSVSSTSGGSFGGSSSVMEWSSVEENELVVPLGFSLVVYAWRR

SEQ ID NO: 24713 - protein, 431 aa, Legionella pneumophila str. Lens
MDMDIKHKPLKRELSLFGATMMGLGSIVGTGVFVSIGIAAGVTGPSVILAIALAALVATCNAFSSAQLAANHAVSGGTYEYGYRYLHPAFGFTAGWMFLCAKSASAATAALGFAGYFIHLSGLETVPVIPIALAASITLILLVLSGLRRTNTVNIIIVMITLITLTVFIISGLPDFMQRGTANLRPFFPVSKQEGLSHFFYATALMFVAYTGYGRIATLAEEVKNPGKFIPAAIIITLMVSAALYILVGLVAIGAVGVEKLAQVTETNATPLESAARAIGIPGLSVLVSIGACTAMLGVLLNLILGLSRVALAMGRKGDLPKMFCYVSETRHVPVFAVIGVGVVIIALVLTGSVETTWTFSAFTVLIYYAITNLAALRLPKEEQLYPPLFAIGGLLSCLFLAFWVPIGVWITGISLLVLGLLWKVVANRFL

SEQ ID NO: 24714 - protein, 111 aa, Chlamydia trachomatis
IEESGADLIHIDVMDGHFVPNITFGPGVVAAINRSTELFLEVHAMIYTPFEFVEAFVKAGADRIIVHFEAAENIKEIISYIQKCGVQAGVAFSPETSIEFVTSFIPLCDVI

SEQ ID NO: 24715 - protein, 455 aa, Methanocaldococcus jannaschii
MEFSEWYSDILEKAEIYDVRYPIKGCGVYLPYGFKIRRYTFEIIRNLLDESGHDEALFPMLIPEDLLAKEAEHIKGFEDEVYWVTHGGKTQLDVKLALRPTSETPIYYMMKLWVKVHTDLPIKIYQIVNTFRYETKHTRPLIRLREIMTFKEAHTAHSTKEEAENQVKEAISIYKKFFDTLGIPYLISKRPEWDKFPGAEYTMAFDTIFPDGRTMQIATVHNLGQNFSKTFEIIFETPTGDKDYAYQTCYGISDRVIASIIAIHGDEKGLILPPIVAPIQVVIVPLIFKGKEDIVMEKAKEIYEKLKGKFRVHIDDRDIRPGRKFNDWEIKGVPLRIEVGPKDIENKKITLFRRDTMEKFQVDETQLMEVVEKTLNNIMENIKNRAWEKFENFITILEDINPDEIKNILSEKRGVILVPFKEEIYNEELEEKVEATILGETEYKGNKYIAIAKTY

SEQ ID NO: 24716 - protein, 103 aa, Rickettsia conorii str. Malish 7
MNNSEFSKIAETTIAYIAEKIEEQDKEASIDVDLQGDILNLDTDKGVYVINKQSAAKEIWLSSPVSGPYHFFYEQGEWTNRAGLELMAILTEELNIKFDTRPT

SEQ ID NO: 24717 - protein, 967 aa, Glycine max
MANRNLEKMASIDAQLRQLAPAKVSEDDKLIEYDALLLDRFLDILQDLHGEDLKETVQEVYELSAEYEGKHDPKKLEELGNLITSLDAGDSILVAKSFSHMLNLANLAEEVQISRRRRNKLKKGDFADENNATTESDIEETLKKLVFGLKKSPQEVFDALKNQTVDLVLTAHPTQSIRRSLLQKHGRIRNCLSQLYAKDITPDDKQELDEALQREIQAAFRTDEIRRTPPTPQDEMRAGMSYFHETIWNGVPRFLRRVDTALNNIGIKERVPYNAPLIQFSSWMGGDRDGNPRVTPEVTRDVCLLARMMAANLYYSQIEDLMFELSMWRCNDELRVRAEELHRSSKKDEVAKHYIEFWKKVPPNEPYRVVLGEVRDRLYQTRERSRHLLSNGYSDIPEEATFTNVEEFLESLELCYRSLCACGDRAIADGSLLDFMRQVSTFGLSLVRLDIRQESDRHTDVLDAITKHLEIGSYQEWSEEKRQEWLLSELSGKRPLFGPDLPQTEEIRDVLDTFHVIAELPPDNFGAYIISMATAPSDVLAVELLQRECHIKHPLRVVPLFEKLADLEAAPAALARLFSIDWYRNRINGKQEVMIGYSDSGKDAGRFSAAWQLYKAQEELINVAKKFGIKLTMFHGRGGTVGRGGGPTHLAILSQPPDTIHGSLRVTVQGEVIEQSFGEQHLCFRTLQRFTAATLEHGMHPPISPKPEWRALMDQMAVIATEEYRSIVFKEPRFVEYFRLATPELEYGRMNIGSRPAKRKPSGGIETLRAIPWIFAWTQTRFHLPVWLGFGAAFKEVIEKNVNNLNMLQEMYNQWPFFRVTLDLVEMVFAKGDPKIAGLNDRLLVSKDLWLFGDQLRNKYEETKKLLLQVAGHKEILEGDPYLKQRLRLRHAPITTLNIVQAYTLKRIRDPNYNVKVRPRISKESAEASKSADELIKLNPTSEYAPGLEDTLILTMKGIAAGMQNTG

SEQ ID NO: 24718 - protein, 418 aa, Xanthomonas campestris pv. vesicatoria str. 85-10
MTTGNLLYAQSGGVTAVINATAAGVIAEARARKIKVLAARNGILGALREELIDTSKESAAAIAALAQTPGGAFGSCRYKLKSLEEDSAKYERLLDVLRAHDVRWFLYNGGNDSADTAWKVSQLAKAYGYPLHCIGVPKTIDNDLAVTDTCPGFGSAAKYTAVSVREAALDVAAMADTSTKVFIYEAMGRHAGWLAAAAGLAGQDPDDAPQIILLPERAYDQAAFLAKVKQVVDKVGWCVVVASEGIQDAHGKFVADAGGATDSFGHAQLGGVASFLAAQVKQELGYKVHWTLPDYLQRSARHLASKTDWEQAQAVGKAAVQYAIKGMNAVIPVIERVSDAPYRWKIVPAPLHKVANHEKKMPPSFLRKDGFGITERARRYFAPLIKGEAPLAYGSDGLPKYVSLKNVAVAKKLPAWEG

SEQ ID NO: 24719 - protein, 409 aa, Bacillus subtilis subsp. subtilis str. 168
MIKRYTCPNGVRIVLENNPTVRSVAIGVWIGTGSRHETPEINGISHFLEHMFFKGTSTKSAREIAESFDRIGGQVNAFTSKEYTCYYAKVLDEHANYALDVLADMFFHSTFDENELKKEKNVVYEEIKMYEDAPDDIVHDLLSKATYGNHSLGYPILGTEETLASFNGDSLRQYMHDYYTPDRVVISVAGNISDSFIKDVEKWFGSYEAKGKATGLEKPEFHTEKLTRKKETEQAHLCLGFKGLEVGHERIYDLIVLNNVLGGSMSSRLFQDVREDKGLAYSVYSYHSSYEDSGMLTIYGGTGANQLQQLSETIQETLATLKRDGITSKELENSKEQMKGSLMLSLESTNSKMSRNGKNELLLGKHKTLDEIINELNAVNLERVNGLARQLFTEDYALALISPSGNMPS

SEQ ID NO: 24720 - protein, 111 aa, Chlamydia trachomatis
IEESGADLIHIDVMDGHFVPNITFGPGVVAAINRSTELFLEVHAMIYTPFEFVEAFVKAGADRIIVHFEAAENIKEIISHIQKCGVQAGVAFSPETSIEFVTSFIPLCDVI

SEQ ID NO: 24721 - protein, 355 aa, Blastopirellula marina DSM 3645
MVVAPQTAALVQGEMTVAVRVAINGFGRIGRLTFRNLIARGKEFEVVAINDLTDNKMLANLLKYDSTHRRFPGTVEYDSEGLTVNGVKIRVFEERNPAALPWGDMGVDVVVESTGVFTSRKTDAKAGYDSHLDAGAKKVVLSAPAKDAPDLTCVLGVNDHELTADMKTVSNASCTTNCLAPVAKILNDSFGLKNGLMTTIHAYTNDQQVLDLPHADPYRARAAALNIIPTSTGAAKAVGLVIPALKGKLTGISMRVPVPTGSVVDLVANLDKSVTKEEINAAMKAAADGPMKGILCYTEDPIVSSDIIGDPHSSIFAAPQTEVIDGSLVKIVSWYDNEAGYSARTADLVSKLGNM

SEQ ID NO: 24722 - protein, 577 aa, Solibacter usitatus Ellin6076
MRQSVIPIFVPVTKPRPLECRSYQTKCRGVAVLNSPMLNKGTAFTSKERKELGLTGLLPPEISTLGTQVKLAYIQYDRLPDTLAKNTYLTTLHAHNEVLFYRLFSEHLREMIPVLDDATLSLAAQRNHHECGQSRGVYLSIDHIDAMEEAFANLGADAGDIDLILTTDGEQVRGVGDAGMSGIERSLGKLAVYTAAGGINPNRAISVVLDVGTDRQDLLDDPTYIGNRHPRIRGKRYDAFLESYVTTTTRLFPHAMLHWENFAPGNGRRLLEKYGGQVCTFNDDMQGTGAITLAAAISAVRICGTPLRNQRVVILGAGTAGVGIADQICDAMAREGLSRQEAVRQFWFVDRQGLLTSNMTGQLRDHQVTFARPDVESRGWKQLHGGGIGLAEVVRQVKPTMLIGASSSSGSFTEPIIRQMAAHTARPIIFVLSTPPVRAEANPADLIAWTAGRALIATGSLFAPVTYRGLTYVVAQLNNAMVYPGLSLGAVVARARRISEGMFEAAAGAVSSLVTVRHPGASLLPHIDDLSSVSMTVAAAVAEAAVSEGLSRAPIDDIVQQVRDAMWQPEYHEIQAS

SEQ ID NO: 24723 - protein, 404 aa, Bacillus subtilis subsp. subtilis str. 168
MKIIVQKFGGTSVKDDKGRKLALGHIKEAISEGYKVVVVVSAMGRKGDPYATDSLLGLLYGDQSAISPREQDLLLSCGETISSVVFTSMLLDNGVKAAALTGAQAGFLTNDQHTNAKIIEMKPERLFSVLANHDAVVVAGFQGATEKGDTTTIGRGGSDTSAAALGAAVDAEYIDIFTDVEGVMTADPRVVENAKPLPVVTYTEICNLAYQGAKVISPRAVEIAMQAKVPIRVRSTYSNDKGTLVTSHHSSKVGSDVFERLITGIAHVKDVTQFKVPAKIGQYNVQTEVFKAMANAGISVDFFNITPSEIVYTVAGNKTETAQRILMDMGYDPMVTRNCAKVSAVGAGIMGVPGVTSKIVSALSEKEIPILQSADSHTTIWVLVHEADMVPAVNALHEEFELSK

SEQ ID NO: 24724 - protein, 478 aa, Arabidopsis thaliana
NISAATITPLTASPPYNAGIVRLAVGWTIIGPFRFQGPDKFFRTRAEKYKSTVFRTNIPPTFPFFGNVNPNIVAVLDVKSFSHLFDMDLVDKRDVLIGDFRPSLGFYGGVRVGVYLDTTEPKHAKVRTYVALLLLRFAMETLKRSSKVWLQELRSNLNIFWGTIESEISKNGAASYIFPLQRCIFSFLCASLAGVDASVSPDIAENGWKTINTWLALQVIPTAKLGVVPQPLEEILLHTWPYPSLLIAGNYKKLYNFIDENAGDCLRLGQEEFGLTRDEAIQNLLFVLGFNAYGGFSVFLPSLIGRITGDNSGLQERIRTEVRRVCGSGSDLNFKTVNEMELVKSVVYETLRFSPPVPLQFARARKDFQISSHDAVFEVKKGELLCGYQPLVMRDANVFDEPEEFKPDRYVGETGSELLNYLYWSNGPQTGTPSASNKQCAAKDIVTLTASLLVADLFLRYDTITGDSGSIKAVVKAK

SEQ ID NO: 24725 - protein, 344 aa, Brassica napus
  misc_feature (316)..(316): Xaa can be any naturally occurring amino acid
STHASGKFARYSKFETCGTIRSGDLLNSTASVVCSLSFDAEEEHIAAAGISKKIKIFDFNAFMNESVGVQYPLVEMVSKSKLSCVCWNNYIKNYLASTDYDGVVQIWDAGTGQGFSQYTEHQKRAWSVDFSPSDPTKFVSGSDDCSVKLWSVNEKRSLGTIWSPANVCCVQFSSYSNHLLAFGSADYKVYCYDLRYVKTPWCTLAGHEKAVSYVKFMDSETIVTASTDNSLKLWNLNKTNSSGLSPGACSMTYKGHTNQKNFVGLSVLDGYIACGSETNEVYSYYRSLPMPMTSYKFGAVDPISGNECFDDNAQFXVSSVCWRKKSNMLVAANSTGNMKLLKLV

SEQ ID NO: 24726 - protein, 310 aa, Ralstonia eutropha JMP134
MKPPRLQSAPLPSQSFYSRTRCLPDRLAAMSDVTLQNFEPEVIEASRQAPVLVDFWAPWCGPCRTLGPMLEKLEAEANGKWKLTKVNVDENPELAAHFGVRSIPHVVAFADGEAVDQFIGVLPESGLREFLSRLTPNPAQLALQDAQSLAAAGDRQAAGDAFQSLLALDPGSDAARLAYISFLLDGNALAEAEAEFGRLSPQAAQEDAYAALRTRLEAMKGVSDLPDEQTLTSRIAADPRDLPARLDLARLLIARQQYEPALEQLLAIVRMDRGFEDDVGRKTMISVFDMLGDHPDVVSRWRRQLSTSLN

SEQ ID NO: 24727 - protein, 308 aa, Staphylococcus aureus subsp. aureus Mu50
MRKLVVGSRRSKLALTQSQQFINKLKAVEPNLEIEIKEIVTKGDRIVDKQLSKVGGKGLFVKEIQHELFEKNIDMAIHSLKDVPSVIPEGLTLGCIPDRELPFDAYISKTHTPLSQLPEGSIIGTSSLRRGAQILSKYPNLEIKWIRGNIDTRLEKLQTEDYDAIILAAAGLRRMGWSDDIVTSYLDRDTLLPAIGQGALGIECRSDDEELLTLLSKVHNDEVAKCVTAERTFLAEMDGSCQVPIAGYATISDQKEIEFTGLIMTPDGKERFEYTMNGTDPVELGKTVSNKLKEQGAYEIIKRLNEQH

SEQ ID NO: 24728 - protein, 347 aa, Wolbachia endosymbiont of Tribolium madens
GNVRESLCDKKIQLGINLTKGLGAGALPDVGKGAAEESIDEIMEHIKDSHMLFITAGMGGGTGTGAAPVIAKAAREARAIVKDKGAKEKKILTVGVVTKPFGFEGVRRMRIAELGLEELQKYVDTLIVIPNQNLFRIANEKTTFADAFQLADNVLHIGIRGVTDLMIMPGLINLDFADIETVMSEMGKAMIGTGEAEGEDRAISAAEAAISNPLLDNVSMKGAQGILINITGGGDMTLFEVDAAANRVREEVDENANIIFGATFDQAMEGRVRVSVLATGIDSYNDKPEASSINQNKIPAEEKNFKWPYNQIPISETKEYAPTEQTNERVKWGSNVYDIPAYLRRKK

SEQ ID NO: 24729 - protein, 647 aa, Pisum sativum
MRNDSPYTPLLNGSANNHRRDLLLVLSGLLLLASIIAFSGYRGGFINSREPHADVSSSSSSSASSDEAAKPSAVSRGVSSGVSEKSNTFLSGKVVGEAESFPWDNTMLSWQRTAFHFQPEKNWMNDPNGPLYYKGWYHFFYQYNPNGAVWGDIVWGHAVSRDIIHWLHLPLAMVADQWYDSNGVWTGSATILPDGQVIMLYTGSTNESVQVQNLAYPADLNDPLLVDWIKYPSNPVLVPPKGILPKDFRDPTTAWLTTEGKWRITIGSKINKTGVALVYDTVDFKTYERKDVLLNAVPGTGMWECVDFFPVSKKSENGSDTSINGVEVKHVMKVSLDDDRHDYYSLGTYDEKKVKFIADDFKNDVGVGLRYDYGIFYASKTFYDQKKNRRVLWGWIGESDSEYADVAKGWASVQSIPRIVKLDKKTGSNLLQWPVAEVESLRLKSDEFKNLKVKPGAVVSLDIETATQLDIDAEFEIDKEALEKTAQSNVEYECSTSGGASRRGALGPFGLYVLADKGLSEYTPVYFYVVKGSNGKLNTPFCSDQSRSSLANDVHKQIYGSVVPVLEGEKLSLRILVDHSIVESFAQGGRTCITSRVYPTRAIYGAARLFLFNHAIETNVTASLKVWANEFCIYTPIPPCSKGVRRN

SEQ ID NO: 24730 - protein, 653 aa, Arabidopsis thaliana
MINFSLSLTKSMSYSFIWMLFVIHISCVLSADGNHILCSPSFTCGNQRGLLYPFWIAGRKECGHPDFELDCNAGVPELSISSVKFRILGADYDSGIITLARSDNIDDPCLPNSFTTSFNETVLPLASTTDLLTIYYDCNRNVSSFVSTFVKELDCPDDGTDDRRNYYLTRNLTFLPPSLKLEGNSFLLNDFGGSCSRNVSNPASRTALNTLESTPSTDNLKIALEDGFALEVNSDCRTCIDSKGACGFSQTSSRFVCYYRQEPQNPTRNKGIGAASFAMMGVILVVTCLNCLIRRQRKTLNDPRMRTSDDSRQQNLKALIPLKHYSYAQVTSITKSFAEVIGKGGFGTVYRGTLYDGRSVAVKVLKESQGNGEDFINEVASMSQTSHVNIVTLLGFCSEGYKRAIIYEFMENGSLDKFISSKKSSTMDWRELYGIALGVARGLEYLHHGCRTRIVHFDIKPQNVLLDDNLSPKVSDFGLAKLCERKESILSLMDTRGTIGYIAPEVFSRVYGRVSHKSDVYSYGMLVLDIIGARNKTSTEDTTSSTSSMYFPEWIYRDLEKAHNGKSIETAISNEEDEIAKKMTLVGLWCIQPWPLDRPAMNRVVEMMEGNLDALEVPPRPVLQQIPTATLQESSTFSEDISAYTEICSINVA

SEQ ID NO: 24731 - protein, 222 aa, Pisum sativum
MRNDSPYTPLLNGSANNHRRDLLLVLSGLLLLASIIAFSGYRGGFINSREPHADVSSSSSSSASSDEAAKPSAVSRGVSSGVSEKSNTFLSGKVVGEAESFPWDNTMLSWQRTAFHFQPEKNWMNDPNGPLYYKGWYHFFYQYNPNGAVWGDIVWGHAVSRDIIHWLHLPLAMVADQWYDSNGVWTGSATILPDGQVIMLYTGSTNESVQVQNLAYPADLND

SEQ ID NO: 24732 - protein, 625 aa, Lactococcus lactis subsp. lactis Il1403
MCGIVGFIDRMNQNDKSKTLEEMMNTIGHRGPSSSGEFIDEGAAIGFRRLSIIDLEGGDQPIFNEDKSKLITFNGEIYNFRELREDLIAKGHDFTTHADTEVLLHGYEEYGVELLQKLRGMFAFVIWDREKQELFGARDHFGIKPLYYTQMGGTFMYGSEIKSFLKHPNFKKELNKEALKPYMTFQYSALDETFFKNVFRIKEGHYFTYKDGVLDIKPYWDMKVDEKDMSLEESIDLIDKTVLGSVDAHKFADVEVGAFVSSGVDSSYVASTLRPEHTYSIGFGQGTFNESKQAKQLTDMIGLNNTSREIHGDEAFKYFPQIQYYLDEPDSNPSCVPLFFLAELAARDVRVVMSGEGADELFAGYESYGFSTNSRAVRVFAEGLKKLPKSLRFSIARGIENKHFKGQKHLYESLAPAEDFFIGQAKVFDESESVELLKEEFKAAPTVKDIVGKTYKKAPEGSELRKMQYLDMHQWMPGDILLKADKMAMAHSLELRVPLLDIELMHTAEQIPTKYLLNEHNTKYAFRQAARRHLPEEWSNRKKLGFPVPIKDWLREEKYYKVVRQLFEQDFVAEFFDQEKLLKMLDDNFADKNDARRKLWTIYSFLTWYDVYFINNGEKPAVVNF

SEQ ID NO: 24733 - protein, 208 aa, Brassica rapa
  misc_feature (161)..(161): Xaa can be any naturally occurring amino acid
MAFLSKVGKIFRQTSAHVTASNSMLQSIRCMSSSKIFVGGISYSTDEFGLREAFSKYGEVVDAKIIVDRETGRSRGFAFVTFTSTEEASNAMQLDGQDLHGRRIRVNYATERGSGFGGRGFGGPGGGNAGGYGAPSGGYGGGGGYGGGAGGYGAPGGGYGXWWWLRRRCWWLRCSSWWLWRRWLQCSRWWLRRWLILWWKCCWWRLWR

SEQ ID NO: 24734 - protein, 119 aa, Glycine max
MNSMAVRLAKHLRLSALTSFSLGGVPRSGASWYSTSLSGGENDHPLPDNDAPKKEALDEEFDDFLGEKPELQLQGVDPKKGWGFRGVHKAIICGKVGQAPVQKILRNGRNITIFTVGTG

SEQ ID NO: 24735 - protein, 664 aa, Zea mays
APRRCENKQNEEKRSSGRQQAGRQEHSPARPAPTPAPAASARPRPLLRFVPSPFAISFEEKGKQARKYSTDTTHLPLRSGHQAQPISRSLSLSPSPSSAQRTRRRPLPGGPSLSLSAGSSGLSRSGGAEIRPLGRRLLPRSAGARSWHPAMSSPMPSPTLKDHLSTPTGPLHLKVWEVICIALGAFMVLVLFATVWLTLRSKKRVRRRASANIPITQIPAISKEIKEVRVEQVPASDFVAHDGVLLTFQDKTSDRDSDKVMAHLGVSKSKRGDESHSGSFRYMDKDAGFQSAEEGGSGTFRQTSANAIVAPSPLVGLPEFSYLGWGHWFTLRDLELATNRFSKDNIIGEGGYGVVYRGQLINGSPVAVKKLLNNLGQAEKEFRVEVEAIGHVRHKNLVRLLGYCVEGTQRMLVYEYVNNGNLEQWLHGAMSQHGSLTWEARIKILLGTAKALAYLHEAIEPKVVHRDIKSSNILIDDEFESKVSDFGLAKLLGAGKSHVTTRVMGTFGYVAPEYANTGLLNEKSDIYSFGVVLLEAITGRDPVDYGRPPNEVNLVDWLKMMVASRRSEEVVDPTIETRPSTRALKRALLTALRCVDPDSEKRPKMGQVVRMLESDDPIPRGDRRSKHHRGGSTEMDSQKDNNSDTEKSDNADSKPSRTRASSSK

SEQ ID NO: 24736 - protein, 501 aa, Glycine max
MAALSNGHGSSFFKMPPIKFTKLFINGEFVDSLSGREFETRDPRTGEVITRIAEGAKEDVDVAVKAARAAFDYGPWPRMPGAERAKIMMKWADLVDQNIEEIAALDAIDAGKLYHWCKAVDIPAAASTIRYYAGAADKIHGEVLKASREFHAYTLLEPIGVVGHIIPWNFPSTMFVAKVSPSLAAGCTMVLKPAEQTPLSALFYAHLAKLAGIPDGVLNVVPGFGQTAGVAISLHMDIDKVSFTGSTEVGREVMRAAANSNLKPVSLELGGKSPVIVFDDADVDKAAELALLGILFNKGEICVAGSRVLVQEGIYDEFEKKLVEKAKAWVVGDPFDPKVQQGPQVDKKQFEKILSYIEQGKKEGATLLTGGKRVGNKGYYIEPTIFSNVKEDMLIVQDEIFGPVMALMKFKTIEDAIKIANNTRYGLASGIVTKSLDTANTVSRSIRAGIVWINCYFAFGNDIPYGGYKMSGFGRDFGMEALHKYLQVKSVVTPIYNSPWL

SEQ ID NO: 24737 - protein, 941 aa, Mycobacterium bovis AF2122/97
MSDHSTFADRHIGLDSQAVATMLAVIGVDSLDDLAVKAVPAGILDTLTDTGAAPGLDSLPPAASEAEALAELRALADANTVAVSMIGQGYYDTHTPPVLLRNIIENPAWYTAYTPYQPEISQGRLEALLNFQTLVTDLTGLEIANASMLDEGTAAAEAMTLMHRAARGPVKRVVVDADVFTQTAAVLATRAKPLGIEIVTADLRAGLPDGEFFGAIAQLPGASGRITDWSALVQQAHDRGALVAVGADLLALTLIAPPGEIGADVAFGTTQRFGVPMGFGGPHAGYLAVHAKHARQLPGRLVGVSVDSDGTPAYRLALQTREQHIRRDKATSNICTAQVLLAVLAAMYASYHGAGGLTAIARRVHAHAEAIAGALGDALVHDKYFDTVLARVPGRADEVLARAKANGINLWRVDADHVSVACDEATTDTHVAVVLDAFGVAAAAPAHADIATRTSEFLTHPAFTQYRTETSMMRYLRALADKDIALDRSMIPLGSCTMKLNAAAEMESITWPEFGRQHPFAPASDTAGLRQLVADLQSWLVLITGYDAVSLQPNAGSQGEYAGLLAIHEYHASRGEPHRDICLIPSSAHGTNAASAALAGMRVVVVDCHDNGDVDLDDLRAKVGEHAERLSALMITYPSTHGVYEHDIAEICAAVHDAGGQVYVDGANLNALVGLARPGKFGGDVSHLNLHKTFCIPHGGGGPGVGPVAVRAHLAPFLPGHPFAPELPKGYPVSSAPYGSASILPITWAYIRMMGAEGLRAASLTAITSANYIARRLDEYYPVLYTGENGMVAHECILDLRGITKLTGITVDDVAKRLADYGFHAPTMSFPVAGTLMVEPTESESLAEVDAFCEAMIGIRAEIDKVGAGEWPVDDNPLRGAPHTAQCLLASDWDHPYTREQAAYPLGTAFRPKVWPAVRRIDGAYGDRNLVCSCPPVEAFA

SEQ ID NO: 24738 - protein, 242 aa, Schizosaccharomyces pombe
MFMGLSFETISSTGPNGAVIHYSPPATGSAIIDPTKIYLCDSGAQYKDGTTDVTRTWHFGEPSEFERQTATLALKGHIALANIVFPKGTTGYMIDVLARQYLWKYGLDYLHGTGHGVGSFLNVHELPVGIGSREVFNSAPLQAGMVTSNEPGFYEDGHFGYRVENCVYITEVNTENRFAGRTYLGLKDLTLAPHCQKLIDPSLLSPEEVKYLNEYHSEVYTTLSPMLSVSAKKWLSKHTSPI

SEQ ID NO: 24739 - protein, 709 aa, Synechococcus elongatus PCC 6301
MAAQNLYILHIQTHGLLRGQNLELGRDADTGGQTKYVLELAQAQAKSPQVQQVDIITRQITDPRVSVGYSQAIEPFAPKGRIVRLPFGPKRYLRKELLWPHLYTFADAILQYLAQQKRTPTWIQAHYADAGQVGSLLSRWLNVPLIFTGHSLGRIKLKKLLEQDWPLEEIEAQFNIQQRIDAEEMTLTHADWIVASTQQEVEEQYRVYDRYNPERKLVIPPGVDTDRFRFQPLGDRGVVLQQELSRFLRDPEKPQILCLCRPAPRKNVPALVRAFGEHPWLRKKANLVLVLGSRQDINQMDRGSRQVFQEIFHLVDRYDLYGSVAYPKQHQADDVPEFYRLAAHSGGVFVNPALTEPFGLTILEAGSCGVPVVATHDGGPQEILKHCDFGTLVDVSRPANIATALATLLSDRDLWQCYHRNGIEKVPAHYSWDQHVNTLFERMETVALPRRRAVSFVRSRKRLIDAKRLVVSDIDNTLLADRQGLENLMTYLDQYRDHFAFGIATGRRLDSAQEVLKEWGVPSPNFWVTSVGSEIHYGTDAEPDISWEKHINRNWNPQRIRAVMAQLPFLELQPEEDQTPFKVSFFVRDRHETVLREVRQHLRRHRLRLKSIYSHQEFLDILPLAASKGDAIRHLSLRWRIPLENILVAGDSGNDEEMLKGHNLGVVVGNYSPESEPLRSYERVYFAEGHYANGILEALKHYRFFEAIA

SEQ ID NO: 24740 - protein, 251 aa, Zea mays
MKFNIANPSTGCQKKLEIDDDQKLRAFYDRRISQEVSGDALGEEFKGYVFKIMGGCDKQGFPMKQGVLTSGRVRLLLHRGTPCFRGYGRRNGERRRKSVRGCIVSQDLSVINLVIVKKGENDLPGLTDTEKPRMRGPKRASKIRKLFNLNKDDDVRKYVNTYRRTFTTKNGKKVSKAPKIQRLVTPLTLQRKRARIADKKKRITKKKSEAAEYQKLLAQRLKEQRDRRSESLAKRRSKLSAAVKASAATSA

SEQ ID NO: 24741 - protein, 268 aa, Triticum aestivum
MAEGARFHGMVGGGGKGMQENEFNGFFSMPYYQKIGEGSHMSVDSTDNYNLAGGSVTMSVDNSSVGSNESRTVILKHPGLRDAPTASYSVGNSVFRPNRVAAHTLNEDALARVLMDPNHPTEILSKYQQWAIDLGRLDMGVPFAQGAFGKLYRGTYIGEDVAIKLLEKPDNDIERAQSLEQQFVQEVMMLSTLRHPNIVRFIGACRKSIVWCIITEYAKGGSVRQFLAKRQNKSGPLRLAVKQALDVARGMAYVHALGLSQRQLCWDR

SEQ ID NO: 24742 - protein, 618 aa, Xylella fastidiosa 9a5c
MSNERTAQQSDIKQLISKGLEQGYLTYAEVNDHLPEDLVDPDQIEDIIGMINGMGIEVHEVAPDAETLLLNEGNTGNREVDDTAAEEAAAALSALDTEAGRTTDPVRMYMREMGTVELLTREGEIAIAKRIEEGLSEVQAALGVFPLSTELLLSEYELHKEGKRRLTEVVVGFNDLIEEDNSVTSSVDVTDESIVEVDEEDDDSVGNDEDAPTIGPDPAEVASRIESLSTEYAKFKKLYAKHGPEHKAVIKVREDVAAIFVTFKLSLPLTDLLVQQLQNMVNSVKDHERKVLHLATNVAKMPRKDFIRSWENNQTNLEWVEDAIKRKQKWSSALRDIKDQITAEQQASIDLEKANSLTLADIKEINRMMVYGEAKASKAKKEMVEANLRLVISIAKKYTNRGLQFLDLIQEGNIGLMKAVCKFEHRRGFKFSTYATWWIRQAITRSIADQARTIRIPVHMIETINKLNRISRQMLQQFGREATPEELAKEMDMPEDKIRKVMKIAKEPISMETPIGDDEDSHLGDFIEDPNVESPVDTTTNVNLSETVREVLAGLTPREAKVLRMRFGIDMNTDHTLEEVGKQFDVTRERIRQIEAKALRKLRHPSRSEQLRSFLDID

SEQ ID NO: 24743 - protein, 740 aa, Pelargonium x hortorum
MEACNCFEPQWPADDLLMKYQYISDFFIAVAYFSIPLELIYFVKKSAVFPYKWVLVQFGAFIVLCGATHLINLWTFNLHTRTVEIVMTTAKLMTAAVSCVTALMLVHIIPDLLSVKTRELFLKNKAAELDREMGLIRTQEETGRHVRMLTHEIRSTLDRHTILKTTLVELGRTLGLEECALWMPTRTGLELQLSHTLRQQNPVGYTVPIHLPVLNQVFSSNRAIKISPNSPIARLRPLAGKYVPGEVVAVRVPLLHLSNFQINDWPELSTKRYAMMVLMLPSDSARQWHVHELELVEVVADQVAVALSHAAILEESMRARDLLMEQNVALDMARREAETAIRARNDFLAVMNHEMRTPMHAIIALSSLLQETDLTSEQRLMVETILKSSNLLATLINDVLDLSRLEDGSLQLDIATFNLHAVFRQVFNLIKPIASVKKLFITLNVSPDLPEYVIGDEKRLVQIMLNVVGNAVKFSKEGIISVTAFVAKSESVRDPRAPDFFPVSSDNQFYMRVQVKDSGSGINPQDMPKLFTKFAQSQPVATKNSGGSGLGLAISKRFVNLMDGHIWIDSEGPSKGCTVTFVVKLGIPEGSNEPKLPLMPKVSANNSQTDFPGLKVLLMDENGISRMVTKGLLMHLGCDVTSVSSSEECLRMVSQDHKVVFMDVRVPGLDGHELAVRIHEKFMKRHERPLIVALTSNADKVTKENCLRVGMEGVILKPVSVDKMRNVLSKLLEHRILFEA

SEQ ID NO: 24744 - protein, 495 aa, Bradyrhizobium japonicum USDA 110
MMSVAYDFAHSPASEFMARPQHLLIDGRRVPASSGRTFKSLNPATGQVIATVAEGNEADVDHAVAAARRAFEGPWRTMRASERGQILLRWAELLKANAEEIIELESIDAGKPISATLRQDFPAAVDTLIYYAGWADKISGDVVPVRDDALTYTVREPVGVVAAIVPWNFPLMIGMWKLAPALACGCTIVMKPAELTSLSALRIAELALQAGLPAGVFNVVTGPGRVVGDALVNHPDVDKVTFTGSPGVGRGIMKGAAGNFKRVSLELGGKSANVIFDDADLEAASKAAASGIFFNAGQVCSAGSRVLVQEKAYDEVVERLAARAKSLKIGDPLDRKTALGPVISEKQMKSILDYVDIGQKEGASLVTGGTRVGERGYFISPAVFANVEHEMRISQEEIFGPVVSIIKFRDEADALRIANGTAYSLAAGVWSRDIGKLQRFAKRARAGTVWMNTYGYTDVRLPWGGERDSGLGREHGTAALDNFTEPKAVWMNLAV

SEQ ID NO: 24745 - protein, 462 aa, Glycine max
MNSIAFKSFVGLRQSSPEAPHFAAQPRPATPHRKFRVLAGKFSPKLNGRNLRVAVVGGGPAGGAAAETLAKGGVETFLIERKMDNCKPCGGAIPLCMVGEFDLPLDIIDRRVTKMKMISPSNVAVDIGRTLKPHEYIGMVRREVLDAYLRDRAKEYGANVINGLFLKMDIPKDKNSPYVLHYSSYDGKTNGVGEKRTLEVDAVIGADGANSRVAKSIDAGDYEYAIAFQERVKIPDDKMVYYENLAEMYVGDDVSPDFYGWVFPKCDHVAVGTGTVTHKGDIKKFQLATRKRAEDKILGGKIIRVEAHPIPEHPRPRRLLGRVALVGDAAGYVTKCSGEGIYFAAKSGRMCAEAIVEGSENGKRMVEEGDLRKYLEKWDKTYWPTYKVLDILQKVFYRSNPAREAFVEMCADEYVQKMTFDSYLYKTVVPGNPLEDLKLAINTIGSLVRANAIRREMNKLNV

SEQ ID NO: 24746 - protein, 318 aa, Salmonella typhimurium LT2
MTVTSMLDNVLRIATRQSPLALWQAHYVKDALMATHPGLTVELVPMVTRGDVILDTPLAKVGGKGLFVKELEIALLEKRADIAVHSMKDVPVAFPDGLGLVTICEREDPRDAFVSNKYHSLDDLPAGSIVGTSSLRRQCQLAERRPDLIIRSLRGNVGTRLGKLDNGDYDAIILAVAGLKRLGLESRIRTALPPDVSLPAVGQGAVGIECRLDDARTQALLAPLNHSQTALRVTAERAMNTRLEGGCQVPIGSYAEIINGEIWLRALVGAPDGSVMVRGERRGSPEQAEQMGISLAEELLENGARAILTEVYNGETPA

SEQ ID NO: 24747 - protein, 741 aa, Pelargonium x hortorum
MESCNCIEPQWPADELLMKYQYISDFFIAIAYFSIPLELIYFVKKSAVFPYRWVLVQFGAFIVLCGATHLINLWTFNMHSKTVEIVMTTAKIMTAVVSCATALMLVHIIPDLLSVKTRELFLKNKAAELDREMGLIRTQEETGRHVRMLTHEIRSTLDRHTILKTTLVELGRTLALEECALWMPTRTGLELQLSYTLRQQNPVGFTVPIHLPVINQVFSSNHAIKISPNSPIARLRPIAGKYMPGEVVGVRVPLLHLSNFQINDWPELSTKRYALMVLMLPSDSARQWHVHELELVEVVADQVAVALSHAAILEESMRARDLLMEQNVALDMARREAETAIRARNDFLAVMNHEMRTPMHAIIALSSLLQETELTPEQRLMVETVLKSSNLLATLINDVLDLSRLEDGSLQLDIGTFNLHALLREVHNLIKPIASVKKLCISLNVATDLPEYAVGDEKRLVQIILNVVGNAVKFSKEGNISITAFVAKSESLRDPRAPDFFPICGENQFYLRVQVKDSGLGINPQDIPRLFTKFAQTQPVATKNSGGSGLGLAICKRFVNLMEGHIWIDSEGPGKGCTATFVVKLGIPERSSEPKLLLMPKVPANHGQTNFSGLKVLLLDDNGVSRAVTRGLLAHLGCDVTTVSSSDELLRVVSQDYKVVFMDVCMPEVDGFEIAVRIHEKFMTRHERPLIVALTGNIDQVTKDNCTRVGMEGVVLKPVSIDKMRNVLSNLLEHRVLFEAI

SEQ ID NO: 24748 - protein, 161 aa, Trema orientalis
MSSSEVDKVFTEEQEALVVKSWAVMKKNSAELGLKFFLKIFEIAPSANNLFSYLKDSPIPLEQNPKLKPHAMTVFVMTCESAVQFRKAGKVTVRESNLKRIGAIHFKNGVVHEHFETRFALLETIKEAVPEMWSPEMKNAWGEAYDQLVAAIKFEVKPSST

SEQ ID NO: 24749 - protein, 975 aa, Burkholderia thailandensis E264
MKLEHPDRLMKRTPLSLAALETHDAFAERHIGPDAASQQAMLDTLGFATRAALIDAVIPASIRRAETLPLGPFAQPLSEAEALAALRELADKNQVFRSYIGQGYYDTHTPAVILRNVLENPAWYTAYTPYQPEISQGRLEALLNFQQMVADLTGLEISNASLLDEATAAAEAMTLLQRVGKPQSNVFYVADDVLPQTLEVIKTRAKPIGIEVKSGPAADAAAANAFGVLLQYPGVNGDVRDYRALADAIHAAGGHVVVAADILALTVLTPPGEWGADVAVGNTQRFGVPMGFGGPHAAYMAVRDEFKRQMPGRLVGVTVDAQGKPALRLALQTREQHIRREKATSNVCTAQALLAIMASMYAVYHGPRGLKTIALRVNRIAALVAAGVKQLGFATVNDTFFDTLTIDTGARTAQIHALANAKRINLRRVSDTRVGISVDETTTRGDLAELLGVFAQAAGGTAPDVDALDAGLADTAALPAGLQRTSAYLTHHVFNRHHSETEMLRYLRSLSDKDLALDRSMIPLGSCTMKLNATSEMLPVTWPEFGRIHPFAPAEQTVGYREMIDQLEQMLVAATGYAAVSLQPNAGSQGEYAGLLIIHAYHESRGESHRNVCLIPASAHGTNPASAHMAGMKVVVVACDAQGNVDIDDLKAKAEQHANDLAAIMITYPSTHGVFEQNVREICEIVHAHGGQVYVDGANMNAMVGLTAPGQFGGDVSHLNLHKTFCIPHGGGGPGVGPVAVGAHLAKFLPNQRSTGYARAEDGIGAVSAAPYGSASILPISWMYIAMMGAKNLTAATETAILNANYIAKRLAPHYPVLYSGPGGLVAHECILDLRPIKDSSGITVDDVAKRLMDYGFHAPTMSFPVPGTLMVEPTESESQEELDRFVAAMIAIRDEIRAVEEGRADREDNPLRHAPHTAAVVTANEWPHAYSREQAAYPVASLVANKYWPPVGRADNAYGDRNLFCSCVPVSDYA

SEQ ID NO: 24750 - protein, 239 aa, Streptomyces coelicolor A3(2)
ETEAALHEAHRDNHTHRDVNGGWLRPAVFGAMDGLVSNLALMTGVAGGTASQQTVVISGLAGLAAGAFSMAAGEYTSVASQRELVEAELDVERRELRKHPADEEAELAALYEARGVEPELAREVARQLSADPEQALEIHAREELGIDPSDLPSPTVAAVSSFGSFALGALLPVLPFLLGAGALWPAVLLALAGLFLCGAVVAKVTARSWWYSGLRQLALGGAAAGVTYLLGSLFGTAVG

SEQ ID NO: 24751 - protein, 254 aa, Triticum aestivum
MGCAHGKCCLPRGDGGVRREGGGVPGGRGGSTLGRAAVPGAGLTLEYATLTVDGLYPDSPGRETQDAYLVATRFAGDPDLHLFAVFDGHGACGAACSGFARDALPRLLLLAAEDDAAGGGGSLLATDPAGAFRAAMVGVNEEMHAAPAVDDSMSGTTAVAALVAGGALHVANVGDSRAVAGVWRDGRVAAEELSWDQTPFRADERARVKACGARVMSVEQVEGVRDPDAEGWLADEGDPPRVWARDGLYPGTAC

SEQ ID NO: 24752 - protein, 129 aa, Burkholderia thailandensis E264
MRLLHTMLRVGDLDRSIKFYTELLGMKLLRRQDYPDGKFTLAFVGYGDEQDHTVIELTHNWDTKSYELGTGFGHLAVEVEDAYKACEQIKAQGGKVTREAGPMKHGTTVIAFVEDPDGYKIEFIQRKTH

SEQ ID NO: 24753 - protein, 116 aa, Triticum aestivum
MLGNFLMHKRREDDELAIIEALYANDRSSANHTRIHTSILTGDRYVREVLEGHELRCKRDFRMEQYIFRNLVQCLRERCHLRDTNFVSVEEQVGIFLYAVSKNATNRTLQGQFQHS

SEQ ID NO: 24754 - protein, 149 aa, Morus alba
GFVGSWLVMRLLERGYTVRATVRDPANVKKVKHLLELPKAKSNLTLWKADLADEGSFNEAIKGCTGVFHVATPMDFDSKDPENEVIKPAVAGMLDIMKACLDAKVKRLVFTSSAGTVDAGPQGKSFSTNPIGVTLNFCRTVKMTRLDVF

SEQ ID NO: 24755 - protein, 240 aa, Kluyveromyces lactis NRRL Y-1140
MSKLLLPGDVISADETQSQSISAGPGIYSDPLSQEIKATHAGLEVVTPNKKGASVYVDYNSKRYIPAVGDFVVGVIVASFGDSYRVSLCNFSNPVTLSYMAFPNASKKNKPTLKVGDLCYARVCSAYKELEAEIECMDSSKGQDAGFGLLDGGMTIEVSLAYARELLFNDSYPLLNILGNLVEFEVAIGVNGIIWLKTDDVRTTLACYRSILTCQGVSPAQFDKTIKSIFNDTLKSTDEK

SEQ ID NO: 24756 - protein, 122 aa, Arabidopsis thaliana
MAGLMKLGCLVFVFVIAAGPITAKAALSCGEVNSNLKPCTGYLTNGGITSPGPQCCNGVRKLNGMVLTTLDRRQACRCIKNAARNVGPGLNADRAAGIPRRCGIKIPYSTQIRFNTKCNTVR

SEQ ID NO: 24757 - protein, 314 aa, Zea mays
MYADAGFAFAFAAAYSPTLTSSQPQPPPPPFDYAFSSEPPLLSMPAMDHDAYLGNLVQPSMVSEYDLGGEGDLFKAPEAIIEEPLLSLDPVAAAFSMMAGNGSAVMDQTIKDAGTGTIQNDPLLSEVLYECEKELMEKSTIEETISELMDVKIPMLQVEEIPSQAEQVLIQNQQLPAMEKEKQSVPECSLQKSVSSGCLNSADWMNGPARPNFLDFQGLDFEAAFGLRRAYSEGDIQNLGANTPRPAANVCVTISDLKTEERKQKLSRYRKKKIKRNFGRKIKYACRKALADSQPRVRGRFAKIEECDLLKPSK

SEQ ID NO: 24758 - protein, 949 aa, Rhodococcus fascians
TDRMTSTASAFVDRHVGPDTTELARILDAIGVDSLDELARKAVPESILDTVVDGVPDGLATLPPALSEHDALAALADLAGCNTVATSMIGLGYYDTLTPPVLTRGILENPAWYTAYTPYQPEISQGRLEALLNFQTMVSDLTGMDVANASMLDESTAAAESMTLMRRANRGSKSPRLVVDSDIFPQTKAVLATRAEPLGIELVYADLADGLPEGDFFGVLAQLPGASGRLVDHTATIEAAHERGALVAVGVDLLAATLVTAPGEIGADVCFGTTQRFGVPMGYGGPHAGYLAVRSGHSRQLPGRLVGVSVDADGHRAYRLALQTREQHIRREKATSNICTAQVLLAIVAAMYASYHGADGLRAIARRVNTRARTVAAGLQAAGIDVVHAEFFDTVLAAVPGAAHTVVDAAKQRGINLRPVDDDHVAIACDEATTEAHIVDVLAAFGAEPAGPGAESVPADCARTSEYLTHPAFTRYRTETAMLRYLRALSDKDIALDRSMIPLGSCTMKLNATAEMESITWPQFARQHPFAPSTDVPGLLRVIADLEQWLVDITGYDAVSLQPNAGSQGEYAGLLAIRRYHQANGDTGRTVCLIPSSAHGTNAASAVMVGMRVVVVACRPNGDVDVDDLRAKIAEHADTLAAIMITYPSTHGVYEHEISDICAAVHDAGGQVYVDGANLNALVGLARPGRFGGDVSHLNLHKTFCIPHGGGGPGVGPIGVRSHLQPYLPGHPLAPQLGDGPTVAGAPYGSASILTITWAYIAMMGAQGLRRATLTAIASANYIARRLDEYFPVLYTGDNGMVAHECILDLRGLTKDTGVTVDDVAKRLADYGFHAPTMSFPVPGTLMVEPTESENLEEIDAFCDAMISIRREIDRVGSGEWTVEDNPLRGAPHTAQCLVADWNHPYSRELAAYPAGYDRPKVWPAVRRIDGAHGDRNLVCSCPPIEAFA

SEQ ID NO: 24759 - protein, 596 aa, Salinibacter ruber DSM 13855
MPTDTMPSSDAAAPPSNGASDAPILKGSEIFVRALEEEGVDRVFGHPGGAVIKIYDAMERIQPSYDHVLVRHEQGGTHAAEGYAKATGRVGTMLATSGPGATNTVTGIADAYLDSVPIVVFTGQVPTHLIGNDSFQETDTTGVTRSITKHNFLVRDVNELASTIRQAYHIARTGRPGPVVVDLPKDVQMDEAPFAYPEEPGLDGYSVPGAAAPTQVDRAAAMIEEAEKPLLYVGGGTINADAPEVLTAFARAANLPVTTTLHGLGAFPETDDLALGWLGMHGFYHTNMAVQNADLIMAVGARFDDRVTGDVEEWAPNAKIIHVDIDPSCISKNVYADCALIGDAQTVLQQLRPKVEPKDTSDWLAQIDEWRGECPPYEYESPEEDGIAPESVVGALYEKTQGDAVMVTDVGQHQMWVCQYYKFGRTRSHISSGGLGTMGFGLPAAMGAAFGMREGRNLDIVCVSGDGGFVMNAQELSVAARHGLPLKIAVINNNYLGMVRQWQSLFHEDRFSHTDLKPTNPDFVRLAEAHHCVGLRARSPDEVSDVIDEAWTVDDRPVVMEFQVPKEEMVFPMVPAGAASDDMLTEMFDKEAMAES

SEQ ID NO: 24760 - protein, 381 aa, Glycine max
MFISRSILFVFVFSACLLLFPANGIRSFATTNGYETEVEEVDPFVQFREAPEYRNQQKCTLIDTTNVQLVCDPSLVHVAMTIDWHYLRGSIAAVHSVVKHTSCPQNLFFHFIASDARLESKDVFERIVHTSFPSLGFKVYVFRESLVGNLISPSIREALDNPLNYARSYLADLLDQCIERVIYLDSDVVVVDDVQELWKVSLTGSRVIGAPEYCHTNFTRYFSYEFWSSAEFSEVFQGKRPCYFNTGVMVMDLVRWRAGDYTRKIEKWMEIQKERRIYKLGSLPPFLLAFGGNVEAIEHRWNQHGLGGDNVRNSCRTLHPGPVSLLHWSGKGKPWTRLDAKMPCSVDFLWAPYDLYIPHHHTYHHYHHHQRIAIGSTHSSF

SEQ ID NO: 24761 - protein, 297 aa, Salinibacter ruber DSM 13855
MPDASDADLLDGQALSQAVRDEVKADIQAWTDDHRPPFLSAVLVGDNPASKAYVRGKEKDAAEVGIETETHHLDADTSQSELLDLVHDLNADASVDGILVQLPLPDHVDERTVIDAVDPSKDVDGFHPENLGRLMRGTPRYIPATPYGIMEMLSRSDIDPESMDAVIVGRSNIVGKPLANLLLRRTANATVTVCHSRTKDLAAHTRRADLLVAAAGQAAFIDADMVKEDAVVIDVGINRVDDPSTDRGYRLVGDVDFEGVRPKARRITPVPGGVGLMTRAMLLKNTLKAARLRATSA

SEQ ID NO: 24762 - protein, 317 aa, Methanosarcina thermophila
MDFEASAKILTTPVKGAKIVSNMTVDELVREYAGCAFGAGRLAKAVDIYYEMLASEKTTKFFGLAGAMTPAGMRNIIADLIRDGYIDVLVTTGANMVHDTVEALGLHHYKGSDCTNDIQLRHECIDRIYDVYLPDQHFTDLEEFLQGVYAGLPQEKLSIRQVLTEIGKNLDDDSSILKTAAEMGVPVYCPALQDSVIGLQAWLYKEGNPLHVDAFADMHEFMEICFETESAGAMLLGGGVPKNYILQSMLVTPRSFDYAIQLTMDHPETGGLSGATLDEAQSWGKVGENAKSVTVYADSTITLPLIVSAVRTRLSKR

SEQ ID NO: 24763 - protein, 502 aa, Oryza sativa
MRRCPRFAHHLRLRSQLLRLRAEASSWRLPVAAVSSSNLHPEYAKKIGGSDFSHDRQSGKELQNFKVSPQEASRASNFMRASKYGMPITANGGNIARWVKKEGDKVSPGEVLCEVETDKATVEMECMEEGYLAKIIHGDGAKEIKVGEIIAVTVEEEEDIGKFKDYKAPSSAESAAPAESKPQSEPTEPKKEKEQPKAPEPKATKTEESFLSEDRTFSSPIARKLAEDNNVPLSSIKGTGPDGRILKADIEDYLASVAKGAKKETAAAPGLGYVDLPNTQIRKVTANRLLHSKQTIPHYYLTVDTRVDKLIKLRSELNPLQDTSGGKKISINDLVIKAAALALRNVPECNSSWMNDFIRQYHNVNINVAVQTEDGLFVPVIRDADKKGLATIADEVKQLAQRARDNSLKPEDYEGGTFTVSNLGGPFGIKQFCAIVNPPQSAILAIGSAEKRVIPGAEGQFEVGSFMSATLSCDHRVIDGAIGAEWMKAFKGYIENPTTMLL

SEQ ID NO: 24764 - protein, 121 aa, Triticum aestivum
  misc_feature (96)..(96): Xaa can be any naturally occurring amino acid
ITSPIVAPTSVPSLSRRGSSFAVVCSGGKKIKVDKPLGLGGGLTVDIDANGRKVGKKGVYQFVDKYGANVDGYSPIYTPEEWLSLGDRYAGGTTGXLIWASPRRLLGGGVLLVYNTSALAG

SEQ ID NO: 24765 - protein, 469 aa, Solibacter usitatus Ellin6076
MSPISIEICSPATGELLGKVPDFDAEAVDCAVAAARASFENKTWRGLDPSKRERILWNIGELLLKYRDELSRLISQETGKTLREAAGADVAPAADCFHYYAGWVRKQYGETIPVDGPYLNYTLREPVGVVGAIVPWNFPLQTAAWKVAPALACGCSVVLKPSELTPLSALRFGEICAEAGLPAGVLVVATGYGETTGEALALHEDVDKISFTGSVTTARKLLQNSAVSNLKRLSLELGGKSPNIVFPDADFDAAVRAALWGIYGNKGEMCTAGSRLLLHEEIHDRFVEELASKARKLRLGNPLDPATQMGPQISGRQLDRILDYIEAGKTEGARLVCGGERDTEGDKAHGFFVKPTIFAGVHPDMRIAREEIFGPVLSVMRFRDAEEAVRIANATTYGLASAVWTNDLKLAHRMAAALKAGSVWVNTYNAFDSGSPFGGYKQSGFGRDLGSYALDQYTNVKSVWIALGK

SEQ ID NO: 24766 - protein, 193 aa, Arabidopsis thaliana
  misc_feature (29)..(29): Xaa can be any naturally occurring amino acid
  misc_feature (53)..(53): Xaa can be any naturally occurring amino acid
  misc_feature (76)..(76): Xaa can be any naturally occurring amino acid
  misc_feature (115)..(115): Xaa can be any naturally occurring amino acid
  misc_feature (131)..(131): Xaa can be any naturally occurring amino acid
  misc_feature (146)..(146): Xaa can be any naturally occurring amino acid
  misc_feature (151)..(151): Xaa can be any naturally occurring amino acid
KTITVASSMVSSATMVASPAEATMVAPFXGLMSSVAFSATRKVNNEITSITTXNRRANCMQEWPPIVKKKFETLSXYLPDLTESELLNEVEYLIRNNCIPCVEFKLEHFFVYASXHGNSPVYYDGRHLNNXNLPLFSSTESDQVLXTVIEXNNRHPNGFITIIEIELMRQAESIIFIVYEPSSFTGEILSAFA

SEQ ID NO: 24767 - protein, 176 aa, Arabidopsis thaliana
  misc_feature (118)..(118): Xaa can be any naturally occurring amino acid
  misc_feature (125)..(125): Xaa can be any naturally occurring amino acid
  misc_feature (127)..(127): Xaa can be any naturally occurring amino acid
  misc_feature (135)..(135): Xaa can be any naturally occurring amino acid
  misc_feature (143)..(145): Xaa can be any naturally occurring amino acid
  misc_feature (149)..(149): Xaa can be any naturally occurring amino acid
  misc_feature (156)..(158): Xaa can be any naturally occurring amino acid
  misc_feature (163)..(164): Xaa can be any naturally occurring amino acid
  misc_feature (167)..(168): Xaa can be any naturally occurring amino acid
  misc_feature (170)..(173): Xaa can be any naturally occurring amino acid
MASSMLSSAAVVTSPAQATMVAPFTGLKSSASFPVTRKANNDITSITSNGGRVSCMKVWPPIGKKKFETLSYLPDLTDVELAKEVDYLLRNKWIPCVEFELEHGFVYREHGNTPGYYXGRYWTMXKXPLFGCTDXAQVLKGSXXXKKGXPGGFIRXXXWQKPXXQWXXLXXXXPQV

SEQ ID NO: 24768 - protein, 523 aa, Pseudomonas fluorescens Pf-5
MSGKGKFKKQLSLVDLTFIGLGAIFGSGWLFAASHVSAIAGPAGIFSWLLGGFAVLLLGIVYCELGAALPRAGGVVRYPVFSHGPLLGYLMGFITLIAFSSLVAIEVVAARQYAAAWFPALTHEGSSNPTIIGWLVQFALLCLFFWLNYYSVKTFAKSNNFISLFKFIVPLLVIGVLFSFFKPDNFHVQGFAPFGLSGIEMAVSAGGIIFAYLGLTPIISVASEVRNPQRTIPIALILSVLLSTLIYGLLQLAFLGSIPTEMLANGWSGISKEFSLPYRDIALTLGVGWLAYLVVADAVISPSGCGNIYMNATPRVVYGWARTGTFFKIFTRIDEESGIPRPALWLTFGLSVFWTLPFPSWEALINVVSAALVLSYAVAPISVAALRKSAPELARPFRVRGFALLGPVSFVIAALIVYWSGWGTVSWLLGLQILMFVIYLLCKRLVPTDHLSLGEQVRSSLWLIAFYALTIVISYLGSFGGIGALAHPFDTLTVTLMALCIYYWGANTGVPGAKLVLDGDEVE

SEQ ID NO: 24769 - protein, 414 aa, Vibrio vulnificus YJ016
MERYIMELTTTVSELRYALDTFFFLISGALVMWMAAGFAMLEAGLVRSKNTTEILTKNFCLYAIACTTYLVVGYNIMYVDNSEGGWLPSIGALIGSQAEGADHSLESDFFFQVVFVATAMSVVSGAVAERMKLWSFLLFSAILTAFIYPVEGYWTWGGGFLSAAGFSDFAGSGIVHMAGASAALAGVLLLGARKGKYGKNGEVYPIPGSNMPLATLGTFILWFGWFGFNGGSQLMVSDFENATAVGQIFLNTNAAAAAGAITALFVCKTTWGKADLTMILNGALAGLVAITADPLSPSPLYSVAIGAVAGALVVFSIVGLDKLKIDDPVGAISVHGVCGFFGLMVVPISNGDASFLSQLFGAVVIFAWVFGASLAVWAVLKATIGIRVSEEEEMEGMDMHDCGVGAYPEFVTVK

SEQ ID NO: 24770 - protein, 402 aa, Silicibacter pomeroyi DSS-3
MLHRRGIMAAPLKRRIGLGLLTAYGVGVMVGAGIYVLVGAVAGDAGVWAPVAFLLAGLIAAPTALSYAEFSTRLPEAAGEAAYVGTGLNSQSLALLVGLAVVVAGTVSAGAVLRGGVGYLSAVTEINPVWAMIGLGGALTLVAVAGVLESLALAAVFTVVELAGLALVVWAGLGADPSPDWVAPAPPVWTGIGLGGVLAFFAFIGFEDIVNMAEEVEAPERTLPRAILISLVVTSVLYALVAWAAVRAVPLDVLGQSESPLALVWQYGRGSGAGFLSAIAVFAALNGILAQIVMATRVLYGLGGRTKALALFHTAHPRFGTPVLATFLVGAAVIFCALYVPVETLAETTSSILLAVFALVNGALIVQKRRAPEARFRVPMAVPVLGLVLSLAALSVAVRGIL

SEQ ID NO: 24771 - protein, 132 aa, Vibrio vulnificus YJ016
MARCLDYLKRYRMNAFREDAMKLINAIIKPFKLDDVREALADVGIEGMTVSEVKGFGRQKGHTELYRGAEYQVDFLPKVKLEIATQAENVDRVIEAITKAAHTGKIGDGKIFVYDLSHAVRIRTGETDVEAL

SEQ ID NO: 24772 - protein, 207 aa, Avicennia marina
MLRVMKKSFKDSLKALEADIQHANTLASDYPTEHDGACLQMRLSYSPCAHLFLFLVQWADCHLAGVLGLIRILIYKAYEDGKTTRSICERKASLREFYGVIFPSLLQLHRGITDVEERKQRVIIPQLNTRRRDEMAKGKLSEIEIEREEECAICMEMNSKVVLPSCSHSMCMKCYRNWRARFSVVPVLSRQSKEDEFWGALDLHKPL

SEQ ID NO: 24773 - protein, 325 aa, Solibacter usitatus Ellin6076
MTITLGATSTADDVLSGVNLHGKRILVTGVSAGIGVETARALAAHGAHVVGAARDLAKAEAATAQVQKDAAANGGGFELTALDLADLKSVRACADGLIAKGEPFDVVIANAGVMATPFGHTADGFETQFGTNHLGHFVLINRIASLIRTGGRLVNLSSAGHRISNVDVEDPNFERTPYDPMIAYGRSKTANILFAVAFDQRHRSRGVRATAVHPGAIQTELGRYMERAQLESMIDRINQQLAAEGKGPFEWKTIPQGAATSVWAGVLAPADEIGGRYCANCQVGRIVRGDAVITAAGEGVREYALDPHNAAALWKKSEELVGESY

SEQ ID NO: 24774 - protein, 167 aa, Cicer arietinum
MAEQASKSIYDFTVKDIRGNDVSLSEYSGKVLLIVNVASQCGLTQTNYKELNVIYDKYKNQGFEILAFPCNQFRGQEPGSSEEIQNVVCTRFKAEFPIFDKVEVNGKNAEPLYKFLKGQQGGIFGDGIKWNFTKFLVNKQGKVVDRYAPTTAPLKIEKDIEKLIKSS

SEQ ID NO: 24775 - protein, 439 aa, Oryza sativa
MAVEYHCCGAAFFEHVVIIVVLVLFAGLMSGLTLGLMSLSLVDLEVLAKSGTDQDRKHAAKILPVVKNQHLLLCTLLICNAAAMEALPIFLDSLVTAWGAILISVTLILLFGEILPQSICSRYGLAIGASVAPLVRVLVWVCFPVAYPISKLLDHLLGKGHTALFRRAELKTLVTLHGNEAGKGGELTHDETTIIAGALELTEKKAKDAMTPLCQTFAIDINAKLDRDLMQKVLDKGHSRVPVYYEKKTNIIGLILVKNLLSINPDDEIPIKSVTIRKIPRVSEDMPLYDILNEFQKGHSHMAVVIRQTNANYAAEPPANDGGTLAFYLTIFSLFSFFLSMWNKEVAISIDDKHGEKVVKNLPPLRRWKSCPNSQNSNRGNRNRKWSKDQSDVLQIHEEPLPTLNEDEEAVGIITMEDVIEELLQEEIYDETDVHVEEQ

SEQ ID NO: 24776 - protein, 504 aa, Yarrowia lipolytica CLIB122
TIAANRRRHPPERALTSGSHSQQKNKSSAFPRLAIAAFFHRDNRETALAHPSTVSLSQSTTQHTSCLNHPTIPTMSTIYMGDLEPWMDEAAIKNMWAQVMGPDTNINVKLIRDKFTDSINYGFIDFASPELAAAALKFNGKPIPGTDRLFKLGEDNGDGAPVEFSIFVGDLAPESTEPELLQAFKSRYESCRAAKIMTDPVTGLSRGYGFVRFSSEEDQQKALQEMQGYMLGSRPLRVSTATPKNRHHHQPYMQFQPQQFQPPAHYQQLHSQHPFPHHPNGAPSHQVHQPFYGGPAHPLNQFTDANNTTVFVGGLSSSVSEDELRQYFQGFGDITYVKIPPGKGCGFVQYVQRQSAEMAITQMQGYPIGNGRVRLSWGRSQSQQQVHHHHQYRPAPQPLIYPQMGIPAQNYGPYQPVSPALAHRHAAPLQTPAIGDQEGMSTNATTLAYAAGLPPVTGAPAAPGEDPSEPIPVARLNELYLAARDGRLDRVESESSGYHGVYAQ

SEQ ID NO: 24777 - protein, 130 aa, Oryza sativa
MATSMITSPLVAPARAKGLPSISRRGSSFAIVCSGGKKIKTDKPYGIGGGMSVDIDASGRKSTGKGVYQFVDKYGANVDGYSPIYSPEEWSPTGDTYVGGTTGLLIWAVTLAGLLGGGALLVYNTSALAG

SEQ ID NO: 24778 - protein, 178 aa, Rosa hybrid cultivar
ECAFWMPSRTGLNLQLSHTLTQVSSGANVSINLPIVTEVFNSARALRIPYTCPLARFRPLVGRYMSPEVVAVRVPLLNLSNFQINDWPELSAKSYAIMVLILPTDSARQWREHELELVEVVADQVAVALSHAAILEESMRARDQLMEQNVALDLARREAEMAIHARNDFLAVMNHEMR

SEQ ID NO: 24779 - protein, 386 aa, Arabidopsis thaliana
MSVHVKEEPVLVPNCDVENTELAVFNGNGESELENFGTCVDEITDRVNQLEQKVVEVEHFYSTKDGAAQTNTSKSSSGGKKIAISQPNNSKGNSAGKEKSKGKHVSSPDLMRQFATMFRQIAQHKWAWPFLEPVDVKGLGLHDYYKVIEKPMDLGTIKKKMESSEYSNVREIYADVRLVFKNAMRYNEEKEDVYVMAESLLEKFEEKWLLIMPKLVEEEKKQVDEEAEKHANKQLTMEAAQAEMARDLSNELYEIDLQLEKLRESVVQRCRKLSTQEKKGLSAALGRLSPEDLSKALKMVSESNPSFPAGAPEVGLDIDVQTDVTLWRLKVFVQEALKAANKSSGGTNAQNNNNTGTGEINKNNAKRRREISDAINKASIKRAKKA

SEQ ID NO: 24780 - protein, 589 aa, Oryza sativa (japonica cultivar-group)
MAPATAISCAVVKCGGGGGPRQPRVSAPPRQQGHAAAAASLEQLLLLPRWSPPSSPLSFARPAAERVAARRARAAAVAMKVVEDATPPAAGAVLLAGAQSRHAIFRDELVRRAFYAAEAAHRGQMRASGDPYLQHCVETAALLAELGAGPAVVAAGLLHDTVDDAGLGYGSLSVQFGAGVADLVKGVSNLSHLSKLARRNDTASRVDEADKLRTVFLAMEDARAVLIKLADRLHNMRTLDSLPKVKQQCFAKETLEIFAPLANQLGILNWKEQLENLCFKYLYPELYEELSSNLLEFYNQDMIAAAIRRLEQALQVRGLCYHTISGRNKSMYSIYSKMAKKLDMDEIYDIHGVRVILDNKADCFTTLEIVHHLWPRIPGKFKDYINSPKPNYQSLHTVVLSEETLPLEIQIRTRDMHLQAEFGIAAHWRYKEAVRNCCSSVPEMVEWVRWVVTWQCETLHIDHPSSLTHGAPPRAICSCSSQSDDCPFSYSKRCDHSGPILVILLENEKMSVQEFPQNSTVLDLLKRTSSYDMQLRLRLNCHVVHNLNQELKMGDVVELIPLAQCNPGAGGYAREFHQMYDHRLTVSQS

SEQ ID NO: 24781 - protein, 137 aa, Brassica napus
  misc_feature (76)..(76): Xaa can be any naturally occurring amino acid
  misc_feature (82)..(82): Xaa can be any naturally occurring amino acid
  misc_feature (115)..(115): Xaa can be any naturally occurring amino acid
MGKVREFGGEDHFPSKLLPSVNPLSLCLSAIYLNPPPVFLSLFLLPTSLFLLVFGLVSLFILLPIDDRSQLGLKLXRTLGKXGASYFPVTLHFQDYQAFKAYRSYVFGYEPHSVXPIGAVALVDLAGFMPLPNIKLL

SEQ ID NO: 24782 - protein, 259 aa, Ralstonia metallidurans CH34
MTAQLLSERVDSTLVLTISNPEARNALHPDIYAASAEALEVAARDDSIRAVILTGADGVFCAGGNLNRLLGNRSQPPSVQADSIEVLNQWIESFHAFPKPIIAAVEGPAAGAGFSLVLACDFVVAASDAKFVMAYVKVGLTPDGGGSYEIARMLPRQLASEIMMEGKPVDPARLAHFGIVNRVAAPGQALTEALRIAENLAKESPNAVSGIKSLINHAGTATLTEHLAAERDSFVAALHHKDGGEGISAFLEKRKPNYR

SEQ ID NO: 24783 - protein, 413 aa, Xylella fastidiosa 9a5c
MEMAHFELIEKMAPNAVIKVVGVGGGGGNAVAHMVNSTVDGVEFIIANTDSQAIKNCGAKLQLQLGANVTKGLGAGANPEVGRQAALEDRERIIDALQGADMVFITAGMGGGTGTGAAPVVAQLAKEMGVLTVAVVTKPFPFEGRRRMQVALKGIEELNQHCDSLITIPNEKLITVLGRNATMIQAFRAANDVLQGAVQGIADLIVRPGLINVDFADVRTVMSEMGLAMMGTGSARGDDRAQAAAEAAVQNPLLDDVNLAGANGILVNITAGSDFTMAEFDEIGRTIDGFASEDATVVVGTVLDPEMQDEVRVTVVATGLSRTVSRAAQPRPEQQRASVKLVRNATTGQAEFGDLDNMGGAVSRAVGGSLGLGFGLRRSGTDAVSGSAPSAPVTAELPSDYLDIPAFLRRQAD

SEQ ID NO: 24784 - protein, 510 aa, Streptococcus agalactiae A909
MVLDKEIKAQLAQYLDLLESDIVLQADLGDNDNSQKVKDFLDEIVAMSDRISLESTHLKRQPSFGIAKKGHESRVIFSGLPMGHEFTSFILALLQVSGRAPKVDEDIIKRIKGIEKTINLETYVSLTCHNCPDVVQAFNIMAVLNPNITHTMIEGGMYQDEVKSKGIMSVPTVYKDQEEFTSGRATIEQLLEQLDGPLDAEAFADKGVYDVLVIGGGPAGNSAAIYAARKGLKTGILAETFGGQVIETVGIENMIGTLYTEGPKLMAQIEEHTKSYDIDIIKSQLATGIEKKELVEVTLANGAILQAKTAILALGAKWRNINVPGEEEFRNKGVTYCPHCDGPLFEGKDVAVIGGGNSGMEAALDLAGVTKHVTVLEFLPELKADQVLQERAAKTDNLTILKNVATKDIVGEDHVTGLNYTDRDTNEEKHIDLEGVFVQIGLVPSTSWLKDSGIELNERQEIVVDKFGSTNIPGIFAAGDCTDAAYKQIIISMGSGATAAIGAFDYLIRQ

SEQ ID NO: 24785 - protein, 151 aa, Triticum aestivum
  misc_feature (14)..(14): Xaa can be any naturally occurring amino acid
  misc_feature (68)..(68): Xaa can be any naturally occurring amino acid
  misc_feature (82)..(82): Xaa can be any naturally occurring amino acid
  misc_feature (90)..(90): Xaa can be any naturally occurring amino acid
  misc_feature (121)..(121): Xaa can be any naturally occurring amino acid
PISNFNVPRLIHLXQLRRTFSLYEQTNHNHNDPENQLLLQTYNYTGYNINTDKSEGSMLTVQNKTMTXTPKTLADIHAERLXSLKTDRPXPKILILARGKYVQPASTELPKDMRPTRLKLXAIHATNAAWTYYTLRRTNQVNLVAVWRIQS

SEQ ID NO: 24786 - protein, 244 aa, Burkholderia xenovorans LB400
MSVSTMSFATFPAPSTIADSAFLDLPLLDADAVPPRIAAALQAMREGRAVVLQDDHDRENEADLIVSAERLSVETMALLIRECSGIVCLCLPDEKIRALELPPMAVNNESRHGTAFTVSIEAREGVTTGVSALDRVTTIRAAIADTAKPADIVRPGHVFPLRAQPGGVLARRGHTEGTVDLAILAGLKPAGVLCELMNPDGTMTRGADVERFAAQHNLPMLTIAELVEFRQALAQARECVADEA

SEQ ID NO: 24787 - protein, 266 aa, Arabidopsis thaliana
MGGVKRKIAIEKIQNKNPRAVSFSKRRKGLYSKASELCLLSDAEIAIIATPVSSNSNAAFYSFGHSSVDNVVAAFLANQRPCDERFWWEDESLLKSENLEELREAMDSMSTMLRDLKELEKQRDHQTQTLIHQPCSARVCIQDYVTVNFDGFNTEEQTLAVSDNSNNNGLLGNLDECNEDFDDLDQIFDTVTNSEFLSVNLEMDDVTVNSEGNTEEQTLAVSDNSNNNGLLGNLDECNEDFDDLDQIIEYLTSSEALSMNLKMDDV

SEQ ID NO: 24788 - protein, 393 aa, Oceanobacter sp. RED65
MMSLNRYRMRHLAKQGHGGAKRASQLLARTDRLIGVILIGNNFVNIAAASIATLIAQRIWVDNPELGVSIATVLLTLVVLIFAEVTPKTIAANHPEKVAYPFSYLLRPLLFLLMPFVYVVNTIANFLIRLTGIKLDQDSKDLLSTEEFRTLIHEAGAMIPPKRQQMLLSILDLETVRVNDIMVPRNEIVGIDLDDDIREIENTLRNSQHTRLPVWKGNINNILGMLHMRNAAKVLAQPEFTKAELLQATREPYFVPETAQLHNQLFNFQSEQRRIAIVVDEYGNVQGIATLEDILEEIVGDFTTDMSATSLDVMPQDDGSFIIDGTITIRELNKALNYELSMDGPKTFSGLIIEHLESIPDSNICLKIDDYPIEILKVKANTIASAKIYPIPK

SEQ ID NO: 24789 - protein, 463 aa, Lactobacillus sakei subsp. sakei 23K
MSKHSLFAKKKIDASQFKNGLLERNLTAVGLTAMGVGAVVGAGIFITPGIIAAKYAGPGAMLSYLLAAVVCALAALCYSEFASTIPLAGSAYTYVYTVFGELVAWILGWALVSEYLFAVASVAVSWSAYFQNLMAGFGLHLPTALSAAWEPGKPAGVNLIAGIVVLIVGFLLSNGMRESTRINTIMVGVKIAVIVIFLGVAVFYVKPANFQPFLPYGASGVLSGAALAFYAYIGFDAVSTASEEVINPQRDMPIGIIASLLIASLLYAAVATVLVGVVHYTKLNVGDPVAFALQLMHQNWVAGIISLGAVAGMTTVLLVMTYGGTRLIFAMSRDGLLPAVFAKINPKTHVPVANTWIFAVVTSIVAALVPLDKIAELVNIGTLFAFATVSLGVIFLRRIPNYNELPQGFKVPLYPIVPILSCILCVLLMTQLQITTWIVFVIWLVIGLVIYFSYSYHHSQQRM

SEQ ID NO: 24790 - protein, 755 aa, Candida glabrata CBS 138
MLVSLKNSKDLIRTMVSGLAASGTVRRYNPPPAPMPHGGARMSRPCADCTCSPGLLSRQGRRVSLFMRQMENTRRRSQRNSVLMSAAGSPTTAVNSGNVSVYSSDSLCQSTREINTTERLLALRKEMAKEGICCYLVPSADEHQSEYVSAVDQRRAFISGFSGSAGIACVTRDLLNFNEKHPDGKSILSTDGRYFNQARQELDFNWTLLRQGEDPLTWQEWCIREAVEMSEGLGGKPAKIGVDPKLISFEEVKAFEKLIKEKTEDKNCDVSLVPVERNLVDTIWKKFEPIPEKPNNGLLLLGSEYHGEDFKTKKEKVLKDLNEKHLQPSSGSAKKNATFITVALDEICWFLNLRGSDIEYNPVFYAYLFVNDKETILFTDDTYNDEIKKYFEDNEIIVKPYNEVWGHLVSVAQAPVSSDSGKTAFLLPDVSSWQLVRSVAGSPYKIVHSPIDMLKSVKNDTEIANAHRAQVKDAVCLIQYFAWLENQLINKEALIDEYSAAERLIDIRKTQKNFMGNSFETISSTGANASVIHYAPPKEGSSMIDPSKIYLCDSGSQFLEGTTDITRTLHFSEPTEEEIKNYTLVLKGNLALERLVFPEKTNGMSIDVIARQYLWSFGLDYRHGTGHGIGSFLNVHEGPIGVGIKPHLANYPLQAGNIISNEPGFYKDGEYGIRIENDMLVKYADGLKFGDRKFLKFENITLVPYCRKLIDANMLTHEEKKQLNEYNQRIWDSLVQLIQPQSISYKWLKREVAPF

SEQ ID NO: 24791 - protein, 515 aa, Idiomarina baltica OS145
MSKDFILPDIGEGIVECEIVEWLVAEGDTVKEDQPVVEVMTDKAMVEIPAKDDGVVEKLYYQKGDIAKVHEPLFRINAEGDASDDAAPASDDAAPASSDDAETTDFILPDIGEGIVECEIVEWLVSEGDEVKEDQPVVEVMTDKATVEIPAKEDGKVVKLYHKKGDIAEVHKPLFALQPAGGVEPSKQTKDSAQAQQKNTPSQSADGGAEPAQPARQGKAVASPAVRRLARENSINIADVPGSGKKGRVLKQDIKDFVAGDKSASQASTQQQTTTPAQQSGGTRTEAIRGVKAAMAKQMMNSVSTIPHFTYSDEFDLTNLIALREKLKEQYKEQGVRLTVMPFFIKALSLALKEFPIMNAQVNDDCTEVTYFDDHNIGMAVDTKIGLLVPNVKQVQNKSIIDVANEVTRLTQAAREGKVPQADMKGGTISISNIGVIGGTVATPIINKPEAAIVALGKVQELPRFDANGQVVARKMMTVSWSGDHRIIDGGTIARFNKRWQEFLEDPTSMLVNMV

SEQ ID NO: 24792 - protein, 325 aa, Idiomarina baltica OS145
MAKMNLLQAINSALDLAMAKHDNVYSFGEDTGGFGGVFRATSGLTEKYGKHRNFNTPLVEQGIIGFANGLASQGSYAVAEIQFGDYIFPAFDQIVNESAKFRYRSGNEFNVGGLTIRTPYGGGIAGGHYHSQSPEAYFAHTPGLKIVMPRNPYEAKGLLLSSIFDPNPVLFMEPKRLYRASTGDVPEEEYTIPLGQAEVVKEGADITLLAWGAQMEMTEKAAELAEKDGVSCEIIDLRTILPWDVKTVTESVLKTGRLVISQEAPITSGFASEIAATVQDKCFLYLESPIARVCGLDVPYPLCHEKEYMADHLKIYEAIKRTMNY

SEQ ID NO: 24793 - protein, 311 aa, Bacillus clausii KSM-K16
MRKIVIGTRRSKLALTQTNWVIDQLKQLGVPYEFEVKEIVTKGDRILDVTLSKVGGKGLFVKEIEAALRSGEIDVAVHSMKDVPSELLEEFTLAAITEREDPRDVLVSENGHTLDELPAGAIVGTSSLRRSAQILHRRPDVQVKWIRGNVETRLRKLKEEDFSAIVLAAAGLKRLGYGEDVITEYLDKDVCLPAIGQGALGLECRVDDVETTELLAKLHHEETGKAVLAERAFLKEMNGGCQVPIGGYATVLEDGAVFLTGLVGSPDGKTILKEGKCGMVADELGKEVSSLLTAQGAGAILEKVRSELEGS

SEQ ID NO: 24794 - protein, 583 aa, Kluyveromyces lactis NRRL Y-1140
MPFYKDPSVKYKPFVSNVKLQDRKWPSKTLNKAPRWLATDLRDGNQSLPDPMNLEEKKLMLDKLCELGFKEIEVAFPSASNIDFQFTQYAVKNVPEDVSIQVLSPCREPLIERTVESLVGAKRAIVHIYLATSPCFREIVFNNMSHEESIEKAVKCAKLVRSLTKDHPDRQDTHWSFEFSPETFSDSEPDFVLEICEAVKAAWGPTEDNPIIFNLPATVEMATPNVYADQIEYFAQSISEREKVCISLHPHNDRGCAVAAAELAQMAGADRVEGCLFGNGERTGNVDLVTLALNLYTQGVSPNLDFSDMASIIEVVEKCNKIPVHARAPYGGQLVVCAFSGSHQDAIKKGFEKYDNKVKALQEKEGPDAVVPWKMPYLPLDPQDIGRTYEAIIRVNSQSGKGGSSWVILKNLELDLPRDLQIAYSKIVQNETEIVGRELKSDELISLFEKSYFVGSHSTTGKFKFIDYKYDKSPENFTLSVQLSDGTTQWDLEGTGNGPISSFIDAVNKNFKTNLDVKNYHEHSLGKSSDSRAATYISVSHEGFVQWGVGIHEDTTLASFLALLSCINGLDRAKNFTVNSAAN

SEQ ID NO: 24795 - protein, 486 aa, Magnaporthe grisea 70-15
MGKVKESKKATKAAPAVKSAGVTKPSQTSSAKSKKIAKDVAVKASKKDKKKKVEVSSESDSDSDASDSSSDSDSESEVEEKKPTKAATNGKAKKAAKAESSDSDSSSESEADSSDSSDSESDAKPAPKEKAATNVDKKAAAKKVEKSESSDSDSDSSDSDESDSDAKPAKAEKTDKAKKEETDSDSDSDSDSDSSGSDSSDDEEEKPAKTEAPSKKRKAEEEEEAPAKKTKTEESDKPSTLFVGNLSWNVDDAMLAEEFKFCGTVTSARVITDRESGRSKGFGYVDFATPEEAEKAHGEKQGAFIDGREIKVDFSTGKATNSNDAAGARAKKYGDTVSPESDTLFVGNLPFDADEDSVGAFFSEVAEVKSLRLPTEQESGRRKGFGYVTFNSVEDAKSAFEQLNGQSINGRNCRLDYSTPRPPREDGGFGGRGGGRGGFGGRGGGRGGGGFGGRGGGGRGGGRGGGRGGFGGSRGGGGFQGKKITF

SEQ ID NO: 24796 - protein, 300 aa, Shewanella sp. ANA-3
DLGDASINAHLTKYDSVHGRFNAKVEHDAEAIYVNGDKILTFQERDPGKLPWGDLQVDVVFECTGIFTSKESVQPHLAAGAKKVIISAPGKNVDATVVYGVNNNVLTADMTVISNASCTTNCLAPFAKPLNDEIGIESGLMTTIHAYTNDQRLSDVYHTDLRRARAAALSMIPTKTGAAAAVGLVVPELQGKFDGLAVRVPTVNVSLVDLSFIAARDTTVEEVNAIIERAAAVAPLSEVLAVNKEPLVSIDFNHNAFSSNFDATQTRVNGRLVKVMAWYDNEWGFSNRMLDNAVALMNAK

SEQ ID NO: 24797 - protein, 239 aa, Wolbachia endosymbiont of Onchocerca lupi
SIEEVMEHIKDSHMLFITAGMGGGTGTGAAPVIAKAAREARAAVKDKMLKEKKILTVGVVTKPFDFEGVRRMRIAELGLEELQKYVDTLIVIPNQNLFRIANEKTTFADAFKLADNVLHIGIRGVTDLMVMPGLINLDFADIGTVMTEMGKAMIGTGEAGGEDRAVTAAEAAISNPLLDNMSMKGAQGILINITGGEDMTLFEVDAAANRVREEVDEDANIIFGATFDQAMEGKVRVSV

SEQ ID NO: 24798 - protein, 245 aa, Bradyrhizobium sp. BTAi1
MISLASIEWGYAMTTAEYLARRSEVETYFDRTAVAAWTRLTSDAPVGRIRATVRAGRDEMRRTLLSWLPLDLRGARLLDAGCGTGSFSIEAARRGAEVVAVDISPTLIEIARRRLPDDISRNAIHFVAGDMLDPRHGGFNFVVAMDSFIHYRAEDAVRIVAGLAARTSESILMTYAPRTPLLAVMHAVGGVFPRGNRAPAIEPVTEQKLYRLIADHPDLADWRCARNCRIANGFYISQALELRPS

SEQ ID NO: 24799 - protein, 569 aa, Xanthomonas campestris pv. campestris str. 8004
MSLADTRHHQMFPELDTAQLAITRRFASGPPRRFDAGEMVFDVGDAHAPVWVVLEGAIEVVRRDGLGNEKPITLHTPGQFTGEVSQLAGRASLAAGRAGEHGCLALPFDTAHLRALMISSAEVGEVVMRALILRRVGLIEGDASGSVLIGEPDDPHLTRLQGFLTRNGYPNTVMDVSDEDGRALVERLGIQEQDLPVMVCPSGRVLRQPSDAEAAHCLGMTPDIDPDHRYDVAIVGAGPAGLATAVYAASEGLSVIVLDQRAIGGQAGASARIENYLGFPTGISGQALAGRAYNQALKFGAELAIPLEAATLECGREDGALRLDLADGKQLQASTVVIASGARYRRPQIDQLDRFEGHGVSYWASPVEARLCEGGVVALVGGGNSAGQAVAFLAPRVKELHLIIRGEGLEASMSQYLIERIAALPNVTLHTGTEVAALEGDPERGLQAAVLRTRADGQTQRLELRHLFLFVGADPNTGWLQQCVETDAHGFVVTGSVRAEGLPPCLPLETNRRGVFAIGDVRAGSVKRVAAAVGEGAAVVAQIHQFLAHQATPVAVSELANATQESATS

SEQ ID NO: 24800 - protein, 132 aa, Nicotiana tabacum
MASIAGVSITTPRILSKTSDSPKVQTLKFQSLNKPWKNSSLVQFGHGKLYLKAISATPDNKLSDLVAESVKEAEEACAENPVSGECAAAWDVVEEASAAASHARDKKKESSDPLENYCKDNPETDECRTYDN

SEQ ID NO: 24801 - protein, 170 aa, Zea mays
  misc_feature (25)..(25): Xaa can be any naturally occurring amino acid
MAPTVMMASSATAVAPFQGLKSAAXLPVARRSTRSLGNVSNGGRIRCMQVWPAYGNKKFETLSYLPPLSTDDLLKQVDYLLRNGWIPCLEFSKVGFVYRENSTSPCYYDGRYWTMWKLPMFGCNDATQVYKELQEAIKSYPDAFHRVIGFDNIKQTQCVSFIAYKPPGSD

SEQ ID NO: 24802 - protein, 336 aa, Candidatus Pelagibacter ubique HTCC1002
MSELNKIALKILSNGKGILAADESNGTMTKRLESVNVPSSPGNRLLFRETLFSSSGMKDFIGGVILYDETINQTSNSKQTIPELISKSGAVPGIKVDTGAKILAGSIEEKITEGLDGLRERLKDYYKLGARFTKWRGVFNISDKYPSKLSMHSNAHALARYSALVQECGMVPIVEPEVLMDGDHSAETCFNKTSEVIKRCFEELMINKIDLSGIILKPNMILAGTTADKKISSEEVAKLTLKCLKENVPTDVPGIAFLSGGQTEVEATENLNLINKYNDTNFIMTYSYGRALQQSALKFWSKDINNTSGTQKIFNHRANMCTLAAQGKWSKELEAE

SEQ ID NO: 24803 - protein, 542 aa, Silicibacter pomeroyi DSS-3
MTLNLSMPGQDELKPRITVFGVGGAGGNAVNNMIEKQLEGVDFVVANTDAQALQQSHAPSRIQLGVKVTEGLGAGARATVGAAAAEESIEQIVDHLAGAHMCFITAGMGGGTGTGAAPIIAQAARELGVLTVGVVTKPFQFEGAKRMRQAEDGVDALQKVVDTLIIIPNQNLFRLANEKTTFTEAFSMADDVLYQGVKGVTDLMVRPGLINLDFADVRAVMDEMGKAMMGTGEAAGEDRAVQAAEKAIANPLLDEISLNGAKGVLINITGGHDLTLFELDEAANIIREKVDPDANIIVGSTLDTSMEGAMRVSVVATGIDAVDVQHDMPVPRRPMNAPLKQRVAAEEKPAPLTLEQPAAPQPVAEAAEEPSLFEGMDVEQVAAHDLGEDILDTGDEPELLDDDGLPPPAYQPQVPAFEPRAYVEEEEAPVETFVAPRAPAPGTPSPEAMRRLQAAAQKAPSAPQQGHRALQQPVGDKPRFGFNRLIDRMTGHAPDTPADRGPAVARKQPVMRPSDATAPAHAEADPDQERIEIPAFLRRQAN

SEQ ID NO: 24804 - protein, 313 aa, Parvularcula bermudensis HTCC2503
MADKQFGSDGFTAEHLPDLTGKTFAITGANSGIGLEAARYLGGRNATVLMLCRNASKAESARNALRQSAPGGKYETISLDLADFSTLSPATDAIRQATDRLDGLILNAGVMMLPRRQITKDGFEMQYQVNVLSHFALAAALADLVETASGRFVWLSSIAHHYAKHPKLTDLGYAAGYSPTSSYAKSKLADLMLGLELHRRLSAAGKSAGSYIAHPGYSDTNLQSAGPGAILGTLIKPFTMIFSQPAEKGALPTVLAAAYPKAQPGVLYGPTGFQEMKGPVGEAAIKPWAKDPQVAKQLWSVCEEATGREWSMA

SEQ ID NO: 24805 - protein, 373 aa, Arabidopsis thaliana
MTLQSSPMSVLTEDLVEDILSRVPATSLVRLRSTCKQWNAILNDRRFIKKHFDTAEKEYLDMLLRSLRVSSMSVNLHGLHDNIDPSIELKRELNLKGLLCNSGKVESFEVFHCNGLLLFTNTSTIVVWNPCTGQTKWIQTESANTRYHKYALGYENKNLCRDYKILRFLDDGTNFELEIYEFNSSSWRVLDSVEIDFELDIGSQGMSVKGNTYWIVIDDHEVDGELVNCFLTSFDFTRERFGPHVCLPFQTSWYSDVISLSSVREERLSVLFHEEDSLTMEIWVTNDITDTIVTSWSKFLRVDLYTHRFYNGVTFFIDEENKAAVFSEDVPDDSDDIHSIVYIIGQDRLRIVDLEDGPFWPQMFCYVPSLVQI

SEQ ID NO: 24806 - protein, 520 aa, Xanthomonas campestris pv. vesicatoria str. 85-10
MNTTVSNQTPRIRIFDTTLRDGEQSPGCSMTPQQKLVMARALDELGVDIIETGFPASSHSDREAVAMMGRELRRPTLAVLSRCLQADIETSAKALETAANPRLHVFLSTSPLHREHKLRMSREQVLESVHRHVTLARGYIDDVEFSAEDATRTEEDFLAEVTRVAIAAGATTINLPDTVGFTTPEEIRGMFSRLIASVEGADKVIFSAHCHNDLGLAVANSLAAIEGGARQVECTINGIGERAGNCALEEITMALKVRGAFYNIDSAINTPRIVSTSQLLQRLVGMPVQRNKAVVGGNAFAHESGIHQHGMLRHRGTYEIMRPEDVGWESSQMVLGRHSGRAAVEQRLRALGYLLEEEEVKLVFEQFKALCEKQRVVTDADLQALMQDATVQEGYRLASMTISDVGSRANALVELSDPEGNRVAETAQGNGPVDALFGALASATGVKLELDSYQVHSVGIGADARGEASLSVRHDGVEYEGTGTSKDIIEASALAWLDVANRLLRQRERGVVAGKTAAVA

SEQ ID NO: 24807 - protein, 104 aa, Lactococcus lactis subsp. lactis Il1403
MEYNITDATFDEETKEGLVLIDFWATWCGPCRMQAPILEQLSEELDESELKICKMDVDENPATAQGFGIMSIPTLMFKKDGEEVKRIVGVQTKAQLKAVIAELS

SEQ ID NO: 24808 - protein, 439 aa, Flavobacteria bacterium BBFL7
MAKFELKLPKMGESVAEATITSWLKNVGDTIEADEAILEIATDKVDSEVPSEVDGTLVEVLFQVDDVVQVGQTIAIIEIDGDGASTPAPATTETAAPAASTVETANAQVEKGIETAAPVDYSGSDSFYSPLVKNIAKEENISLQELESINGTGSNGRVTKNDILSYVADKKAGKTTTAAAPQTKTTAPASAPVQKPAAPVSVNGGDEIIEMTRMGKLISHHMIASVQTSAHVQSFIECDVTNIWNWRKKHKDVFAKREGENLTFTPIFMEAVAKALKEFPMMNIAVDGDNIIKRKNINLGMAAALPDGNLIVPVIKNADQLNLMGMAKAVNDLARRSRDGKLKPDDTQGGTYTVTNVGTFGSVLGTPIINQPQVGILALGAIRKVPAVVETPQGDFIGIRMKMFLSHSYDHRVVNGALGGQFVQRVAQLLEGFDDKREI

SEQ ID NO: 24809 - protein, 443 aa, Shewanella sp. MR-4
MKRTLSALVLAMGLFNPLSQAQATTAEDIKSFTLANGMKIMVLEDSSIPNANMYLFWKVGSRNEVPGITGISHFFEHMMFNGSKKYGPKMFDRTMEAAGGANNAYTTEDMTVYTDWFPANALETMFDLEADRIANLDINPDMVESERGVVQSERSTGLENSNWNTLEGEVKGVAFLAHPYSWSVIGHESDIAAWTLEDLVQYHKTYYAPNNAVVVIAGDVKLAQVKALADKYFAPIPAQTPPKAVRTVEPLQKGERRTFVQKASVSTPNVMLAYHVPAATHADYYALDLLSSILSQGNSSRLYQALVDKQVALEAETYMPMSVDPNLFYVMGVATPEVNANTLERALIEQINSIVTNGVTQQELDKVKNIKLMDFYRAMETINGKANTIGTYEMYFGSYDKLFNAPEAYNKVTPADIQRVAQTYLRKSNRTVAVLAANEESDQ

SEQ ID NO: 24810 - protein, 325 aa, Shewanella oneidensis MR-1
MAEMNMLQAVNEALSIAMQADERMVVFGEDVGHFGGVFRATSGLQEKFGRARCFNTPLTEQGIAGFANGLASNGMTAVAEIQFADYIFPAFDQIVNESAKFRYRSGNEFNVGSLVFRTPYGGGIAGGHYHSQSPEAYFTQTPGLKVVVPRNPAQAKGLLLASIRDKNPVVFFEPKRLYRASVGDVPAGDYEIELGKAEVLREGKDITLVAWGAQMEIIEKAADMAAKEGISCEIIDLRTLAPWDVNTVADSVKKTGRLLVNHEAPLTGGFAGEIAATIQQECFLYLESPISRVCGLDTPYPLVHEKEYMPDALKTFEAIKASVNF

SEQ ID NO: 24811 - protein, 535 aa, Shewanella oneidensis MR-1
MIKDFILPDIGEGVVECELVEWLVKEGDTIVEDQPIADVMTDKALVQIPAPFAGVVTKLYYAKGDIAKVHAPLYAVQIEAEEPSSQVAPQTVEHSAPNQAAISAASSSIEQFLLPDIGEGIVECELVEWLVQEGDIVVEDQPIADVMTDKALVQIPAIKAGKIVKLHYRKGQLAKVHAPLYAIEVEGGVIPAVSAHETTNVAVANTATSAACATASVSQEPARQGKALASPAVRRMARALDIDLSRVPGSGKHGRVYKEDISRFQAQGSATPVVAPVATASTQQSSVTQSAVPITVASAARADIVEPIRGVKAVMAKLMVESVSTIPHFTYCEEFDLTDLVALRESMKAKYSSDEVKLTMMPFFMKAMSLALTQFPVLNSQVNADCTEITYKARHNIGMAVDSKVGLLVPNVKDVQDKSILEVAAEITRLTNAARSGRVAPADLKEGTISISNIGALGGTVATPIINKPEVAIVALGKLQTLPRFNAKGEVEARQIMQVSWSGDHRVIDGGTIARFCNLWKQYLEQPQDMLLAMR

SEQ ID NO: 24812 - protein, 525 aa, Oryza sativa (japonica cultivar-group)
MAAKVGLFPSSSLTTSPHAIAAAPTNAPRPRGARGLASPGRSAAAMDAFHVSCGHMRRAARRPPAVAPEMARPGRSSRGRPSSFRKIAPLSISLSAELSGTTWFSLSSIQLGLVASGSLYGALGGSLLAYRVADFLGRRIELVTAAALYISGALVTGFAPDFVLLIIGRLLYGIGIGLAMHGAPLYIAETSPSRIRGTLISLKELFIVLGILTGYLVGSLEIDVVGGWRYMFGFGAPLAVIMAIGMWNLPPSPRWLLLRAVQGKASVEDNKKKAIQALRSLRGRFRSDRVLADEIDDTLLSIKAAYAEQESEGNIWKMFEGASLKALIIGGGLVLFQQITGQPSVLYYATSILQTAGFAAASDAAKVSILIGLFKLLMTGVAVFKVDDLGRRPLLIGGIGGIAVSLFLLAAYYKILNSFPFVAVGALLLYVGSYQVSFGPISWLMVSEIFPLRTRGRGISLAVLTNFGSNALVTFAFSPLQEFLGPANIFLLFGAISLLSLVFVILKVPETKGLTLEEIESKLLK

SEQ ID NO: 24813 - protein, 106 aa, Symbiobacterium thermophilum IAM 14863
MLEVNKENFEQEVLQASGPVVVDWWSPKCDPCMELLPEVERLAETYGDRVKFCKVNVLENRRLAISQRVLGLPTFLFFRDGEKVAELAGPEACTAEAIEAELQRLV

SEQ ID NO: 24814 - protein, 321 aa, Lactococcus lactis subsp. lactis Il1403
MQELDLIIVGAGPVGLYAAFYAGMRGLSVAIIESAQVPGGQPQNLYPEKLIYDIAGLPAVTGADLTKNLLEQLAQISHRLFLGESVQKIEKEEGIFSVTTDKSTRRAKGVLLTTGAGLLKPRKLGIDNEETLANEGKISYFITSLKEFEGKNVAVFGGGDSALDWSLMLEKVAKNVHLVHRRTAFRGHEITVDRVMNSNVQVHTPYTFSNLIENELELKKIKSEESLNFSIDKILVNYGFLTNQVTLAENLEVSRNGRVKADSMMQSNIEGLYVAGDASDYPGKMPLMSVGFGEAVHAINAMTKKLEFDHPLRGGHSSSIF

SEQ ID NO: 24815 - protein, 1020 aa, Vibrio cholerae O1 biovar eltor str. N16961
MQTQIWHEVIRWRTGVNTAQYSPIRHAEEVNKKVFPMRLAKASIGRKLLFSFSAMALLVLLSALIGVLGFSLVAKTERDVVNNAIPSMIEARQVAELSHQIIASVQTLSNAKNEQEHQAAGQKVFSQLETLLTHIQQLGEEAFDSVLLDRLEQDVQNVIDTLAQLGRRVEHRLTLESQLSTSVKEMRKLAQELEQLTRTQVLNTSTIAIANVTHIYDLLQKQQQAQVYQALDNLVEVDLDLAERLHELHLLAFKVLNEIEETQTVTDLERILALDSEFAANLSIMQRRVQAVEDPTRSKQMVSLLRGLEKRRIVFELLKQRYSNEQAAQQLLHDTLTQFAKLNNTVNQLVDASNQVTTAAVSKLSNTLYDAQLILTVLGLLGLVIVVWIVWKVVYRSVIQRLDQHTAALLSVAKGQLDVDVSTQGNDELGQMGQAIAHARDTAKALKVVAESEVLAKRELQQHKEHLEELVEQRTCQLSEMNHKLNQEVLNHAKARQQAEQASRAKSAFLATMSHEIRTPMNGVLGTARLLQDTTLTSTQQHYVQVINRSGRSLLAILNDVLDYSKIEAGHLEIHHTHFDLYRLVSETHELMQSRAREKGITLTYHIDEDVTQYWQGDEIRIGQVLNNLVGNGIKFTDQGEVRIRIRLAPDGQGIRFAVEDSGIGIAEEEQATLFDAFTQADAGRRKLGGTGLGLAISRKLVQAMGGELQLASQLGQGSCFWFTLPLPVGEPVETPALAVDDVPVANVLLVEDNEVNCLVAQGFLTSLGHQVTLAKSVQEAKLCFQQQRFDIALLDIHLPDGNGVDLLRDLRQMEDSIHNAVIPFIAVSAHVFNEEVAGYLAAGFDGYLPKPLVKEQLAAMLRQQLTAKSGDDADMRDKAESHDTSSIFDNGQPQGEPSPEAQAVRKEWVAVMDHAKFEQDVQILGVEKMREIVGYFEQGCAEFFALCEAERDNDAQIKSQAHKLKGSAGALWLTQLYQLCQQIEKADSPAAAYQQTPLVDAVENAKQALRNALDLLSKE

SEQ ID NO: 24816 - protein, 254 aa, Oryza sativa
MISPDAARNVVGIIGNVISFGLFLSPVPTFWRICKRKDVEQFKADPYLATLLNCMLWVFYGIPIVHPNSILVVTINGIGLIVEGTYLFIFFLYSPNKKRLRMLAVLGVELVFMLAVILGVLLSAHTHKKRSMIVGILCVFFGSIMYFSPLTIMGKVIKTKSVEYMPFFLSLVCFLNGVCWTAYALIRFDIYVTIPNGLGAIFGAIQLILYACYYRTTPKKTKAAKDVEMPSVISGPGAAATASGGSVVSVTVER

SEQ ID NO: 24817 - protein, 378 aa, Shewanella sp. MR-4
MFELIHETATGAMPKLTVFGVGGCGCNTINQLSQVNLPSSVELISVNTDAQAMAATSSHYRIQIGPQTTKGLGAGAKPDVGCAAAIESAQALTEQMQHSDIVFLTAGLGGGTGTGALPQVAKLARELTKPVIAVVTMPFSFEGQHRKTNAEAGLQELLESANAVIVLPNDKLAEVLGAKVTLLNAFKESNKILQDVLLGLANTISQAGLINIDLNDFISVISRQGRAAMGVSCLQGDEDLISAVKRAMQHPLLDNIELNQAQAAIVSVVAKDTIELSQYNQIGATVHEQLPRDALVIIGLTIDPNLESELEIMVIATGIGFAPPEIQTPIQAVNDNYINVHDFIKRQAISIAEPAPTKFDLENLQIPTYLRQQKPQAH

SEQ ID NO: 24818 - protein, 410 aa, Symbiobacterium thermophilum IAM 14863
MAERWDLVIIGGGPAGLSAAVYGARARMSTLLIEKGRPGGQAATTEEVENYPGLGRTTGPELMKQFREHAEALGATIVRGEVGAVELQGPVKTIRTKKGEVYEARAVILCPGAEPRMLGVKGEGRLRGKGVSYCATCDADFFTDLDVVVVGNGDAAVEEAIYLTRFASSVTLICIHPEGIMDANKAAQERLFATPKIKVIWQTMVEEILGEDHVEKVALRHLGTGERTELPCDGVFVFVGTTPRTEFLRGTGIELDRKGYIIADPDTMETNIPGVFAAGDARRKWLRQIVTAAADGAIAACAAEKFLAEEEQVDREILSPEEPVLAVFWSPADSLSVHVLQQAERIVAGMGGQMRLARIDCYKSARTAARLGVFDVPAVRIFHKGIPLATLTEDFNHLEEWVVGHLPARI

SEQ ID NO: 24819 - protein, 469 aa, Yarrowia lipolytica CLIB122
MPEIRSNLPTTATSLNDGFTLPITKRNYNRQYAPIYYMRLHQLMSQVLDAATSKWADKNVKYLNKCLDVLVGDTVFVVGTLFKDMKYKPSMLEEVTRSHWGAPPGKKPKYVDPQGDCEDGGHKDDSSIQLEDSSGRITLVGPKVQEFMLITGVVCGVLGTAGENGRFTVVDVVWGGFPEQIYRPLSGVNDGEDVEMADNDTPEDTYICLASGLYIGQKKTDYKHVLLAEYLQGLLEEDGAKDGLVKPKNISRFIMAGNNCSLESERPVIDTLSRTVDLDAFKPMARVDEYIAQLLPSISVDIMAGNDDPGNMSLPQQPLHLSMFPQSRKFKKATFGSVSNPYWWDFSTDEAPLKVLGTSGQNVSDIYKYLIEGRDDILDIMEHTLAWRHLCPTAPDTLTCYPYGDDDPFIIKETPHLYFCGNQDEFQTSVVKHDGVSVRLVAVPRFDETGEVVLVNMRTLKAEVLRIVA

SEQ ID NO: 24820 - protein, 566 aa, Arabidopsis thaliana
MDSLSSMGFQTASFFLILLFLFYHLPCVPSQQERSRLCKPFQCGDITVGFPFWGENRQSDCGHFSLKLNCNKPSNTTSLTISGHNYSVLHIDNKSNILSLSRQDFSGPFCSASFSSTPLRSDLFQNLQPYRNLTVFYMCDPRRHFFGNFTCPVKGLGSVVQNSTYRKLCDKSFSVTVPTSYVPEEEALNLTHLESVLRKGLEVKLKISEMSGQECVTTDGNSGFTRFCCTNVSGPEISCLTSITTMNNGTYSDNRPFLVTIGTEVVGRGGFGTVYRGRLRDGRKVAVKVLKDSKGNCEDFINEVASMSQTSHVNIVTLLGFCYEGSKRAIIYEFLENGSLDQSLNLDVSTLYGIALGVARGLEYLHYGCKTRIVHFDIKPQNVLLDENLRPKVADFGLAKLCEKQESILSLLDTRGTIGYIAPELFSRMYGSVSHKSDVYSYGMLVLEMIGARNKERVQNADPNNSSAYFPDWIYKDLENFDNTRLLGDGLTREEEKNAKKMILVGLWCIQFRPSDRPSMNKVVEMMEGSLDSLDPPPKPLLHMPMQNNNAESSQLSVESSIYSEV

SEQ ID NO: 24821 - protein, 472 aa, Streptococcus agalactiae A909
MSEINEKVEPQPIDLGEYKFGFHDDVKPIYSTGKGLNEAVIRELSAAKGEPEWMLDFRLKSLETFNKMPMQTWGADLSDIDFDDIIYYQKASDKPARDWDDVPEKIKETFERIGIPEAERAYLAGASAQYESEVVYHNMKEEYDKLGIVFTDTDSALKEYPELFKKYFAKLVPPTDNKLAALNSAVWSGGTFIYVPKGVKVDIPLQTYFRINNENTGQFERTLIIVDEGASVHYVEGCTAPTYSSNSLHAAIVEIFALDGAYMRYTTIQNWSDNVYNLVTKRATAKKDATVEWIDGNLGAKTTMKYPSVYLDGEGARGTMLSIAFANKGQHQDTGAKMIHNAPHTSSSIVSKSIAKGGGKVDYRGQVTFNKDSKKSVSHIECDTILMDDISKSDTIPFNEIHNSQVALEHEAKVSKISEEQLYYLMSRGLSEAEATEMIVMGFVEPFTKELPMEYAVELNRLISYEMEGSVG

SEQ ID NO: 24822 - protein, 401 aa, Wolbachia endosymbiont strain TRS of Brugia malayi
MSTSAIFFSEGSYIVIMNNIIVKKFGGTSLTDLTRVANLIKKDVDKGYRIIVVVSAIAGLTDQMVFQARQTLNLSHKQALSEYDVMLSAGEQISCGLLAITLLSIGVNAKSWLAWQLPIITDNSYSESKIKTIKIDHLKRSFAEGYTVAIIAGFQGIYDDRITTFGRGGSDISAVALAVAFGVRVCEIFTDIDGIYTADPKIVPKARKLKSISYDEMLEMSSSGAKILHNRSVQLAMKHNIKVQVLSTFKEVEGTAVLHENDVLERHTITGITYSTNEALITFTNFANTLRTLKDMAGANIKIDMIHGSSIVISEFDIDLMKELLNKNEDYVINNNAAKISIIGIGVMSVMYHTLKFFSEKKIEILAITASEIKISIIVQRECAEALVRDLHTELMCTEGG

SEQ ID NO: 24823 - protein, 921 aa, Yersinia pestis biovar Medievalis str. 91001
MTKYSLRARMMILILAPTLLLGLLLSTSFMVNRYNELQNQIVSAGTNIIEPLAVASEYGMSFRNRDTVRQLINLLHRRHSNIVRSISVFDVDNKLFVTSNYNYNSSQLRLPPGEPVPDSLMLSYRGDSLILRMPIVSESNLSSEQASGQGESDQILGYIAIDLDLQSVRLKQYKEIFISTLLLLFCMCVAILFAYRLMRDVTGPIRNMVNTVDRIRRGQLDSRVEGHMLGELDILKNGINSMAMSLAAYHEEMQQNIDQATSDLRETLEQMEIQNVELGLAKKRAQEASRIKSEFLANMSHELRTPLNGVIGFTRQTLKTSLTPTQTDYLQTIQRSANNLLCIINDVLDFSKLEADKLILEHIPFSLRETLDEVIILLAHTAHEKGLELTLHINNDVPDQVLGDAMRLQQIVTNLLGNAIKFTEEGNIDILVVVKAIASQQVTLMVEIHDTGIGISESQQAQLFQAFRQADASTSRRHGGTGLGLVITERLVKEMGGNISFQSQMSCGSIFRFHLTLELNESIPYRQPDMAHLEGKQLAYIERNSTAARATINILNTTPLQVTHRQSLAQLPEQHYDFLLVGVPIPFRNNMAIHQDKLLTALKIADHVILALPSQSQVEAEQLKQIGAKDCLLKPISSIRLIPLLLAEDTHSKVPSEEQPRKQPKLPFRVMAVDDNPANLKLIGTLLEEQIEETVLCDSGAMAITYAREHTLDIILMDIQMPEIDGIRASEIIHQIPHHQETPIIAVTAHAVKGQQEQLLRLGMADYLAKPIDEARLLQVLSRYQSDNPPLSTASTAESLPLPVPKGAGVIDWAQAVRQAANKEDLARDLLTMLLEFMPQITARVQAILAGADDGDILNLVHKFHGSCACSGVPRLRQLCMTIELQLRQQVNLQDLEPEWLELLDEIENVSEAAKTYLRTE

SEQ ID NO: 24824 - protein, 650 aa, Prosthecochloris aestuarii DSM 271
MHSVLYPFSAVTGQEELKHALLLNAVNPRIGGVVVRGEKGTAKSTTVRALGELLSGQERSPVVTLPLNATEDMVAGGIDFQCTMRDGCRVFQPGLLSRADGGILYVDEVNLLDDHIVDIVLDAAASGENRVEREGISFCHPASFVLVGTMNPEEGELRPQLLDRFGLCVEVHAESIPEQRVELMLRRESFDDDREAFIERFREENQRLAQKITAARDLLPTVSMPGHLRGFISELCRENNVAGHRADLCIEQAARANAAYRESRVVELDDITSVAALVLAHRRRDAELPPPPEPPQPDEEERQEERDERPDERDEQKAEEAEQGDAAEKPQGRGKEPGDEQPEDRQDAAPPEGAEDQDSGDDAEEGSVPEQVFEIAAPFKVRPITSPKDRTMRRGSGKRSRSRVSQKQGRYTKSTMKRRNNDIALDATLRAAAPFQRHRDNRSGMAVILHDQDIREKVREKRLGNLLIFVVDASGSMGARGRMAASKGAVMSLLIDAYQKRDKLALVSFRKNEAVVNLPVTSSVELAGKLLREMPVGGRTPFAAGLVKGYEIARSHLMKEPDARPMVIFVTDGKANKSLGSGKPLDEVFELSRKIALEERIRFLVVDTEEPGLVNFGLARKIAGMLQAEYFKIDDLQADSLVNIVKNATS

SEQ ID NO: 24825 - protein, 231 aa, Yarrowia lipolytica CLIB122
MFDQSRKSQEPSYDSTGYEGSGYEMDYEKPGYKFDHEHPEGHTTGGTNTPDHVANPVTLNKAEELLANASEEQYSVVALGGTFDHLHAGHKILLTLAAWLTRDKLIVGITGPQLLTKKKYAEAMESFDVRESHVTQFLNYISPPLRLQPVMINDVYGPTASDPDIDALVLSAETRGGGAAINKVREEKGWSQLTVFEINIVGGKGNEEDNWADKLSSTQLRKEALEKKEKL

SEQ ID NO: 24826 - protein, 565 aa, Medicago truncatula
MAPAAIVTNGTTTVTPTVTTRFASVYSEVQNSRVDHKLRLPSVLQAPFAIVDGPKSSAAGNPDEIAKLFPYLFGQPSAALVPAGENTALPHRKLKIGVVLSGGQAPGGHNVISGIYDYLQQSASGSTLYGFKGGPAGIMKGKYVELNSDYIYPYRNQGGFDMICSGRDKIETPEQFKQAEETATKLDLDGLVVIGGDDSNTNACLLAENFRSKNLKTQVLGCPKTIDGDLKSKEVPTSFGFDTACKIYAEMIGNVMIDARSTGKYYHFVRLMGRAASHITLECALQTHPNITIIGEEVAAKKLTLKNVTDYIVDVICKRAEDNYNYGVILIPEGLIDFIPEVQHLIAELNEILAHETVDEGGLWKKKLTDQSLELFEFLPQAIQEQLMLERDPHGNVQVAKIETEKMLIEMVETELGKRKQEGKYNGEFKGQSHFFGYEGRCGLPTNFDANYCYALGYGAGALLHSGKTGLISSVGNLCAPVEEWTVGGTALTSLMDVERRHGKFKPVIKKAMVELEGAPFKKFASLRDEWALKNCYTSPGPIQFTGPGSDAVSHTLLLESGFQI

SEQ ID NO: 24827 - protein, 667 aa, Desulfovibrio vulgaris subsp. vulgaris str. Hildenborough
MPNLRIIVVDDEQIVALDLRRTLEGLGYIVPAVETDADGAIDAAKRLRPDLVLMDIRLRRGDGVDAAHVITNQFDIPVVFLTAFSDEATLSRAMKAGPFGFLVKPFAERELYSTIEVALLKHRAVREIDEARQAAEHASLAKTSFLAGMSHEIRNTLNGIVGMTELVLDTPLSGEQRESLNTVLASSETLLTLLHDVLDFSRLEARQLRLVERPFSLDRLLKQVVQASRSEAERKNISLDFRVTPDVPDRLTGDATRLTQVLANLVGNAVKFTHKGSVIIEVSAIPQDQTLLESLFPDGPPSSLTLLFSIRDTGIGIADEHLRTIFEAFSQGAEETVQRYGGTGLGLAICRNLVEIMGGSIWARSSEGQGSSFHFTCRLRPETPAINTPSEHAQAPTSSATPASGARPLRVLVVDDDATGRTITCKMLRKRGHVCACAHDGATALQRLTADRFDLVLLDVKMHPMGGLELLRRIRNAQYPGVDRNIPVVAVTAHALKGDRERFLASGMTDYIAKPINARAFNAMLDRFALSASSARDIPVIPDRSALLAPSEVVRRHGGDHNLVEPVWKAFCDEAPRHFALLAGALEEGDAQQAARFNKRLRLASEHAGAVALAMLTERVGLCLVEDDTAGARQLVPRLESLLSRTIGLILSGMGTTEVPPIEHTTD

SEQ ID NO: 24828 - protein, 116 aa, Triticum aestivum
MARAQLVLVALVAALLLAAPHAAVAITCGQVNSAVGPCLTYARGGAGPSAACCSGVRSLKAAASTTADRRTACNCLKNAARGIKGLNAGNAASIPSKCGVSVPYTISASIDCSRVS

SEQ ID NO: 24829 - protein, 531 aa, Shewanella sp. ANA-3
MIKDFILPDIGEGVVECELVEWLVQEGDTIAEDQPIADVMTDKALVQIPAPFAGVVTKLYYTKGDIAKVHAPLYAVQIESDEAAPVAASQPEAHTATQTPASQSSAAGTSVEEFLLPDIGEGIVECELVEWLVQEGDTVVEDQPIADVMTDKALVQIPAIKAGKIVKLHYRKGQLAKVHAPLFAIEVEGGVSAPVSHAQEASATAVNTAAPVACAAVSSEPARQGKALASPAVRRMARALDIDLSRVPGSGKHGRVYKEDITRFQAQGGAVPAAAPVAAAPTVAQSTVSTAVASAARGDIVEPIRGVKAVMAKMMVESVSTIPHFTYCEEFDLTDLVALRESMKAKYSSDEVKLTMMPFFMKAMSLALTQFPVLNSQVNADCTEITYKARHNIGMAVDSKVGLLVPNVKDVQDKSILEVAAEITRLTNAARSGRVAPADLKEGTISISNIGALGGTVATPIINKPEVAIVALGKLQTLPRFNAKGEVEARQIMQVSWSGDHRVIDGGTIARFCNLWKQYLEQPQDMLLAMR

SEQ ID NO: 24830 - protein, 410 aa, Burkholderia sp. 383
MSRRRVVVTGLGLISPVGNNVADGWANLVAGKSGIATVTKFDPSNLAVHFAGEVKGFVPEEYIPAKEARNMDTFIHYGIAAGVQAIKDSGLEVNEANAERIGVLVGSGIGGLPMIEDTHQTYVDRGARRISPFFVPGSIINMISGHLSIMFGLKGPNLAAVTACTTGLHSIGLAARLIQAGDADVMVAGGAESTVSPLGIGGFAAARALSTRNDDPASASRPWDKDRDGFVLGEGAGVMVLEEYEAAKARGAKIYAEVSGFGMTGDAYHMTAPNMDGPRRCMVAALRDAGVNADEVQYLNAHGTSTPLGDKNESDAVKAAFGEHAYKIVVNSTKSMTGHLLGGAGGLESVFTVLALHNNVSPPTINIFNQDPECDLDYCANTARDMKIDVAVKNNFGFGGTNGTLVFKRV

SEQ ID NO: 24831 - protein, 364 aa, Bacillus clausii KSM-K16
MEKQILLLPGDGIGPEIIAETKRVLEEIARLYHHTFQFVEGRIGGDAIDATGSPLPEETLDLAKGSDAILLGAVGGPKWDGNAPEKRPEKGLLQIRKALGLYANLRPVRVLKPLMGASTLKEEVLADVDLLIVRELTGGLYFGEPRERRQINGEDGAVDTLLYTRGEIERIVHQAFQFARTRKKRVVSVDKANVLESSRLWREIADEVAREYPDVTLSHMLVDNAAMQLIRDPRQFDVIVTENLFGDILSDEASMITGSLGLLPSASMNTSKVGLFEPVHGSAPDIAGTGAANPLATILSAAMMLQYSFGLADEAKAIEVAVDRVLAQGVRTKDIAKASENAVSTTAITNAVMEALALKSASSR

SEQ ID NO: 24832 - protein, 500 aa, Xanthomonas oryzae pv. oryzae KACC10331
MGVWATLSAQCRSHDCSAERAFRSLQHLRCASASLSPDTCMTDTPRRDDAATLERFGYAQELKRQLTLKDLLIYGLVSMVPTAPFSIFGGVFDISAGMVPLTYLVGFVAMLFTALSYQQMSQAFPVAGSVYAYVGRGLNSGMGFLAGWAILLDYLLVPTLLYVVGANAMYNVVPAVPQPAWIGFFVVLNTVVNLRGIETTARANRFFLLGQLVVLAVFLVLATLAIQRGVNGAHWSWRPIYDPQAFSPHVIFSALSVAVVSFLGFDAISTLSEEARGGNRVVGRATLLALLIVAGVFVLQTWLAALLQPTLQRYPSAQASNDAFFEIGRLIAGPWLQIVIALTVAISAAIANSLVAQAATSRLLFAMARDRQLPAFLRYIHPRTAVPQRAILLVAGLSIVLGEVFVGQIALLSSLCNVGALTAFVLLHIAVLWHFRAQGRRVLHGLAPLIGIVILAYVLLNADTHAQLGGTAWMVVGLTVLAFLKLSGRSTEFRASDAVE

SEQ ID NO: 24833 - protein, 166 aa, Glycine max
  misc_feature (116)..(116): Xaa can be any naturally occurring amino acid
MGKKRKHSETTQSVAQPKKEDAAPERPARTLLGWKDKNQVEDNNNADSPIFRNKEKLLVTCSRRINYRYRHLMLNLVTLLPHCKKDNKVESKETKGATLNELVELKNCSSCLFFEXHKDLYLWMAKCPNGPSVKFLVSAVHTMEELKLTGNHLQGSRPILTFSANF

SEQ ID NO: 24834 - protein, 357 aa, Xanthomonas campestris pv. vesicatoria str. 85-10
MSKQILILPGDGIGPEIMAEAVKVLKRIDAQHGLGFELVYDELGGAAYDKYGSPLADETLERARAADAVLLGAVGGPQWDTIDPSLRPERGLLKIRSQLGLFANLRPALLYPQLADASTLKPEVVAGLDLLILRELTGGIYFGQPRGNRTLDNGERQAYDTLPYSESEIRRIAKAGFEMARLRGKKLCSVDKANVLASSQLWRAVVEEVAKDYPDIALSHMYVDNAAMQLVRAPKQFDVIVTDNMFGDILSDQASMLTGSIGMLPSASLDANSKGMYEPCHGSAPDIAGKGIANPLATILSVAMMLRYTFAQADAADAIERAVGKVLDQGLRTADIWSEGTTKVGTVAMGDAVVAAL

SEQ ID NO: 24835 - protein, 495 aa, Chlorobium tepidum TLS
MKNSFRKKPLSLLLEEMKSEHRLNRVLGPLALTSLGVGAIIGTGIFVLIGVAAHDKAGPAVTLSFALAGLACVFAALCYAEFASMAPVAGSAYTYAYATLGELFAWIIGWDLILEYAVASATVAHGWSHYFQDFMGIFGLHIPEIFSRAPLDFDPATGSLVLTGSMFDLPAVIIVLIVTVILVKGIRESAGFNTAMVIVKVAIVLLVIVLGAQYVKPENWQPFAPFGYSGLSVFGHTILGETGAGGAPVGVLAGAAMIFFAYIGFDSISTHAEEARRPERDVPIGIIASLIICTMLYVAVAAVITGMVPYDQINIDAPVSYAFKQVGLDWAQFLVSLGAITGITSVLLVMMLSQPRIFLAMARDGLLPNKFFGVVHPKFKTPWNATILTGIFVAILGAFLPLRLLAELVNIGTLFAFVVVCAAVLIMRRTNPDAERPFRAPLVPFVPIAGILTCLLLMFSLPAENWWRLIVWLLIGFCIYFFYGRHHSVLNQHHD

SEQ ID NO: 24836 - protein, 297 aa, Halobacterium sp. NRC-1
MTEIIDGDAVAAQLRADLTGAVETLETAGVTPRLATVLMNDKQASETYVSMKQQDCEEVGIAAEDVRIDPEASADTLFDTVAELNAREDVHGILVQDPTPDHVPDERVLSAVDPAKDVDGFHPENVGKLVGGTPRFKPCTPHGVQKLLAHQGVDPDGAEVVVVGRSNIVGKPLANLLAQKAAGGNATVTICHSHTDDLAAHTRRADVVVAACGVPELIDGDMLSGDPVVIDVGINRVDADTEKGYELVGDVDYDSAEAAASAITPVPGGVGPMTRAMLLYNTLAAASEQTGVAVALP

SEQ ID NO: 24837 - protein, 550 aa, Shewanella sp. ANA-3
MAIHQRAGQTASQTDLVNIPKLMSHYYSIKPNVDAAEQRVTFGTSGHRGTAFQASFNQDHIWAITQAVVDYRQSVNIDGPLFLGIDTHALSYAAYVSAIEVLAANKVTVHIQQNDGFTPTPVVSHAIICANREAALSGAALSDGLIITPSHNPPQDGGIKYNPPHGGPAEGNITAWIESRANDYLRAGLKGVNKLAYADALTSGYVHAIDLITPYVADLVNVVDMHAIAKAKLKLGVDPLGGSGIHYWAPIAKHYGIDITLVNDKVDPSFSFMSLDKDGKIRMDCSSPYAMAGLLAHKESFDLCVGNDPDYDRHGIVCPCTGLMDPNHYLAVAIDYLLTHRPEWSEQLAIGKTLVSSALIDKICTFHGKKLLEVPVGFKWFVDGLAEATIAFGGEESAGAAFLRRDGTTWCTDKDGFILVLLAAEMLAVTGKTPGQRHQELVAQFGQSFYKRIDSPISLENKAKFAKLNAETLNATMLAGEKIDAVLTHAPGNNASIGGIKVTTANGWFAARPSGTEALFKIYGESFISEQHLADIIKDAQALIDKALSA

SEQ ID NO: 24838 - protein, 403 aa, Bradyrhizobium sp. BTAi1
MNPSSSSETFDVVVVGGGPAGATAANDLARQGHHVLLLDRAGRIKPCGGAIPPRLIAEFEIPDHLLVARISSARMVSPSNRDVDMPIDGGFVGMVDREHYDEWLRQRAAEGGAVRRTGTFNRLASETDGTAVMHYERRMDDGSVREDSVRARAVIGADGAVSAVARQCIPEVREIRYVFAYHEIIRSPDRSHPVFDATRCDVVYRGKLSPDFYSWVFPHGPTTSIGTGSACKGFSLRGSVAEFRKAAALDDLETIRREGAPIPLKPLSRWDNGRDVVLAGDAAGVVAPASGEGIYYAMAGGRAAAQAVALFLKTGDAAALATARKTFMRKHGAVFFILGMMQRYWYTNDARRERFVAICRDRDVQQLTWDAYMNKELVRAKPLSHVRIFFKNIAHLTGLAKAA

SEQ ID NO: 24839 - protein, 138 aa, Gossypium hirsutum
  misc_feature (106)..(106): Xaa can be any naturally occurring amino acid
GAKTNFKDYKKFPFKKLYLSKGKEIQTNLQIMSSAAATTTKGGRGKSKAKAVSRSSKAGLQFPVGRVARFLKKGRYAERVGSGSPVYLSAVLEYLAAEVLELAGNXARDNKKNRIIPRHIQLAVRNDEELSKLLGGVT

SEQ ID NO: 24840 - protein, 581 aa, Nicotiana benthamiana
MGNTCVGPSISKIGLFQSVSAAMWRTRMPDDSGSTTNGDSARGETAESSKDPNLVVPSKPPEQITMPKSDQKEEEPAKKEEGPEKPKKPVQMKRVGSAGLRTDSVLQKKTGNLKEFFSIGKKLGQGQFGTTFKCVEKATGKEYACKSIAKRKLLTDDDVEDVRREIQIMHHLAGHPNVISIKGAYEDAVAVHVVMEYCAGGELFDRIIQRGHYTERKAAELTRTIVGVLEACHSLGVMHRDLKPENFLFVNQKEDSLLKTIDFGLSIFFKPGDRFNDVVGSPYYVAPEVLKKRYGPEADVWSAGVIVYILLSGVPPLWAENEQGIFEEVLHGDLDFSSDPWPSISEDAKDLVRRMLVRDPKKRLTAHEVLCHRWVQVDGVAPDKPLDSAVPSRMEQFSAMNKLKKMALRVIAESLSEEEIAGLKEMFRMIDTDNSGQITFEELKVGLKRVGANLKESEIYDLMQAADVDNSGTIDYGEFIAATLHFNKIEREDHLFAAFSYFDKDCSGYITADELQQACEEFGIGDVHLEDMIRDADQDNDGRIDYNEFVAMMQKGNPVIGGGKKGLEHSFSTGFREALRL

SEQ ID NO: 24841 - protein, 334 aa, Rhodobacter sphaeroides 2.4.1
MKKPFPFSAIVGQEQMKQAMVLTAIDPGIGGVLVFGDRGTGKSTAVRALAALLPLIKAVEGCPVNSARPEDCPEWAHVSSTTMIERPTPVVDLPLGVTEDRVVGALDIERALTRGEKAFEPGLLARANRGYLYIDEVNLLEDHIVDLLLDVAQSGENVVEREGLSIRHPARFVLVGSGNPEEGELRPQLLDRFGLSVEVRSPRDVETRVEVITRRDAYDADHDAFMEKWGAEDMQLRGRILGARAALPQLKTPNTVLHDCAALCIALGSDGLRGELTLLRAARAQAAFEGAEAVGRSHLRSVATMALSHRLRRDPLDEAGSVSRVERCVAEVLP

SEQ ID NO: 24842 - protein, 88 aa, Oryza sativa (japonica cultivar-group)
MSGRRASGRITDDEINELISKLQSLLPESSRRRGATSRSPATKLLKEMCSYIKSLHREVDDLSERLSELMATMDSNSPQADIIRSLLR

SEQ ID NO: 24843 - protein, 368 aa, Neurospora crassa
MATHNIVVFGGNHCGPEVVLEAIKVLKAIETNSPSACKFNLQNHLLGGASIDKHNDPLTDEALNAAKAADAVLLGAIGGPEWGTSSTVRPEQGLLKLRKELGTYGNLRPCNFASESLVDSSPLKAEVCRGTDFIVVRELTGGIYFGDRTEDDGSGYACDTEPYSRAEIVRIARLAGFLALAKNPPAKVWSLDKANVLATSRLWRKTVTDVISKEFPQLQLEHQLIDSAAMLLVKNPRALNGVVITSNLFGDIISDEASVIPGSIGLLPSASLGGIPDGKGKCNGIYEPIHGSAPDISGKGIVNPVGTILSVAMMLRYSLNLPKEADAVEAAVKAAIDNGTKTKDLGGNATTSDMGNAVVAELEKILKA

SEQ ID NO: 24844 - protein, 564 aa, Rhodobacter sphaeroides 2.4.1
MTHAAPVPLGPWERVEAALTLLAIDPAGLKGLWLRARASALRDRITGALGALPLPVRRIHPTIGDDALFGGLDLAATLSAGTPVVQKGILDEPAVLVLAMAERTLPGLAARLGTALDAPRHCLIALDEGAERDELLPLGLVDRLALFLDLDGLPWGETREIALDPERLAAARARLAAVATPPEAAATLARVAAQLGIASLRAPTLALAAARAQAAWEGHAAVTDEDIRRAADLVFAHRAMPASEEAPPEPEPEPPEDQPDDSPPPPEQQQGEEMFPEEMLVEAVRAALPADLLEQLAAGRAARMARGATGTGSAKAGNRRGRPLPSRMGRLGTGARIDLVGTLRAAAPWQPLRRRQQKTDAVLLVRPSDIRIKRFRETSDRVLIFAVDASGSSAMARLSEAKGAVELLLGQAYARRDHVSLLAFRGRDAELILPPTRSLVQTKRRLAGLPGGGGTPLAHGLRLALAVGLQARARGMTPTVALLTDGRGNIALDGSANRAQAEEDALKLAASLRGSGLPAVVIDTANRPQPSLAALARALDAPYIALPRADAHKLSNVLGAAMGD

SEQ ID NO: 24845 - protein, 561 aa, Geobacter metallireducens GS-15
MKLRVVVIGANAAGAKAASKAKRMNPHAEVTLIERGNFISYGACGIPYFVSDTVADVKELMSTPVGVVRDAAFFNKVKGVHVITGTEVVSLDRQSRTVQLFEKESAKAFSLEYDRLVLATGSSPSLPPLKNRDLGNILTVKAIEDAELLKERAVTGKRACIVGGGLIGLETAEALRQKGLEVTIVEMRDQLLPGILDPEMASLVERHIRQNGVEVETSCRVAGFDGTGVVNKVLTERGEIPADVVVLAPGVTPNVKLAKEAGLEIGPTGAIAVDSRMGTSDPAIYACGDCCETTHLVTGKKVHVPLGSTANKQGRVAGINASGGEATFAGILGTSILRVFSVNAGKTGLTESEARAQGYDVETVLSPAPDKAHFFPGAKPIALKLVADRATGRILGLQAVGEGAVDKRVDAAAAAITFGATADQLSHLDLAYAPPYSAAMDNLIVAADILKNKLAGHARGISPRKVRQMLDDGDDFILLDVRSPAEHAEVGIEGATLIPLGALREKLESLPKDKEIVTFCKISLRGYEAQKILDAAGFRDVKFLDGGIMTWPYELRRGGGA

SEQ ID NO: 24846 - protein, 588 aa, Rhodobacter sphaeroides 2.4.1
MEREMTEVMSGARMVVQALKDQGVDTVFGYPGGAVLPIYDEIFQQNDIRHILVRHEQGAVHMAEGYARSTGKPGVVLVTSGPGATNAVTGLVDALMDSIPLVVLSGQVPTFMIGTDGFQEADTVGITRPCTKHNWLVKDTARLAETIHQAFHVATHGRPGPVLVDIPKDVQFATATYQPPQKARVDHYQPKVKGDIEAITRMVELIETAERPVFYTGGGVINSGSAASQLLREFVDATGFPITSTLMGLGAYPASGKGWLGMLGMHGLYEANLAMHGCDLMINVGARFDDRITGRVKDFSPFSQKVHIDIDPSSINKVIRADVPIIGDVGHVLEDALRLWKSRGRKVNREALAEWWKQIAEWKAVNCLDYAPSSKLIKPQHALQRLEALTKGMDRYITTEVGQHQMWAAQFLGFEGPNRWMTSGGLGTMGYGLPASIGVQVAHPEALVINIAGDASFLMNMQEIGTAMQFRLPVKQFILNNERLGMVRQWQQLLHGQRYSQSWSESLPDFVKLAEAFGAKGIQCADPADLDDAIREMIAYDGPVVFDCLVEKHENCFPMIPSGRPHNEMLLGDAETEGAIGAKGAVLV

SEQ ID NO: 24847 - protein, 666 aa, Arabidopsis thaliana
MINFSLSLTKSMSYSFIWMLFVIHISCVLSADGNHILCSPSFTCGNQRGLLYPFWIAGRKECGHPDFELDCNAGVPELSISSVKFRILGADYDSGIITLARSDNIDDPCLPNSFTTSFNETVLPLASTTDLLTIYYDCNRNVSSFVSTFVKELDCPDDGTDDRRNYYLTRNLTFLPPSLKLEGNSFLLNDFGGSCSRNVSNPASRTALNTLESTPSTDNLKIALEDGFALEVNSDCRTCIDSKGACGFSQTSSRFVCYYRQEPQNPTRNKVILKLFFIVIYVLGIGAASFAMMGVILVVTCLNCLIRRQRKTLNDPRMRTSDDSRQQNLKALIPLKHYSYAQVTSITKSFAEVIGKGGFGTVYRGTLYDGRSVAVKVLKESQGNGEDFINEVASMSQTSHVNIVTLLGFCSEGYKRAIIYEFMENGSLDKFISSKKSSTMDWRELYGIALGVARGLEYLHHGCRTRIVHFDIKPQNVLLDDNLSPKVSDFGLAKLCERKESILSLMDTRGTIGYIAPEVFSRVYGRVSHKSDVYSYGMLVLDIIGARNKTSTEDTTSSTSSMYFPEWIYRDLEKAHNGKSIETAISNEEDEIAKKMTLVGLWCIQPWPLDRPAMNRVVEMMEGNLDALEVPPRPVLQQIPTATLQESSTFSEDISAYTEICSINVA

SEQ ID NO: 24848 - protein, 362 aa, Lactococcus lactis subsp. lactis Il1403
MSKIERISAFLNDKEVDMTFITNPTTLNYLTGLAIDPHERIAGLMIFRDSTPMLFTPALEVEKAKEYTSGLDIFGYEDSQNPWEVVKNHVKSDVKSIAVEFSDIPLAKTEGLKAQFGDINFVNLTPLIERMRLIKSADEIEKMKVAGDFADKCFEIGFATAAERNGVTESDIVAKIEYEMKRMGVPQMSFDTLVLSGARAANPHGAPENVEIQENKLLLFDLGVMSGGYASDATRTIAIGQPNDFDAEIHKIVKEAQQAAMDFIKPGVTAHEVDAVARDLITKAGYGEYFNHRLGHGIGMDVHEYPSIVAGNDLVIQEGMCFSNEPGIYIPGKVGVRIEDCLYVTENGCESFTHTDHDLLIF

SEQ ID NO: 24849 - protein, 197 aa, Brassica napus
SRPRVRGTGTVTHKGDIKKFQLATRNRAKDKILGGKIIRVEAHPIPEHPRPRRLSKRVALFGDAAGYVTKCSGEGIYFAAKSGRMCAEAIVEGSQNGKKMIDESDLRKYLEKWDKTYLPTYRVLDVLQKVFYRSNPAREAFVEMCGDEYVQKMTFDSYLYKRVAPGSPLEDLKLAVNTIGSVFRANALRREIEKLNV

SEQ ID NO: 24850 - protein, 336 aa, Shewanella oneidensis MR-1
MTIRVAINGYGRIGRNVLRALYESEKAYPIKIVAINDLGDASINAHLTKYDSVHGRFNAKVEHDAEAIYVNGDKILTFQERDPGKLPWNDLQVDVVFECTGIFTSKESVQPHLAAGAKKVIISAPGKNVDATVVYGVNNNVLTSDMTVISNASCTTNCLAPFAKPLNDEIGIESGLMTTIHAYTNDQRLSDVYHTDLRRARAAALSMIPTKTGAAAAVGLVVPELQGKFDGLAVRVPTVNVSLVDLSFIASRDTTVEEVNAIIERAASVAPLSEVLAVNKEPLVSIDFNHNAFSSNFDATQTRVNGRLVKVMAWYDNEWGFSNRMLDNAVALMNAK

SEQ ID NO: 24851 - protein, 674 aa, Synechococcus sp. RS9917
MCGIGGVFSAQAHQRVDPQLLVNMAAIQEHRGPDGFGYRSLDDAGVGFCHARLSIIDLNETRARQPFLSEAAGPGARLLMAHNGEFYDFQRIRADLTARGVRFDSKSDSEILLRLYEQQGLEATLPQLRGEFAFAIYDEADDALHLVRDRFGIKPQYWALTPAGLVFGSELKVLFAHPAVERRFTSEGLFHQLMQTMVPGTTAFAGVHQVPPGHGITVRRRDGQLTVEHWKYWDLDFPRQGERDASITEQEHIDAIRAALLDAVELRMVADVPVGCYLSGGIDSCSILGLAAAVSQNPVKAFTIGFDDARYDESPIAREMAEATGAEQDLMRLSGKELYGWMERTLWHTERTIYNTLAVAKFLMSRHVNAVDYKVVMTGEGSDELFGGYPAFRRDMFLHGFNDLPEAERRSWEDLLQQSNALVQGAMLAADQVDDPDLDAVVGFTPSCLQPWLACAPLVPDLLSEPHRQALEGYAPGKAIAATLDADQLEGRHALDKAQYVWIKTMLEGQILTWGGDRVDMAHSMEARPAFLDHHLAAAAVQVPPELRIKGKTEKYVLREAMAGLLPEVLYKREKFAFMAPPAHTEPDKWNQMRQLADDYLSDAAIAEAGLLSAEGVRDLFARHEDPATTDADRVQMDALINHLLGVQMLHRMFIATDVPAQARQKADALGWHV

SEQ ID NO: 24852 - protein, 394 aa, Rhodobacter sphaeroides 2.4.1
MAYDVFVVGGGPSGATAADELARAGKSVALLDRAGRIKPCGGAIPPRLIEDFDIPDSQIVARIRTARMISPTGRKVDIPIEGGFVGMVDREHFDEWLRRRAAKAGAERLTGTFLRVERDSFHTYVVWREKATGEEKRSETKLVIGADGAKSDVARAEVPGGDKIPMVIAYHEIIKPPTSSVIDYDPTRCDVIYDGRVSPDFYGWIFPHGETASVGMGTGILGFDLKEATALLRRQAGLDQCETIRKEGAPIPLQPLEKWDNGKDVVLAGDAAGVVAPSSGEGIYYAFVGGQVAARACLAALKSGRATDLQLARKMFMADHKTVFKVLRSMQDAYYRDDERRERFVSLCHDTDVQRLTFESYMNKKLTSKQPWAHIKIGFKNVMHLTRLVSPQWT

SEQ ID NO: 24853 - protein, 191 aa, Cryptococcus neoformans var. neoformans B-3501A
MALLPYSAHAFRTYMRPATLPVTRATARVFSPRRYLQNILAPTDPDANSPTLIISKLTPRGFILSDNLIIPGGAILHSGKVLLWDVDPPRQPQAGEKGGLEKVWDGWEKERFGALEMLVPRPEILLLGTGQRALPAPKRLREYISGLGIQLDVMDSRNAASTYNLLVEEGRRVAAALCPLGPIDPRTGEPR

SEQ ID NO: 24854 - protein, 255 aa, Bordetella bronchiseptica RB50
MAIKVSQPDNGVVTLLMDRPAKHNAFTWEMYEAFGAACDALQADDSVRCVIVRGAGGAFCAGSDIGGFDENRSGVEQARAYAAFTLAMFDKFKHLRHPTIACIEGVCVGGGLEIAALCDIRIAQADARFGIPVNRIGLTLDHQELADLVAVVGHGVALEILLEGRVFGAQEALAKGLLSRVVDDAWSDADETARRIARLAPLSNRWHKQFIRQLQSGQPLTQAQRDEAYACFDTQDYQIGSRAFLEKQRPQFIGR

SEQ ID NO: 24855 - protein, 175 aa, Triticum aestivum
MAPTVMASSATSVAPFQGLKSTAGLPVSRRSNGASLGSVSNGGRIRCMQVWPIEGIKKFETLSYLPPLSTEALLKQVDYLIRSKWVPCLEFSKVGFIFREHNASPGYYDGRYWTMWKLPMFGCTDATQVINEVEEVKKEYPDAYVRIIGFDNMRQVQCVSFIAFKPPGCEESGKA

SEQ ID NO: 24856 - protein, 631 aa, Vibrio vulnificus YJ016
MAIEINVPDIGADEVEVTEILVSVGDKVEEEQSLITVEGDKASMEVPASQAGIVKEIKVVAGDKVTTGSLIMVFEAEGAAAAAPAPAVAPVAAPAAASELKEVCVPDIGGDEVEVTEILVAVGDSIAEEQSLLTVEGDKASMEVPAPFAGTLKEIKVAAGDKVSTGSLVMVFEVAGSGAAAPAPVAAAAPAAAPAAVSGVKEVNVPDIGGDEVEVTEIMVAVGDTVSEEQSLITVEGDKASMEVPAPFAGTVKEIKVAAGDKVSTGSLIMVFEVAGAAPVAAAAPAQAAAPAPAAAPAPAVAPVAKAEAQATTSDFKENDEYAHASPVVRRLAREFGVNLSKVKGSGRKSRILKEDVQAYVKDALKRLESGAVAAASGKGDGAALGLLPWPKVDFSKFGETEVQPLSRIKKISGANLHRNWVMIPHVTQWDNADITELENFRKEQNAIEAKKDSGMKITPLVFIMKAAAKALEAFPAFNSSLSEDGESLILKKYVNIGIAVDTPNGLVVPVFKDVNKKGIYELSEELMVVSKKARAGKLTAADMQGGCFTISSLGGIGGTAFTPIVNAPEVGILGVSKSEIKPVWNGKEFAPRLQLPLSLSYDHRVIDGAEGARFITYLNECLSDIRRLVL

SEQ ID NO: 24857 - protein, 187 aa, Arabidopsis thaliana
MHTWKNQIFSDSQFVLLFMGKNCSIIFPEPHLFISHVFIIHLNVLFLVKKINKNNLRFVGSTSGQSQLVCSGCRNLLMYPVGATSVCCAVCNAVTAVPPPGTEMAQLVCGGCHTLLMYIRGATSVQCSCCHTVNLALEANQVAHVNCGNCMMLLMYQYGARSVKCAVCNFVTSVGGSTSTTDSKFNN

SEQ ID NO: 24858 - protein, 430 aa, Pseudomonas aeruginosa PAO1
MDELHPGYLVGLLVLLVACSAFFSCVETALLNLDRYRLRLQAKQGLRGARRSSWLLLHDDRLRGTLLFGRTLVNVSAAALASWAALRHWGVIGLAVAIPGMTLLLLLFGALLPRRYGALRSERVALPLSLPLLILQRLCWPLLWLLTLLSNALLRLLGVAAAEQDDSGRSRDEEALHPADNPQASEVNRHDMLLGLLDLEKVTVNDLMIPRNEIEGIDLDDELEVIVEQLRTTSHTRLPVYRDDVNQIEGVVHMRQIARLLTQGRLTKENLRQACMEPYFVPESTPLSTQLVNFQKEKRRIGVVVDEYGEVIGIVTLEDILEEIVGDFNDLDSLDNPDIQAQEDGSFVIDGSANLRELNKSLGWQLPCDGPKTLNGLVTEALEQIPDCAVCLRIGPYCLEIQQSAENRVKSVRAWHPRALTPLVESDASV

SEQ ID NO: 24859 - protein, 311 aa, Carboxydothermus hydrogenoformans Z-2901
MKKEVIVGSRDSALALWQTNWVVERLSKIHPEINFKIVTMKTKGDKILDVALAKIGDKGLFTKELEHALLNKTIDMAVHSMKDLPTVLPEGLKIGAFCEREYPGDVFISPKGFKFLELPQGARIGTSSLRRIAQILAVRPDLQAIPLRGNLPTRFRKMEEMDLDGIILAYAGVKRLGYEDKITEMLSFDLCLPAVGQGSIGVEIRADDTFIEELLKPIDHFATNRAIRAERAFLKRLEGGCQIPIGAYSEVKENRLHLKGVVASLDGKLVIKGEKEGSIEEPEKVGISLAEELLTKGAQKILEEIRRDANE

SEQ ID NO: 24860 - protein, 494 aa, Bacillus cereus ATCC 10987
MSQLAVNLHEKVEKFLQGTKKLYVNGSFIESASGKTFNTPNPATGETLAVVSEAGREDIHKAVVAARMAFDEGPWSRMSTAERSRLMYKLADLMEEHKEELAQLETLDNGKPIRETMAADIPLAIEHMRYYAGWATKIVGQTIPVSGDYFNYTRHEAVGVVGQIIPWNFPLLMAMWKMGAALATGCTIVLKPAEQTPLSALYLAELIEEAGFPKGVINIVPGFGESAGQALVNHPLVDKIAFTGSTPVGKQIMRQASETLKRVTLELGGKSPNIILPDADLSRAIPGALSGVMFNQGQVCSAGSRLFVPKKMYDNVMADLVLYSKKLNQGAGLSPETTIGPLVSEEQQKRVMGYIEKGIEEGAEVLCGGSNPFDRGYFVSPTVFADVNDEMTIAKEEIFGPVISAIPFNDIDEVIERANKSQFGLAAGVWTENVKTAHYVASKVRAGTVWVNCYNVFDAASPFGGFKQSGLGREMGSYALNNYTEVKSVWLNLN

SEQ ID NO: 24861 - protein, 582 aa, Oryza sativa (japonica cultivar-group)
MAASQRQSRLFRSPSTSRDPSTSRISTPRRRRCCRGGGGGSSSLPSPAMSVMPSIRRLLLAGAAVAVVVVSCAVVCAEASVHEYAGERFAGVGNGFVLHGGSEGVYASATAESFVRFEKVAFRRTPEAASVAEEDGNRTVTVAAVIFEAGDRDAVGAVSDVVGGERALCCTPGMARRGGCTEGAVVYRAPASSNATGRWPKVLAASFLPGSLVAAFPDETVAVARTGMYSLHFVHCDASLAAGQVVAAEGKTIWKNSRGYLPGRMAPLKPFYGAMSLAFAALAALWFARYARFWREVSPLQNFATAAIALGMVEVTTWYLDLAEFDASGVRPAGTTFWAATSGAVRAAACRVLALLVAMGYGVTRPALGCGNARVAALGAAFLAAAEVLDVGDNVGIVSDHSPARRLFFILPVAALNTVFIYWIFTSLSRTISKLKARRMTAKLEMYRKFANSLTIAVALSLGWITFEVHFKTTDEHNERWRVAWVIPAVWELISFFLLCTICILWTPSQNSMRFAYSREECEDDTEHNDEDDDVEDTRPLIRAGPLSYVDNWACYVTQDAKIILRTDSGVYAKAGEEYKRV

SEQ ID NO: 24862 - protein, 672 aa, Oryza sativa
MAIPGAYAHAVQALATGILFVVVSLVLDHVEGRHHKCPSFSCGHLKGVSAPFRRAADPPGCGSKSYELVCSDTNATILIDNATYHVNEINYDYRRFWVVDANIAGSTCPLPQWNHLLDQYKRKVSGHRIEIELAPGAYNHAYFVRCSREVKDNGIYRPVTCASSNYSFIYVLLSSDSDNPGYIESLEPSCGYLAMTLLGDWSTTVPRNASYEDVKKFMREGFAIRFPRIYGAGSINECLMDSISELRNGIEPRSSTGTAISDRLIVISIIDLHFWFCLIGYPSGILIAFGMWIVKCIAVLCRFVLVPLAILTFLAHKYWKTRLAIDAVEKFLQMQQVLGPTRYAYTDLTAVTSHFRDKLGQGGYGSVYKGVLLSGDVHVAVKMLNGASTYDGEEFISEVSTIGRIHHVNVVRLVGFCSEELRRALVYEYMPQGSLDKYIFSSERSFSWDKLNEIAIGIARGINYLHQGCDMQILHFDIKPHNILLDDNFVPKVADFGLAKLYPRNKSFVSDRALRGTVGYIAPEMVSRSFGVISSKCDVYSFGMLLLEMAGGRRNADPNTNPNASQSYYPSWVYGQLTGEQVGETSGAADMHELQKKLCLVGLWCIQMKSHDRPTMSETIEMLEGDVNALQVPPRPFFCDGDFMPNVMDSYLHSSELTAISEDDGAIEFASN

SEQ ID NO: 24863 - protein, 368 aa, Lactobacillus delbrueckii subsp. bulgaricus
MNLDKLQNWLQENGMDVAYVSSPTTINYFTGFITDPEERIFKLFAFKDAEPFLFCPALNYEEAKTSAWDGDVVGYLDSEDPWGKIAEEIKQRSKDYQNWAVEKNGLTVAHYQALHAQFPDSDFSKDLSDFIAHIRLFKTESELVKLRKAGEEADFAFQIGFEALRNGVTERAVVSQIEYQLKLQKGVMQTSFDTIVQAGKNAANPHQGPSMNTVQPNELVLFDLGTMHEGYASDSSRTVAYGEPTDKMREIYEVNRTAQQAAIDAAKPGMTASELDGVARKIITDAGYGEYFIHRLGHGIGMEVHEFPSIANGNDVVLEEGMCFSIEPGIYIPGFAGVRIEDCGVLTKDGFKPFTHTSKELKVLPVKE

SEQ ID NO: 24864 - protein, 439 aa, Bacillus cereus ATCC 10987
MAVENITMPQLGESVTEGTISKWLVNVGDHVNKYDPLAEVMTDKVNAEVPSSFTGIVKELIASEGDTLAVGEVVCVIQVEGADEVAATAVEEKTKEEPKAEVATPEKAPKAKQPTDGKPRFSPAVLKLAGEHNVDLDQVEGTGANGRITRKDILKLVESGNIPQAGAAKKEEAVAAVVEARPEAPKAAPVAQKVESAKPVSVPTMPGDIEIPVTGVRKAIAANMLRSKHEAPHAWMMIEVDVTNLVSYRNSIKGDFKKREGFNLTFFAFFVKAVAQALKEYPQINSMWAGDKIVQKKDINLSIAVATEDELFVPVIKHADEKTIKGIAREITELAGKVRTKSLKADEMQGGTFTINNTGSFGSVQSMGIINYPQAAILQVESIVKRPVIMDNGMFGARDMVNLCLSLDHRVLDGLICGKFLGRVKEILENTSENNTSVY

SEQ ID NO: 24865 - protein, 346 aa, Oenococcus oeni PSU-1
MDNEIFDIAIIGAGPAGLFAQFYAGLRELKTALIEATPRIGGQITALYPEKTILDVAGFLGISGRDLVNELKLQTDLVDSKTFLNSEVTNLKKIASHFEIEINHHASFLAKSVIIASGNGSFSPRKIDVPGSSEAEQSGMLTYLLPGLSEVADKDFAVVGGGNTAVDYAVELIDHDCHVSLIHRRDNFRAMESSVTKLKNSRRTNFLTPMKITGLSPKKEKLEIELQSVPDGAVKRVSVDRLIGGFGFTASSRTINQWEEFPEQFNQGFLTNEAQMTSIAGIFAIGDASIYPGKSDLIATAFGEAPTAINQAVNYFDPDRGGPQHSTSLNKKEVFKHDRIKSRYNS

SEQ ID NO: 24866 - protein, 514 aa, Bacillus clausii KSM-K16
MRKINVFDTSLRDGEQMPGIALTVKEKLEIARQLERLGVDIIEAGFPASSPGDFQAVKEIAETVKGSSITGLARAKKSDIDSAWEALKSSAEPRVHVFLATSPIHMEHKLKLTPDQVVERAVESVRYAAEKFPHVQFSAEDANRSEWPFLKRIIEAAIDAGASVINLPDTVGYRTPEEISKLFEFVTENVKNIDRAILSTHNHDDLGMGVANSLAAISAGAGQVECTINGIGERAGNAALEEIAVALQIRSDYYQAKTGLKLSELKRTSALVSRLTSMNVPGNKAVVGANAFAHESGIHQDGMLKNKETYEIITPELVGATSSLPLGKHSGRHAFKTKLNELGFSGSDEKLQTIFSAFKQLCDKKKEVTEDDLYALIADATDDQDSTAYELTALQVTYGMNHVPTATIRLKKQDDREIEEAGTGSGSVEAIYNTLAKMTGGNYSLADYRIQSVNGGEDALAEVHVRIQADDFEQSGRGVAHDVLEASAKAYLHAVNRVIARKHYAKREMAKVES

SEQ ID NO: 24867 - protein, 334 aa, Xylella fastidiosa 9a5c
MSIEQLAETAQAMVASGKGIIAIDESAGTIAKRFSSVGIENIEENRRAYRELLLTTPKLSDYISGAILFDETIRQSTKAGVPFPKYMADHGIIPGIKVDKGAYPLAGCPGELVTEGLDGLRARLEEYYKLGARFAKWRAVINIGDDIPSGMCIDANVHALARYAALCQEQGLVPMVEPEVIMDGNHDISAAYEVTEATLRSLFNALYEQNVVLEGTILKASMVIPGTDCEEQASIDEVAESTVMCLKSTVPAILPGIVFLSGGQTDAQSTAHLNAMNQLDPLPWPLSFSYGRAMQQAALKLWSQDMKGNFAKAQQVVYERAKENGLAALGKWKG

SEQ ID NO: 24868 - protein, 399 aa, Ustilago maydis 521
MACSSTKNAGASGGCANCACASSSKGASVKLPSKNTSKTESTPLLWSTTTTANTENYQAVPQASNRNSTASSSASTLSATHECPSQQHDPSFVCCRDVTAADERTLIDPDFARDCIVGLSDGLTVPFALTAGLSSTGSTKLVVLAGLAELVSGAISMGIGGFLSAQAELSHFAYNLRSTQQKVERSCGTEVERQVHDILKGYGIAPDTSAQIAAELTAKEQARRQAEQLAAIQQNRTSSSRRKLFGIVSIPSSTSTVPAHKRIAADDQESQQLLTDQDLENAGLTPFLLKLGEGLEPVSTSRLYVSALTIGLSYFLGGIIPLLPYMFVQEASRALLLSVIITGVILLVFGVVKQRVTGGEGGFKGYAYGAISTLAVGGVAAGASWLLVGLLEGGSDAKI

SEQ ID NO: 24869 - protein, 964 aa, Prochlorococcus marinus
MRNTKASKFSDRHLGLIEEAQVEILNALGHADINDFISSVVPEEILDAQPPDELLPKALNEIEALEELRSIAKKNQIKRSLIGLGYYGTYTPAVIQRHVFENPAWYTSYTPYQAEIAQGRLEALFNFQTLITELTGLPIANASLLDEGTAAAEAMSLSFAVNKQTKARKFIVDDQVLPQTLAVLKTRAEPLELDIEVVNLTDLVINETVFGLLIQLPGKSGQLWDPSSLIAQAHEFNALVTVAIDPLAQVLIAPMGQLGVDIAIGSSQRFGVPIGFGGPHAAFFAIKEEYKRLVPGRLVGQSIDSKGHSALRLALQTREQHIRRDKATSNICTAQALLATIASFYAVYHGPHGLEEIAKNIIYLRSQLELYLKEFGYTFAPDCRFDTLEIHCLEAPEIHRLSILSGFNLRILPLGASIEKSKGFAVSFDELSTTKELYKLCKIFADVKDKNFEPRENTNFNFKESLTSLPLRTTPWLKQQVFNNYRTETELMRYIQKLASRDFSLVNGMIPLGSCTMKLNATAELLPITWKEFSSIHPFVPSDQAKGYGYLSEQLEGWLCALTGFDGVSLQPNAGSQGEFAGLLVIRAWHKAINQADRNICLIPKSAHGTNPASAVMAGFKVVAVECDEYGNIDFEDLVLKVETYSSELGALMITYPSTHGVFEPNIRQICDQVHLHGGQVYLDGANLNAQVGLCRPGAFGADVCHLNLHKTFCIPHGGGGPGIGPIAVAKHLVAFLPSKNFHASDNNAAIGAISASPLGSASILPISWMYIRMMGADGLRQASSLAILSANYIANKLDPYFQVLFKAPNGKVAHECILDLRSIKRITGIEVDDVAKRLMDYGFHAPTISWPVAGTLMIEPTESESFEEINRFCEAMISIRSEIDAIESGITDLSNNPLRLAPHTMETVTAEIWDRPYTRQQAAFPLKDQFMNKFWPAVSRIDNAFGDRNLVCSCSTLEELSET

SEQ ID NO: 24870 - protein, 455 aa, Yarrowia lipolytica CLIB122
MHIKISTDFAIQNLHCTTMIRPLLRLCGQRTAATPFVSFFRPPKKPLSGISFARHYSPTKKPPSEVPTPTPGNYLVPITGPPGDTPRDTDLLIKSLTHKSLLPENNLVRCTVFDSDGNVTVASGEFKRTELLNKHGLLPRDLRKLDTGVNSIVPTILVRDNSILINLLHIRALIKADKVLLFDVFGSTDSKTQSLFMYDLGHKLKKSNKTMGSLPYEMRALEAIFISVIAALDAEMKVHTTVINGILSELEQDIDREKLRHLLIQSKKLSAFLQKATLIRDVIDELLDTDEDLAGLYLTEKKAGHPRAIDDHSEVEMLLETYYKHCDEIVQTVGNLVSNIRNTEEIVNIILDANRNALMHLDLKFQIGALGLAGGTFIASLYGMNLKNFIEESYWGFLGVTGVASLLTVWIIAHFLKSLRQVQRVTMTSDKKKAMKKKDTVAEKRRNHLRNWLTK

SEQ ID NO: 24871 - protein, 229 aa, Nicotiana langsdorffii x Nicotiana sanderae
MAAFGINSKIFQSMEMAILFLLAISIDRYCFAADEDMLQDVCVADLHSKVKVNGFPCKTNFTAADFSSLAISKPGATNNKFGSVVTTANVEQVPGLNTLGVSLARIDYAPGGINPPHTHPRASEMVFVMEGELDVGFITTANVLVSKKIIKGEVFVFPRGLVHFQKNNGEVPAAVISAFNSQLPGTQSIPITLFGASPPVPDDVLAQTFQINTEDVQQIKSKFAPVKKF

SEQ ID NO: 24872 - protein, 413 aa, Arabidopsis thaliana
  misc_feature (152)..(152): Xaa can be any naturally occurring amino acid
MAVEYVCCSPNFFIHIAVIVFLVLFAGLMSGLTLGLMSLSLVDLEVLAKSGTPEHRKYAAKILPVVKNQHLLLVTLLICNAAAMETLPIFLDGLVTAWGAILISVTLILLFGEIIPQSICSRYGLAIGATVAPFVRVLVFICLPVAWPISKXLFRRAELKTLVDFHGNEAGKGGELTHDETTIIAGALELSEKMVKDAMTPISDIFVIDINAKLDRDLMNLILEKGHSRVPVYYEQPTNIIGLVLVKNLLTINPDEEIPVKNVTIRRIPRVPEILPLYDILNEFQKGLSHMAVVVRQCDKIHPLPSKNGSVKEARVDVDSEGTPTPQERMLRTKRSLQKWKSFPNRASSFKGGSKSKKWSKDNDADILQLNGNPLPKLAEEEEAVGIITMEDVIEELLQEEIFDETDHHFEDS

SEQ ID NO: 24873 - protein, 123 aa, Corynebacterium nephridii
MMFKFALYFLNLEQPYSATIVNTTDENFQADVLDAETPVLVDFWAGWCAPCKAIAPVLEELSNEYAGKVKIVKVDVTSCEDTAVKYNIRNIPALLMFKDGEVVAQQVGAAPRSKLAAFIDQNI

SEQ ID NO: 24874 - protein, 746 aa, Salinibacter ruber DSM 13855
MIQASAVPQKSEIEIDPKYEERLEELLLCCRTHLPTVDENMIRRAFRLSYWAHRNDWRESGEKYVSHPLRVATIVARDIGLDDTSVAAALLHDVVEDTELSLDLIRDEFGDTMATIIDGLTKIEGVFSSQKLGQAENVRKLMLSMASDLRVILVKFADRLHNMRTIEALPKKKQLQKASETQELFAPLAHRFGLFKIKSELEDLSFKVLDPEAYTHIVDRLEEMAEQREAYIAGFIEPLAEHLEEEGFEFDIKGRVKNVYSIHRKMERKNKPIDEIYDIFAIRVILQSGGRKGKEDCWRVYSLVTDLYKPLPERFRDFISVPKSNGYQSLHTTVFGPGGRRVEVQVRTQEMHEVAERGVAAHWKYKEGTENVDEEMERFLEWVRDLLENPEPEEATEFVKEFRLNLYDEEIYVFTPQGDLLTLPQGATPVDFAFKVHTEVGMQCLGAKVNGKMVPLSQELESGDQVEVITSEKQNPSPDWINFVVTHKARSRIRKWTNEERRKAVELGKEIWGKTKDQADLEISDQDLQEVAHELKFPDLQQLFYEIGKGLYDPDELVDYIKGNTQTEEKTVEEFDEESLREQYEQFLDAAQETEKQALVIDGEVQKDLAVNYASCCNPIPGDEVFGFVSKTGTVNIHRSNCRNASDLLVNKADRILDVDWSHQKDVQFVAALRLMGEDRVGMVNDITTVISKNLKTNIRSITIDTEDGIFSGTIMLHVSDLEHLQRLIERLKRIDGIQGVYRFKE

SEQ ID NO: 24875 - protein, 358 aa, Staphylococcus aureus subsp. aureus Mu50
MLRSVYEMTKISKIIDELNNQQADAAWITTPLNVYYFTGYRSEPHERLFALLIKKDGKQVLFCPKMEVEEVKASPFTGEIVGYLDTENPFSLYPQTINKLLIESEHLTVARQKQLISGFNVNSFGDVDLTIKQLRNIKSEDEISKIRKAAELADKCIEIGVSYLKEGVTEREVVNHIEQTIKQYGVNEMSFDTMVLFGDHAASPHGTPGDRRLKSNEYVLFDLGVIYEHYCSDMTRTIKFGEPSKEAQEIYNIVLEAETSAIQAIKPGIPLKDIDHIARNIISEKGYGEYFPHRLGHGLGLQEHEYQDVSSTNSNLLEAGMVITIEPGIYVPGVAGVRIEDDILVTNEGYEVLTHYEK

SEQ ID NO: 24876 - protein, 546 aa, Pseudomonas aeruginosa
MSELIRVPDIGNGEGEVIELLVKPGDKVEADQSLLTLESDKASMEIPSPKAGVVKSIKAKVGDTLKEGDEILELEVEGGEQPAEAKAEAAPAQPEAPKAEAPAPAPSESKPAAPAAASVQDIKVPDIGSAGKANVIEVMVKAGDTVEADQSLITLESDKASMEIPSPASGVVESVSIKVGDEVGTGDLILKLKVEGAAPAAEEQPAAAPAQAAAPAAEQKPAAAVPAPAKADTPAPVGAPSRDGAKVHAGPAVRMLAREFGVELSEVKASGPKGRILKEDVQVFVKEQLQRAKSAVPAPRGAGIPPIPEVDFSKFGEVEEVAMTRLIEVGAANLHRSWLNVPHVTQFDQSDITDMEAFRVAQKAAAEKAGVKLTVLPILLKACAHLLKELPDFNSSLAPSGKALIRKKYVHIGFAVDTPDGLLVPVIRDVDRKSLLQLAAEAADLADKARNKKLSADAMQGACFTISSLGHIGGTGFTPIVNAPEVAILGVSKATMQPVWDGKAFQPRLMLPLSLSYDHRVINGAAAARFTKRLGELLADIRTLLL

SEQ ID NO: 24877 - protein, 317 aa, Comamonas sp. JS46
MLKVKITSKALEARDIVSLELLSLDGAELPAFEPGAHIDLHVLPGVVRQYSLCGSPLLRHGYRVAVLRDPASRGGSAAVHDVLNEGDIVTIGMPTNLFPLAVSPHSLLFAGGIGITPILSMAQRLSRDCASFELHYCARSRERMAFLQEIGNSLAPDQLHLHLDDGSPEQRLDVQDILQRSAPGSHLYVCGPAGYISHVTDTARRLGWDEARIHFEHFGNAAAAHAGGDRPFRICIASSGRIVEVGAQEPATVALARAGLHVPVACEQGICGTCLTRIVEGVPEHRDMYLTEREKAANDQFLPCCSRAAGDLLVVDL

SEQ ID NO: 24878 - protein, 222 aa, Rhodobacter sphaeroides 2.4.1
MNDYSTTRDRVEHYFDRTATHTWERLTSSAPVSRIRQTVREGRDTMRAKMLWRLPKDLTGLRVLDAGCGAGQMTAELAARGAQVMAVDISPQLVEIARKRLPPEHQDRVTFASGDMLADDLGRFDYVVAMDSLIYYTDADIAAALDRLGARTRHSVVFTVAPRTPFLMAFWTMGKLFPRSDRSPVMIPHPFQPLNEATGGRLVKVGRVSRGFYISECLEFRP

SEQ ID NO: 24879 - protein, 423 aa, Corynebacterium ammoniagenes
MNAPLNSAVRLDSIEEAIADIAAGKAVVVVDNEDRENEGDLIFAAELATPELVAFMVRYSSGYICVPLLPEDCKRLNLPPMMGRNEDVRGTAYTVTVDANTGTTGISATSRAETMLRLADPMSVVDDFTRPGHVVPLAARPNGVLERDGHTEAAIDLARLAGLRPAGVLCEIVSEEDPTTMARSEELRRFSDEHDLKMISIEQLIEWRRHNETQVRRTVETQLPTDFGSFTALGYKHEIDGQEHVALIAGGVEELNGAEDVFVRVHSECLTGDVFHSRRCDCGQQLHQSMEIIQEAGQGIIIYLRGHEGRGIGLLAKLKAYSLQDSGLDTVDANLEQGLPEDAREYSVAGQILRDLGIKSANLLTNNPHKGEGLRGFGVEASAHTPVEIEPNADNIDYLRTKRDRMNHDLPQVARWDAAHALK

SEQ ID NO: 24880 - protein, 447 aa, Debaryomyces hansenii CBS767
MAKSSTKSAKADKKQVKSKKQVKKQESSSESSSSSSSESESSSSSESDSDSSDEEKEEEKKVSSDSDSSSDSESEAEVKKEKKDDSSDSDSDSSSSDSDSSDEEEAPKKEAKKDTKKVAKKEVKKEASSSSSSSSSESDSDSSSSSSSSSDSDSDSDSDSEEEEKDSKKRKVEESSEEVEESTEEPVSKKPKTNEEPATLFVGRLSWSIDDEWLRREFEPVGGVISARVIMERSTGKSRGYGYVDFDSKSAAEKALQEYQGKELDGRPINLDMSTGKPHASNPNTDRAKQFGDVPSAPSDTLFVGNLSFNAERDSLFNTFGEYGTVVSCRIPTHPDTQQPKGFGYVQFSSVDEAKAALEALNGEYLDGRACRLDFSTPRDNSNAPRGGFGGNRGGRGDFGGNRGGRGGFGGRGDFGGRGGFGGRERSAPPRSAPNSAEFKGTKKTFD

SEQ ID NO: 24881 - protein, 360 aa, Pseudomonas syringae pv. syringae B728a
MSKQILILPGDGIGPEIMTEAVKVLELANEKYQLGFELTHDVIGGAAIDKHGVPLADETLERARAADAVLLGAVGGPKWDTIERDIRPERGLLKIRSQLGLFGNLRPAILYPQLADASSLKPEIVAGLDIMIVRELTGGIYFGAPRGTRVLDNGERQAYDTLPYSESEIRRIAKVGFDMAMVRGKKLCSVDKANVLASSQLWREIVEQVARDYPEVELSHMYVDNAAMQLVRAPKQFDVIVTDNLFGDILSDQASMLTGSIGMLPSASLDTANKGMYEPCHGSAPDIAGKGIANPLATILSVSMMLRYSFNLTDAADAIEKAVSLVLDQGIRTGDIWSEGKVKVGTQEMGDAVVAALRNL

SEQ ID NO: 24882 - protein, 613 aa, Ruta graveolens
MSAAATSMQSLKFSNRLVPPSRRLSPVPNNVTCNNLPKSAAPVRTVKCCASSWNSTINGAAATTNGASAASNGASTTTTTYVSDATRFIDSSKRANLVPLYRCIFADHLTPVLAYRCLVQEDDKETPSFLFESVEPGRISTVGRYSVVGAHPVMEVIAKDNMVTVMDHEKGSLVEEVVDDPMEIPRRISEDWKPQIIDDLPEAFCGGWVGFFSYDTVRYVEKKKLPFSKAPQDDRNLADMHLGLYNDVIVFDHVEKKVYVIHWVRLNQQSSEEKAYAEGLEHLERLVSRVQDENTPRLAPGSIDLHTGHFGPPLKKSNMTCEEYKMAVLAAKEHIQAGDIFQIVLSQRFERRTFADPFEVYRALRVVNPSPYMTYMQARGCVLVASSPEILTRVKKNKIVNRPLAGTARRGRTTEEDEMLETQLLKDAKQCAEHVMLVDLGRNDVGKVSKSGSVKVEKLMNVERYSHVMHISSTVTGELQDNLSCWDALRAALPVGTVSGAPKVKAMELIDELEVNRRGPYSGGFGGISFTGDMDIALALRTIVFQTGTRYDTMYSYKNATKRRQWVAYLQAGAGIVADSDPDDEHRECQNKAAGLARAIDLAESAFVNKSSS

SEQ ID NO: 24883 - protein, 371 aa, Ralstonia metallidurans CH34
MTFSPEPAHQHGQPPRTAILLINLGTPDAPTPKAVGRYLKAFLSDPRVVEIPRLAWLPILHGLILPFRSRASAMKYESIWLREAHMTGSPLLVYTERQAHALQLLMQQQGHDVTVACAMRYGNPSIESVMEALRRQGTEQILLLPLYPQFSGTTTATAFDEAFRVLSTWRNQPELRLVKHFHDHPAYISALHKQVGGYWAQHGKPDFARGDKLILSFHGLPRRLLDLGDPYHCECLKTGRLLGEALGLQPGQFQVTFQSRFGKAEWLQPYTAPTLAELGKVGTQRVDVFCPGFPADCIETLEEIAMEGQSEFRLAGGQDFHFIPCLNDAEAWIAGLADIALQHLQGWPLNVPHPHELEARRSRAQARGAGA

SEQ ID NO: 24884 - protein, 111 aa, Synechococcus sp. CC9605
MSALAGAVADFTDAGFKREVLKASGTVLVDFWAAWCGPCRLIAPLMDWVASDYGDRVSVGKLEVDANPQTRDAYEVQGIPTLILFRNGEVVARHEGAIAKPQLQSFLDANL

SEQ ID NO: 24885 - protein, 640 aa, Arabidopsis thaliana
MTMMMSDLPNDLVEEILSRVPITSLGAVRSTCKRWNGLSKDRIVCKGDANQQFTGFTRYVNESTVCSMRLDLNEIQNEDVELVELSINKINKFIELELFQVYYSDGLLLLVTDEVDSKLVVWNPYLGQTRLIQCRDTEHFKYRYALGYDNNRNHKILMYNRKNCEIYDFKSDSWRVLDIIPDLHTNIYVRDMSIKGNTYFFYRGEKIGEGLAGCLLSFDFTRERFVSCLPLPFQIAKFDDNVALSSVREEHLVVLFNNWEESEMEIWVTTKIEPNAVSWSNFLTFTHFRIKFLVTSFFIDQEKKLAVVFGRSLSKQMRCNIAYVIGDNGYLRILDFGVTFIPSNLPVSYAPSLVKITQGQELSVIEEKKRSRLLASLVYTSNNLLGLMSWVSFSMQFHMDCGRDSARDHDRERSKNPDFHLKTTMMISDLPEDMVEEILSRVSIISLGALRWNDLSKARVICKAEARQQFAGFMIKGSKEVSNTRLVVWNPYLGKIWSIQHRSAYHSENRYTLGYDNNRKPQNLEEQLAVLLHNWGAFAMEIWVTTNIEPNAKKHAVIFDSSLSCGSVACIIGETGNLRTVDLGVAAVPYRQLPVCSYAPSLEQINQGQELPLIGLTQIFMEQHKYWVSTFLDNLITKYG

SEQ ID NO: 24886 - protein, 356 aa, Desulfitobacterium hafniense Y51
MYDVLIIGAGPAGSSLARLIGDKYKVLLIDKRDLANENPHNLAGKCCGGLLAPDAQKMIAKLGLGIPKDILVNPQLFAVRTIDLTNNLERLYQRFYLNMDREKFDRWLVSILPKKVDKKFNSVFKGFVEIPGGYEIRYIHNGQEISAKTKAIIGADGAFSKLRRFLNQDINSPEKYIAIQEWYECPHHVPYFTAIFDEEISDFYSWIIPKENYLLLGSALKPKEKAREKYELLKTKLTQRGFNFDNKIRTEGAYLYRPKKVSQFYAGRDSIALVGEAAGGISPSSAEGISYALKSSAYLAQSLEEGIDGFLDRYKLKVKGIKLNLLLKNLKSPAMYNPLLRQLAMKSGLQSIDRAE

SEQ ID NO: 24887 - protein, 427 aa, Oryza sativa (japonica cultivar-group)
MLPQQQQQQKQQAAALMPPSMYAMPPPPPLHHHHHPLLAAAPPQQQIEPILTGNLPPGFDTSTCRSVYVGNVHVQVTEALLREVFQSTGLVEGCKLIRKEKSSYGFVDYYDRRSAALSILTLNGKQIFGQLIRVNWAYASGQREDTTDHFNIFVGDLSPEVTDSALFAFFSGYSSCSDARVMWDQKTGRSRGYGFVSFRNQQDAQSAINDLNGQWLGSRQIRCNWATKGASNGEQQTSDSKNVADLTNNLTEDGKEKANEDAPENNPQYRTVYVGNLAHEVTQDVLHRLFHALGAGAIEEVRIQLGKGFGFVRYSNHAEAALAIQMGNGRILGGKPIKCSWGNKPTPPGTTSAPLPPPAAPSVTAADLLEYQRSLALSKMVSSQALMQAQAQQHLKQAMGMGAGVSQAMYDASFPNVGPSQQQLMYY

SEQ ID NO: 24888 - protein, 993 aa, Xylella fastidiosa 9a5c
MFSVSHFCSGSLMMSHTLSSLRDLEYQGAFVERHIGPNDVEIAQMLRVVGYDSLESLTDAIVPEKIRSTVALDLPKGITEEEALAKIRVIANKNRVFRSFIGQGYYGTHTPKVILRNVLENPAWYTAYTPYQAEISQGRMEALINFQTMCADLTGMEIANASLLDEATAAAEAMSLAKRSAKSRSDLFFVHDAVHPQTLELLRTRAEPLGIVLRVGTPEEALQADVFGILLQYPDTFGRIGDHRVLADAVHARGGLVAVASDLLALTLITPPGEWGADIVVGNSQRFGVPFGFGGPHAGFMACRDIYKRSIPGRLIGVSVDAAGHPAYRLALQTREQHIRREKATSNICTAQVLLAVMASMYAVYHGPQGLLRIAWRTHRMAAILAAALRGAGLTVGEYFFDTLHIVGIDAVAIHCAAAAAGMNLRMIDNAQLGISLDETVTRSDVVALGQVFGVQVDVEALDAITADALPAGLLRSSAFLTHPVFNTHHSEHELLRYLRMLADKDLAMDRTMIPLGSCTMKLNATAEMIPVTWQEFACIHPLAPAVQWSGYRQLIDELEAMLAECTGYDAISLQPNSGAQGEYAGLLAIRAYHRSRGEERRNVCLIPESAHGTNPASAQLCGMQVVIIKCDRSGNVDVDDLRMKAEKYSDSLAALMVTYPSTHGVFEEAITEICEIVHAHGGQVYTDGANMNALVGVAKPGRWGSDVSHLNLHKTFCIPHGGGGPGVGPCAVKAHLAPFLPKTLPLPGDAAGLPVQGTQEAKVGMVSAANFGSASILPVSWMYITMMGAAGLRKATQVALLNANYIAKRLAPHYKTLYTGRHGLVAHECILDVRPLEKVSGVSAEDIAKRLIDFGFHAPTLSFPVAGTLMVEPTESESQQELDRFVDAMIQIRGEIAAIEKGHLDPEDNPLKQAPHTAVQVMASQWGHAYSRELAAFPLGVLHHAKYWPPVARVDNVYGDKHVMCACIPVEAYKEKEDSEIQHLIEEDASRC

SEQ ID NO: 24889 - protein, 361 aa, Zea mays
  misc_feature (10)..(10): Xaa can be any naturally occurring amino acid
  misc_feature (29)..(29): Xaa can be any naturally occurring amino acid
  misc_feature (36)..(36): Xaa can be any naturally occurring amino acid
  misc_feature (41)..(41): Xaa can be any naturally occurring amino acid
  misc_feature (46)..(46): Xaa can be any naturally occurring amino acid
  misc_feature (48)..(48): Xaa can be any naturally occurring amino acid
  misc_feature (54)..(54): Xaa can be any naturally occurring amino acid
  misc_feature (66)..(66): Xaa can be any naturally occurring amino acid
  misc_feature (82)..(82): Xaa can be any naturally occurring amino acid
LPGDGIGPEXVAVAKDVLSLAGALEGVEXRFQEKLXGGSAXDATGXPXPDETLXAAKGSDAVLLGXIGGYKWDNNEKHLKPXETGLLQLRAGLGVFANLRPAVVLPQLVDASTLKREVAEGVDIMVVRELTGGIYFGKPRGFGTNDKGDDIGFNTEVYSASEIDRIARVAFEVARKRRGKLCSVDKANVLEASMLWRKKVTALASEFPDIELSHMYVDNAAMQLVRNPKQFDTIVTNNIFGDILSDEASMITGSIGMLPSASVGESGPGLFEPIHGSAPDIAGQDKANPLATILSAAMLLRYGLGEENAARRIEAAVTETLNHGFRTGDIYSPGTTLVGCKRMGEEVLKTVESLKEVAAVN

SEQ ID NO: 24890 - protein, 532 aa, Burkholderia sp. 383
MKSSIQRNIGPFALMLTGLGSIIGSGWLFGAWKAAKIAGPAAICAWIIGAVVILAIALTYAELGAMFPESGGMVRYARYSHGSLVGFISAWANWIAIVSVIPIEAEASIQYMSTWPYPWAHALFVNGELTVPGLLLSAVLVVIYFLLNYWGVKAFARANTTITIFKFLIPGLTILGLMLTSYHPENLGTASNASFAPYGWSAVLTAVATSGIVFAFNGFQSPVNLAGEARNPSRSVPFAVITSILIALVIYVLLQMAYIGSVNPADVAQGWSHFNFKSPFAELAIALNLNWLAILLYVDAFVSPSGTGTTYMATTTRMIYAMERNNTMPKMFGNVHPLYGVPRQAMWFNLFVSFLFLFFFRGWSSLAAVISVATVISYLTGPISLMALRRAATDIKRPLSIPLMKLIAPFAFVCASLILYWAKWPLTGEIILLMIVALPVYFYFQAKSGWTGWGDDLKAAWWLVAYLPTMAVLSLIGSKEFGGHGVLPYGWDMLVVAAIALVFYFWGVNTGYRTKYLDERESHDEILEGIGA

SEQ ID NO: 24891 - protein, 233 aa, Thermoplasma acidophilum
MGLKESKKENLNLNSGWLTLSIILLWVGWFGFNPGSELAFTTETVIVVITTFLAAASAMVSTMLTKFLVSKQDPGLIYAVNGVLMGLIVITPLAGYVSPGSAIILGLISGPIFVSAESIFSKHKWYSDPIGVLPGHMVGGIFGLLMIAFFTQTPFADASGASNLPNGILFGGGIMALHQLGLEAMAVVVVGAFVFTVSYASVYAISLLLNGILRDSEYSPARPANRLAKDTGA

SEQ ID NO: 24892 - protein, 330 aa, Halobacterium sp. NRC-1
MTGDDADETHENVVPGSDEDLDTPDVRGYDFSGEFDFFELLDSYATTGFQASHLADAVDITREMREDDATIYLTLTSNIVSSGLREVVAHLVRENYVDVIITTSGSLTEDIIKTAKPFKMGEWDVDEAALREEGINRLGNIFVPSDRYVWLEEYLYDFFEEFFADQKVRTPTAFARELGATLDDEDSILKNAADNDIPVFCPALTDAEIGNFLYYYRQGYDSEVGIEILDDYDALIEEGLLADTTGLICVGAGVPKHHAIMTNLFRGGADYAVYISTGMEGDGSLSGAPPEEAVSWGKIKDEDAEPNYALIEAEATLVFPLLVAGAFENP

SEQ ID NO: 24893 - protein, 311 aa, Shewanella sp. ANA-3
MFFEGAEKKLEIRLTPKMASLRQREYGFWSTLVACANAEILSTISNPACDAYLLSESSLFVWDDKILLLTCGNSTLVDAACHFINALGVEHIAALCYQRKNEYQAQRQSTSFVDDIAKLRTLIPGKAFRVGHLDSHHHYLFCTDKQTVSSTETCLELMMYHIRGELADYLKLPTQTEQGIYQRLGFQQLFGDFQFDMHCFQPAGFSLNAIRGTDYVTLHITPSLGLGEHSYVSFETNLDLANYSHPVVARLVDLFSPISWDLISFNQPILTAGLPEHLCLGQAEVTTASGGEITFSHYQQLETQVLQPEFM

SEQ ID NO: 24894 - protein, 909 aa, Caulobacter crescentus CB15
MRNPALSIDVDRPTSRHVRQNAHLLSDLLIEAITYLEGEEKAELVAKARKAASREDVVNGDAPLLDHLFSDLTTEQAVFLARAFASHSLLANIGEDVAGRRRHAEADAQPGDERPRTLIDAVKALKAAGKSDAELAKIFAAMNVVPVLTAHPTEVRRRSMVDRETEISRLMALRRHHLPPDLEAEIRESLFREIALMWRTRLYRPERITVKDEIRNALSIVRTSILPAIIDLYGDWTGKIGQHGQLAPLLKMGSWLGGDRDGHPGVNGQTLKLALSSQSRVILDWYAGEVRKLWSNLAVSTAYTPVSDELLALAAQAKDPSVHRIDEPYRLALELIFDRLTAVSQKLTGAPVAFASGVTSVEPYAHPDAFVADLSVIIDSLERNGGERLVGSALRTLVEVAKACGFHLMSLDLRQNADVHERTLDELFRRAGTGVEYLKLDEDARCKVLIDELSHQRPLVSPFTAYGEETSKELATMEAAAQAVRDYGHGCLGAYIISKSATLSDMLEPLVLLKQVGLVWGGAAPRASVKVAPLFETIGDLENGPAVLRQWLELPLSRTILGDRPVQEIMLGYSDSNKDGGYVASRRGVATGASALAHEADRMGVGLQLFHGRGGSVGRGGGPAAEAVLAQPAGTVQGRIRMTEQGEMIARRFGDQPTARRNLDGLAAAVLMASERPIPKRDPKVEGAMTALAQSSFEGYRALVYDDAAFEDFFWSVTPISEIVGLNIGSRPASRTASRKIEDLRAIPWVFSWSQARFMLPGWYGFASGVERAGLSVEQLRDLAGNFDFFASLLSNMELALAQSQMGIAARYVALSPDKANAERIFATIRREHEAATGLALAIRGGAALLDNQPDLAESVALASRSVDPLNHLQLELLSRRRAGDIDEELRLAIQLTVAGIAAGLRNTG

SEQ ID NO: 24895 - protein, 162 aa, Rubrivivax gelatinosus PM1
MGNKLYVGNLAYSVRDDDLQQAFGEFGAVTSAKVMMDRDTGRSKGFGFVEMGSDAEAQAAIEGMNGQSLSGRAIVVNEARPREERPGGFRGPYGGGGAGGGGGYGGGGGGRSGGGGGYGGGGGGYGGGGGGRSGGGGGYGGGGGRSGGGGGYGGGGGGRGGY

SEQ ID NO: 24896 - protein, 304 aa, Moorella thermoacetica ATCC 39073
MVYDLMIIGGGPAGLTAALYGARGGLNTILLEMGAPGGQAGQTDRIENYPGFPDGITGIDLAMKFAEQAQRFGARLEMTTVREVDFSGANKKVITSNGEYEARAVIIASGAHPRPLGVPGEAELRGRGVSYCATCDGAFFRDKKVAVVGGGDSAVEEALFLTRFASQVTIIHRRDALRATRVIQDRARDNPKISFQWNTVVNAIQGKDKVSSLQLKDVRTGALREEPFDGVFIFIGLEPNTDFLGGALTLDPDGYIVTREDLATSIPGVFAAGDVRAKNFRQVSTAVGDGAVAAMAAERYLANL

SEQ ID NO: 24897 - protein, 266 aa, Rhodococcus aetherivorans
MADESTVTEPAAQYERRGGIAVITLNRPRALNAVNAALATAVGTLLEQAEADDDVRVVVLTGAGRAFCAGADLKALATGESIAADGHPEWGFAGYAQHWISKPTIAAVNGFALGGGTELVLASDLAVVDEEAQLGLPEVKRGLFAAAGGVIRLQQQIPRKVALELALTGEPISAAQGKELGLVNRVAPHGTALEMALGLAETIAANAPLSVRESKSMIHRTAHGADWEPGVWEANAAAVKVVFTSDDAKEGPTAFAQKRQPVWKGR

SEQ ID NO: 24898 - protein, 288 aa, Kineococcus radiotolerans SRS30216
MTPAPPPTPSPAPPLRGRTVVVTGASSGIGAAAARRFARAGARVVPVGRDPERTRALAAELGVEPLLVDAARLDDVRRLAGDLLERCDRIDVLANNAGGSSARRTETPDGHETTFQVNHLAPFLLTALLRERIEATPGARVVTTSSAANLLGRVDLDDLDSRRGRYRGFRVYATTKLENVLFTRALSRRLGGTATASCFHPGVVATRFARDSVVAGVLYRTPLRRVLAVTPEEGAEPLWRLAVRPDPETVDGAYLDRLAPGRVNRQADDVELAEQLWVRSAQLVGVPA

SEQ ID NO: 24899 - protein, 542 aa, Corynebacterium efficiens YS-314
MANDITTTAAWQSLTERYEAFQGTTLRELFQDGGRAEKLSFDAAGLRVDLSKNLLDDAILTDLVALAEQAGLTDRIEAMFRGEHINNTEDRAVLHTALRLPVEESLEVDGQDVAADVHEVLGRMRDFATALRSGAWLGYTGRTIKKVVNIGIGGSDLGPAMATKALRAYATAGITAEFVSNVDPADMVSVLEDLDAESTLFVIASKTFTTQETLANANAAKNWLIEQLGSEEAVSKHFVAVSTNAEKVTAFGINPENMFGFWDWVGGRYSVDSAVGLSLMAVIGPRDFMRFLGGFRAMDEHFRYTDFGQNVPVLMALLSVWYTDFFGAETHAVLPYSEDLSRFAAYLQQLTMESNGKSVRRDGSPVTTGTGEIYWGEPGTNGQHAFFQLIHQGTRLIPADFIGFARPKQDLPAGEKSMHDLLMSNFFAQTKVLAFGKTAEEIAAEGVDDNLINHKVMPGNRPTTTILAEELTPAVLGALIALYEHIVFVQGVIWDINSFDQWGVELGKQQASDLAPAVSGEVEVDSGDSSTDALIRWYRTNR

SEQ ID NO: 24900 - protein, 321 aa, Haemophilus influenzae R2866
MIKKIAVLTSGGDAPGMNAAIRGVVRSALAEGLEVFGIYDGYQGLYNNKIKQLNRYSVSDVINRGGTFLGSARFPEFKDPNIRAKCAEILRSHGIDALVVIGGDGSYMGAKLLTEEHSFPCVGLPGTIDNDVAGTDYTIGYQTALQTAVDAIDRLRDTSSSHQRISIVEIMGRHCSDLTISAGIAGGCEYIVASEIEFNREELIQQIERSIIRGKRHAIIAITELLTDVHSLAKEIEARVGHETRATVLGHIQRGGSPCAFDRILASRMGAYAVDLLLQGKGGYCVGIQNEQLVHHDIIDAINNMQRVFKADWLKVAKRLE

SEQ ID NO: 24901 - protein, 954 aa, Bordetella bronchiseptica RB50
MSRAPDTHSDFIPRHIGPSDEDQATMLAAIGAASLDALIDEVVPPRIRSRAPLALPAARSETDVLQDLKRMAARNQIYRNYIGQGYYGTHTPNVVLRNVLENPAWYTAYTPYQPEISQGRLEALLNYQTMVADLTGLDISNASLLDEGTAAAEAMTLARRGSRSSSPVFFVSQHCHPQTLEVVRTRAEGLGIELVIGDESRGLPECFGVLLQYPHSLGGVADYRELAQAAHAQGAVVACVTDLLALALIEPPGQWGADIAVGSAQRFGVPFGFGGPHAGFMSCRDAYKRNMPGRLVGVSKDAQGNPALRLALQTREQHIRREKATSNICTAQVLLAVMAGLYAVWHGPRGVRRIAERVQSLTGALRAALAGLGVKVANDTWFDTLLLETGVATPAILAAADCARINLRQVDGARLAVSLDETVTLADLQALVNVFAAGLGKDEVALPAPQASLDGIPAAVRRQGPILSHPVFSSVQSETDMLRYLRKLADKDLALDRTMIPLGSCTMKLNATAEMIPITWPEFALIHPFAPASQTPGYRELIDGLSAQLCEITGYDGISLQPNSGAQGEYAGLLAIRAYHQANGQPQRNVCLIPASAHGTNPASAQLAGMDVVVVASDANGNVDLADLRARIAQVGERLAALMITYPSTHGVFEEAVTEICDAVHEAGGQVYLDGANMNAMVGVAQPGKFGSDVSHLNLHKTFCIPHGGGGPGVGPVAVRAHLAPYLPGVLDAQGRLDPEAKVGPVSAAPYGSAGILPIPYVYIALMGAEGLRRATEVAILNANYIAARLRDHYPVLYAGRNGRVAHECILDVRPLKETSGISAEDIAKRLMDYGFHAPTMSFPVAGTLMVEPTESEGLAELERFIEAMIAIRAEIAQIESGERDRDDNVLRNAPHTAQMLLAEEWHHDYPRQQAAYPVASLRENKYWPPVARVDNAYGDRNLVCACLPVEAYA

SEQ ID NO: 24902 - protein, 334 aa, non-culturable plant pathogenic bacterial sp.
VLSTRGLAKSRAYDQIDNAPEERERGITIKTSHVEYETEKRHYAHVDCPGHADYVKNMITGAAQMDAAILVVSGADSVMPQTREHILLARQVGVPKIVVFLNKCDLSPDEQILELVEMEVRELLSQYDFPGDDIPVIRGSALKALEGDAHYVAQVNELIETLDTYIEDPVREVDKPFLMPVEDVFTITGRGTVVTGRVERGQVKAGDEVEIVGLKETRKTIVTAVEMFKKDLDFAQAGDNVGALLRGINREDVQRGQVLAKPGSVKPHSKFVAQVYVLTKEEGGRHTAFFSQYRPQFYFRTTDITGVVELQGDVKMVMPGDNAELVVTLNNPIA

SEQ ID NO: 24903 - protein, 286 aa, Staphylococcus aureus subsp. aureus Mu50
MVAKILDGKQIAKDYRQGLQDQVEALKEKGFTPKLSVILVGNDGASQSYVRSKKKAAEKIGMISEIVHLEETATEEEVLNELNRLNNDDSVSGILVQVPLPKQVSEQKILEAINPEKDVDGFHPINIGKLYIDEQTFVPCTPLGIMEILKHADIDLEAKNAVVIGRSHIVGQPVSKLLLQKNASVTILHSRSKDMASYLKDADVIVSAVGKPSLVTKDVVKEGAVIIDVGNTPDENGKLKGDVDYDAVKEIAGAITPVPGGVGPLTITMVLNNTLLAEKMRRGIDS

SEQ ID NO: 24904 - protein, 325 aa, non-culturable plant pathogenic bacterial sp.
GLAKSRAYDQIDNAPEERERGITIKTSHVEYETSKRHYAHVDCPGHADYIKNMITGAAQMDAAILVVSGADSVMPQTREHILLARQVGVPKIVVFLNKCDLCPDEEILELVEMEVRELLSKYDFPGDDTPIIRGSALKALEGDKHYIAQVNELINALDSYIEDPVREVDKPFLMPVEDVFTITGRGTVVTGRVERGQVKAGDEIEIIGLKDTRKTIVTAIEMFKKDLDFAQAGDNVGALLRGINREDVQRGQVLAKPGSVKPHFQFVAQAYILTKEEGGRHTAFFSQYRPQFYFRTTDITGVVELQGDVKMVMPGDNVELTVTLN

SEQ ID NO: 24905 - protein, 406 aa, Carboxydothermus hydrogenoformans Z-2901
MLVVQKYGGSSVANPERIKNVARRVAEYYRAGHRVAVVVSAMGDTTDELLDLMGEISPNPPAREIDMLLSTGEQVSVALLAMALHELGVPARSFTGLQAGIYTDEVHTKARITEIKPERVIACLNSGKVAVVAGFQGVNREGDITTLGRGGSDTTAVALAAALKADICEIYTDVDGVYTADPRIVPDARKIKEISYEEMLELASLGAVVLQPRSVDFARNYKVEVHVRSSFNYNEGTVLKEERDLEKKGVVTGVAHDKNVVKIGVFGVPDQPGVAYRLFSELAAHNINVDMIIQSAGKEEGQNDISFTIGKNDLAKTVEILEDVVKKLSARGYTYDEKVAKVSIVGAGMVTYPGVAAKMFEALYEENINIQMISTSEIKVSCIIAEDAVERAVNAIHKKFELGNGV

SEQ ID NO: 24906 - protein, 598 aa, Debaryomyces hansenii CBS767
MFKQTATLFQKAASAAKPYANMLKDPSQKYKAFKGVALPNRTWPNKTITKAPRWLSTDLRDGNQALPDPMSIPEKKEYFHKLLEIGFKEIEVSFPSASQTDFDFTRYAVENAPDDVSIQVLTQSREPLVRRTVESVKGAKKATIHIYLATSDVFRDIVFDMSKEDAVKKAIETTKLVRSLTKDDPTAQETEWALEFSPECFSDTPTEFAVEICEAVKNAWEPTAENPIIFNLPATVEVASPNIYADQIEYFCKNITEREKICVSVHPHNDRGCGVAAAELGLMAGADRVEGCLFGSGERTGNVDLVTVALNMYTQGVAPNLDFSDLESVIEVTERCNKIQVHPRAPYGGSLVVCAFSGSHQDAIKKGFAKVDERVARGDTKWAIPYLPLDPKDIGRTYEAVIRVNSQSGKGGAAWVILRSLGLDLPRQLQVAFSSVVQERADRLGRELMTEEINDLFKEQYMSHEKSPITLDGFDIPKPASSSSKNNREINVSIHVNDQPVNITGQGNGPISAFIDAISNKFGTLFEVVNYSEHLLGSGSQGKAATYIELSYLNKNGDRVSQWGCGIHSDVSEASIQAILSVVNSLIESKEIPVLYNC

SEQ ID NO: 24907 - protein, 857 aa, Vibrio cholerae O1 biovar eltor str. N16961
MNIRPSQIKHKQRIASFITHAVVVVMGVLIVSVLFQSYQISSRLMAQEGQRTSVQTSSLIQSLFDFRLAALRIHQDSTAKNASLINALVSRDSSRLDEFFSSVDELELSNAPDLRFISSHDNILWDDGNASFYGIAQQELNKLIRRVAISGNWHLVQTPSEGKSVHILMRRSSLIEAGTGQVVGYLYVGIVLNDNFALLENIRSGSNSENLVLAVDTTPLVSTLKGNEPYSLDYVVHSAKDAMRDSFIVGQTFLEVESVPTYLCVYSIQTNQNVLTLRDNFYFWMAFALISMIGVSIASRWWLQKRIQREIETLMNYTHKLMDLDTKSEFIGSKIYEFDYFGRTLEQSFRRLANKEKQFEDLFNFALSPTMLWNTSGRLIRMNPSAQIQFLREDAQNHFLFEILERQLLPTITNAAQGNNPSDVTTEVDGRVYRWNLSPIMVEGQIISIITQGQDITTIAEAEKQSQAARREAEESARVRAEFLAKMSHELRTPLNGVLGVSQLLKRTPLNDEQREHVAVLCSSGEHLLAVLNDILDFSRLEQGKFRIQKNEFRLKELVCAIDRIYRPLCNEKGLELVVNSNITTAAIVRSDQIRINQILFNLLNNAIKFTHQGSIRVELQLIEGDPLAQLVIQVVDTGIGIREQDLTVIFEPFMQAESTTTREYGGSGLGLTIVHSLVEMLSGQLHVSSEYGIGTRFEIQLPIELVEKPDAPQQLLPAPDPQPLFDKTLRVLLVEDNHTNAFIAQAFCRKYGLDVSWVTDGLQAIEELKIHDYDLVLMDNQLPYLDGVETTRTIKKVLHLPVVVYACTADGLEETRQAFFHAGAEYVLVKPLKEQTLHKALEHFKHHHGQKNAGLN

SEQ ID NO: 24908 - protein, 492 aa, Flavobacteria bacterium BBFL7
MTNPPKPNQKNMDIKNFINNNEHIPLSGLWLDNYEPASGLVYGQIPNSNEDDVEKAYQAANAAFKDWSTTSIDERSRIMLRIADLIEENLEELAAAESRDNGKPLWLATAVDIPRASSNFRFYGNAITQYSSDAHETTGKNTMNFTMRKPIGVVGCISPWNLPLYLFSWKIAPAIAAGNCVVAKPSEVTPATAFLLGEIVKKAGLPAGVLNIVHGLGGSCGQAIVAHPGIKAISFTGGTTTGEHIARTAAPMFKKLSLELGGKNPNIIFADCNYDKMLTTTLRSSFANQGQICLCGSRILVEQSLYEKFKTDFVARVQQLKVGHPNQSDTKVGAVVSAAHRDKILDYIAFAKANPKEYTILSGGNSVLIEGHEGGYYLEPTVIEVQSNDCKLNQEEIFGPVVTIIPFKDEAQALELANGTRYGLSATLWTSDLSRTMRMSNELEAGIVWVNTWLNRDLRTPFGGVKDSGVGREGGFEALNFFTEPKNVCIEY

SEQ ID NO: 24909 - protein, 961 aa, Saccharum spontaneum
MASERHHSIDAQLRALAPDKVSEELIQYDALLADRFLDILQDLHGPSLREFVQECYEVSADYEGKKDTSKLGELGTKLTGLAPADAILVASSILHMLNLANLAEEVELAHRRRNSKLKHGDFSDEGSATTESDIEETLKRLVSLGKTPEEVFEALKNQSVDLVFTAHPTQSARRSLLQKNARIRNCLTQLSAKDVTDEDKKELDEALQREIQAAFRTDEIRRAQPTPQDEMRYGMSYIHETVWKGVPKFLRRVDTALKNIGINERLPYNVPLIKFCSWMGGDRDGNPRVTPEVTRDVCLLSRMMAANLYIDQVEDLMFELSMWRCNDELRARAEEVQSTPASKKVTKYYIEFWKQIPPNEPYRVILGAVRDKLYNTRERARHLLATGFSDISVDSVFTNIEEFLEPLELCYKSLCDCGDKAIADGSLLDLLRQVFTFGLSLVKLDIRQESERHTDVIDAITTYLGIGSYRSWPEDKRMEWLVSELKGKRPLLPPDLPMTEEIADVIGAMHVLAELPSDSFGPYIISMCTAPSDVLAVELLQRECGIRQTLPVVPLFERLADLQAAPASVERLFSTDWYFDHIKGKQQVMVGYSDSGKDAGRLSAAWQLYVAQEEMAKVAKKYGVKLTLFHGRGGTVGRGGGPTHLAILSQPPDTINGSIRVTVQGEVIEFMFGEDHLCFQSLQRFTAATLEHGMHPPVSPKPEWRKLMEEMAVVATEEYRSVVVKEPRFVEYFRSATPETEYGKMNIGSRPAKRKPGGGITTLRAIPWIFSWTQTRFHLPVWLGVGAAFKWAIDKDIKNFQKLKEMYNEWPFFRVTLDLLEMVFAKGDPGIAGLYDLLLVADDLKPFGKQLRDKYMETEKLLLQIAGHKDILEGDPYLKQGLRLRNPYITTLNVLQAYTLKRIRDPSFKVTPQPPLSKEFADENKPAGLVKLNPASEYPPGLEDTLILTMKGIAAGMQNTG

SEQ ID NO: 24910 - protein, 293 aa, Anabaena variabilis ATCC 29413
MNLTPDSKVIIQGFHEFISENHIAQMKAYGTNLVAGVQPGYGGQELYHLPVFDLVEEVVGQFGSIDTTIICVHPYQVLDAALEAIASHIRQIIIISAGVPPLDMVELLRKAEAGETLVVGPNSPGIIVPGKILLGTQPSEFYTPGVVGIVSRSSTLTYEVARELTQAGWGQSISVSIGSDAIVGSSFLQWLQILDEDETTEAIVLVGQPGGGSEEAAARYITEAIDKPVIAYIAGRQAPPGKTWRQTGTLATVVGRPPNFGTAQSKITAFEAAEVPVAERPSLIPQLLKKAIH

SEQ ID NO: 24911 - protein, 413 aa, Shigella flexneri 2a str. 301
MSKRRVVVTGLGMLSPVGNTVESTWKALLAGQSGISLIDHFDTSAYATKFAGLVKDFNCEDIISRKEQRKMDAFIQYGIVAGVQAMQDSGLEITEENATRIGAAIGSGIGGLGLIEENHTSLMNGGPRKISPFFVPSTIVNMVAGHLTIMYGLRGPSISIATACTSGVHNIGHAARIIAYGDADVMVAGGAEKASTPLGVGGFGAARALSTRNDNPQAASRPWDKERDGFVLGDGAGMLVLEEYEHAKKRGAKIYAELVGFGMSSDAYHMTSPPENGAGAALAMANALRDAGIEASQIGYVNAHGTSTPAGDKAEAQAVKTIFGEAASRVLVSSTKSMTGHLLGAAGAVESIYSILALRDQAVPPTINLDNPDEGCDLDFVPHEARQVSGMEYTLCNSFGFGGTNGSLIFKKI

SEQ ID NO: 24912 - protein, 336 aa, Carboxydothermus hydrogenoformans Z-2901
MAKKIRIIDSTLRDGMHAVSHQFTPEEMAEIAAGLDAAGIDTIEVSHGDGLGGSSYNYGFAAAKDEDYLKAVSQVLKNSKLGVLLLPGIGTAHDLEMAAKFGAKVVRVATHCTEADIGEQHIKIAKELGMEAIGFLMMSHMVPPEKLVEQAKLFESYGADAVYITDSAGAMTPYDVKVRIEAVKAAVSVPVGFHAHNNLGLAIGNTLAAIEAGATYVDGTARGLGAGAGNSQTEILVAVLAKLGYETGVDLYKIMDVAEEVVAPKMRRPQIVDKAALSLGYAGVYGSFLLHAMRAAEKFKVDVRDILIELGRLKTVGGQEDMIVDVAYELSKANKQ

SEQ ID NO: 24913 - protein, 359 aa, Aspergillus oryzae
MAAARTLRIGLIPGDGIGREVIPAGRKVLESLPASLNLNFSFVNLDAGFDTFKQTGTALPDKTVETLKKECDGALFGAVSSPSTKVAGYSSPIVALRKKLDLYANVRPVKSTIGGGRNPVDLVIVRENTEDLYVKEEQTKDTPNGKVAEAIKRISENASFRISSIAGEIALRRQKIRDAASTTGLRTKPMVTITHKSNVLSQTDGLFRETARKALAAERFSSVEVEEQIVDSMVYKLFRQPEYYDVIVAPNLYGDILSDGAAALVGSLGLVPSANVGDGFAIGEPCHGSAPDIEGQGIANPIATLRSAALMLEFLGEEGAAAKIYTAVDANLDEGKYLSPDMGGKASTQEVLDDVLKRL

SEQ ID NO: 24914 - protein, 213 aa, Pseudananas sagenarius
AVPQSIDWRDYGAVNEVKNQGPCGGCWAFAAIATVEGIYKIRKGNLVYLSEQEVLDCAVSYGCKGGWVNRAYDFIISNNGVTTDENYPYRAYQGTCNANYFPNSAYITGYSYVRRNDESHMMYAVSNQPIAALIDASGDNFQYYKGGVYSGPCGFSLNHAITIIGYGRDSYWIVRNSWGSSWGQGGYVRIRRDVSHSGGVCGIAMSPLFPTLQ

SEQ ID NO: 24915 - protein, 160 aa, Zea mays
MAAPLRRSLPSLGRALLTPPTPAPARMLSAEASDALVEIKPGEIGMVSGIPEEHLRRKVLIYSPARTASQQGSGKVGRWKINFLSTQKWENPLMGWTSTGDPYANVGEAGLTFDSAESAKAFAEKHGWNYVVRKRHAPLLRPKAYAENFKWRGPPKAEQA

SEQ ID NO: 24916 - protein, 311 aa, Picrophilus torridus DSM 9790
MDRNELLKEPVKDISIKSETTISELIGMFGRSGGFTAKKIYEGYEIIKEMFNDDETTFLSFPADIISTGTRGIINELVKRKLVDVIITTNGTLDHDIARTYRDYYAGTFNFSDAMLRDLGINRLGNVFVPDESYGSIIEEKVMPILDELYKEKKEWSGYELIWELGKRINNESSIIYNAYKNRIPVFIPGMTDGSVGSQLWSFYEMNRDFRINLLEDEHKLSDIIFDAKKTGAIMIGGGISKHHTIWWNQFRDGLNQAVYITTAQEYDGSLSGAKLEEAISWKKVREDARFVNIYGDATVILPLIVAPFLK

SEQ ID NO: 24917 - protein, 333 aa, Yarrowia lipolytica CLIB122
MAILTIQKATPREEEDVEMVYSDADSDAEEQMVMSDDENEDMDDNAQAANVAAGLVTPGKLITEDPIWMRGHGTYSVGNKTFSSTAGVVTKTNKLLSVVPLRGRYQPQIGDHVVGRIVDVGVKRWRVDIGAKQLAVLQLGSVNLPGGILRRKQESDELQMRGFLKEGDLINTEVQSLYQDGSAALHTRSLRYGKLRNGVLITVPSALIVRAKSHVHQLPGGVDTVVGVNGWIWLCMAWANSHLTRENTTSITRLEEEASLTETYSDKNEDIPRSVRENIARYANCFKALAANEVGITEDRVIAAYEASLVYPSAGDLIDKEAKEIIAAKAIAA

SEQ ID NO: 24918 - protein, 141 aa, Frankia sp. EAN1pec
MRPMETRVVTDLGWAHPAKARPLMSIYDAIGGASAVQAAVDEFYVRVTADPELAPFFAGKDIPRLKAHQQAFISAAIGGPEVYQGGAIASVHSGLRITDANFNAVVDHLVSALSGLGVPAETTGQIGAALAPLRADIVTAK

SEQ ID NO: 24919 - protein, 440 aa, Burkholderia xenovorans LB400
MSSQQQAAQLAQSAATLHSVPSYLNKDDLGPWGNYLRQVDRVAPYLGSLSRWLETLKRPKRILIVDVPIELDNGTVAHFEGYRVQHNVSRGPGKGGVRYHQDVTLSEVMALSAWMSVKNAAVNVPYGGAKGGIRVDPRTLSRGELERVTRRYTSEIGIIIGPNTDIPAPDVNTNEQIMAWMMDTYSMNQGQTATGVVTGKPITLGGSLGRREATGRGVFVVASEAARRIGVDIEGARIAVQGFGNVGGIAARLFQEAGSKLVAVQDHTGSLYKSTGIDAVALLEHVAKHGGVGGFPEADAVSNEEFWTVESDILIPAALENQITEKNAAKIRTKIVVEGANGPTTTAADDILHDRGILVIPDVVANAGGVTVSYFEWVQDFSSFFWTEDEINQRLERVMREAFAAVWQVSSEQKVSVRTAAFIVACKRILEARELRGLYP

SEQ ID NO: 24920 - protein, 856 aa, Erwinia carotovora subsp. atroseptica SCRI1043
MNKVRLAVIGNGMVGHRFIEELLDKAPTSTYDITVFCEEPRVAYDRVHLSSYFAHHTVEELSLVREGYYEKNGVKILLGERAITINRSEKAIHSNSGRTVYYDKLIMATGSYPWIPSIKGSNGQDCFVYRTIEDLNAIENCARRSKRGAVIGGGLLGLEAAGALKHLGVETHVIEFAPVLMAEQLDAQGGALLQRKIENMGVRVHTGKNTQAIQHSGLENRKTMVFADGSTLEVDFIVFSTGIRAQDKLARQCALEIGPRGGIAINDWCQTSDPDVYAIGECAAWQGRPFGLVAPGYKMAQVTVDHLLGHENRFQGADMSAKLKLMGVDVGGIGDAHGHTPGARSYMWLDENKETYKRLIVSADNKTLLGAVLVGDTRDYGNLLQFMLNKIPLPDSPEALILPATAGSAKPTLGVDALPESAQICSCFDVSKGDIIKAINGGCHTVAALKETTKAGTGCGGCIPLLTQVLNAELSKQGIEVNNHLCEHFAYSRQELYHLIQIEKIKTFDQLLEKHGSGYGCEVCKPTVASLLASCWNEYVLKPQHTPLQDSNDNFLGNIQKDGTYSVIPRSAGGEITPDGLIAIGRIAKQYNLYTKMTGSQRMALFGVQKDDLPDVWAQLIEAGFETGHAYAKALRMAKTCVGSTWCRFGVGDSVGFGVELENRYKGIRTPHKMKFGVSGCTRECAEAQGKDVGIIATEKGWNLYVCGNGGMKPRHADLLEADLDRETLVRYLDRFMMFYIRTADKLQRTSVWLDNLEGGIDYLRNVIVKDKLGINDQLEADIARLREGYVCEWQATLESPEAQKRFTHFINSPERDPNVQMVDERQQHRPARPAERIPVKLIDQIKNSELEGENA

SEQ ID NO: 24921 - protein, 107 aa, Aspergillus oryzae
MAEVTPLNSLSEFQTLINSGQVVIIDFWAPWCGPCRMISPVFERLASDPQYSSIKFVKVDVDDQPEISQECGIRAMPTFMVFKDGAKLDEFMGAHPNGLHDLVQKYV

SEQ ID NO: 24922 - protein, 236 aa, Saccharomyces cerevisiae
MRLNISYPVNGSQKTFEIDDEHRIRVFFDKRIGQEVDGEAVGDEFKGYVFKISGGNDKQGFPMKQGVLLPTRIKLLLTKNVSCYRPRRDGERKRKSVRGAIVGPDLAVLALVIVKKGEQELEGLTDTTVPKRLGPKRANNIRKFFGLSKEDDVRDFVIRREVTKGEKTYTKAPKIQRLVTPQRLQRKRHQRALKVRNAQAQREAAAEYAQLLAKRLSERKAEKAEIRKRRASSLKA

SEQ ID NO: 24923 - protein, 604 aa, Burkholderia sp. 383
MNARLPEVSPVPARLALLRGAMAREDLAAYLVPSADPHLSEYLPERWQARRWLSGFTGSVGTLVVTADFAGLWVDSRYWVQADAELAGTGVQLMKMTGGQQSAPHVDWLAQNVVAGATVGVDGAVLGVAAARGLTSALNARGIALRTDLDLLDAIWPERPGLPGDAVFEHTAPQADTTRASKLAEVRRAMHAQGAQWHFVSTLDDLAWLFNLRGADVNFNPVFVAHAMIGADRATLFVADGKVSPALAASLAKDGVDVRAYDAARAALAALPDGATLLIDPRRVTFGTLEAVPAGVKLVEAVNPSTFAKSRKTSAEIEHVRVTMEHDGAALAEFFTWFEQAVNRETITELTIEEKLTAARARRPGYVSASFATIAGFNANGAMPHYHATPESHATIAGDGLLLIDSGGQYVTGTTDITRVVPVGTVSDLQRRDFTIVLKSMMALSRARFPRGIRSPMLDAIARAPMWAAGLDYGHGTGHGVGYFLNVHEGPQVISHYAPAEPHTAMEEGMITSIEPGVYRPGQWGIRIENLVVNRAAGQTEFGDFLAFETLTLCPIDTRCVLIEMLHDDERAWLNTYHATVRERVGRHLSGDAKAWLDARTQPI

SEQ ID NO: 24924 - protein, 214 aa, Brassica napus
  misc_feature (200)..(200): Xaa can be any naturally occurring amino acid
  misc_feature (208)..(208): Xaa can be any naturally occurring amino acid
MTSFSAFSEMMGSENESPALSGEYCPTLAASCPKKPAGRKKFRETRHPIYRGVRQRHSGKWVCEVREPNKKSRIWLGTFLTAEIAARAHDVAAIALRGKSACLNFADSAWRLRIPETTCPKDIQKAAAEAAVAFQAEINDTTTDHGLDVEETIVEAIFTEENNDGFYMDEEESMFGMPSLLASMAEGMLLPPPSVRFEHXYDFDGDAXVSLWSY

SEQ ID NO: 24925 - protein, 571 aa, Medicago truncatula
MVLSKVVTIFVAVLSISLLLINNGVEAFHKVYPHLQSVSAISVSEVHRTGYHFQPPRNWINGPMYYNGYYHLFYQYNPKGSVWGNIVWAHSVSKDLINWKALEPAIYPSKPFDKYGCWSGSATIVPGKGPVILYTGIIDEKNTQVQVYAIPEDPTDPLLRKWIKPDAINPIVIAGQGVNGSAFRDPTTAWMGKDGRWRMLVGSRRKHRGMAYLYRSRDFVKWVRAKHPIHSKTTTGMWECPDFYPVSLKGKVGLDTSIEGNHVKHVLKNSLDMTRFEYYTLGTYLTDKDKYIPSNTSEDGWGGLRYDYGNFYASKSFFDQSKNRRILWGWANESDSQDDDVKKGWAGIQAIPRTVWLDPTERQLVQWPVEELNVLREKEVSMNNQKLEKGNHVEVAGITAAQADVEVTFSFSSLDKAEAYDPSWVNAQDLCSQKGSKVQGGVGPFGLLTLASENLAEFTPVFFRVFKAPSKHVVLLCSDATSSSLTSNLYKPSFAGFVDVDFATKKLSLRSLIDHSVVESFGEGGKTNILSRVYPVLAVANQANLFVFNNGTEPIIVENLKAWSMKSAELI

SEQ ID NO: 24926 - protein, 589 aa, Arabidopsis thaliana
MLVAGNALNCLFIDSSGFQRYLGFGVTNLNGATVKSYKQEGFVIDERGKLKRFNRKKLSRKRCGSLRGRGWKYGSGFVDGIFPVLSPIAQKILSFIQKETDPDKVADVLGALPSTHASWDDLINVSVQLRLNKKWDSIILVCEWILRKSSFQPDVICFNLLIDAYGQKFQYKEAESLYVQLLESRYVPTEDTYALLIKAYCMAGLIERAEVVLVEMQNHHVSPIGVTVYNAYIEGLMKRKGNTEEAIDVFQRMKRDRCKPTTETYNLMINLYGKASKSYMSWKLYCEMRSHQCKPNICTYTALVNAFAREGLCEKAEEIFEQLQEDGLEPDVYVYNALMESYSRAGYPYGAAEIFSLMQHMGCEPDRASYNIMVDAYGRAGLHSDAEAVFEEMKRLGIAPTMKSHMLLLSAYSKARDVTKCEAIVKEMSENGVEPDTFVLNSMLNLYGRLGQFTKMEKILAEMENGPCTADISTYNILINIYGKAGFLERIEELFVELKEKNFRPDVVTWTSRIGAYSRKKLYVKCLEVFEEMIDSGCAPDGGTAKVLLSACSSEEQVEQVTSVLRTMHKGVTVSSLVPKLMAKSLTVN

SEQ ID NO: 24927 - protein, 214 aa, Brassica napus
  misc_feature (54)..(54): Xaa can be any naturally occurring amino acid
MTSFSTFSEMLGSEYESPVTLGGEYCPKLAASCPKKPAGRKKFRETRHPVYRGXRLRNSGKWVCEVREPNKKSRIWLGTFLTAEIAARAHDVAAIALRGKSACLNFADSAWRLRIPETTCPKEIQKAAAEAALAFQAEINNTTTDHGLDMEETIVEAIFTEENNDVFYMDEESMLEMPALLASMAEGMLLPPPSVHFGHNYDFDGDADVSLWSY

SEQ ID NO: 24928 - protein, 580 aa, Bradyrhizobium sp. BTAi1
MSDGAAIWADAMIAAALAAIDPAAASVMLRAGAGPVREQWLELLRELTPATTVLRKLPPSISDDRLLGGLDLAATLQAGRPVMQRGLLAELHDGMLIAVMAERIAPSTVAHLTAALDTGMISIERDGLSLRAPARFGLIALDEGIGDEHVSPALADRLACHLDLGMVARADLGESLFTSSDIAAARALLPQVGLSDEAIAALTTTACALGIDSLRAPLLACRIARIAAALDGATDVAESHIACAARLVLAPRATRLPAADDETETNEAPEPENDPAENEEDDRSEDGPLEDRVLEAAQAAIPADLLKRLQEERATRLRSSSASKQGTTQKAPKRGRPIGARRGEWRAGARLNVLETLRAAAPWQPLRRAQRSGKSGRLIVHKDDIRLTRFKQRSGTTTIFVVDASGSSALQRLAEVKGAVELLLAECYIRRDEVALIAFRGKGAELLLPPTRSLTRAKRSLAALPGGGGTPLSAAIFAATELALAVKAKGQAPTIVLMTDGRANVARDGVGGRSEAEAEALVAARQLALTGIPVVLVDSSPRPQDKAAQLAGAMQARYVALPHADAARLSQAVMAEASRG

SEQ ID NO: 24929 - protein, 364 aa, Medicago truncatula
MAAITSGYDRVKAVKEFDESKMGVKGLSDSGIKTIPQIFIHPQQTLSDIKSTSKQTTSIPLIDLSNVASPNHRPNIIKQIKEAAKTWGFFQIINHNVNVSSLDNTINAIESFHNQPHETKSKYYKRDEGRGVMYASNNDLYRTNAASWHDSLQAWMAPEAPKAEELPEICRKEMVEWDFHAAGVAEVVFELLSEGLGLERGKLKELSFCETRVIVGHCYPYCPQPDLTMGITPHTDPCAITLLLQNQVPGLQVKYEGEWVDVNPVQGGIIVNIGDFLQIISNGEYSSVQHRVLANSNKKSRISIVMFLNLSKWRGEGYHGPLPELLSPEKPPVYRDFTTQEFIENFYSKGIDAKSFVDKVKIQN

SEQ ID NO: 24930 - protein, 360 aa, Pseudomonas putida KT2440
MSKQILILPGDGIGPEIMAEAVKVLELANDKFQLGFSLAHDVIGGAAIDKHGVPLADETLERARKADAVLLGAVGGPKWDKIERDIRPERGLLKIRSQLGLFANLRPAILYPQLADASSLKPEIVSGLDILIVRELTGGIYFGAPRGQRELEGGERQAYDTLPYSESEVRRIARVGFDMARVRGKKLCSVDKANVLASSQLWREVVEDVAKDYPDVELSHMYVDNAAMQLVRAPKQFDVMVTDNMFGDILSDEASMLTGSIGMLPSASLDADNKGMYEPCHGSAPDIAGLGIANPLATILSVSMMLRYSFNQSAAAEAIEKAVSLVLDQGLRTGDIFSEGCRKVGTQEMGDAVVAALRNL

SEQ ID NO: 24931 - protein, 104 aa, Bacillus clausii KSM-K16
MAIVNATDQNFTEETKEGLVLVDFWAPWCGPCKMIAPVLEELDGDLGDKAKIVKVDVDENQETAGKFGVMSIPTLLVLKDGEVVDKAVGFQPKEALEELLNKQM

SEQ ID NO: 24932 - protein, 503 aa, Xanthomonas campestris pv. campestris str. ATCC 33913
MDPQPAGGSTMHALPSIATPTTATPAWHGCIFNGDWVPGSGGTLQIHEPATGGLLHEVGKADLSDVEAAIAQAKHAQRAWAITSPRERAAVFHRAAQLMEAHRAEATLLIARETGGIMPKAEREVSEAIAYYQQAAGLPLQAMGQVLPTAAGQLSLARHLPLGIIAVISPFNFPLILSLRSVAPALAMGNAVILKPDPRTPYTGGVIIAQVLEEAGLPKGLLHVLHGGADIGQALVEAPDVPMIAFTGSTAAGRRIGELAGRHLKKVALELGGNNAVIVLDDADLERAASAIAFGAYLHQGQICMATGRVLVQRGVADALTKLLADKARHLPVGDPVSGTVALGPIIGQRQLQRVLDIVDDSIDAGAVVEAGATHDGLFYAATVLSNVRPGMRVFDEEVFGPVINITVFDTDEEAAVLANHGEYGLVAGIMSASVSRAMVLGEQLHTGLLHINDQTVADEVINPFGGTGASGNGTSVGGPADWEQYMHWQWLTIKHAVPQYPF

SEQ ID NO: 24933 - protein, 521 aa, Frankia sp. EAN1pec
MAGGPLSQMAQPTVLFERNTSLSDVTIRHWVDGQPFNGTGTRWAEVTNPATGHVTGRVALASSKDADHVIAVAARAAGSWSRTSLAQRTRILFAFRELLDSRRDELAAIITAEHGKLPSDALGEIARGQEVVEFACGVSHLLKGGHSESVSTGVDVHSKRDPLGVVGIISPFNFPAMVPMWFFPLAIATGNTVVLKPSEKDPTAALWIADLWKQAGLPDGIFNVLQGDKEAVDALIESPVVQSISFVGSTPVAQYVYEASSRHGKRVQALGGAKNHMIVLPDADLDLAADAAVNAGYGSAGQRCMAVSVLVAVGEIADDLVARIADRTRTLVVGDGAEADMGPLITRAHRDRVASFVDAGEQDGAAIEVDGRDVQKGGIQDGFWLGPTLLDHVTPAMKVYQEEIFGPVLCVVRVNTYDEAVVLVNGNPYGNGAALFTNDGGAARRFEADVQVGMIGVNIPVPVPVAYYSFGGWKQSLMGDTHAHGTEGVQFFTRGKVVTTRWIDPANRPQGGLELGFPRNV

SEQ ID NO: 24934 - protein, 131 aa, Arabidopsis thaliana
  misc_feature (47)..(47): Xaa can be any naturally occurring amino acid
GILSSGPDQRVRKKQEEVWVSFLSSSTVGVTSRVKATMVVPLTGWKXSVFFRATRRANNDITSITGNGGGVSCMKGGPPIGKKKLGTLFYLPDLRDVEWAKEVDYLFRTRGIPGVEFKWKHGFVYRKHGNT

SEQ ID NO: 24935 - protein, 256 aa, Bacillus clausii KSM-K16
MENITWKVTDGIAEIGLKRPPANALARSVIEELSEVFENVYNDDAIKVAIIYGEGRFFAAGADIKEFTEVGDSEEFAQLGKKGQDTFNKIEAAPKPVIAAIHGAALGGGLELAMACHIRLAAPETKLGLPELNLGLIPGFGGTQRLPRLVGQPKALEMMLTSAPITAEEALNVGLVNKVCDEDHLLEEARAMARTIAAKSPLTVKRVLELTKMSEGALKEGLDKEIAYFSEVYQKEDRIEGVNAFIEKRKPVFRGK

SEQ ID NO: 24936 - protein, 250 aa, Brassica napus
MNSVSTFSELLGSENESPVGSDYCPMLAASCPKKPAGRKKFRETRHPIYRGVRLRKSGKWVCEVREPNKKSRIWLGTFKTAEIAARAHDVAALALRGRGACLNFADSAWRLRIPETTCAKDIQKAAAEAALAFEAEKSDTTTNDHGMNMASQVEVNDTTDHDLDMEETIVEAVFREEQREGFYMAEETTVVGVVPEEQMSKGFYMDEEWMFGMPTLLADMAAGMLLPLPSVQWGHNDDFEGVADINLWSY

SEQ ID NO: 24937 - protein, 211 aa, Triticum aestivum
  misc_feature (188)..(188): Xaa can be any naturally occurring amino acid
  misc_feature (193)..(193): Xaa can be any naturally occurring amino acid
  misc_feature (203)..(203): Xaa can be any naturally occurring amino acid
MGSHGKPPLPYAYKPLPSGAAAADADGERTGWTRWRVCATVLTASAMVVVVVGATLLAGFRVDQAVDEEAAGGFPWSNEMLQWQRSGYHFQTAKNYMSDPNGLMYYRGWYHMFFQYNPVGTDWDDGMEWGHAVSRNLVTWRTLPIAMVADQWYDILGVLSGSMTVLPNGTVIMIYTGGTHASAIEVRXSGTPXDPNDPFLRRXWTKHPGEP

SEQ ID NO: 24938 - protein, 473 aa, Arabidopsis thaliana
MSSSVPNSDRKIVTGPAGYILEDVPHFSDDFPDHPTYPNPLQDNAAYSVVKQYFVDEDDTVPQKIVVHPDSPRGTHFRRAGPRQRVYFESDDVLACIVTCGGLCPGLNTVIREIVCGLSYMYGVKRILGIDGGYRGFYARNTIHLDLKTVNDIHRSGGTILGTSRGGHNTTKIVDSIQDRGINQVYIIGGDGSQKGAAAIFEEIRKRKLKVAVAGIPKTIDNDIPIIDRSFGFDTAVEEAQRAINAAHVEATSFENGIGLVKLMGRYSGFIAMHATLASRDVDCCLIPESPFFLEGSGGLFEFIDKRLKESGHMVIVIAEGAGQDLLSESMKESTTLKDASGNKLLQDIGLWISQRIKDHFAKKMTLTLKYIDPTYMIRAVPSNASDNVCCTLLAQSAVHGVMAGYNGFTVGLVNGRHTYIPFNRITEKQNKVVITDRMWARLLSSTNQPSFMKQADKIHSNQLVGEPGTMKW

SEQ ID NO: 24939 - protein, 399 aa, Zea mays
  misc_feature (139)..(139): Xaa can be any naturally occurring amino acid
MAAVEQKDEKRWAHISESIDLLFTRLGDVTRVQEQIQVNQELGAKAMDQVLKDQSLLAQQIAATGKAVAHLSMEREVEADLETYSRDSRDARPPFHRRQPRPFPQPQGMATGSEASKAAETVVDWHKQDSKRMLHAVYXRVGDLDRTIKYYTECFGMKLLRKRDVPDEKYTNAFLGFGPENTNFAVELTYNYGVDKYDIGTGFGHFAIANDDVYKLAENIKSKGGKITREPGPVKGGSTVIAFAQDPDGYMFELIQRADTPEPLCQVMLRVGDLERSIKFYEKALGMKLLRKKDVPDYKYTIAMLGYADEDKTTVLELTYNYGVTEYSKGNAYAQVAIGTNDVYKSAEAVDLATKELGGKILRQPGPLPGINTKIASFVDPDGWKVVLVDNTDFLKELQ

SEQ ID NO: 24940 - protein, 540 aa, Mesorhizobium loti MAFF303099
MTMTRERLYLFDTTLRDGQQTPGIDFSVEDKIAIAKLLDEFGMDYVEGGYPGANPTDTAFFQQKRTASAKFVAFGMTKRAGVSASNDPGLAALVQSKSDAICFVAKSWDYHVRVALGCTNEENLESIKTSVETAVASGKEAMVDCEHFFDGFKANPDYALACAKTAYDAGARWVVLCDTNGGTQPSEVRTIVAKVIASSIPGDHLGIHAHDDTGQAVANSLAAVEAGVRQIQGTLNGIGERCGNANLISIVPTLALKPAFADRFVSGISAEALTGISRLSRAFDELLNRAPEAQAPYVGASAFATKAGIHASALAKEPATYEHVPPESVGNRRRVMVSDQGGKANFLAELKRRGIEVPRDDHRLDALISVVKEREAEGYAYEGADASFELLARKMLHGLPEFFNVTSFRCMVERRFDANGNLKTVSEAIVKVEVDGEEKMSVAEGHGPVNALDIALRKDLGKYQSEIVDLELADFKVRILNGGTEAITRVLIESHDGTGARWWTVGVSENIIDASFQALMDSIIYKLMKNREMAGLVAAE

SEQ ID NO: 24941 - protein, 106 aa, Carboxydothermus hydrogenoformans Z-2901
MGIITLTDENFETEALKREGLIIVDFWAEWCGPCRMIAPILEEIAQEYEGKLTVGKLDVDSNPETPRRYGIMSIPTLLFIKNGEEVGRTVGFKHKNELMKIIIKNL

SEQ ID NO: 24942 - protein, 327 aa, Xanthomonas campestris pv. campestris str. ATCC 33913
MRKDTHWHHARVVSVADACQGVREIVLDPGANTRSFEVGSHLDFRLQLHGREDVRSYSLVGEPRADGYYQVAVRQMPESRGGSRHMWTLAPGDVVEISPPSNNFALDEAGEEILLIAGGIGVTPIVGMAQRLARRHQAFRMLYVGRARDTMAYVDTLEALLGARLQVHCDDQAGPPDLAAELATLSPNAEVYVCGPLGMLEAVRQQWHAAGRPRARLHFETFGNSGRVPAQAFVVKLPGLGMEVQVAENVSMLDALADAGVELIAECRRGECGLCAVDVLDTAADIDHRDVFFSDAQRSENRKLCACVSRAVGGSISIDTGYRAGSD

SEQ ID NO: 24943 - protein, 410 aa, Triticum aestivum
AYLGDTIEQVCTKKQAGTGPEFPGYRRPTRPDESRENEGDLILAASLVTPEAMAFIVRHSTGIVCVSMKENDLERLNLPLMVSTKENEEKLCTAFTITVDAKEGTTTGVSAKDRAKTVMTLASPYSKPEDFNRPGHIFPLKYRDGGVLKRAGHTEASVDLAVLAGLPPVGVLCEIVDEDGSMARLPKLRLFAEKNNLKIVSIADLIRYRRKRDRLIERASVARIPLRWGNVRAYCYRSVIDGIEHIAMVKGEIGDGQDILVRVHSECLTGDIFGSARCDCGDQLAMSMERIEKAGRGVLVYLRGHEGRGIGLGHKLRAYNLQDDGRDTVEANEELGLPVDSREYGIGAQILRDLGVRSMKLMTNNPAKYVGLKGYGLSIVGRVPLVTPITTENQRYLETKRTKMGHVYSN

SEQ ID NO: 24944 - protein, 497 aa, Bordetella bronchiseptica RB50
MKTIPHFINGQPYEGRNGRYTQGFNPATGEVSSSIPLASAQDVDTAVAAAAAAFPAWSETPPLKRARILFKFKALLDEHQDELAALITAEHGKVFSDAKGEVTRGIEVVEFACGIPHLLKGQYTDQIGGGIDNWSMRQPLGVVAGITPFNFPMMVPCWMFPVALACGNTFVLKPSERDPSAALRLAELLKEAGLPDGVFNVVQGDKQAVDALIAHPQVEALSFVGSTPIAEYIYAEGTRRGKRVQALGGAKNHMVVMPDADLDQVTDALMGAAYGSAGERCMAISVAVAVGEVADEVVARLAPRVRALVVKDGMQADAEMGPLVTAQHRAKVTGYIEDGQACGATLVVDGRGLQVPGNEGGFFLGGTLFDHVTPAMNIYREEIFGPVLCIVRVPDFAAAVELINAHEFGNGVSCFTSDGGIARAFARQIKVGMVGINVPIPVPMAWHSFGGWKRSLFGDHHAYGEEGVRFYSRYKSVMQRWPDSIGKGAEFTMPVAK

SEQ ID NO: 24945 - protein, 224 aa, Lycopersicon esculentum
MAVFRKMFPLIMVIMTLLAINSDKACAGDPDMLQDVCVADLTSTLKLNGFTCKNMFSAADFSSMVISKPGATNNMFGSLVTGANVMAIPGLNTLGVSMARIDYAPGGINPPHLHPRATEMIYVLQGELDVGFITTANVLVSKHIVQGEVFVFPRGLVHFQKNNGHMPAAVIAGFNSQLAGTQSIATTLFAATPAPGVPNDILAQAFQIGTMQVQQIKAKFAPRN

SEQ ID NO: 24946 - protein, 483 aa, Arabidopsis thaliana
MTMMMSDLPNDLVEEILSRVPITSLGAVRSTCKRWNGLSKDRIVCKGDANQQFTGFTRYVNESTVCSMRLDLNEIQNEDVELVELSINKINKFIELELFQVYYSDGLLLLVTDEVDSKIVVWNPYLGQTRLIQCRDTEHFKYRYALGYDNNRNHKILMYNRKNCEIYDFKSDSWKVLDIIPDLHTNIYVRDMSIKGNTYFFYRGEKIGEGLAGCLLSFDFTRERFVSCLPLPFQIAKFDDNVALSSVREEHLVVLFNNWEESEMEIWVTTKIEPNAVSWSNFLTFTHFRIKFLVTSFFIDQEKKLAVVFGRSLSKQMRCNIAYVIGDNGYLRILDFGVTFIPSNLPVSYAPSLVKITQGQELSVIEEKKRSRLLASLVYIGSFFIDQEKKHAVIFDSSLSCGSVACIIGETGNLRTVDLGVAAVPYRQLPVCSYAPSLEQINQGQELPLIGQKKISRLSTSLIYIMLFVSFITFILFFDSVFF

SEQ ID NO: 24947 - protein, 340 aa, Triticum aestivum
MGGGGGGGGGGAEEELTAQETALYDRQIRVWGVDAQKRLSKAHVLVCGVNGTTIEFCKNIVLAGVGSLSLMDDHMVTEDDLNSNFLIPHDESVYGGKSRAEVCCESLKDFNPMVRVAVAKGNPSLIDGTFIDMFDIIVVSCASLKTKLFINDNCRKRSKHIAFYSVECKDSCGEIFVDLQDHSYLQKKPGGEPEQQELKYPSLQEAISVPWKDLSKRTTKLYYAMRVLESYESSEGRDPGETSLSDLPAVLARRKDMCDRMSVDESKIPTSLLERLLAAGKKEHPPVCAILGGILGQEVIKSISCKGDPIKNFFYFDDADGKGAMGGTSPQLLKTKSRDT

SEQ ID NO: 24948 - protein, 509 aa, Arabidopsis thaliana
MMDSALYHPRIFFAHSFINGLYSSPRFANTCWRLVSRSSWEIKASENSDRNVFDENPVRKTDGSLFDSASFETVDAEITPETDDFFVSDAEGDPDCPTQGYSSIELALQALRKGKFVIVVDDETGDVEGNLIMAATLTSPKDIAFLIKNGSGIVSVGMKKENLERLSLTLMSPEMEDEDSSAPTFTITVDAKSGTSTGVSASDRAMTVLALSSLDAKPDDFRRPGHVFPLKYRDGGVLRRAGHTEASVDLMILAGLRPLSVLSAILDQEDGSMASLPYMKKLATEHDIPIVSLTDLIRYRRKRDKLVERITVSRLPTKWGLFQAYCYRSKLDGTENIALVKGNVGNGEDILVRVHSECLTGDIFGSARCDCGNQLDLAMELIEKEGRGVVVYLRGHEGRGIGLGHKLRAYNLQDEGHDTVQANVELGLSIDSREYGIGAQMLRDIGVRTMRLMTNNPAKFTGLKGYGLAVVGRVPVVTPITKENRRYMETKRKKMGHIYISDNNDQPLA

SEQ ID NO: 24949 - protein, 673 aa, Shewanella sp. MR-4
MAELKEVFVPDIGGDEVQVIEICASVGDTLAAEESILTVESDKATMDIPAPFAGVLAELKVAVGDKVSEGTLIAMMQAAGTANVQAAPVAQAAAPAPAPAAPAPVQAAPAPVAAAPATGATQVVEVTVPDIGGDTDVSVIEVLVAAGDKIEVDAGLITLETDKATMDVPSPFAGVVKEVKVAVGDKVSQGSLVIMLEVGGAAPAAAPQASAPAASAPVAQAAPAAPVAPVAAAAPVVAVKEIQVPDIGDASNVDVIEVLVSVGDDITVDQGLITLETDKATMEVPAPFAGKLLSLTVKVGDKVSQGSVIATIETVTAGSAPAPVAQAAAPAPVAQEAAPAPVAAAPSRPPVPHHPSAGAPVATGVVHASPAVRRLAREFGVDLTQVTGSGRKGRIMKEDVQAYVKYELSRPKATAATSVATGNGGGLQVIAAPKVDFSKFGEVEEIPLSRIQKISGPNLHRNWVTIPHVTQFDEADITEMEEFRKQQNDAAAKKKADYKITPLVFMMKAVAKTLQQFPVFNSSLSSDGESLIQKKYYHIGVAVDTPNGLVVPVVRDVDKKGIIELSRELADISVRARDGKLKSADMQGSCFTISSLGGIGGTAFTPIVNYPDVAILGVSKSEIKPKWNGKEFEPKLMLPLSLSYDHRVIDGAMAARFSVTLSGILSDIRTLIL

SEQ ID NO: 24950 - protein, 160 aa, Zea mays
  misc_feature (45)..(45): Xaa can be any naturally occurring amino acid
  misc_feature (60)..(60): Xaa can be any naturally occurring amino acid
  misc_feature (91)..(91): Xaa can be any naturally occurring amino acid
  misc_feature (150)..(150): Xaa can be any naturally occurring amino acid
MAGGGVDVGVEGDEKLGRKTLQCEHEVLYFDVHDNACGRYCLDLXEKTSATCSTIIASVXHGASCLLDLFDYYIRTDDRDGFRKEVRVHTXAIYFDIGENHMSRFAAGLRGLLSMRNRQIPYIVPAGSSDDKGWEAFTSVLLDIYNDATXMRVLPNHPRP

SEQ ID NO: 24951 - protein, 666 aa, Oryza sativa (japonica cultivar-group)
MWPASLKGVVILLMLMVFNVSGAFVGINVGTDISNPPSASDTVSILKEKKIQHVRLLDSDHQMLSALANTGIEVVVGVPNDQLLRVGQSRSTAADWINKNVAAYIPATNITHIAVGNEVLTTEPNAALVLVPALQFLQSALLAANLNTQVKISSPHSTDMISKPFPPSTATFNSTWSSIMLQYLQFLNNTASPFMLNAQPYYDYVKGQGVFPLEYALFRSLNPDSQISDPNTNLFYTNMFDAMVDATYNSMQAMNFTGIPVMVTASGWPSHGGQNEKAANVDNALAYNTNLIRHVLNNSGTPGQPNNQVSTFIFELFNEDLRAGPVSEKNWGIMFPNATTVYSLTFEDMATTNTDSPVLRGTFCVANSSAPHSALKQSLDWACGPGSANCSAIQPGQPCYKSDDIVAVASYAFNDYYHRTRASGGTCNFNSTAMVTSTDPTLAPMAATVVRRLGPPSRKPAVEAMSSSSSSFPTSRSPFPAGAGAGTSGGGGGGGGGSGGGGGGGRWSGVRPWGSSGGTSVSSSGKRIQKELMDLNASDCSAGPKGDNLYHWLSTIIGPQGSPYEGGIFFLDIVFPIDYPFKPPMVTFKTRIYHCNVDSTGNLSMDILREGWSPALTISKVLLAIKAIITNPDPYCPLVPSIGHLYLTDRTKHDEIAAEWTMRFAR

SEQ ID NO: 24952 - protein, 375 aa, Botryotinia fuckeliana
MEEEVAALVIDNGSGMCKAGFAGDDAPRAVFPSIVGRPRHHGIMIGMGQKDSYVGDEAQSKRGILTLRYPIEHGVVTNWDDMEKIWHHTFYNELRVAPEEHPVLLTEAPINPKSNREKMTQIVFETFNAPAFYVSIQAVLSLYASGRTTGIVLDSGDGVTHVVPIYEGFSLPHAIARVDMAGRDLTDYLMKILAERGYTFSTTAEREIVRDIKEKLCYVALDFEQEIQTASQSSSLEKSYELPDGQVITIGNERFRAPEALFQPSVLGLESGGIHVTTFNSIMKCDVDVRKDLYGNIVMSGGTTMYPGISDRMQKEITALAPSSMKVKIIAPPERKYSVWIGGSILASLSTFQQMWISKQEYDESGPSIVHRKCF

SEQ ID NO: 24953 - protein, 345 aa, Thermus thermophilus
MKVAVLPGDGIGPEVTEAALKVLRALDEAEGLGLAYEVFPFGGAAIDAFGEPFPEPTRKGVEEAEAVLLGSVGGPKWDGLPRKIRPETGLLSLRKSQDLFANLRPAKVFPGLERLSPLKEEIARGVDVLIVRELTGGIYFGEPRGMSEAEAWNTERYSKPEVERVARVAFELARKRRKHVVSVDKANVLEVGEFWRKTVEEVGRGYPDVALEHQYVDAMAMHLVRSPARFDVVVTGNIFGDILSDLASVLPGSLGLLPSASLGRGTPVFEPVHGSAPDIAGKGIANPTAAILSAAMMLEHAFGLVELARKVEDAVAKALLETPPPDLGGSAGTEAFTATVLRHLA

SEQ ID NO: 24954 - protein, 109 aa, Desulfitobacterium hafniense Y51
MAGENVKTFTTANWNEEVLGSDKAVLVDFWAAWCGPCRMVAPIIEELADEMAGKVIIGKLNVDEEPAIAGQYQVMSIPTLAVFKNGQVVDKSVGFRGKADLVKMIEKHA

SEQ ID NO: 24955 - protein, 411 aa, Pseudomonas syringae pv. syringae B728a
MAIEIKAPSFPESVADGTISKWYKKEGDAVKRDEMLVDIETDKVVLEVLAEADGVMGTITKEEGAIVLSNEVLGTLNDGATASAAPAPAAAPAAAPASAPAAAPAATAGEEDPIAAPAARQLAEENGINLASVKGTGKDGRITKEDIVAAVEAKKSAPAAAPAAKPAAAAAPVVAAGDRTEKRVPMTRVRATVAKRLVEAQSNMAMLTTFNEVDMTEVMALRSKYKDLFEKSHNGVRLGFMSFFVKAATEALKRFPAVNASIDGSDIVYHGYADVGVAVSSDRGLVVPVLRNAEHMSLAEIEGGIATFGKKARDGKLSIDEMTGGTFTITNGGTFGSMMSTPIVNPPQAAILGMHNILQRPMAVNGQVVIRPMMYLALSYDHRLIDGKEAVTFLVTIKNLLEDPARLLLDI

SEQ ID NO: 24956 - protein, 221 aa, Streptomyces coelicolor A3(2)
MTATASTVLPARALLLDMDGTLVNSDAAVDRVWRRWADRHGLDGDEVMKVVHGRQGYASMALLLPDRPMEHNHADNARMLAEETADTEGVVAIPGAAEFLASLRGLPHALVTSADVALSTARMAAAGLAQPDVRVTAESVGASKPDPEGFLKGAAELGIAPADCVVFEDSGAGIAAGRAAGMRVVGVGPRAGFHGPDVVVEDLTRVRVEADADGGLRLHIG

SEQ ID NO: 24957 - protein, 173 aa, Triticum aestivum
  misc_feature (155)..(155): Xaa can be any naturally occurring amino acid
MATVMAMSSFAGAAVLPRGSAGRLGARSLPALGRRSLVVRAQTEGPSAPPPNKPKASTSIWDALAFSGPAPERINGRLAMVGFVTALAVEAGRGDGLLSQLGSGTGQAWFAYTVAVLSVASLVPLLQGESAEGRAGAIMSANAELWNGRFAMLGXLVALAATEIITGTPFINV

SEQ ID NO: 24958 - protein, 279 aa, Triticum aestivum
LALRRPWSGSRRTGGACSTSSYRVGDLDKTIKFYTECLGMKLLRRRDIPEERYTNAFLGYGPEDSHFVVELTYNYGVESYDIGSGFGHFGIAVEDVEKTVELIKAKGGTVTREPGPVKGGKSVIAFIEDPDGYKFELIERGPTPEPLCQVMLRVGDLDRAISFYEKAFGMELLRRKDNPQYKYTIAMMGYGPEDKHAVLELTYNYGVKEYDKGNAYAQIAIGTDDVYKTAEVVRQNGGQITREPGPLPGISTKITACTDPDGWKSVFVDNLDFLKELEE

SEQ ID NO: 24959 - protein, 225 aa, Erwinia carotovora subsp. atroseptica SCRI1043
MKPFLIAPSILSADFARLGEDTTNVLAAGADVVHFDVMDNHYVPNLTIGPLVLKSLRDYGITAPIDVHLMVKPVDRIIPDFANAGASFITFHPEATDHLDRSLQLIKDHGCKAGLVFNPATPLSYLDYVMDKLDIILLMSVNPGFGGQSFIPSTLDKLRQVRRLIDDSGYDIRLEVDGGVKVENIGAIAEAGADMFVAGSAIFGHPDYRAVIDQMRNEISRTKHG

SEQ ID NO: 24960 - protein, 322 aa, uncultured crenarchaeote DeepAnt-EC39
  misc_feature (315)..(315): Xaa can be any naturally occurring amino acid
MDHHHFKGNDIPHIKLDPDMSIEDLVKIYSESGFNGRKLGEAAKVYAKMIKEDATICLTASGALTPVGFGGIFKTLIERGFVDWIITTGANVYHEDHFAWGLPVKQGDFQVDDMKLYDMEIVRIRDVFIKFYETLEAQDQVIQKTFKNNFVDKPFTTAEFCNFLGKISSENSKYPEKSFVTTAYNYDVPVYISTLKDSSLALNLAIHRLREKTYNLDFVREILEQASILYNSKKSGIVELGGGVPKNAAQQTGPLLDQILRQNVGGQDYIIQITDARPDTGGLSGATLQEGKSWGKVQDAHHDMITVYADATIGXFLFLHCM

SEQ ID NO: 24961 - protein, 441 aa, Prosthecochloris aestuarii DSM 271
MKSAGKEGKATIGFFGAVAIGIGGMVGGGIFAVLGEAVSLAHGSTSLAFIIAGSVAIVTAFAYARLSVAFPGRGGTVLFIDRAFGNNLASGSVNLMLWLSYLVTIALYANAFASYAETFFHGGGGLPFLRHLLISAAILLPTFINLTNASFVSRSETVIVLFKLLLLIVIIGFSLPAVGVVAVLPTELTLLPSIATAGMVIFVAYEGFELIANASDDVRNPGNTLPAAFFSSVVIVIMLYVIIGYVTVGAVPEKELLRAKDYALAVAARPSLGETGFTIVAIAALLATFSAINATIYGNARLGYFLARDGELPKVFDRQLWNEPVTGVLVTACISLLIANTLDISSIAVIASASFLLVFALVNASAAALTKEINGRRWIHVLGAVCCGVSLSVLLVHAVLSDFSAIVVFLVFIVVSVLFEWIYGKTARGHFLGRPYDAGKT

SEQ ID NO: 24962 - protein, 355 aa, Nectria haematococca mpVI
MSRSNPPNPTGSRKISFNVSEQYDIQDVVGEGAYGVVCSAIHKPSGQKVAIKKITPFDHSMFCLRTLREMKLLRYFNHENIISILDIQKPRNYESFNEVYLIQELMETDMHRAIRTQDLSDDHCQYFIYQTLRALKAMHSANVLHRDLKPSNLLLNANCDLKVCDFGLARSAASQEDNSGFMTEYVATRWYRAPEIMLTFKEYTKAIDVWSVGCILAEMLSGKPLFPGKDYHHQLTLILDVLGTPTMEDYYGIKSRRAREYIRSLPFKKKVPFRTLFPKTSDLALDLLEKLLAFNPVKRITVEEALKHPYLEPYHDPEDEPTAPPIPEEFFDFDKHKDNLSKEQLKQLIYQEIMR

SEQ ID NO: 24963 - protein, 534 aa, Medicago truncatula
MGRNSIDMDKERLTAEMDFKDSTSAVIKIRRRLPDFLQTVKLKYVKLGYGYSCNATTILIFTFVVPLLLFLTVQFQLTDLKLHRLSQLLLEHTVQLDTDTAIGSIFLLFLFGLYYAKRSPPIYLVDFACYKPENERKIAVESFVKMLEDSGEFGEETLQFQRRILSRAGLGDETSLPNGIMSSPPNLCMKEARLEAESVMFGSLDALFAKTGVNPRDIDILVVNCSLFNPTPSLSAMIVNHYKLRTNIKSYNLGGMGCSAGLISIDLAKDLLKANPNSYAVVLSTENLTLNWYFGNDRSMLLSNCIFRMGGAAILLSNKSSDRTRSKYKLVHTVRTHKGADDKNYNCVYQKEDETGKVGVSLARELMAVAGDALKTNITTLGPLVLPFSEQLMFFVSLVRRKLLKGSGVKPYIPDFKLAFEHFCIHAGGRAVLDELQKNLQLSEWHMEPSRMTLHRFGNTSSSSLWYELAYTEAKGRVAKGDRVWQIAFGSGFKCNSAVWKAVRDLPVVGDWRGNPWDDSVHKYPVSVPVSVAS

SEQ ID NO: 24964 - protein, 909 aa, Kluyveromyces lactis NRRL Y-1140
MSTEAHRHTYYGGPTTNTESSHHIHTSHAHNCSNGSSRRHSSSHNGRRRQVTFGPYIIGPTLGEGEFGKVKLGWSKSNSDESKNVAIKLIRRDTIPKNSEKEVKIYREINALKHLAHPNIVTLEEVLQNSKYIGIVLHYASGGEFYKYIQKKRRLKEPAACRLFAQLISGVHYMHHKGLAHRDLKLENLLLDEHENLIITDFGFVNEFSSRNDLMKTSCGSPCYAAPELVVTTKAYEARKADVWSCGVILYAMLAGYLPWDDDPDNPDGDDIAKLYNYITKTSLKFPEYINPIPRDILRRILVSDPSKRITVELILKHQWLQPHALFLSLKPEDWDIKAKAEISNIFRPPPSQSSQSAYSRPHSNSSVSSSEKRNSLIIDSTLHLQPVPPHESQSHAIAKPSSPSSDLRSSPIKRVNHSRSNSAASIALQAVVDAEREFFQSSQSILQISGVQSIEQSPNTRVQTYTATRSLAHNNSSSLMNRNSIIVEVSPNKEVISSSSSSAIPGMSYSASRESYISTSPVRNAAQSPKFVPGSFTSNTSHHNNKFGSSQQSRPRPTSYHPISSSYLEMQPSNSQNNFITTTNEFSYIPRTVNANNYIDSTRAISPELNGRTVDGTSPPLNSRNFQSGIIRRGSFSASKPSPSVDLNNVEGDLIKTDAEDHKKLKQQRRKSQRYSTVILDNSIATVQEETEEPITAYDANIKKPVENSNNLTKEFGKIVINEPRKEDAHIPISKPESEHLQKPPQQHQSQASIARADSHSKKEKRFSLLSFYSYYNNSKTSVSSDSSGGRRVSANSQKTNERISSVKSNGIPSRNVSGSINQFETSKPRVSSNPSNRTNYRHSMLPPKSSQVIDASAKRMNRSSVMVSSAKDITSSDGTASKEHKEQREPSTAKRVFDFFKRRSMRV

SEQ ID NO: 24965 - protein, 363 aa, Aspergillus niger
MPAYNIVVFAGDHWGPEVTAEAIKVLRVIEKSRDDITLNLQDHLLGGASIDATANPLTDEALAAAKNADAVLLGAIGGPKWGTGAVRPEQGLLNVRKEMGTFGNLRPCNFAAPSLVEHSPLKASVCEGVDFNIIRELTGGIYFGDRKKMTAAATMDTEPYSRAEIERITPRAHLALQHNPPLPVWSLDKANVLATSRLWRKTVTEIMAKEFPQLKIEHQLIDSAAMIMVKNPRQLNGIIVTSNLFGDIISDEASVIPGSLGLLPSASLSGIPDGKGRVNGIYEPIHGSAPDIAGKGIVNPVAAILSVAMMMQYSFGRFDEARAIEAAVRNVLESGVRTGDIGGKATTSEVGDAVAAELEKLLK

SEQ ID NO: 24966 - protein, 322 aa, Gibberella zeae PH-1
MSLFLGMIRDRFTTIPPQEEDCTGKTFVVTGSNSGIGLETVRHLTELNAAKVILACRSIERGEQAKKNVEKSTGKENVVQVWQLDLASYDSVREFTSRVNKLERVDAFINNASLLSFKREMIEGHESMLTVNFISTALLSLLVLPALRLTAMRFNITPRMVIVSSDAAFDCRLTTEVLNIFEAIDAETSVLDHYSKTKLLQAMFISRLSQAIDSSGKGHIIVNAVHPGLCGTQLFKHIDFPFSLFFSALVAMLGRTPEMGSRALLAGAFAGEDLHGKIMFNGEEHEFPKCMHGDMGDKLTGRVWDELMELLEGIEPGVKNNV

SEQ ID NO: 24967 - protein, 481 aa, Thermoplasma acidophilum
MESTYVNKDEEIDRLINDLKSNGSLDYGFHDNINPVYSTGKGLSRQVVEEISEIKKEPDWMRRIRLHAYEIFMSKPVPTWGPDLSGIDWENMTYYSRPDEVKATNWDEVPKEIKDTFEKLGVPEMERKYLAGSIAQYDSEGIYNSIKKEWEEKGVVFMDLDSALKRYPDLVKEYFAKAVPPSDNKFAALNVAVWSGGAFLYVPRGVHVDMPLQTYFRINGEATGQFEHTIVVADEGSSVHYLEGCTAPVYSKDSLHAAIVEYYVMKNAHGRYTSVQNWSNSVYNMPTKRAWVEENGNMEWVGGSLGSKVTMIYPSSYLRGRNATTSNLNIALAGPGTVKDTGAKAIHMAPNTSSKIIAKSVSLGDGKSIYRGLVRINKDAVNAKSHVQCDALLINDESVSYTMPHDEIYEPTANFTHEATVGKIGTEELTYLRSRGLSEDEASSLIVLGFLDDVMKEIPMEFAVEMNRLVKLEMSKMGAVG

SEQ ID NO: 24968 - protein, 371 aa, Aspergillus niger
MSGTRAYNILVLPGDGIGPEVMAEAIKVLRTFNSSSMQFHLQEELIGGISIDTHGHSVTQPVKDAAVAADAVLFAAVGGSKVDHIRRGLDGPEGGLLQVRKAMDIYANLRPCSVDVPSREIARDFSPFRQEVIEGVDFVVVRENCGGAYFGKKVEEENYAMDEWGYSTTEIQRIARLAAELALRHDPPWPVISLDKANVLASSRLWRRVVENTISVEYPQVKLVHQLADSASLIMATDPRVLNGVILADNTFGDMLSDQAGSLIGTLGVLPSASLDGLPHPGKQEKVRGLYEPTHGSAPTIAGKNIANPTAMILCVSLMFRYSFNMENEARQIEDAVRAVLDRGLRTPDLGGNSSTQEFGDAVVAALQGKY

SEQ ID NO: 24969 - protein, 112 aa, Idiomarina loihiensis L2TR
MKMLVALIKPFKLEDVKQALFEIGCKGLTVTEVRGVGRQKGHTELYRGAEYQVDFLPKMKIELAVPDETVERALEVVIAAAHTGNIGDGKIFVMPLEQCVRIRTGETDQDAL

SEQ ID NO: 24970 - protein, 394 aa, Thermoplasma acidophilum
MINDRGYDRLHEYRQENFIQFMKTPPQTWKESPTRMRYVEFTDEFVEKMVLGKQEASNGDYRRSDEDVAIVNGRVHVYDTKGLIVSSIRDAEETHPSILYDFAGKEYVYDRYEFLINAGFHDGLFLYVPKGVSASINIEDYASSTSSFAAKNMIIVDEGSKINVFRRISGSGTGNGYQGDNTYIFLGKNASIEYNQVQDRPKTVEGLQFIRTFMDDYSSARIYHAENGYDRSIIVTESYQYGNGTNYQVRGVSFTRSLQQMDLRDNTIQIGTHTVADIYIRGIVRDRSLTMQRGNIDIREQARHAEGYYDTRILLLSKDAFANTKPALLINNNDVRSKHASAISNIDDISLFYLRSRGIDEDTAKNMIVEGFTEHVVEGSDERLKEAVVRFSGL

SEQ ID NO: 24971 - protein, 393 aa, Idiomarina loihiensis L2TR
MEAQNLQQLTFAVDTLYLLISGALVMWMAAGFSMLEAGLVRSKNTTEILTKNIVLYAIACIVYLVIGYKVMYPDPSTSAYAADANFFFQMVFVATAMSIVSGAVAERMKLMSFLLFCVVLSAVIYPVQGLWTWGGGMLTEWGFVDFAGSSIVHLTGASAALAAVLLLGPRSGKYLSDGSINALPGSNMPLAALGTFILWFGWFGFNGGSQLALSTVDDANAIARAMVNTNTSAAAGTIATLLFTKLLWKKADLTMILNGALAGLVAITAQPVTPEPWLAGVIGFIAGLIVVLSIIGLDKLHIDDPVGAISVHGVVGIFGTLVVPLSDDGASFVIQLAGVGTIFCWVFFSSLIVWAILKLILGIRVTKEQEYIGLDQVDCGVEAYPEFTSKKDG

SEQ ID NO: 24972 - protein, 166 aa, Xanthomonas campestris pv. vesicatoria str. 85-10
MTWTTPDLCDRYPDVTIAEPLFRHFGGRTAFAGPMVTVRCFEDNSRVRELSAMPGDGRVLVVDGQGSLKHALLGDQIAANAVANGWAGVLIHGCVRDVEILATLPLGVLALAACPRRTERRDLGDVDVAVNFAGVPFVPGHWLYADANGVLVAPQPLALDGAGGSI

SEQ ID NO: 24973 - protein, 177 aa, Brassica napus
GAASISRSLASYAVALLELFPAFKGCIPLWIGSGQELFGGFLSFNILAPILLALLTLVLCQGVRESSAVNSVMTATKVVIVLVVICAGAFDIDVANWSPFAPNGFKAVLTGATVVFFSYVGFDAVANSAEESNNPQRDLPIGIMGSLLVCISLYIGVCLVLTGMVPFSLLSEDAPLA

SEQ ID NO: 24974 - protein, 372 aa, Zea mays
MGGAAGEAMWAAVVAATVVFLAVEVSGAASALPRFAEAPEYRNGEGCPAAAAGVCDPGLVHIAMTLDAHYLRGSMAAVYSLLKHASCPESIFFHFLAAEAGAVDGADPEPELLRRAVAASFPSLRFEIYPFRAEAVAGLISASVRAALEAPLNYARNHLADLLPRCVPRAIYLDSDVLAADDVRRLWETRLPAAAVVAAPEYCHANFSRYFTPAFWSDPVLGARVFAGRRRPPCYFNTGVMVIDLRRWRAGNYRQRIERWMEIQKQKRIYELGSLPPFLLVFAGEVEAVDHRWNQHGLGGNNVHGSCRPLHAGPVSLMHWSGKGKPWDRLDAGRPCPLDHTWKSYDLYIPGDSGGAASPASGPALSASVFSW

SEQ ID NO: 24975 - protein, 353 aa, Podospora anserina
MSNAQARGGARKISFNVSEQYDIQDVVGEGAYGVVCSAIHKPSGQKVAIKKITPFDHSMFCLRTLREMKLLRYFNHENIISILDIQKPRSYESFNEVYLIQELMETDMHRVIRTQELSDDHCQYFIYQTLRALKAMHSANVLHRDLKPSNLLLNANCDLKVCDFGLARSAASQEDNSGFMTEYVATRWYRAPEIMLTFKEYTKAIDVWSVGCILAEMLSGKPLFPGKDYHHQLTLILDVLGTPTMEDYYGIKSRRAREYIRSLPFKKKVPFRTLFPNTSDMALDLLEKLLAFNPVKRITVEEALKHPYLEPYHDPEDEPTAPPIPEEFFDFDKHKDNLSKEQLKQLIYQEIMR

SEQ ID NO: 24976 - protein, 144 aa, Vibrio cholerae O1 biovar eltor str. N16961
MSTFNTRCPSCHSLNRVPEERITESPNCGKCQSALLDGAPIEGTEANFSALLQSDKPVVVDFWAPWCNPCVGFAPIFSDVAAERKGQIRCVKIDTEAQQNLAAHFQIRSIPTIMVFKNGQRIDMINGALPKSQFDQWLNQALTK

SEQ ID NO: 24977 - protein, 641 aa, Bordetella bronchiseptica RB50
MCGIVGIWGPLRDKANVLAESCRRIRHRGPDSNGYWEDAEADLALAHVRLAILDLTEAGHQPMVSACGRYVIVLNGEIYNHMELRERLQQDGLAPAWRGHSDTETVLACFAGWGLEQTLQAAVGMFAIALWDRAERKLALMRDRMGEKPLYYGYSQANLLFGSELKAFMPVPGFGRELDRNALASFMRHNYIPAPQSIYAGIRKLPPGAWVEIDAAQMRRGELPEPQVYWSARRAADQGLGDRRRFESDAQAIDALEQVVSQAVRGQMLSDVSLGAFLSGGIDSSTVVALMQAQSAQPVRTFAIGFHEKGYNEAEHAKAVAAHLGTEHTELYVTAEDGLAVVPSLADMYDEPFADSSQIPTSLVTRMARQHVTVALSGDGGDELFGGYSRYFRVDNWWRKCAAMPGPLRHLAGAALRGSAALPGAGAWRGKVGKLGELLGADTRGEFYRLFVSYWADPGRVVIGGTEPLSPFEQPMEGSTFDAMMKLDTVTYLPDDILVKVDRAAMAVSLETRVPLIDHRVYEFAWQLPFEYKVRGGTGKWLLRQLLYRHVPQAMVDRPKRGFAVPLAAWLRGPLRDWAEALLDPARLRQEGWFEPEPILRKWREHLSGHRNWDSHLWGVLMMQAWLDRYRAGAGDEAGRR

SEQ ID NO: 24978 - protein, 394 aa, Rickettsia conorii str. Malish 7
MAKAKFERTKPHVNIGTIGHVDHGKTSLTAAITIVLAKTGGAQATAYDQIDAAPEEKERGITISTAHVEYETQNRHYAHVDCPGHADYVKNMITGAAQMDGAILVVSAADGPMPQTREHILLAKQVGVPAMVVFLNKIDMVDDPDLLELVEMEVRELLSKYGFPGDEIPIIKGSALQALEGKPEGEKAINELMDAVDSYIPQPVRATDKPFLMPIEDVFSISGRGTVVTGRVESGIIKVGEEIEIVGLKDTQKTTCTGVEMFRKLLDEGQAGDNVGILLRGTKREEVERGQVLAKPGSIKPHDKFEAEVYVLSKEEGGRHTPFTNDYRPQFYFRTTDVTGTIKLSADKQMVMPGDNATFTVELIKPIAMQEGLKFSIREGGRTVGAGVVTKINN

SEQ ID NO: 24979 - protein, 248 aa, Glycine max
MKFNIANPTTGCQKKLEIDDDLKLRAFWDKRISQEVIGDALGEEFKGYVFKITGGCDKQGFPMKQGVLTPGRVRLLLHRGTPCFRGYGRRNGERRRKSVRGCIVSPDLSVLNLVIVKKGENDLPGLTDAEKPRMRGPKRASKIRKLFNLSKEDDVRKYVNTYRRTFTTKAGKKVSKAPKIQRLVTPLTLQRKRARIADKKKRIAKAKSEAAEYQKLLASRLKEQRDRRSESLAKRRSKLSSAAKAAAV

SEQ ID NO: 24980 - protein, 326 aa, Kazachstania telluris
SIVGRPRHQGIMVGMGQKDSYVGDEAQSKRGILTLRYPIEHGIVTNWDDMEKIWHHTFYNELRVAPEEHPVLLTEAPMNPKSNREKMTQIMFETFNVPAFYVSIQAVLSLYSSGRTTGIVLDSGDGVTHVVPIYAGFSLPHAILRIDLAGRDLTDYLMKILCERGYSFSTTAEREIVRDIKEKLCYVALDFEQEMQTAAQSSSIEKSYELPDGQVITIGNERFRTPEALFHPSVLGLEAAGIDQTTYNSIQKCDVDVRKELYGNIVMSGGTTMFPGIAERMQKEITALAPSSMKVKIIAPPERKYSVWIGGSILASLTTFQQMWIS

SEQ ID NO: 24981 - protein, 326 aa, Pichia farinosa
SIVGRPRHQGIMVGMGQKDSYVGDEAQSKRGILTLRYPIEHGVVTNWDDMEKIWHHTFYNELRVAPEEHPVLLTEAPMNPKSNREKMTQILFETFNVPAFYVNIQAVLSLYSSGRTTGIVLDSGDGVTHVVPIYAGFSLPHGILRIDLAGRDLTDYLMKILSERGYTFSTTAEREIVRDIKEKLCYVALDFEQEMQTSAQSSAIEKSYELPDGQVITIGNERFRAAEALFRPSDLGLESAGIDQTTYNSIIKCDLDVRRKLYGNIVMSGGTTMFPGIAERMQKEITALAPSSMKVKIIAPPERKYSVWIGGSILASLSTFQQMWIS

SEQ ID NO: 24982 - protein, 130 aa, Triticum aestivum
  misc_feature (71)..(71): Xaa can be any naturally occurring amino acid
  misc_feature (80)..(80): Xaa can be any naturally occurring amino acid
  misc_feature (89)..(89): Xaa can be any naturally occurring amino acid
  misc_feature (101)..(101): Xaa can be any naturally occurring amino acid
  misc_feature (109)..(109): Xaa can be any naturally occurring amino acid
MARLNSKAVVAAVVLAAVVLMMAGREASAALSCGQVDSKLAPCVAYVTGRASSISKECCSGVQGLNGMARXSSDRKIACXCLKEASPTXSIKVQSTMGKVXRRGPAKCXVKCAFPAMSNKLANTVQSSNI

SEQ ID NO: 24983 - protein, 132 aa, Triticum aestivum
  misc_feature (87)..(87): Xaa can be any naturally occurring amino acid
  misc_feature (100)..(100): Xaa can be any naturally occurring amino acid
MAPAATIRGAARALLVVAVLVLAARGASAALSCSTVYNTLMPCLGYVQSGGVVPRACCGGIKKLVSTARSTPDRRSICTCLKNVGSXAPPGGPYVSRAAXGLPGKCKVPLPFNCNSYVAWKTSTTGLVLVIF

SEQ ID NO: 24984 - protein, 608 aa, Arabidopsis thaliana
MPTWWGRKSCKNKDDNHRGIISTDRDIKSSAVVDPPLTPTRGGTPRCSREFAGASSAFSGFDSDSTEKKGHPLPRPLLSPVSIHHQDHVSGSTSGSTSVSSVSSSGSADDQSQLVASRGRGDVKFNVAAAPRSPERVSPKAATITTRPTSPRHQRLSGVVSLESSTGRNDDGRSSSECHPLPRPPTSPTSPSAVHGSRIGGGYETSPSGFSTWKKGKFLGSGTFGQVYLGFNSEKGKMCAIKEVKVISDDQTSKECLKQLNQEINLLNQLCHPNIVQYYGSELSEETLSVYLEYVSGGSIHKLLKDYGSFTEPVIQNYTRQILAGLAYLHGRNTVHRDIKGANILVDPNGEIKLADFGMAKHVTAFSTMLSFKGSPYWMAPEVVMSQNGYTHAVDIWSLGCTILEMATSKPPWSQFEGVAAIFKIGNSKDTPEIPDHLSNDAKNFIRLCLQRNPTVRPTASQLLEHPFLRNTTRVASTSLPKDFPPRSYDGNFSLQPTREPYPGRLSHDNYAKQPLSRTIKSPSRENVRPITSLPVSPCSSPLRQLGPAYKSCFLSPPHPSYAFPGQDSGYNLAEFAASPFRMKKDAMMEPSSFRTQTPNSPLRSRLV

SEQ ID NO: 24985 - protein, 326 aa, Candida castellii
SIVGRPRHQGIMVGMGQKDSYVGDEAQSKRGILTLRYPIEHGIVTNWDDMEKIWHHTFYNELRVAPEEHPVLLTEAPMNPKSNREKMTQIMFETFNVPAFYVSIQAVLSLYSSGRTTGIVLDSGDGVTHVVPIYAGFSLPHAILRIDLAGRDLTDYLMKILSERGYSFSTTAEREIVRDIKEKLCYVALDFEQEMQTAAQSSSIEKSYELPDGQVITIGNERFRAPEALFNPSVLGLESAGIDQTTYNSIMKCDVDVRKELYGNIVMSGGSTMYPGIAERMQKEITALAPSSMKVKIIAPPERKYSVWIGGSILASLTTFQQMWIS

SEQ ID NO: 24986 - protein, 379 aa, Ralstonia solanacearum
MGGAARYSAPIVSFRSLRLAMTAETAFSAAPLPPVEQRIDVLIVGAGPVGLFAAFEAGVLGLSCVLVDVLDRPGGQCTELYPEKPIYDIPALVSCTAQELVDRLLAQCAPFGYPILCGRRAETVETIEGEHGRRFRVTTSVGDVFDCAAVLITAGNGAFAPQRVALPEAAALEGRHLHYAVRDTARFAGKHVVVAGGGDSALDWALALRKTAARVTLVHRREGFRAADASVAGMRAAVAAGEMDFQVGMIGRLDSAPDGTLTGIALRQREGETRLPCDELIALYGLVSEPGPIASWDVEMRAGRIVVETTAYETSRAGVFAAGDIALYPNKQKLILSGFHEVAMALRRAYRYANPDKTLVHTHTSNDTNLQSRLHAAAE

SEQ ID NO: 24987 - protein, 326 aa, Candida catenulata
SIVGRPRHQGIMVGMGQKDSYVGDEAQSKRGILTLRYPIEHGIVTNWDDMEKIWHHTFYNELRVAPEEHPVLLTEAPMNPKTNREKMTQIMFETFNVPAFYVSIQAVLSLYSSGRTTGIVLDSGDGVTHVVPIYAGFSLPHGISRLDLAGRDLTDYLMKILSERGYTFSTSAEREIVRDIKEKLCYVALDFEQEMQTSSQSSAIEKSYELPDGQVITIGNERFRAAEALFRPADLGMESAGIDQLTYNSIMKCDLDVRKELYNNIVMSGGTTMFPGIAERMQKEITSLAPSLMKVKIIAPPERKYSVWIGGSILASLSTFQQMWIS

SEQ ID NO: 24988 - protein, 95 aa, Salmonella typhimurium LT2
MQLNITGHNVEITEALREFVTTKFAKLEQYFERINQVYVVLKVEKVTHISDATLHVNGGEIHASAEGQDMYAAIDGLIDKLARQLTRHKDKLKQH

SEQ ID NO: 24989 - protein, 645 aa, Pseudomonas syringae pv. syringae B728a
MKFRHWDINTRTQIISLGPALLLTALLISFFTFVRIQDLRQELNHTGQLIANQLATAVEPGVTTGDIEGLKALMRATLSMPSVRYVEIQDSSNTAVIYIDQPRENEQQTRQMEVFLAPVQPQRTTIHGNPGAPAAGKGQPAQGASQSYLGRVLVGMSSEAFSRRQQEILLKAGVLAMVALLFAFLLARSLALSLSRPISDMGEALKAIQQGDYHTPMPVSDDAELGALARHINNLAENLHRASLEQQRSVAQLIQTREEAEQANRAKSDFLAMMSHELRTPMNGVLGMLQLLETTHMTHEQSEYATLATESTEHLLRVINDILDFSRIERDALQMEGIPFNLAELVSASTHAFNHSAAQRNLLLELHIQPGLETMNVIGDPTRIRQILVNLIGNALKFTERGKVCVDARWAMLDDERLHFTCAVQDSGIGIDAERLESMFDAFKQADSSISRRYGGTGLGLPIARTLAERMGGTLYAESKEGSGSLFTLQIPLPLSRDASVAIAKPLSILDAHGRERSILLVEDNPVNRTVVQAMLRNLGCEVDIAVDGAEAVMKARAGNHALILMDCRLPVMDGYEATRRIRQLSGLERIPIIALTANALQGDRDACLQAGMDDYLPKPFKHADLQQVLQRWLSFEAPATGDKC

SEQ ID NO: 24990 - protein, 558 aa, Haemophilus somnus 2336
MNGANLVVECLKAHGVTSLFGYPGGAIMPVYDAIYDSGLDHLLCRNEQGAAMAAIGYARSTNKVGVCVATSGPGATNLITGLGDALMDSIPIIAITGQVASNFIGTDAFQEADILGLSLACTKHSFIVQHIDELPEIIAKAFQIAQSGRPGPVLIDLPKDVQFAPTSLKPIVYPKIADSLQNLVALEQAKNLLSQAKRPVLYVGGGVGMAKSSDGMSGVKAIRTFLDITNIPSVSTLKGLGTIPPKHPLYMGMIGMHGTKAANYAVQECDLLIACGARFDDRVTGKLDTFAPHAKVIHIDIDVAEINKLRKADVGLQGDLVEAVTNLAQLLDIEPWRKDIEQLKASFDFNYIENTEDKEIEPCALLHTLSERKAKNAVITTDVGQHQMWSAQHMKHYEPENYITSAGFGSMGFGLPAAIGAAKARPQDPVILITGDGSLMMNIQELGSIKRGNLPIKILLLDNQRLGMVRQWQSLFFHGRHSHTVLDDNPDFVTLASAFGIAGERIEKASEVSDALDRLLNAKEAYLLHVCIPDEENVWPLVPPNTCNSNMIEEDIGV

SEQ ID NO: 24991 - protein, 315 aa, uncultured crenarchaeote DeepAnt-EC39
MNEPIKNIRLLLEEITIKCDASWIAFSGGLDSSILAEIKKEQNLNAITIISKDFLATDLSYSQITAKHIDIPLEIKYVSIDQMLGAIESTIKILKNFNDIEIRNSIVPYLYMNALKEKNITNVITGDGADEIFAGYNFLLKKDHNELKNELKRIKKIMHFTSQKIANKLGMSIQMPFIDEKIIELVETLPINLLINQKNGIKFGKWVLRKAFENTLPTNVIWRKKTAMQDGSGTTNLTKLFDSIITDDIFTKKVKKIKSECNIKIRTKESLYYYELFKENFIIPECEDKKNICPDCNAEIVSNSKFCRMCGKFPI

SEQ ID NO: 24992 - protein, 232 aa, Ustilago maydis 521
MTLPPHLVANLVLSRSLVVTIHHPTEILRHFVHVLTIYPNFLFNQQVRYAFDDSKLAEKTAKSRGQYLRVHFKNTRETAAAVNGMKLQKAYAYLGNVVEKKQCIPFRRFNGGVGRTQQAKEFKTTQGRWPVKSVKFLLALLKNAEANAEAKGLETEELVIRNIVIQQAPKTRRRTYRAHGRINPYEGHPIHAEILLSEPAAQVPKAASTDVVRLNKRQIAQKRVAAARAIKA

SEQ ID NO: 24993 - protein, 225 aa, Kluyveromyces lactis NRRL Y-1140
METTTHVLGHVDGSSVVSNSGTKVICSVSGPMEPKSRQELPTQLALEIIVKPAEGVQSTREKLMEDQIRSVLTPVLARYLHPRQFVQICLQVLEAGESRDYTVKEVSVCVNAAVLALVDAGVPLLSMCSGTCIGITTEGKQLVVNPTESQLAKCESVHVYCLELGTNENGDIDVRNLLLLDSLGSFDESQLFKVLETGEKECIRLYTELRSVIKDKVAKDFVWRQ

SEQ ID NO: 24994 - protein, 605 aa, Candida glabrata CBS 138
MRQTIPNFAEHVSRAAKTIAPVKLGFKNMLANPSVKYRPFQGPKLTNRQWPNKTIKRAPRWLSTDLRDGNQSLPDPMSVEQKKEYFHKLVEIGFKEIEVSFPSASQTDFDFTRYAVENAPDDVSIQCLVQSREHLIKRTVEALTGAKRATIHTYLATSDMFREIVFNMSQEEAIAKAVEATKLVRKLTKDDPSQKATRWSYEFSPECFSDTPVEFAVEICEAVKAAWEPTVDNPIIFNLPATVEVATPNVYADQIEYFSTHISEREKVCISTHAHNDRGCGVAATELGILAGADRVEGCIFGNGERTGNVDLVTVALNMYTQGVSPGLDFSDMRSVIEIVERCNKIPVPARAPYGGDLVVCAFSGSHQDAIKKGFALQQKKRAQGETLWRIPYLPLDPKDIGRDYEAVIRVNSQSGKGGAAWVILRSLGLDTPRNMQMQFSTIVQNEADTRGKELSAEEITALFKSTYNYNNETHQYVSLLDYDVKKIDNDRRILTGQVEINDKIIPIKGIGNGPISSLVDALSNLFNVKFGVENYTEHALGSGSKTQAASFIHISYRDAATNEKEYSWGVGVSEDVGEASVRAIFSTINSIIHSGEVTLPTENN

SEQ ID NO: 24995 - protein, 409 aa, Arabidopsis thaliana
MAAFLQTNISLNAIKIVPGKYSSLTDHQFRAPYRIRCAAASPGKKRYNIALLPGDGIGPEVISVAKNVLQKAGSLEGLEFDFKEMPVGGAALDLVGVPLPEETFTAAKLSDAILLGAIGGYKWDKNEKHLRPEMALFYLRRDLKVFANLRPATVLPQLVDASTLKKEVAEGVDMMIVRELTGGIYFGEPRGITINENGEEVGVSTEIYAAHEIDRIARVAFETARKRRGKLCSVDKANVLDASILWRKRVAALASEYPDVELSHMYVDNAAMQLIRDPKQFDTIVTNNIFGDILSDEASMITGSIGMLPSASLGESGPGLFEPIHGSAPDIAGQDKANPLATILSAAMLLKYGLGEEKAAKRIEDAVVDALNKGFRTGDIYSPGNKLVGCKEMGEEVLKSVESKVPATV

SEQ ID NO: 24996 - protein, 539 aa, Paxillus involutus
MSLSKHVNAESLIRESKDKKHPHHHRSTTTSISTISYGARYGTQSIPKFHLPSKGTSAENAYQLIHDELALDGSPSLNLASFVHTWMPEPANKLMVENMSKNLIDQDEYPMTQLIHTRCVSILADLWHAPSTKQAIGTATTGSSEAIQLGGLAMKRIWQEHRKAAGKSIHEPGPNIVMGANAQVALEKFARYFEVECRLVPVSAESKYRLDPKKAMEYIDENTIGVFVILGSTYTGHYEPVKEMADLLDEYEKQTGHSVPIHVDGASGAFIAPFAQPKLLWDFKIPRVVSINTSGHKFGLAYVGVGWVVWRSKEYLPKDLIFELHYLGSVEYSFSLNFSRPAAPIIAQYFNFLHLGFEGYRAVALDDLKNARLLSRVLEGTGWYTVLSDIHRQKSNSLLTKGMQATIGIDEEHLENYMEGLPVVSFRFSDKFQEQYPEIQQKWIQTLLRAKGWIVPNYELPPNLEKVQILRVVVRENCTEVLIDRLVTDIVEITQNLVDRDSSTHALDMLGNGQHCKTVIGQMEEGSGSRSSGTYAKQC

SEQ ID NO: 24997 - protein, 664 aa, marine gamma proteobacterium HTCC2207
MFLKRKLSFMCGILGLSEVLQETLYTRRDRQETISRCFEEGLAILSHRGPDASGAKYFFDEGVFLGHTRLSIQDLSPAGTQPMMSLDEKYAITFNGEIYNFPVLKEKLEFLGYNFSSNTDTEVILNLYQEYGLDCFAMLDGIFALGIFDKEKNQLIISRDGLGIKPLYYYQDESRLVFASEIKAIEIFLKDVVLTLQKSNINKYLTFQWCPGEGTPFAEIKKHIPGETLVVTDGKIVDRKTFYRLPIFRPPAKNLKTSVRSIISGLDANLRIAVHDQMLSDAPVGAFLSGGLDSTSIVAFAKEIDPNITCFTIDAGNAANDGMADDLPYARAAAEHLKVPLEIVKVNPESLVQNLEKMVWMLDEPLGDPAPLNVFYISQLAKDNGIKVLLSGAGGDDILTGYRRHHAIMIDRQIQRLPKVLLSAVELFSGKLDKRVTLFRRLAKLFNGISLAGESRIINYFKWADQGQLLSLYTNDFRNEIKNELAEQPMLDFLAHAHPDSTDLDKMLALEQRFFTTDHNLMYTDKMSMAAGVEVRVPLLANNLIEYAATIPDNLKQNGRQGKWIFKKTMEAYLPKEIIYRPKTGFGAPLRSWLKVELRDYLEDLLSRKSLYSRGLFDPEAVHALISRNDEGQVDASYTIFSLMCIEIWCRQHVDSVKLSTGST

SEQ ID NO: 24998 - protein, 636 aa, Oryza sativa (japonica cultivar-group)
MDGCDCIEPLWPTDELLIKYQYISDFFIALAYFSIPLELIYFVKKSSFFPYRWVLIQFGAFIVLCGATHLINLWTFTTHTKTVAMVMTVAKVSTAVVSCATALMLVHIIPDLLSVKTRELFLKNKAEQLDREMGLIRTQEETGRHVRMLTHEIRSTLDRHTILKTTLVELGGTLGLEECALWMPSRSGSSLQLSHTLRHQITVGSTVSINLPVVNQVFSSNRAIIIPHTSPLARIRPLAGRYVPPEVAAVRVPLLHLSNFQINDWPELSAKSYAIMVLMLPSDSARKWHVHELELVEVVADQVAVALSHAAILEESMRARDLLMEQNVALDLARREAEMAIRARNDFLAVMNHEMRTPMNAIIALSSLLLETELTPEQRLMVETVLKSSNLLATLINDVLDLSKLEDGSLELEIKAFNLHAVFKEVMSFIKPIAAIKRLSVSVMLAPDLPLCAIGDEKRLMQTILNISGNAVKFTKEGHITLVASVVKADSLREFRTPDFHPTASDDNFYLKVQIKDTGCGISPQDLPQVFTKFAQSQPGGNRGYSGSGLGLAICKRFVTLMGGHIWLDSEGTGRGCTVTFVIQLGICDNTNAYQQKLIPLVWPSSGDADFVGPVPNAPNEEKGQASLKSRYQRSI

SEQ ID NO: 24999 - protein, 526 aa, Chlamydophila pneumoniae CWL029
MERKRFIDCDSTKILQELALNPLDLTAPGVLSAERIKKFSLLGGGFTFSFATERLDDAILAALISLAEERGLHESMLAMQQGQVVNYIEGFPSEMRPALHTATRAWVTDSSFTGEAEDIAVRSRVEAQRLKDFLTKVRSQFTTIVQIGIGGSELGPKALYRALRAYCPTDKHVHFISNIDPDNGAEVLDTIDCAKALVVVVSKSGTTIETAVNEAFFADYFAKKGLSFKDHFIAVTCEGSPMDDTGKYLEVFHLWESIGGRFSSTSMVGGVVLGFAYGFEVFLQLLQGASAMDQIALQPNARENLPMLSALISIWNRNFLGYPTEAVIPYSSGLEFFPAHLQQCCMESNGKSIAQDGRRVGFSTSPVIWGEPGTNGQHSFFQCLHQGTDIIPVEFIGFEKSQKGEDISFQGTTSSQKLFANMIAQAIALACGSENTNPNKNFDGNRPSSVLVSSQLNPYSLGELLSYYENKIVFQGLCWGINSFDQEGVSLGKALANRVLELLEGADASNFPEAASLLTLFNIKFR

SEQ ID NO: 25000 - protein, 130 aa, Arabidopsis thaliana
MIREISNLQKDIINIQDSYSNNRVMDVGRNNRKNMSFRSSPEKSKQELRRSFSAQKRMMIPANYFSLESLFLLVGLTASLLILPLVLPPLPPPPFMLLLVPIGIMVLLVVLAFMPSSHSNANTDVTCNFM

SEQ ID NO: 25001 - protein, 521 aa, Bordetella bronchiseptica RB50
MPTPLPSSSAWLAFADAARHSSRRGARLRVIEAAGLRVDLTAQAHSDDLDSAAEDLLAQQDFDNARAQLFDGGPANWTEHRPAWHTALRAARPPTPVAGAILGERDRLRRFVQDADMRGAYRHVLHLGIGGSDWGPRMVTRALRHNGLKREVRFASNVDSHAVADALHHLDPHDTLIIVASKSFTTTEPLANAEVAMNWLRNAGVADPVRQVVAITANVDAALDFGISPQHIFRFWDWVGGRYSLWSAIGLPVALALGCDALDELLAGAAAMDQHFLHTPMRRNAPLQMALAGVANRSVLGYGSLAITPYDSRLTHLVPWAQQLEMESLGKVAGHDGSPAGVPTGPVVWGMTGTDCQHTFFQWLHQDTAGAPVDFIVCEQADHPYDHFHKLLIANCLAQRAALLRGKPFDEALKEARLVESDPQQAEILAHHRVHPGGRPSTLIMLPRLSAHALGALLAMYEHKVFAQGVLWGINPFDQWGVEYGKALARNIIRELENPSSEVNQQDPSTRYWIDALRKQP

SEQ ID NO: 25002 - protein, 132 aa, Synechococcus sp. RS9917
MRMLHTMLRVGDLERSLRFYTEVLGMQLLRRKDYPSGRFTLAFVGYGEESDHTVLELTHNWDTDHYALGDGYGHIALGVDDIQATCAAIADKGGRVVREPGPMKHGSTVIAFVEDPDGYKVELIQLASRASS

SEQ ID NO: 25003 - protein, 452 aa, Rickettsia conorii str. Malish 7
MVLNIKAPENIVLKPTITVFGVGGAGSNAVNNMISANLQGANFVVANTDAQSLEHSLCTNKIQLGVSTTRGLGAGASPEVGALAAQESESEIRNYLENSNMVFITAGMGGGTGTGSAPVIARIAKELGILTVGVVTKPFHFEGGHRMKTADKGLIELQQFVDTLIVIPNQNLFRIANEQTTFADAFKMADDVLHAGVRGVTDLMIMPGLINLDFADIKAVMSEMGKAMMGTGEASGEDRAIKAAESAISNPLLDHSSMCGARGVLINITGGSDMTLFEVDNAANRIREEVDNLDANIIFGSTFNPELKGMIRVSVVATGIDADKVPTYKPAIAETTNIVPEETYNKAIAQPTQIEEMPDFNSYSTENIEITDSPINQNFIGNEKELGLHANTFNKSEDDSPKPSFLGKIWGSLRASNNQTLERKNVVVSTLDQDNKESDIHDIPAFLRKKRD

SEQ ID NO: 25004 - protein, 411 aa, Shewanella sp. MR-4
MYTMDSNKMKRVVITGMGVVSSIGNNKQEVTESLKAGRSGITHSAQFEEMQLRSHVWGNIKLDPSELIDRKALRFMGDAAAYAYIAMQEAIKDAQLTEEQYSNPRVGLIVGTGGASSSNQVQAADILREKGVKRVGPYIVPRIMSSTASACLATPFKIKGMNYSISSACATSAHCIGHAVELIQMGKQDMVFAGGSEEVDWTLTMGFDAMGALSTKYNDTPEKASRTYDADRDGFVISGGGGILIVEELEHALARGAKIYAEVIGYGASSDGYDMVAPSGEGAVRCMQMALADVDTPIDYINTHGTSTPVGDVRELEALREVFKDKCPPVASTKSMTGHALGAAGVHEAIYSLIMMENSFIAPSINIDNLDEAAKDMPIVREYRDAELNTVMSNSFGFGGTNATLVMRKYK

SEQ ID NO: 25005 - protein, 291 aa, Xylella fastidiosa Ann-1
MLAATDLARILDGRRIADDLLDALKTRVDARVSAGKLPPTLAVVLVGSDPASVVYVRNKRRAAEKVGIKAYDFDLPEATTEAELAALIDRLNADPKIHGILIQLPLPGIPDAHRLIQRIDPRKDVDGFHPQNVGHLALREFGLRPCTPRGIVTLLGHTDRPLRGRNATIVGVSNHVGRPMGLELLMAGCTVTSCHKFTPPQMLETAVRQADILIVAVGRPGVIPGEWVKPGAVVIDVGINRLDDGQLVGDVGFESAVKRASWITPVPGGVGPMTVATLMQNTLEAAEATDC

SEQ ID NO: 25006 - protein, 286 aa, Arabidopsis thaliana
MLLRLCRHRLPLPLTLSSSVFFSKSSPVSSAFMDASNPNSSRKSNVSSFAQSSRRGGGYERDNDRRRPQGRGDGGGGKDRIDALGRLLTRILRHMATELRLNMRGDGFVKVEDLLNLNLKTSANIQLKSHTIDEIREAVRRDNKQRFSLIDENGELLIRANQGHSITTVESEKLLKPILSPEEAPVCVHGTYRKNLESILASGLKRMNRMHVHFSCGLPTDGEVISGMRRNVNVIIFLDIKKALEDGIAFYISDNKVILTEGIDGVLPVDYFQKIESWPDRQSIPF

SEQ ID NO: 25007 - protein, 310 aa, Streptococcus mutans UA159
MGIYTCTMNLAIDLFIETEHLYESKVNRALSDDIQANGKGVNVSFIMKRLGLENTALGFSGGFTGKYVADNLEAEGIAAPFVEVEGLTRINVFTKVNATCQEFKLVNQGPLVNEAAQCRLLQQISKFKKGDYLVVSGSLPRGVPSQILYDIAKLCYEKGVNLIFDVSDCIIMDSLSFHPFLLKPNEEELATWFGKNQLEEEQLISYAKQLIVKGARHVLLSLGQDGAIFIDSHFNVYQANAPRGKVVNTACAGDTLLGTFLAGFIRQESLERVLAKSVAAGSSTAFRSGITDFSDVNELKEQIMVKKIKE

SEQ ID NO: 25008 - protein, 430 aa, Staphylococcus aureus subsp. aureus Mu50
MAFEFRLPDIGEGIHEGEIVKWFVKAGDTIEEDDVLAEVQNDKSVVEIPSPVSGTVEEVMVEEGTVAVVGDVIVKIDAPDAEDMQFKGHDDDSSSKEEPAKEEAPAEQAPVATQTEEVDENRTVKAMPSVRKYAREKGVNIKAVSGSGKNGRITKEDVDAYLNGGAPTASNESAASATSEEVAETPAAPAAVSLEGDFPETTEKIPAMRRAIAKAMVNSKHTAPHVTLMDEIDVQALWDHRKKFKEIAAEQGTKLTFLPYVVKALVSALKKYPALNTSFNEEAGEIVHKHYWNIGIAADTDRGLLVPVVKHADRKSIFQISDEINELAVKARDGKLTADEMKGATCTISNIGSAGGQWFTPVINHPEVAILGIGRIAQKPIVKDGEIVAAPVLALSLSFDHRQIDGATGQNAMNHIKRLLNNPELLLMEG

SEQ ID NO: 25009 - protein, 142 aa, Silicibacter pomeroyi DSS-3
MPLKYLHVMVRVKDLEKSMAFYELLGLREIRRYDSEEGRFTLVYLAAPGQDETPLELTYNWDGDDGLPSDSRHFGHLAYGVDDIYATCAMLQENGITINRPPRDGRMAFIRSPDNISIELLQNGAALDPAEPWVSMDSTGHW

SEQ ID NO: 25010 - protein, 363 aa, Bordetella parapertussis
MSSPRTYRIAAIAGDGIGREVMPEGLRVVRAAARRFGLDLDIVTFDWAHCDYYREHGQMMPDDWKAQLAGMDAIYFGAVGWPATVPDHVSLWGSLLKFRREFDQYINLRPVRLFEGVPCPLAGRQPGDIDYLVVRENTEGEYTSAGGVIYEGTEREIVIQESVYSRYGADRVLHYAYALADSRPRRRLTVATKSNGIAISMPWWDKRADAVGQQYPGVAVDKQHIDILSARFVLQPDRFDVVVASNLFGDILSDLGPATTGTIGLAPSANLNPERKFPSLFEPVHGSAPDIYGQNIANPVAMIWSGALMLDFLTEGAGAGRAAHDAIVAAIEQVLAHGPRTRDLGGTASTDAMGEAIAARLAA

SEQ ID NO: 25011 - protein, 326 aa, Torulaspora delbrueckii
SIVGRPRHQGIMVGMGQKDSYVGDEAQSKRGILTLRYPIEHGIVTNWDDMEKIWHHTFYNELRVAPEEHPVLLTEAPMNPKSNREKMTQIMFETFNVPAFYVSIQAVLSLYSSGRTTGIVLDPGDGVTHVVPIYAGFSLPHAILRIDLAGRDLTDYLMKILSERGYSFSTTAEREIVRDIKEKLCYVALDFEQEMQTAAQSSSIEKSYELPDGQVITIGNERFRAPEALFHPSVLGLESAGIDQTTYNSIMKCDVDVRKELYGNIVMSGGTTMFPGIAERMQKEITALAPSSMKVKIIAPPERKYSVWIGGSILASLTTFQQMWIS

SEQ ID NO: 25012 - protein, 326 aa, Debaryomyces hansenii var. hansenii
SIVGRPRHQGIMVGMGQKDSYVGDEAQSKRGILTLRYPIEHGIVTNWDDMEKIWHHTFYNELRVAPEEHPVLLTEAPMNPKSNREKMTQIMFETFNVPAFYVSIQAVLSLYSSGRTTGIVLDSGDGVTHVVPIYAGFSLPHGILRIDLAGRDLTDYLMKILSERGYTFSTTAEREIVRDIKEKLCYVALDFEQEMQTSSQSSAIEKSYELPDGQVITIGNERFRASEALFRPADLGLEAAGIDQTTYNSIIKCDVDVRRELYGNIVMSGGTTMFPGIAERMQKEITALAPSSMKVKIIAPPERKYSVWIGGSILASLSTFQQMWIS

SEQ ID NO: 25013 - protein, 531 aa, Shigella flexneri 2a str. 301
MMMFKAQEINMLDTNMKTQLKAYLEKLTKPVELIATLDDSAKSAEIKELLAEIAELSDKVTFKEDNSLPVRKPSFLITNPGSNQGPRFAGSPLGHEFTSLVLALLWTGGHPSKEAQSLLEQIRHIDGDFEFETYYSLSCHNCPDVVQALNLMSVLNPRIKHTAIDGGTFQNEITDRNVMGVPAVFVNGKEFGQGRMTLTEIVAKIDTGAENRAAEELNKRDAYDVLIVGSGPAGAAAAIYSARKGIRTGLMGERFGGQILDTVDIENYISVPKTEGQKLAGALKVHVDEYDVDVIDSQSASKLIPAAVEGGLHQIETASGAVLKARSIIVATGAKWRNMNVPGEDQYRTKGVTYCPHCDGPLFKGKRVAVIGGGNSGVEAAIDLAGIVEHVTLLEFAPEMKADQVLQDKLRSLKNVDIILNAQTTEVKGDGSKVVGLEYRDRVSGNIHNIELAGIFVQIGLLPNTNWLEGAVERNRMGEIIIDAKCETNVKGVFAAGDCTTVPYKQIIIATGEGAKASLSAFDYLIRTKTA

SEQ ID NO: 25014 - protein, 413 aa, Arabidopsis thaliana
  misc_feature (166)..(166): Xaa can be any naturally occurring amino acid
MARKKHRKLFPTLASETNKTLDCSNGVCDPICPYNCYPEPDYYTISPQLPPWSSSPQPSPCPSPSISAVYLPSQDSSSSLDAISIITITGAVLAILLTGFFLVAKFFSDSVNRVNQGTYQSDNEDNDTVMEEEFQDREQVDHPIWLIRTTGLQQSIINSITICNYXRGDGLIERTDCPVCLNEFEEDESLRLLPKCNHAFHISCIDTWLSSHTNCPLCRAGIAMISVTTPRYSGPVEVTPGGSGSHLENDGVDEEDHGEIENRVDSDFKESDDSDIRIEIYRFDSDGDGSETETKERVRVLKECMDPNGGDSVNSLSHTKTHVESVDFPGKSCENQSEEFTRHNGEDEASCSEENGGGSNQLRRSCDSGELNGETTGDEGKSQSDISSSTLKTNGSSSSVSCFNKNKSSVFPL

SEQ ID NO: 25015 - protein, 592 aa, Pseudomonas aeruginosa PAO1
MPGQPATAWLSDASLHLVTAFAWPRRPRNRLQRISPMSMLKDPSQKYRPFSAINLPDRTWPSKTITEVPIWCSSDLRDGNQSLIEPMDAAKKMRFFKTLVQVGLKQIEVAFPSASDTDFNFVRELIEGNHIPDDVTIQVLTQAREDLITRTFESLRGAKKAIVHVYNATAPSFRRIVFNQDKQGVVDIATNAAKLIKKLAAEQPETQWSFQYSPEIFSSTELEFSVEVCNAVIDVWQPTPDNKIILNLPATVECATPNVYADQIEWFGRHVDKRDSVIISLHTHNDRGTGVAATELGLMAGADRVEGCLFGNGERTGNVDLVTLALNMYTQGLHPQLDFSDIDAVRKVVEECNQLPVHPRHPYVGDLVHTAFSGSHQDAIRKGFAQQKEDAIWEVPYLPIDPADIGRDYEAVIRVNSQSGKGGITFLLEQEYGISLPRRMQIEFSQVVQGETDRLGLEMTAQQIYSLLENEYLKATSPYVLASHRLQEENGTSAVDLEVSFDGEKQHWRGIGKGPLEALVAALPVKAEIMDYHEHAIGAGANAKAAAYIEIRLEGQRPLHGIGIDENITTASFRALFSALNRAVTQAEAKAA

SEQ ID NO: 25016 - protein, 661 aa, Mycobacterium sp. KMS
MHRRGRQGVDLIAGRRGRAGQRPGRVPGRKWVRDPGGRAVGGSAVGRRRDGAAADLRPGGRGVRRDRRGVRRAAPLIGDRPGGYAATMTDLVADALVARLRDWGADRVFGYAGDGVNTLLGALQRSGAPEFISTRHEELAAFMACGHAKYTGRVGVCMATQGPGAIHLLAGLYDAKLDKRPVVAIVGQVVSTALGSGYLQEVDLHTLFKDVCGQYVQTVFAPEQALMALDNAMRTAIATSTPTCLIIPHDVQQAEMPDELAHSHGVVPSAAVSAPTRITAPDDQIRSAADILNAGRRVALLVGRGAAGAADEIARVVETLGAGVTTSLLGKPVLDEGQPWHTGVMGHLGTTASAELMANCDTLLIVGSNDPWTEFYPAPGQAKAVQIDIQPRVIGAKYPVDAPVVGQAAQALSALSALLEPKPDRAWQEQVRQWREQWHAEAARRAAAETSDANPEAVVRALSDHLPADARVAVDTGSSTYWYARHLRLPPGVPAHHSGYLASMGCALPYGVAAKLDAPQRPVVALVGDGAMQMSGLLELVTIADRWRSWQDPRFVVLVLHNADLTEVSWEQREMEGNPRFAPSQDVPRFPYAGYAELLGLRGIRVTSSQEADDAWATAFSADRPTVIEAVVDAATPLLPPLMPDSKADKVRAALEQEART

SEQ ID NO: 25017 - protein, 190 aa, Glycine max
  misc_feature (132)..(132): Xaa can be any naturally occurring amino acid
  misc_feature (157)..(157): Xaa can be any naturally occurring amino acid
LSQPPDTINGSIRVTVQGEVIEFCFGEEHLCFQTLQRFTAATLEHGMHPPVSPKPEWRKLMDEMAVVATEEYRSVVVKEARFVEYFRSATPETEYGRMNIGSRPAKRRPGGGITTLRAIPWIFSWTQTRFHXPVWLGVGAAFKFAIDKDVRNFQVLXEMYHEWPFFRVTLDLLEMVFAKGDPRIAGLYDE

SEQ ID NO: 25018 - protein, 323 aa, uncultured crenarchaeote DeepAnt-EC39
MQEFEIVIVGAGPAGLSAGMYVARQNVSCLVISKDLGGQMNLIPKLENYPGTIMSSGQILAKTLETQYLSFKGEIVYDTVEKIDESEDGFKIKTTRSEYKAKAIVLAPGKVPNMLGVENESEYFNKGIHYCTKCDAPFYQGRITASVGVGSYLVESGLLLSRMASKMYLILKGSKLAGDKDLVTTLENNKNIEIITQSSVKSISGNSTLQQITLVDSSGSEKVLDVDALFIELGSKINLDYVKHLVKINTKGEIEIESGGMTSHPAIFAAGDATTIPYKQIIVACGDGSNAGLSAFNYLEKLKGKPGIRADWKKQIGGQVFHY

SEQ ID NO: 25019 - protein, 462 aa, Olea europaea
MASIALKSFIGLRQTTSENKSIVLTKPNTQTYHKIRINASKTSPRVNGRNLKVAVVGGGPAGGAAAETLAKGGIETILFERKMDNCKPCGGAIPLCMVGEFDLPLDIIDRRVTKMKMISPSNVAVDIGQTLKPHEYIGMVRREVLDAYLRDRAATAGATVINGLLLKMDLPKSTGSPYKLHYTDYNAKTGGAGEKKTMEADAVIGADGANSRVAKNINAGEYEYAIAFQERIKISDDKMKYYENLAEMYVGDDVSPDFYGWVFPTCDHVAVGTGTVTHKGDIKKLQIAPRLRARDKIEGGKIIRVEAPPIPEHPRPRRVLDRVALVGDAAGYVTKCSGEGIYFAAKSGRMCAEAIVEGSENGIRMVDESDLRKYLEKWDKTYWPPYKVLDVLQKVFSRSNPPREAFVEMCADEYVQKMTFDSYLYKKVVPGNPLDDLKLAVNPIGSLVRANPLRREMEKLSV

SEQ ID NO: 25020 - protein, 525 aa, Ustilago maydis 521
MAARLFAQSSLRLARAQKVPATAATFNLRNLATAVSRQPITQTTTLSNGLTVATESNPSAQTATVGVWIDAGSRAETDRTNGTAHFLEHMAFKGTIVPGRPLRAVSLRIRVTRLTCSLFLLSLTPHCTATRNRQCPSLSHKGTGKRSQHSLELEVENLGAHLNAYTSREQTVYYAKAFRKDVDKAVDIISDILQNSKLENSAIERERDVILREQEEVDKLKEEVVFDHLHSVAFQGQPLGRTILGPKKNILSIKREDLAEYIKTNYTADRMVLVGAGGIEHDSLVKLAEQHFGSLPVSSSPLKLGQSSSPKTSFVGSEVRIRDDTSPTCNFALAVEGVSWKSPDYFPMLVLQSIMGNWDRSLGSSPLLSSRLSHIISSNNLANSFMHFSTSYSDTGLWGVYMVSENFVQLDDLIHFTLREWQRMSTAPTEGEVERAKAQLKASLLLGLDGTTAIAEDIGRQLVTAGKRYTPQEIQAAIDSIGVQDIQRVARTYLWDADFALAAHGQVEGILDYNRIRSDLSSMIW

SEQ ID NO: 25021 - protein, 437 aa, Arabidopsis thaliana
MGDCRPLGFLIGLPFALVALVLALVGAVIWIIGTVLSCLCPCCFCFAALANFAVDLIKLPIKLNGLESYGNEEKPVMQTRVTQTIRESGKVKKRKREEDRMGVDYYKVLQVDRSASDDDLKKAYRKLAMKWHPDKNPNNKKDAEAMFKQISEAYEVLSDPQKKAVYDQYGEEGLKGNVPPPDAGGATYFSTGDGPTSFRFNPRNADDIFAEFFGFSSPFGGGRGGTRFSSSMFGDNMFASFGEGGGGGGGSMHHGGARKAAPIENKLPCSLEDLYKGTTKKMRISREIADVSGKTMQVEEILTIDVKPGWKKGTKITFPEKGNEQPGVIPADLVFIIDEKPHPVFTREGNDLIVTQKISLVEALTGYTVNLTTLDGRRLTIPVTNVVHPEYEEVVPKEGMPLQKDQTKRGNLRIKFNIKFPTRLTSEQKTGVKKLLG

SEQ ID NO: 25022 - protein, 453 aa, Ashbya gossypii ATCC 10895
MWRARTMASQEEFYRTQIFGTVFEITNRYADLNPVGMGAFGLVCSAVDTYTQQPVAIKKIMKPFSTAVLAKRTYRELKLLKHLRHENLICLEDIFLSPLEDIYFVTELQGTDLHRLLQTRPLEKQFLQYFLYQILRGLKYVHSAGVIHRDLKPSNILINENCDLKICDFGLARIQDPQMTGYVSTRYYRAPEIMLTWQKYNVEVDIWSAGCIFAEMIEGKPLFPGKDHVHQFSIITDLLGSPPKDVIDTICSENTLKFVTSLPHRDPVPFTERFKNLKPDAVDLLEKMLVFDPKKRITAGDALTHPYLAPYHDPTDEPVADAKFDWNFNDADLPVDTWRVMMYSEILDFHQVPDSQINPNDTFDDQVAAATAAAEAARQQQQQKQQQQKQQQQRHQGVEHGAQHVQLQHGAKQLSADPLVGDSNGGIPLNVSAANETLNNFANQAAQYATDFE

SEQ ID NO: 25023 - protein, 258 aa, Burkholderia sp. 383
MAYENILVETRGRVGLVTLNRPKALNALNDALMDELGDALKAFDADDGIGAIVVTGSEKAFAAGADIGMMATYSYMDAYRGDYITRNWETVREIRKPIIAAVSGFALGGGCELAMMCDIIFAADTAKFGQPEIKLGVMPGAGGTQRLPRAVSKAKAMDMCLTARFMDAAEAERAGLVSRVLPADTLLDEALAAAATIAEFSLPAVMMVKESVNRAYETTLAEGVHFERRLFHSLFATEDQKEGMAAFVEKRKPVFKHR

SEQ ID NO: 25024 - protein, 542 aa, marine gamma proteobacterium HTCC2207
MTSSTNQAADYTPTTTSAWKSLEQQAEKAQHQNISGFFDQNPSRSSQMSVQCGEIFLDYSKNLVSDESWQALLELANQSPLEQHRAAMFSGEKVNTTEGRAVLHGALRAEIGDQRVASAAVESDQRVTLVKQQLVDVELVSEQIRSGQWLGSTGKAITDVVNIGIGGSDLGPKLACSALQEFAHPDIKLHFISNVDGAEILTTLKKLNPETTLVALASKTFTTHETLLNAKTARNWFAETLGLENAQSTRHFVGLTANRANALAYGIPADQILEFAEWVGGRYSLWSSIGLSIAISIGFEKFVEMLAGAREMDLHFQQAPLAENMPVIMALLGIWYSNFLDAQSTAVIPYCERLLLLPSYLQQLDMESNGKSTTLNGDSIDYQTGAILWGQTGTNGQHAFFQLLHQGTRMVPVDFIAAAVDNLSNEEHHRVLLGNMLAQASALMCGQDAPDGEPYRYYPGNKPSNTLLLDTLSPKNFGALIALYEHKVFVQGSIWNINSFDQWGVELGKKMANQLLASDNSGQAELDPSTTALFAHIKKCQE

SEQ ID NO: 25025 - protein, 303 aa, Prochloron didemni
RIGRNFLRCWAGRENSQLDLVGINDTSDPKTNAHLLKYDSMLGIFDGDVDADENSLIVNGKTIKCVSDRNPLNLPWADWGIDLIIESTGVFVTEEGASKHLTAGAKKVLITAPGKGGNIGTYVVGVNEKDYEHHKHNVVSNASCTTNCLAPFAKVLNDTFGIVKGTMTTTHSYTGDQRLLDASHRDLRRARAAAINIVPTSTGAAKAVALVVPELKGKLNGIAMRVPTPNVSVVDLVVQVEQGCIKEQVNDALKAAAEGPLKGILRYNDLPLVSCDYRGTDCSSIVDGSLTMVMGGDMVKVVA

SEQ ID NO: 25026 - protein, 312 aa, Bradyrhizobium sp. BTAi1
MSDIVTITPNPAVDVSTTVERIMPVAKLRGTTQQRDPGGGGINVARVITRLGGDVTALYPVGGPTGQLLKQLVESEGVTSLTWTTAEHTREDFFVQERATAQPYRFILPGPTLSESEWQAGLALLARIDPFPRFVVGSGSLPRGVPTDYYARIAALVRARGAQFILDTSGPALAAAVAGGVDLIKPSLREMQELAGGELPDAAAWERAARALVASGKAGTVALTMGHLGALLVTSERVLRAQPLTMVPVNAVGAGDSFLGALVAKLAAGAPLEDAFRFAVAAGAAALLRTGTALCDPSDVNRLLADVRLETA

SEQ ID NO: 25027 - protein, 366 aa, Pseudomonas aeruginosa PAO1
MALLPLALLTPLLAPLRRLAARGWLREADVDGLLRHAHPLASLNRHYARVEARYWVADDMLALALRTAPGWPPVRPGQHIQLLAERDGVRVGRSYSLTRVVGERLEIAVKRHPDGLLSPWLCEHLAVGQRVELQPAQGDLRWPMQAEAVCLLAAGSGLTPLLGLLREALENGYRGPVLWLHYVRHPGQRAWLGELEALAARHPNLELRWSLTRGARADGCLEGHFQPRHLDGWAADLARSQALACGPAAFVEAVGEQLGARFAGLQTESFSVPRWRSGEAPREVRLRFARSQREVSGDSAASLLEQAEAHGLRPAHGCRQGICASCTCVLLSGCVRDLRSGALCSEPGQPIRLCVSAAHGDLALDL

SEQ ID NO: 25028 - protein, 551 aa, Xylella fastidiosa 9a5c
MTEIKEAFVPDIGDYSNVPVIEVLVAVGDTVSKGQSLITLESDKATMEVPSSTAGIIKEIKVKVGDTLSQGHVVALIEVSEETAGVTTPMTVNTPATRAHNAAPPEDGGSLIEVRVPDIGDYSNVPVIEVLVTVGDTVSKDQSLITLESDKATLEVPSSATGVIKQLKVNVGDTLSQGDIVVVLQSAESTPLTPATNKPALPPNSSPARDAISAPASPAGTPSTPPITFDANTVLPSKIPYASPAVRLLARQLGVDLSRIKGSEKNGRITREDVQKFVNATVGTGIPEGRTPSASITTNGGLNLLPWPNVDFSKFGEIETQPLSRIKKISGANLARNWAMIPHVTQFDQADITELEALRVQINKENAAPNKNGTGIKLTVLAFLIKASAAALKKFPTFNASLDATGETLTLKKYFHIGFAADTPNGLVVPVIRNVDQKGIVEIAQETSDLAKKARDGKLTPADMSGGCFSISSLGGIGGTAFTPIINAPEVAILGVSKSLIQPIWDGTQFAPKMLLPLSLSYDHRVIDGALAAHFTTYLSQILADMRRVLL

SEQ ID NO: 25029 - protein, 374 aa, Glycine max
MDVAVSGNSLAGTSTPYNRLQELKAFDESKAGVKGLVDSGITKLPKIFVRPPEDLAAADPVSGNPAGAQFTIPIIDLDGLTGERSGVVAGVRRAAETVGFFQVVNHGIPVKVLEETMAAVHEFHELPQELKAEYYSREQMKKVKYGSNFDLYQSKYANWRDTLFCVMGPDPLDPQELPPICRDVAMEYSRQVKLLGRVLFGLLSEALGLDPDHLEGMDCAKGHSILFHYYPSCPEPELTMGTTRHSDPDFLTILLQDHIGGLQVLSHNGWVDVPPVPGALVVNIGDLLQLISNDKFKSVEHRVLANRIGPRVSVACFFTIHFYPSTRIYGPIKELLSEEKPPVYRETSLKDFIAYYDNKGLDGNSALDHFMISR

SEQ ID NO: 25030 - protein, 413 aa, Bacillus subtilis subsp. subtilis str. 168
MTKKRVVVTGLGALSPLGNDVDTSWNNAINGVSGIGPITRVDAEEYPAKVAAELKDFNVEDYMDKKEARKMDRFTQYAVVAAKMAVEDADLNITDEIAPRVGVWVGSGIGGLETLESQFEIFLTKGPRRVSPFFVPMMIPDMATGQISIALGAKGVNSCTVTACATGTNSIGDAFKVIQRGDADVMVTGGTEAPLTRMSFAGFSANKALSTNPDPKTASRPFDKNRDGFVMGEGAGIIVLEELEHALARGAKIYGEIVGYGSTGDAYHITAPAQDGEGGARAMQEAIKDAGIAPEEIDYINAHGTSTYYNDKYETMAIKTVFGEHAHKLAVSSTKSMTGHLLGAAGGIEAIFSILAIKEGVIPPTINIQTPDEECDLDYVPDEARRQELNYVLSNSLGFGGHNATLIFKKYQS

SEQ ID NO: 25031 - protein, 362 aa, Thermoanaerobacter tengcongensis MB4
MDFINQALNFYSEEIEAYTLYSYLSKIEKSPEIKKRFKKLSEMEKNHAAFWEKFLKDRKAQVPKLKSQPFKLFIYRIFRKLLGNKLFVTILEMNETSTTECYFKFLNEVPLSDEEKTVLSRIIEEELEHEKLFSQQKDRISIENIRDFIMGMNDGLVEILGTVTGLSAVYPKNPITVGTAGLVVGVAGALSMAIGAYTSVRSQRQVNEGIKKKMELLFKVSKERAKEEFLNKLQDSGIPMEVGEEIAEKLNNNEEAMTNLLTEEITENEVKSALYTGIAYLVGLVFPVIPYFFISSSSLLALAFSVIFAAIALSIVGTVVSVASESLSIKGKITEMVITGLGAAALSYLFGTLVQKVFGITA

SEQ ID NO: 25032 - protein, 420 aa, Kineococcus radiotolerans SRS30216
MTTTSTSSSRRVVVTGMGATTPLGGDVRTSWEAALAGRSGARPITDPWIEEFELPVTFAAQAAVRADTILERREIKRLDPSQQFAVIAAREAWADAGTPEVDPLRLGSVVATGIGGIWTLLTSYDTLKEKGARRVLPLTVPMLMANGPTAAISIEFTARAGAHTPVSACASGAEAIAYGADMIRTGRADIVICGGTEAAIHPLPIASFTSMHAMSRRNEDPERASRPFDTARDGFVLGEGAGILVLESEEHARARGARVHAEVLGVGLSADAYHVAAPEPEGAGTSRAMLDALHQADLTPADLCHVNAHATSTPVGDVAEDKGLRLAFGDATDGIAVSATKSMTGHLLGAAGAVESIFTILALRDRLAPPTINVDDLDPAITLDVVRKDPRPLPAEGRLVGLNNAFGFGGHNVSAVFATP

SEQ ID NO: 25033 - protein, 492 aa, Xanthobacter autotrophicus Py2
MAAPQPLSRPATARFPLLRDKMLIGGAWVDADSGATIEVNNPATGEIIGTIPKAGAAETRRAIEAASEAFKTWRATTAAERAAKLHKLADLITQNADELAAILTTEQGKPLAEAKGEIGASAGYVRWFAEEARRLYGDVIPSPWGNRRILVTKEPVGVVTAVTPWNFPSSMLSRKIGAALAAGCTVVAKPSELTPYSGLAWGVLAEMAGIPAGVVNIVVGEAPAIGGEMTSNPLVKKVTFTGSTPVGKLLMKQSADTMKKISMELGGNAPFLVFDDADLDLAVEQAIASKFRNVGQTCVCANRFYVQAGIYDAFAAKFAEASKKLKVGNGLDEGVVAGPLIDDRALAKVERLLKDALDKGATVLTGGKQPALGGTFFEPTVLAGATQDMAFARDEIFGPLAPLFKFETEEQAVSYANDTEYGLACYFFTKDLGRAFRVAEKLEYGQVGINAGVITTEVAPFGGVKESGMGREGSKYGCDDYLNIKYMCVGGL

SEQ ID NO: 25034 - protein, 482 aa, Bradyrhizobium sp. BTAi1
MNAILKNFIAGEWVDGSGVTRNINPSNTNDVVGEYAKADRAQTEKAIAAAKAAFPAWSRSTPQERYDALNKISAEILSRKEELGRLLAREEGKTLPEGIGEVARAGQIFAFFAGEALRLTGEKGASVRPGLDVEITREAVGVVGMITPWNFPIAIPAWKIAPALCYGNTVVFKPAELVPGSAHALSEIIARSGLPAGVFNLVVGSGSVVGQTLLEHPDVAAISFTGSVGTGRKIAQACVLSNPMKKFQLEMGGKNPLVVLDDADVKVAVEAAANGAYFSTGQRCTASSRLIVTEGIHDTFVAALTERLKGLVVDDAVKQGTHIGPVVDANQLEQDQRYLKIGQDEGAKLAWGGELLNRETPGFYMQPALFTEATNNMRIAREEIFGPVACVIRAKNYDEALAISNDTEFGLAAGVCTTSLKYASHFKRNSEAGMVMVNLPTAGVDYHVPFGGRKGSSYGAREQGSYAREFYTTVKTAYTFPV

SEQ ID NO: 25035 - protein, 294 aa, Brassica napus
  misc_feature (208)..(208): Xaa can be any naturally occurring amino acid
  misc_feature (211)..(211): Xaa can be any naturally occurring amino acid
  misc_feature (253)..(253): Xaa can be any naturally occurring amino acid
  misc_feature (259)..(259): Xaa can be any naturally occurring amino acid
  misc_feature (286)..(286): Xaa can be any naturally occurring amino acid
MSLVVVSGYNTGRLLRLPTLSIFPKFSPLSALMNSSNLSSSSKPAFSSFSQSSRSGGRGRGNERDNDRRRPQGRGGGGGGRGGGGGNDRIDALGRLLTRILRHMATELRLDMRGDGFVIVEDLLNLNLKTSANVQLKSHTVDEIREAVRRDNKQRFSLVEENGELLIRANQGHSITTVESEKLLKPILSPEEAPVCVHGTYRKNLESXLAXGLKRMNRLHVHFSCGLPTDGEVISGMRRDVNLLIFLDIKKAXEDGIAXYISDNKVILTEGVDGVVPVDYFQKIEXWPSRQPIP

SEQ ID NO: 25036 - protein, 337 aa, Streptococcus mutans UA159
MEEEKLTSEKEIYDITVIGGGPVGLFTAFYAGLRGISVKVIESLSELGGQPAILYPEKVIYDIPAFPAITGADLVDNLIEQLERFKDKTTICLKEEVKTFEKENAIFTITTNKGNHFSKAIIIACGNGAFAPRRLGLDDEERYADHNLFYNVHKLDQFAGKKVVICGGGDSAVDWANALDKIAESVTLVHRRDAFRAHEHSVEVLKTSHVNIMTPYVPLELKGEGDEATSLVIQKVKSEETKELSLDSLIVSFGFSTSNKNLKSWNIDYKRSSINVSPLFETSQTGVFAIGDAAEYEGKIDLIATGFGEAPTAVNQAIKYIYPERDNRVVHSTSLIK

SEQ ID NO: 25037 - protein, 373 aa, Pichia stipitis
MSTVTKTITVLPGDHVGTEICNEAIKVLEAIEQATPYQKIHFEFKHHLIGGAAIDSTGVPLPDDSLAAAKLSDAVLLGAVGGPKWGTGAVRPEQGLLKIRKELNLYANLRPCNFASDALLELSPLKSEIVKGTNFTVVRELVGGIYFGERQEQEESADGESAWDTEKYSVAEVTRITRMAAFMALQHNPPLPIWSLDKANVLASSRLWRKTVDKVMKEEFPQLTIQHQLIDSAAMILVQSPTKLNGIVITSNMFGYIISDEASVIPGSLGLLPSASLASLPDTNSAFGLYEPCHGSAPDLPENKVNPIATILSVAMMLRLSLDSLKEAEALEEAVRQVLDSGVRTADLRGTNSTKEVGEAVVAGVTKILKDAA

SEQ ID NO: 25038 - protein, 412 aa, Alkalilimnicola ehrlichei MLHE-1
MSKRRVAVTGLGLVCPQGNTVDEAWENILAGRSAARSIDRFDASEFPVQFAAMLQGFDVGRYLSPKEARKMDPFIHYAIAAGVQAMEDSGLAVSDENADRIGVSIGSGIGGISGIEANMAVLNRSGARRISPFFVPSSIINMASGHLSIRYGLKGPNLATVTACAAGTHNIGQAARAIAYGDVDAMLAGGSEMPISPLGLAGFAAARALSNRNDEPAQASRPFEKGRDGFVLGEGAGIVVLEEMEAAKRRGATIYGELAGFGMSGDAYHITLPAEGGDGARRCMVHALRDAHITPDQVDYINAHGTSTPAGDRVEVEAVRTAFGDHADRLAMSSTKSMTGHLLGAAGGVEAIFSLLALRDQVAPPTINYEEPDPDCRLDFVPNEARDLTMNVALSNSFGFGGTNGSLVFRRV

SEQ ID NO: 25039 - protein, 323 aa, Geobacter metallireducens GS-15
MSLKRSFNVKRTAVLTILSATLLAVPFTGCKGKTETGTATAPAKKAGEVIAEVNGDTITTGDFQKELENLPPYLKPMADTAEGKKELLDTMVVRELILQQARKDGLDKSPDVAAKLEELKKRVVVEAFLKKKVEEQAKVSDEEMKKFYEENKDKFKTGPQVHASHILMKSEDEAQKVLKELKEGGNFEELAKKHSIDSAAAKGGDLGWFSKGSMVPEFEKVVFGLKEGETSGIVKTKFGYHIIKLTGKRPAGIRTFDEVKEQLRAAILPSKQQEVFQKLKDDIKKGAKVTIKEDVLKGIGGAAAEKPAPAGPESTPAKKAETK

SEQ ID NO: 25040 - protein, 585 aa, Arabidopsis thaliana
MQDLFGSVRRSLVFRSTTDDENQENHPPPFPSLLADKITSCIRKSMVFAKSQSPPNNSTVQIKPPIRWRKGQLIGRGAFGTVYMGMNLDSGELLAVKQVLITSNCASKEKTQAHIQELEEEVKLLKNLSHPNIVRYLGTVREDETLNILLEFVPGGSISSLLEKFGAFPESVVRTYTNQLLLGLEYLHNHAIMHRDIKGANILVDNQGCIKLADFGASKQVAELATISGAKSMKGTPYWMAPEVILQTGHSFSADIWSVGCTVIEMVTGKAPWSQQYKEIAAIFHIGTTKSHPPIPDNISSDANDFLLKCLQQEPNLRPTASELLKVKWSTDIHLLRANRRNLRLKILLHLCQTSTSDDVGDICNLGSLTCTLAFPEKSIQNNSLCLKSNNGYDDDDDNDMCLIDDENFLTYNGETGPSLDNNTDAKKSCDTMSEISDILKCKFDENSGNGETETKVSMEVDHPSYSEDENELTESKIKAFLDDKGHIGRSPSRATDAACCSKSPESGNSSGAPKNSNASAGAEQESNSQSVALSEIERKWKEELDQELERKRREITRQAGMGSSPRDRSLSRHREKSRFASPGK

SEQ ID NO: 25041 - protein, 344 aa, Bacillus cereus E33L
MTRTVSMSTAINEAMKISMRRDENVILIGEDVAGGAQVDHLQDDEAWGGVLGVTKGLVQEFGRNRILDTPISEAGYMGAAMAAAATGLRPIAELMFNDFIGSCLDQVLNQGAKFRYMFGGKAKVPVTVRTMHGAGFSAAAQHSQSLYALFTSIPGIKVVVPSTPYDAKGLLLAAIEDDDPVIFFEDKTLYNMKGEVPEGYYTIPLGKADIKREGSDVTIVAIGKQVHTALAAAEQLAKKGLEVEVIDPRSLSPLDEDTILSSVEKTNRLIVIDEANPRCSIATDIAAIVADKGFDLLDAPIKRITAPHTPVPFSPPLEKLYLPTPEKVIETVSEMIGDQSLLHV

SEQ ID NO: 25042 - protein, 313 aa, Triticum aestivum
MASTLLRKVWGTVLARAVPRDPDASASSSSPRRRGAPAAAAAAEYGSLGALDAVPIDVLAQILRLLGPADAARSVAVCRTWRLLASDNALWAFFLSLGPDPWDLVVFAETHLAAGSAEPRSVYFGTVRVPPQLSFKRIYGQRALVPGSIIVDGGSGYCKYGWSKYPAPSGRCATFLEFGNIHVPMYARPRQFRSTILTGIHVKPSCSTKLWVAFPLWPLRVYRRLLGPQQSSPRGTWSWGCGPNTDCPRRIAPFDPTPPLAVQSEATTPLGLGGPHGGCNRHIPGRPHPAKGRAGAGSPALCEPWGQTGPRKT

SEQ ID NO: 25043 - protein, 398 aa, Bacillus cereus E33L
MAVEVVMPKLGMAMKEGIITSWNIKAGDHVSKGELIASINSEKIETEIEAPADGTVLDIAVSEDEGVPPGTVICYIGKPNEKVEVHESTKVEEELVASEVSQNVQHPEPLGKEVTNKQRIKISPVAKKIAKTENLDIKSLLGTGPGGRITKVDVLKALEERVAIPEVLEESKVIPVTGMRKAIANRMHASLQNSAQLTLTMKVDVTDLVALHKEIAKVVQKRYNNKLTITDFVSRAVVLALGEHKEMNSAYMDDTIHQFEHVHLGMAIALEKGLVVPAIRFANNLSLVELSKQIKNVAQKARAGSLSSDDMQGTTFTISNLGSFGIEYFTPVLNTPEAGILGVGAIEHVPVYKGKKLKKGSMLPLSLTFDHRVLDGAPAAAFLRTIKRYLEEPVTILL

SEQ ID NO: 25044 - protein, 633 aa, Phalaenopsis equestris
MEGCDCIEPQWPADELLVKYQYISDFFIALAYFSIPLELIYFVKKSSFFPYRWVLIQFGAFIVLCGATHLINLWTFTMHSRTLAIVMTVAKVSTAVVSCATALMLVHIIPDLLSVKTRELFLRNKAEELDREMGLIRTQEETGRHVRMLTHEIRSTLDRHTILRTTLVELGRTLDLVECALWMPSRTGLNLQLSHTLNNQIPVGSVVSINLPVVNQVFNSSCAVRIPHTCPLARFQPHTGRYVPPEVVAVRVPLLHLSNFQINDWPELSAKNFAVMVLMLPSDSARKWHVYELELVEVVADQVAVALSHAAILEESMRARDQLMDQNVALDLARREAEMAIRARNDFLAVMNHEMRTPMHAIIALSSLLLETELTPEQRLMVETILKSSNLLATLINDVLDLSKLEDGSFELEVTVFNLHTVFREVVNLIKPIAAVKKLSLIVFLSPDLPSCAVGDEKRLMQTMLNVVGNAVKFTKEGSISITASIAKPDSLRDPRDPEFYPIPSDGHFYLRVQIKDTGCGISPQELPHLFTKFAHAQNGSDKGYNGSGLGLAICKRFVNIMKGHIWPESEGIGKGCTTIFIVKLGISEDPAHRFQHKLLPPIRAGQSEADAFGSKPTPTDLIPLKNRYQRSL

SEQ ID NO: 25045 - protein, 155 aa, Haloarcula marismortui ATCC 43049
MGISYSVEADPDTTAKAMLRERQMSFKHSKAIAREIKGKTAGEAVDYLEAVIEGDQPVPFKQHNSGVGHKSKVDGWDAGRYPEKASKAFLDLLENAVGNADHQGFDGEAMTIKHVAAHKVGEQQGRKPRAMGRASAWNSPQVDVELILEEPEVED

SEQ ID NO: 25046 - protein, 240 aa, Glycine max
SYVGPPPSVYQAIRCMSSKLFVGGISYQTDDHSLRDEFAKYGQVIEARIIIDRESGRSRGFGFVTYTSSEEASAAITALDGKTLDGRSIRVNHANEKTGGFRGGGGYGGGGYGGGGGYGGGGGGYGGGGGYGGGGGGGGYGGGDYGGNRNRGGGGDYGVAGGGGGTFTAGGSDSFANSNFGSDSSFGGNGAGGFDATGGSTGDDGFSGTPDDNFGGNKNEETMDDIFKDDEPDSYADKRS

SEQ ID NO: 25047 - protein, 128 aa, Triticum aestivum
MRPGAEFFAVSHLAGAPTATQALHSAWQSPVPYLFGGLAAMLGLIAFALLILACSYWKLSGFLDGGSDGQAAGDADGEKGSASGASRPAPDFQEHVVVIMAGDERPTFLAKPVTSRAAEAELAAAAAP

SEQ ID NO: 25048 - protein, 1192 aa, Candida glabrata CBS 138
MERDYHVNTGFQMGRREEERGIAMAPASLRMMGKSGARELMEPATVNAGVQDIDANAEMQATDMPGAPASVPAERKSQGQGQSQGQGQGQGQGQGQMKQFHRKSLGDWDFLETVGAGSMGKVKLAKHRRTGEVCAIKIVNRATKAFLHKEQNSPPPVNNQEIMERQKKLEKEISRDKRAIREASLGQIFYHPHICRLFEMCTMSNHFYMLFEYVAGGQLLDYIIQHGSLREHHARKFARGVASALQYLHANNIVHRDLKIENIMISNSGEIKIIDFGLSNVYDTRKQLHTFCGSLYFAAPELLKAHPYTGPEVDVWSFGVVLYVLVCGKVPFDDENSSVLHEKIKRGKVEYPQHLSIEVMSLLSKMLVVDPSRRASLKQVVEHPWMTKGYDTPAPSYVPNRIPLTPEMLDSTVLREMFRLEFIEDIEETRKLLATIVSDPTYLTLSNEYWTRLQSITETTGQGKTTHFEIQGVSINFHLTSGVNKIPFEDPTRAFHPLLSIYYLVAEMLQRKMAKLQKKQALIQQQQQQIQKQQQQRVQQQQPQQQKQPLTPKEPEQTEFAYSKTPNTSDKSAGLTVPSRPTDIINEMKAKSDRTDYIMNTPKQDTGSNTTVEKLYTPKEQQSVERKTAPLHIMVPPKLTMPEQAHTSPTTRKSSDIHDELNTAMSPKVLSKEYEQRPNTQLDSPEKKRFPALFGKLSQKRQPSSQQSPQSNNNPQFQVHAAPNLEPAKRSTKTHTRTVSEYVPGPSNNKEFIETYLPSNYANKNNSPSRSVSTKVANTERFPALPANANTMVEQQLAKDMDNLNVNNNTNRAPDTSSADYDENKPLPPLTVTKGRKLHPSARAKSVGHSRRESLKFTRPPVPTNVQGYDNDDAGFLEYSDDNRNDSAIIRTPNSSKYLSPPTPNTRFGFGSTEELTDEQILEQASRAPPGTMPSIDYPRSLFLKGFFSVQTTSSKPLPIVRYKIMHLLKKMHVEFKEVKGGFVCTHEGQLSFLNNDNELPEYNPLAETDENNIDNRLTINTNLSPHPSQNHLQLPTPIENQAVTYRSIRSGSRQNSIRRQGSTKISPNIPTTPMATTEHHRNISEVMSPVAQNINLGSTLSDEHSTTSLDNIANQEDILTTSRVQNMNRPDLDLEQQAIAKASNEKSRVKFEIHIVKVRIVGLAGVHFKKVSGNTWLYKELASHILKNLNL

SEQ ID NO: 25049 - protein, 1071 aa, Ashbya gossypii ATCC 10895
MPSSTQDYHVNSQFRMGGSPQAAVAPATPRMMGKAGEEERRMPKPFHRKSLGDWDFLETVGAGSMGKVKLAKHRYTNELCAIKIVNRATKSFMHKQQLQGLPPPATEEELLERRKKLEKEVSRDKRTIREASLGQILYHPHICRLFEMCTMSNHFYMLFEYVSGGQLLDYIIQHGSLRERHARKFARGIASALQYLHLNNIVHRDLKIENIMISSSGEIRIIDFGLSNMYDPKKQLHTFCGSLYFAAPELLKAHPYTGPEVDIWSFGVVLYVLVCGKVPFDDENASVLHEKIKQGKVEYPQHLSIDVISLLSKMLVVDPYKRATLKQVVHHQWMQKGYDFPPPSYLPPCVPLTPDRINMDIITEMYRLELIHDVAETAQWLEKIITSPEYLELSRQYWENAANMKPEDAPIRGYSPLLSMYHLVDEMLKRKRSKMQKRGQASAQTPATAGANSGLPSSAALISADTTSAGSYASTAAGPQKLAAAVTPENSDRMSGPHVLVSQLDSEKSRTLQPAVSPHDETSSTYITVTTPSKQKQNVLVPPRLAIPEQAHTTTPRKAINVDGEIDQKVLSPTPQSHDFETSNKYSTTSNATHSAAVSAGSTEKHIFGTLFRRFSQRHRHTTSQGGSQCAYHPEVNTLQSSAQYQTSKTSTQAAKTKTHTRTVSEYTPASKYANMGPPAAADSTRSTTNYLEARSPLPALPVNAESLVKEQQRLQDNLQGLDISGGGQSSHANNNRNSTSSYNNNGPEVIDEDKPLRQLSVPKGRKLHPSARAKSVGHARRESLKFMRPAIASQLSPQDINDEGFLEQGSDTESENIFGGSSSGAVASVDEELTDKQILELAARAPPGSMPSIDYPRSLFLKGFFSVQTTSSKPLPIVRYKIISTLKKLNIEFKEVKGGFVCVHRQSYMTNRASPTQPNIFVTDSTSITSSTNGTASSTHRRQLSVPSRHNSLRRQQQAGANNLGTSMHERTSSTASHSIAGSGCITEELSTASLESLHGDDILTTSKAQHMNTKDLEMQLQKERPPLKFEIHIVKVRIVGLAGVHFKKVSGNTWMYKELASHILKELNL

SEQ ID NO: 25050 - protein, 342 aa, marine gamma proteobacterium HTCC2207
MYRIAINGFGRIGRNIVRALYERPELREKIQIVAINDLGSLEISAHLLQFDTVHGRFNQQVEVTDNAIVINGDVINWSSERNPTDLPWADLNVDLVCECTGVFTSREKAAMHIEAGAKKVIISAPGTNVDATVVYGVNDHILDGTQEIISNASCTTNCLAPMVQPLQESIGILSGYMTTVHAYTNDQQLSDVCHSDVYRSRSATQSMIPTKTGAAVAIGLVLPELAGKLDGLAVRVPTINVSLVDLTFNAGRETSVEEVNELLLKASQGTLKSVLCYNDKPLVSVDFNHTPFSCNFDATQTRVNGSLVKVMAWYDNEWGFSNRMLDNSLVLLASTTEQKDAA

SEQ ID NO: 25051 - protein, 987 aa, Arabidopsis thaliana
MSDHGEKTCPLCAEEMDLTDQQLKPCKCGYQICVWCWHHIVDMAEKDQIEGRCPACRTPYDKEKIVGMTVNCDSLASEGNMERKKIQKSKSKSSEGRKQQLTSVRVIQRNLVYIVGLPLNLADEDLLQHKEYFGQYGKVLKVSMSRTASGVIQQFPNNTCSVYITYGKEEEAVRCIQAVHGFILDGKPLKACFGTTKYCHAWLRNVACVNPDCLYLHEVGSQDDSFTKDEIISAYTRSRVQQITGATNILQHHSGNMLPPPLDAYCSDSSSAKPIIKVPSTNATSVPRYSPPSGSGSSSRSTALPAAASWGTHQSLATSVTSNGSSDIQRSTSVNGTLPFSAVVANAAHGPVSSNDILKRPSRKEESQIVMDKVKPSVLKPLQHNVVVSGSERITAPDRDPTSNRLSSSVDSAYGGRDIDQPSAYSGRDIDKPSSTVSSFDAANEAVEDVPTVSNLLDGVACMRITMNCRDERPDITMAIGSQSDQGSIRQPGSEVSKLPDLEQCRIDSSINTDKKAISLEDRIPRTRPGWDWISDLQSQMQGSSKLQVEDISTLDSQRPHPEEDIIHSRLLSNLSSSSLDTNHMASRSSLPCEVRGSDRLHLPNGFGEKSMSSVEHSLFANEGRNKVNNAEDAILSNILSLDFDPWDESLTSPHNLAELLGEVDQRSSTLKPSNFLKQHNNQSRFSFARYEESSNQAYDSENYSIYGQLSRDKPIQESAMSRDIYRNNLGSVNGFASNFAGGLDNFAASPLFSSHKNPVSRPQVSAPPGFSAPNRLPPPGFSSHERVGLSSDTTLGNRFLDSTSLRNAYQVPPPVGNSNGASDIDFVDPAILAVGRGMVNADLDMRSGFSSQLNSFENETGLHMLRQQSLSSAQQVNGFHHDLRNLSPSLNDPYGFSSRLMDQTQGSSLSPFSQLPRQQPSANSILSNGHHWDKWNEGQSVNNIGMAELLRNERLGFNGSLYNNGYEEPKFRIPSPGDVYNRTYGI

SEQ ID NO: 25052 - protein, 496 aa, Triticum aestivum
  misc_feature (449)..(449): Xaa can be any naturally occurring amino acid
  misc_feature (476)..(476): Xaa can be any naturally occurring amino acid
MSATCAADLGPLLGAAAANATDYLCNRFADTTSAVDSTYLLFSAYLVFAMQLGFAMLCAGSVRAKNTMNIMLTNVLDAAAGALFYYLFGFAFAFGTPSNGFIGKHFFGLKDMPQTGFDYSFFLFQWAFAIAAAGITSGSIAERTQFVAYLIYSAFLTGFVYPVVSHWIWSVDGWASAARTSGPLLFKSGVIDFAGSGVVHMVGGIAGFWGALIEGPRIGRFDHAGRSVALKGHSASLVVLGTFLLWFGWYGFNPGSFVTILKSYGPPGSINGQWSGVGRTAVTTTLAGSVAALTTLFGKRLQTGHWNVVDVCNGLLGGFAAITAGCSVVDPWAAVICGFVSAWVLIGLNALAGRLKYDDPLEAAQLHGGCGAWGIIFTALFAKKQYVEEIYGAGRPYGLFLGGGGRLLAAHIVQILVIAGFVSCTMGPLFLALKKLGLLRISAEDEMAXGMDLTRHGGFAYVYHDDDEHDKSVGGXFMLRSAQTRVEPAAAANSQV

SEQ ID NO: 25053 - protein, 2799 aa, Ustilago maydis 521
MSIDMTGGAAPTDDDFTKLPIHDRLASKLWKARVSAYEELSKAFPNTSSEDDPIFRQYTRNPDILKSIVVDTNAVAQEKGVDAVRAFVEFGAKPAGSTRELVVPALVEKCLGSTRAGTKNNALQLISFYAEMEDVLGCEPLLADLLDGLKAKQPKVVAGCVTAIMHLVRDFGHKQVSPKPILQRLPDMFAHSDKNVRAEASLLALQLHRYIGAALEPTIDTLKDIQAKELRQQFAEIDAAAASKPLPTRFLLSQREKLQAAAAPISQPGTDAAASISAAQQDHRDDDDDDVDPYDLAEPVNVFGSRDYPADFEEMIVSKKWQERKETLETILKILSSSPKIQPDNRFDGLVDHLALKISKDANINVVLVSCQCLNAMAKGLRDNFARYKDKVVPPIIEKLKEKKPATVEVLAKALDAIFQTVSFSEILEHIFTGIKHKNPAVKTESIRFLVRCLRTTKLAPAKADIKPIGDALVVAMADGSPDVRDAGAAGLGTLMKLIGERPMNIFLDGLDDIKKAKIQDECNTAEVKVKMGAGAGARPPLSSAARPTAPIPASAPSAVTNRAAPPAAVRAKPPSATQAMATGKENQAPRPVARPTPSMAARPIGTRPAAATSSAVSSAPAPARKATPAAAAGSSKVAASATEPVKYRFHPDDAEARAADLIPAAIATQLASSAWKERLAGMTQFNDWLKVEAESVESEIIVRALGKKPGWKESNFQVMAEVYKALQLLANDCPTFSRPSVALSVQPLCDKLGDIKLKTPAGETLVTFAEKTSFGFLLAQALGPLGSLKAPKAIADSVLWVDQTLLEFGTAGVDVRSLIDYLITCLKSANAAVRINATKAIGTLARFLGTALNSFLADLNPQLRTTIEAEIEKAASNPPPAPVRFSDETKAPAGKAAVAGGEDAAGPAAQDNAADEDMLDQLVPRVDLDRLVSAAAIARMGDANWKERKEGLEEVLAVVNANSRLKGNMAELANALKMRCSDSNIMCKSMALDAIAKIATAMNKHFEPQARILAGPVTQVLADAKAPVRASATTALTAIAEQVGAGPLLPGMSTVVEGKTANPMLKQELFGWLAAWFELHPPEKGMDLAPLALPCVQCLDDKLAAVRKASLACLPHIITRAGYKHVMEQANQLKTASKNTAIPLIDAAKIQAQNSARAAGATATAAPAATATVPAPTARVAAVSARTATASPARAAGVGSTSSVAPATSSPRTSAIARPGGIKPPSAVGRSLKAPSSIIARQARLASDSSNGAVPSRNALASANGAASQGAGPGGAMEGSAPLISADTKAKALREKREGKAANWIGADGAPRPELVEVLRQQCDGQLSRGITDSMFSKSHSSEKDYYAALTLLSDFISSPTFAEEQYGLSRQETIERTLANSDLIFKYVSIRLTDNNTSLSLKCLDILEHLVALLSEQQYHMSDYEAACILPCLTAKFGDAKVAFRDRIREIFRKMTFIFPPSKLLTSYLENGLPSKNARVRTECLSEVGYLFSKNGLQVCSPSRTLPVIAKQISDRDANVRTAALSAIGEVYKIIGDEVYKLVGALPGKEMSMLEERLKRTTAPPASVAVAVAKSAGAASTAGRAGPRASVVPSSAPGPSSPGRLSAGAPSSRLARPGSALQQPAAPSAGVRSRLAAPGAARRESAIGLPRAAKPPSVASPRASMLRAPSEAAARATSIIAPGRNKVLADELPEEEDEELSVDQAINLVVNDNFEQSVFAIKHVEAFIQEEEPQLISYVDQIAIVLSKQMQKAFSLDPSDLGNERLRKHLLVANISLFDKDRVWEDGRTLGSYLSRSALIPLLTVLVQQLIQSSFRAEDPSAQNESKYLNIILLRCFSACSLNLLYGACLQMLSEATEDLRELEGDVLETRYEFAKLLIKCLWKIAKRLEDDLSQRKVEPQQLFVDIESFLQTIEPFEWRQRAEDGVPLADVPLRTVKIILSSVVNHFGEEALGMLDMIPQPENSYVYKYLVRMLNFAFGDGGVDEEGDAVGSNAGTRTRTDAKAPSQAVNEADTVVEAQRNIAPEDRGVDKAAVVDEEGDAVGSNAGAGANAPSQAVNAADTVDGAQQNSQNGHAADAAVDEESSIRLAELHAELHEIFKRISDKKLSRQGLQEMYEFRKRYPYLESYIQSLLQTTGPMFQRYIKRVFANYAAEDPDVINAAQPPPVDAYIIALIDTHRTSRQLHSQPVVVHTFAAILLLPSRLLSAEMNVQQSHRIEPGRAVHMMCTCSRAEHRSEDMRPNVQGEHQQYDEHEYDGHGAESKPVQLDQLLQILEHDFTVQLALTLLAQTEAERNFCDIGTVQSDFETLGIDMMIGCVEAVFCDSKESTHGVRGGCERTREHARTGRNDSSMQGPVLVHADTDAVACTEDERLLPVEREQKRGYRLRRMLQVSVHTDHSLAASFAKSSNHSGRKPAFRRAHNDAGRRLRFSRNAGTITEQLGVEDVDHPEDPGCFRILADASMSRAIDIEILDVSAADPSQRPRRRESRTVNRESRIACFVTRGSWFVRAVRTLSECYIASQRMYLFPVSRVVCLFNDSRLYISSPCTLDSPLDCESRIHKTSNSTDQDASYRRDCQLPTQPSARTLYRASLDSVMLRVKDPKISLDFYENVLGMDLIDKHDGGDFTLYFLAYQHQKGITQRGEREAILELTHNHGTENDADFSYHNGNQEPKGFGHLCVAVDDIHKACDRFEKLGVKFQKKLTDGKMKNIAFILDPHTPEAGWLKLTLSLVCLVGATNACSHARACASSVVGNLRNDISSPNRPPQSKSPRPTEDHQCVPALRDPASVLQNVSVA

SEQ ID NO: 25054 - protein, 600 aa, Arabidopsis thaliana
MADRLTRIAIVSSDRCKPKKCRQECKKSCPVVKTGKLCIEVTVGSKLAFISEELCIGCGICVKKCPFEAIQIINLPRDLEKDTTHRYGANTFKLHRLPVPRPGQVLGLVGTNGIGKSTALKILAGKLKPNLGRFTSPPDWQEILTHFRGSELQNYFTRILEDNLKAIIKPQYVDHIPRAVKGNVGEVLDQKDERDKKAELCADLELNQVIDRDVENLSGGELQRFAIAVVAIQNAEIYMFDEPSSYLDVKQRLKAAQVVRSLLRPNSYVIVVEHDLSVLDYLSDFICCLYGKPGAYGVVTLPFSVREGINIFLAGFVPTENLRFRDESLTFKVAETPQESAEEIQSYARYKYPTMTKTQGNFRLRVSEGEFTDSQIIVMLGENGTGKTTFIRMLVFSSSMIYREIPEFNVSYKPQKISPKFQNSVRHLLHQKIRDSYMHPQFMSDVMKPLQIEQLMDQEVVNLSGGELQRVALTLCLGKPADIYLIDEPSAYLDSEQRIVASKVIKRFILHAKKTAFVVEHDFIMATYLADRVIVYEGQPSIDCTANCPQSLLSGMNLFLSHLNITFRRDPTNFRPRINKLESTKDREQKSAGSYYYLDD

SEQ ID NO: 25055 - protein, 281 aa, Yarrowia lipolytica CLIB122
MVLVALKKAIFGTEKQPLLRNNASYATMTDEEARLGLTDDDTLSQGSGSSGSGNSWVSPRVVSDMIIGLSDGLTVPFALTAGLSSLGDTKLVITGGMAELVAGAISMGLGGYLAAKSENDYYKSECTKERAVLKTESSEGESQIADILAQYNLSPETTASFTKDLQKNPTSMVDFIIRFGKGLEEPAEGREFTSAMTIGLAYFFGGFIPLIPYFFTAHVDDGLMWSVIVMLITLFIFGCTKTVISLGSDVGRGCITWNGIQMTLIGGLAAGAAWGLVKLIE

SEQ ID NO: 25056 - protein, 193 aa, Brassica napus
  misc_feature (60)..(60): Xaa can be any naturally occurring amino acid
MALGDLSSSSTSELHVLAVDDSIVDRKVIERLLRISACKVTTVESGTRALQYLGLDGDKXSSGLKDLKVNLIVTDYSMPGLTGYELLKKIKESSAFREIPVVIMSSENIQPRIEQCMTEGAEDFLLKPVKLADVKRLTELIMRSGEPQEEDKAKHSYPNRILQNNTDSSSSSHDYVSSVYDDTPSSKRMKLES

SEQ ID NO: 25057 - protein, 510 aa, Photorhabdus luminescens subsp. laumondii TTO1
MCGIGGVFNTENRLIDDIENKLQTIMSKIAHRGDPSRFNEKVVRNNFSIATNRLAIVERDSAYQPISNQEHDLHLVLNGQIYNYKSLRNELIKQGYQFKNGGDAEVALIAYICYGKSFIKKLDGMFSFILFDNKNNKFLLGRDHVGIKPLYYTQKEGNWYVASEIKSLIEFNSEIKPVEPGSIFDGLTSEKYISYDTTIPASSDNVEQAKEKIYSLLDNAVRKRVDTDLPVSIMFSGGIDSTIVLYLAKKYHHDITAISFGLPGSKDIEIAQRYCTENNIKHIIYTFTQEELINNIQDAIYYGEFFEQIDAIDSTIAHFGYYIANRLGFKIALCGEGSDEIFAGYDLFKTYPDPHHLSLYRLNNLHRTDLQRVDRASMRNTVEARVPFMDSALVPYVLSLDFSYKLNNGIEKYILREAFRGKIPEYIIDRPKIRMPDGSGVKNTIIDYVKDIKCNLPRNMVDSLNSIGLTHQSSLYFAEKYLSLGYPLPKERFKESGKDFSESGYFNFIS

SEQ ID NO: 25058 - protein, 440 aa, Chlamydophila pneumoniae CWL029
MSKIVYKFGGTSLATAENICLVCDIICKDKPSFVVVSAIAGVTDLLVDFCSSSLREREEVLRKIEGKHEEIVKNLAIPFPVSTWTSRLLPYLQHLEISDLDFARILSLGEDISASLVRAVCSTRGWDLGFLEARSVILTDDSYRRASPNLDLMKAHWHQLELNQPSYIIQGFIGSNGLGETVLLGRGGSDYSATLIAELARATEVRIYTDVNGIYTMDPKVISDAQRIPELSFEEMQNLASFGAKVLYPPMLFPCMRAGIPIFVTSTFDPEKGGTWVYAVDKSVSYEPRIKALSLSQYQSFCSVDYTVLGCGGLEEILGILESHGIDPELMIAQNNVVGFVMDDDIISQEAQEHLVDVLSLSSVTRLHHSVALITMIGDNLSSPKVVSTITEKLRGFQGPVFCFCQSSMALSFVVASELAEGIIEELHNDYVKQKAIVAT

SEQ ID NO: 25059 - protein, 868 aa, Bdellovibrio bacteriovorus HD100
MSKKFQLKNGLKVLLLESHKSPVVSVQMWVKTGSADEKKTEEGISHFIEHLVFKGTRKYKVGEIAATVEGSGGELNAYTSFDQTVFYVTISKQFSDVALDVISEMMGYPTFDPQEIDNEREVVLEEIKRGQDSPGRRASQLLFTNVFQKSPYGIPVIGYDKVVKKVSAKKIREFYQSRYVPSNMFLVVSGDFDSKEMKNRVQQMFGGFAPYKLRKVARKKEPAQKTIRIKVEQAKFEQTTAYLTWRIPSVKHKDIAALEVMSAILGQGDSCRLMQTLRIKEPLTNSVGSFAYSMQDDGLFAVSLGLEKENLTKALSALIPELVRIVTEPPTVAEMQKAITNFASHEVYSMETVDNIARKAGSNEFYYGDHDYYKKYMKQVYALKPEDIQKIAKKYLKADSFGLSMMTNMDKKNADRILKAFAKDLRKALREAKAVKQKAPRFAAKKFNINAGAAKGVPTTERIVLDSGATLLIREQSDTPYVAMKAAFLGGARVEPEGQNGLTELFARNWMSGSKNFTEDDINLRVDELAAGIGAFGGRNSAGLSMDYLSPFEDKMLEIYADSLLEPQFPEIILEREKVVLKNQIKARNDNPAQLCILAFMQEIFKGHPYARDLVGSETTVNAITSADLLGYYKKIAMAKNVTFSVVGDVDTKKWVKTLNEITKELPKGERVKNHFAAPKITESKHLFRELKKEQSHIIVGYQGLTLSSPERYTMEIIQSILSGQGGRLFIELRDKNSLAYSVSPMHMEGIERGYFGGYIGCSPEKSEKAIQMLKAEFNKLASTKISPEELVRAQRYLIGRHDIELQRKSTIGNAILFDDIYGLDYRESLDVADKYFAVSPEDVQKLAQKIFAQPAIVSLVGPTDVKS

SEQ ID NO: 25060 - protein, 450 aa, Kineococcus radiotolerans SRS30216
MTSVLWFRRDLRLSDHPALLAAAADGDVLPLFVIDPALWGPSGDVRRTYLLRSLRSLDAALGGALVVERGDPAVVVDRVAARIGASRVHVTADAGPLGRRRDDAVGRALAAGGRELVRTGTPYAIGPGTLRTGSGSPFQVFTPFSRAWRAHGWPAPADSPGAVRWVGDGEGVDGGHWPDEPDLGGLTLPEAGEDAAHERWHRFLDHALADYDGDRDRPDRDGTSQLSHALKWGELHPRTLLAALRGQSSKGAETYATELCWRDFYADVLWHRPDSAREYYKPQLAGLRYAEPGEQFRAWAEGRTGFPIVDAGMRQMRAVGWVHNRVRMITASFLVKDLHVEWQHGGREFMHWLRDADLASNMHGWQWVAGSGTDASPFFRVFNPVTQGQRFDPDGDYVRRFVPELRHLPGKSVHTPWEAADGYAHGYPERIVDHAHEREVALAEYARVRG

SEQ ID NO: 25061 - protein, 186 aa, Brassica napus
MAFSFSFTALALLISSLAAAFLLLFRRTRYRRMGLPPGSVGFPLIGETLQLIKAYKTEDPEPFIDERVARYGSVFTTHLFGEPTVFSADAETNRFVLQNEGKLFECSYPDSISNLMGKHSLIRMEGSLHKRMHSFTMSFANASAMKDHLMVDIDRLVRFNLGSWSSRVLLMEESKKMTFDVAVKQL

SEQ ID NO: 25062 - protein, 424 aa, Nocardioides sp. JS614
MGIVVQKYGGSSVADAAGIKRVAQRIVNTRKAGHDVVVVVSAMGDETDNLRDLAEQVTPLPPPRELDMLLTAGERISMALVAMAIAALGHEAKSFTGSQAGVITDSAHGKAKIIDITPGRIEKALKDGAIAIVAGFQGVSQDTKDVTTLGRGASDTTAVALAAALGAEVCEIYSDVDGVFTADPRIVPAARKLARVSTEEMLEMAASGAKILHLRCVEYARRYDMPIHVRSSFSQKEGTWVIPDSKAGEDEMEQAIIAGVAHDRSEAKITVVGVPDKVGEAARIFEALAATEVNLDMVVQNVSAAATGLTDISFTLPRADGQSAMGALARIQDEVGYDKLLYDDQIGKVSLIGAGMRSHPGITARFFASLAAAGVNIEMISTSEIRISVIVDEAQVDEAVRATHTAFDLDAEEVEAVVYGGTGR

SEQ ID NO: 25063 - protein, 186 aa, Brassica rapa subsp. pekinensis
YIGLKQRRATGQEYAEFLHEFMCAVKQNYGEKVLVQFEDFANHNAFDLLSRYMDSHLVFNDDIQGTASVVLAGLIAAQKVLGKSLADHTFLFLGAGEAGTGIAELIALKISKETGAPIEETRKKIWLVDSKGLIVSSRKESLQHFKQPWAHEYEPVKDLIGAVNAIKPTVLIGTSGVGQTFTKEVV

SEQ ID NO: 25064 - protein, 602 aa, Pseudomonas syringae pv. tomato str. DC3000
MSTQSNASSEVAVRLARTRALMSRERIDAYLVPSADPHLSEYLPGYWQGRQWLSGFHGSVGTLIITQKFAGVWADSRYWEQATKELAGSGIELVKLMPGQQGPLEWLADQATAETVVAVDGAVLAVASSRTLASKLYERGARLRTDIDLLIELWPDRPALPTQPIYEHLPPQASLDRGEKLTRVRHSMGERNADWHFIATLDDIAWLFNLRGADVSYNPVFISFALIGPHSVTLFVDAKKVPGDVRASLERDGINLMEYTQIGAALRELPKDARLLVDPARVTCGLLDYLDSEVTLVEGLNPSTLLKSQKTEIDAGHIRQAMEQDGAALCEFFAWLDSALGQEPVSEVTVDEKLTQARERRPGYMSPSFATIAGFNANGAMPHYRATEAEHAQIEGDGLLLIDSGGQYLGGTTDITRMVAIGTPSTEQKQDCARVLKGVIALSRTHFPKGILSPLLDAIARAPIWSDGVNYGHGTGHGVGYFLNVHEGPQVIAYQAPATPQTAMLPGMITSIEPGTYRPGRWGVRIENLVINQPAGATEFGEFLRFETLTLCPIDTRCIEVSMLNEEERNWLNDYHANVLARLSPLLQGAALQWLQARTTAI

SEQ ID NO: 25065 - protein, 437 aa, Medicago truncatula
MVLNPTLPSKKVQSIQKCVDNGPDRQGKWWYSTFHTVTAMIGAGVLSLPYAMAYLGWGPGILMLLLSWCLTLNTMWQMIQLHECVPGTRFDRYIDLGRHAFGPKLGAWIVLPQQLIVQVGCDTVYMVIGGKCLKNFVEMAFISCTQIKQTYWIMIFGGIHFFLSQLPNFNSVSGVSLAASVMSLSYSTIAWVACLSRGRIDNVNYAYKQISKTDLLFRVFSALGQISFAFSGQAVTLEIQATIPSTPEKPSKIPMWKGAICAYLINAICYFPVATLGYWAFGQDVDDNILMSLERPSWLVASANLMVFINVLGSYQVYAMPVFDLIEGTMVRRLNFPPSVALRLVARSAYVAFTLLFGVSFPFFGDLLGFFGGFGFAPTSYFLPSIMWLIIKKPRRFSINWFINWVAICIGVCIMLASTIGGLRNIIVDSSTYSFYT

SEQ ID NO: 25066 - protein, 420 aa, Mesorhizobium loti MAFF303099
MRRVVVTGLGLLSPFGMGFEHSWKELLTGRSAAKRITEFEVEDLACKIAHVVPRGDGSNATFNPESVLEPKELRKIGDFILYGIAAADEALKDSGWEPKTHEEQCATGVLIGSGIGGIEGIAENAMILKERGPRRISPFFIPGQIINLVSGQVSIRHGLKGPNHAVVTACSTGAHAIGDAARLIMWGDADVMVAGGAEAPVTRLSIAGFAACRALSTERNDTPQTASRPYDRDRDGFVMGEGAGVVVLEELEHAKARGAKIYAEVTGYGLTGDAYHITAPAEDGDGAFRCMTAALNRAKLTPADVDYINAHGTSTMADTIELGAVERLVGNAASKISMSSTKSSIGHLLGAAGAAEAIFSILAIRDNVAPATINLDNPERETAIDLVPNKPRSRQIDVALSNSFGFGGTNASLVFQRYNG

SEQ ID NO: 25067 - protein, 437 aa, Medicago truncatula
MVSTPSLPSKETQSEQKEVENGPARRAKWWYSTFHTVTAMIGAGVLSLPYAMAYLGWGPGILMLLLSWCLTLNTMWQMIQLHECVPGTRFDRYIDLGRHAFGPKLGAWIVLPQQLIVQVGCDIVYMVIGGKCLKQFVEIACTDCTQIKQSYWIMIFGGIHFFLSQLPNFNSVACVSLAAAVMSLSYSTIAWVACLPRGRIDNVSYAYKPISKTDLLFRVFNALGQISFAFAGHAVTLEIQATIPSTPEKPSKIAMWNGAICAYFINAICYFPVAIIGYWTFGQDVNDNILMSLEKPSWLIASANLMVFIHVVGSYQVYAMPVFDLIERMMMRRLNFPPGVALRLVARSAYVAFTLFFGVTFPFFGDLLGFFGGFGFAPTSYFLPSIMWMIIKKPKKFSINWFINWAGIYIGVCIMLASTVGGLRNIIADSSTYSFYT

SEQ ID NO: 25068 - protein, 304 aa, Triticum aestivum
TILLPPPPKNPRRSSKGDRAAGAGQRTDRATRSPPTSRGRQRGSSSVPAMGADEAAPGGGGGGIRVLLRRKQVDTDRARAAGGQQLAKELSITQLIAIGVGSTVGAGVYVLVGTVAREHSGPALTLSFLIAGIAAALSAFCYAELASRCPSAGSAYHYSYICVGEGVAWLIGWALILEYTIGGSAVARGISPNLALFFGGPNSLPWILARHELPWLDVVVDPCAAALVFLVTALLCVGIKESTFVQGIVTVLNCCVMLFVIIGGSYIGFQTGWVGYKVSGGIPGIWGEWNACWITDRFLCLHRL

SEQ ID NO: 25069 - protein, 529 aa, Salinibacter ruber DSM 13855
MPTGRRTTDCTLKFSAPRFGKALFPSKLSLFVSGMPDTFENYIGGRWTGAASQATFDNRNPADPDDHIGDFPDSAPADVDAAVQAAQDAFSDWGSTPAPDRGKILKASGDLLAERKDEIARSMTREMGKPFFETKGDVQEAIDTAYYAASETRRLFGTTVPSELPDKMNMAIRRPLGVCGIITAWNFPVAVPSWKIFPALAAGNTIVFKPSEDAPHSGLRFVQTLIDAGIPDGVINVVHGADEAGQALVEHPEVDAIGFTGSYEVGTAIAETCGRLNTPVSLEMGGKNPMIVMDDADLDLALEGAIWGAYGTTGQRCTATSRLICHESVHDELVAMIRDEAEALVLGDGNDADTDVGPLINQAAAETVHRYVEIGQEEGATLEMGGAPASVDGLDGHFYEPTLFTDVTPDMTIAQEEIFGPVLATFEVGSYDEAVTVANDTQYGLSSSIYTQDVNKSFRAMRDLEAGITYVNGPTIGAEAHMPFGGVKDTGNGQRDGGYAAFEFWTEHKTLYVDYSGQLQKAQMDSVED

SEQ ID NO: 25070 - protein, 133 aa, Coccidioides immitis RS
MTGGKSGGKASGSKSSQSRSSKAGLAFPVGRVHRLLRKGNYAQRVGAGAPVYLAAVLEYLAAEILELAGNAARDNKKTRIIPRHLQLAIRNDEELNKLLGHVTIAQGGVMPYIHQNLLPKKTPKTGKNPSQEL

SEQ ID NO: 25071 - protein, 326 aa, Candida haemulonii
SIVGRPRHQGIMVGMGQKDSYVGDEAQSKRGILTLRYPIEHGIVTNWDDMEKIWHHTFYNELRVAPEEHPVLLTEAPMNPKSNREKMTQIMFETFNVPAFYVNIQAVLSLYSSGRTTGIVLDSGDGVTHVVPIYAGFSLPHGILRLDLAGRDLTDYLMKILSERGYTFSTTAEREIVRDIKEKLCYVALDFEQEMHTSSQSSAIEKSYELPDGQVITIGNERFRAAEALFRPSDLALEAAGIDQTTYNSIIKCDVDVRKELYGNIVMSGGTTLFPGIAERMQKEITALAPSSMKVKIIAPPERKYSVWIGGSILASLSTFQQMWIS

SEQ ID NO: 25072 - protein, 432 aa, Coccidioides immitis RS
MNTVDIGQKYKRIVEYLWDPEPKNDDDIIEPVWCLGKEYKTSIPRDSEGAEAPESCNMPGMPFLSPMNQMSLSSRDTQAALSKPATPPHQLGIQRSKSREWPTSFLDDFESKFWFTYRSNFPAIPKSRDPDTPLALTLSVRLRSQFLDTHGFTADTGWGCMIRSGQSLLANALSILNLGRDWRRGSKIKEECELLSLFADNPQAPFSIHRFVDYGASACGKHPGEWFGPSATARCIEALSNECKHTDLNVYVMSDGSDVHEDQFRQIAGPDGIRPTLILLGVRLGIESVTPVYWEALRAIIRYPQSVGIAGGRPSSSLYFIGVQGPYFFYLDPHHTRPAVSWNPDSTLSPENLDTYHTRRLRRLHIREMDPSMLIGFLIKDDDDWKDWKRRLRSVTGNPIIHIFDLERPNFGRHLEREEAVDEVEALDDDSN

SEQ ID NO: 25073 - protein, 176 aa, Brassica rapa subsp. pekinensis
VRHLLHQKIRDSYMHPQFVSDVMKPLQIEQLMDQEVVNLSGGELQRVALALCLGKPADIHLIDEPSAYLDSEQRIVASKVIKRFILHAKKTAFIVEHDFIMATYLADRVIVYEGQPSIDCIANCPQSLLSGMNLFLSHLNITFRRDPTNFRPRINKLESTKDREQKSAGSYYYLDD

SEQ ID NO: 25074 - protein, 560 aa, Podospora anserina
MSSARPATPASPKNYKVKAAQQGQPMYGCEHLQKLFNQDQVTTNTSIHHYKMILRTIFDQTPVVSQTVKVVDTQQVVTTLTPTYLCLQCPSTVTEEDRIKHGNKKSHRFYVDSRSAALYCQMCDDMVYDPTFEELRLKKLGTSTFSNTRKRKQDELFSPDPVKDSPAYISQNTTTATCKANGLRGIYNAGATCYQNVVLQSFLHNPILRNYYLSDGHSGCDTPHCLSCAMDDMFQDFYAVENTNGYTAANILSGFWISERKAFENLVTTKEQDAHEFFQFLAEELHERNGDGKKPEIGSEHSCNCIIHQTFYGKLQTQTTCQNCQGVTNQVQSFLDLSLPLENLTQKKGGKKLLGGKGTMTLQECLDEEYVKLDKCEYRCNGCNSTQQARRQTSIKRLPNVLSIQLKRFEYKQGRHERAAKIDTPVQFPLQLNMLPYTTVGRSGDTKDSYELARQCTYDLLSVVVHVGEIDTGHYVSYCRVGDQVCPFFSLWKMAMLTRLKVVRFQRPQGGSCPEVGRAQRKSLPLVLYCQVVDVGTLLGFLGRAGWTVSISSNGTGPTF

SEQ ID NO: 25075 - protein, 326 aa, Kazachstania exigua
  misc_feature (207)..(207): Xaa can be any naturally occurring amino acid
SIVGRPRHQGIMVGMGQKDSYVGDEAQSKRGILTLRYPIEHGIVTNWDDMEKIWHHTFYNELRVAPEEHPVLLTEAPMNPKSNREKMTQIMFETFNVPAFYVSIQAVLSLYSSGRTTGIVLDSGDGVTHVVPIYAGFSLPHAILRIDLAGRDLTDYLMKILSERGYSFSTTAEREIVRDIKEKLCYVALDFEQEMQTAAQSSSIEKXYELPDGQVITIGNERFRAPEALFHPSVLGLESSGIDQTTYNSIMKCDVDVRKELYGNIVMSGGTTMFPGIAERMQKEITALAPSSMKVKIIAPPERKYSVWIGGSILASLTTFQQMWIS

SEQ ID NO: 25076 - protein, 247 aa, Aspergillus oryzae
MPRSKRARVVHETKTAKKSHKEQTRRLYANIRESVEKYDHLFVFGVDNMRNTYLKDVRTEFADSRLFFGKTKVMAVALGHNPESEAATNLHKLVPYLTGAVGLLFTSRDPESVTNYFETFRPLDFARAGTVSTRSFSIPNGLVYSRAGEIPASEDEPVSHTIEPELRKLGVPTRLVKGKVMLELTGGQEAFPVCREGEVLDSRQTTLLKMFGVATSEFHVALKACWTRESGEVKILEKEQGGMEVEQ

SEQ ID NO: 25077 - protein, 326 aa, Candida humilis
SIVGRPRHQGIMVGMGQKDSYVGDEAQSKRGILTLRYPIEHGIVTNWDDMEKIWHHTFYNELRVAPEEHPVLLTEAPMNPKSNREKMTQIMFETFNVPAFYVSIQAVLSLYSSGRTTGIVLDSGDGVTHVVPIYAGFSLPHAILRIDLAGRDLTDYLMKILSERGYSFSTTAEREIVRDIKEKLCYVALDFEQEMQTAAQSSSIEKSYELPDGQVITIGNERFRAPEALFHPSVLGLESSGIDQTTYNFIMKCDVDVRKELYGNIVMSGGTTMFPGIAERMQKEITALAPSSMKVKIIAPPERKYSVWIGGSILASLTTFQQMWIS

SEQ ID NO: 25078 - protein, 121 aa, Listeria innocua
MSGLTKIEIITRPNRFHLFQKELAKIGVSGLTVTKALGTGLEKGFIELYRGTKKESNVHERMKIEIVVSTVPVEDVLRVVKETLRTGEPGDGKVFIYPLAEVVKISTGETGIDALQDKPAK

SEQ ID NO: 25079 - protein, 440 aa, Yarrowia lipolytica CLIB122
MPLNIIQTLATEGKDAVPYFDQIAVAVPVLGVVSLLKTYFGGSTNTWQRDMHGRVVIMTGGTSGVGAEIARELAQKGAQLILLVREHTTYAAEFVDDLRAASGNELVYMETCDLNDLHSVRKFATKWLDNQPPRRLDTVICCAATATPPSVERKYSRDGIEEMLQVNYLAHYHLLTLLEPALKVQPPDRDVRIVLTSCVAHVMADLDFSDLQFTRRKYPTYSPWRAFGASKLLLNMFGYEYQRRLAAYERPDKAPCNVRVVMADPGMMRSPSFKRFITCGSVLLLLLYLVFWPFWWLVLKTSKQGMQSILYGVFCGELPAPIEEAVYIQECDVRSHMARAEMNDKELQKEVFDKTKLMVEVIEKKSAIDRKKLEEKLKKEGKASNGSKTEYTPNSTASDEKITPIEEEDEESTTGSTTTTATGSATSRNDKKKRNRKRKT

SEQ ID NO: 25080 - protein, 240 aa, Agrobacterium tumefaciens str. C58
MDLRLIFGPTCTGKTSTAVALAQQTGLPVLSLDRVQCCPQLSTGSGRPTVEELKGTSRLYLDDRPLVKGIIAAKQAHERLMGEVYNYEAHGGLILEGGSISLLKCMAQSSYWSADFRWHIIRHELADEETFMNVAKARVKQMLRPAAGLSIIQELVDLWKEPRLRPILKEIDGYRYAMLFASQNQITSDMLLQLDADMEDKLIHGIAQEYLIHARRQEQKFPRVNAAAYDGFEGHPFGMY

SEQ ID NO: 25081 - protein, 237 aa, Mycobacterium avium subsp. paratuberculosis K-10
MSSTPHPAEPHIGSVSSKLNWLRAGVLGANDGIVSTAGIVVGVAAATALRAPILTAGSAGLVAGAVSMALGEYVSVSTQRDTEKALLIQEHQELRDDPAAELDELAALYEAKGLTAATARTVAEELTDQNPLLAHAEVELGINPEELTNPWHAASSSALSFAIGALLPLIAILLPPPTWRIPVTVVAVLIALVITGAVSARLGGAPQLRAVARNAIGGSLALAVTYTIGHVVGAAID

SEQ ID NO: 25082 - protein, 416 aa, Ralstonia solanacearum
MALIVHKYGGTSMGSVERIKNVAKRVAKWHRAGHQIVVVPSAMSGETNRLLGMAKEISAQPDPRELDMIASTGEQVSVGLLAIALHAEGIDAISYTGWQVPVQTDSAYTKARIQSIDDERVRADLEAGRVVVITGFQGIDGEGHITTLGRGGSDTSAVAVAAALEAEECLIYTDVDGVYTTDPRVVDDARRLDKITFEEMLEMASLGSKVLQIRSVEFAGKYRVKTRVLSSLTDPLMPLEVEMHSGTLITFEEDSNMEAAAISGIAFARDEAKITVIGVPDKPGIAYQILGPVADANIDVDMIIQNQSVDGKTDFTFTVPRGDYQRALGILNDSVKGHIGAANVSGDPKVSKVSVVGVGMRSHVGIASKMFRTLSEEGINIQMISTSEIKISVLIDEKYMELAVRALHKAFELDQA

SEQ ID NO: 25083 - protein, 388 aa, Arabidopsis thaliana
MTTISDLSDDLVGDILSRVPFTSLISVRSTCKKWNALSKNQIFGRKTAARNQFLEFMILDSRVCSLRLDLQGIRNEDKEDFVDPSMKLISIPSNDDQVEISQVYHCDGLLLCIAKENSNVFVWNPYLGQTKWIRPRNTFHRYDRFALGYDNNRNHKILRFLYDEESNESSRRTHIDVYDFSSDSWRVLDVNPDCDIPFYQTGVSLKGNTYFFGQEVTQATKVTEIETCLLCFDFTTERFGPCLPLLFYPPCPSFETVTLSWVRDEKLAVLYNHYVTAEIIEIRISTKIEPNAVSWSSFLTVDMSLVNGLPDHFSMYFEAKSFFIDEEKKVVVLFDSKEIKTCRYQMAYIVGDDGYFKSVNIGVSPNSQRKPGRLVCSSYVPSLVQLQD

SEQ ID NO: 25084 - protein, 601 aa, Mycobacterium avium subsp. paratuberculosis K-10
MCGVTGEVRLDGRAPDVAAVSAMAAVLTPRGPDAGGAWSQGRVALGHRRLKIIDLTEAGAQPMVDSELGLSIAWNGCIYNYKELRSELSGYGYRFFSHSDTEVLIKAYHRWGDDFVSHLFGMFAFAIVERDSGRVLLGRDRLGIKPLYLTEDSHRVRFASTLPALLAGGGVDTRIDPVALHHYMSFHSVVPAPATILRGVRKVPPASLVAIEPDGKRTVTTYWAPDFTRHADRADWSERDWEDAVLSTLRLAVKRRLVADVPVGCLLSGGVDSSLIVGLLAEAGQHGLSTFSIGFESAGGVKGDEFQYSDIVAQRFETNHHQIRIDSDRMLPALDGAIGAMSEPMVSHDCVAFYLLSQEVARHVKVVQSGQGADEVFAGYHWYPPMGEPAAATLDGAVAQYRRAFFDRDTAGVAQLVGPGILAPGDPSLRFVTEHFAQAGAETGIDRALRLDTTVMLIDDPVKRVDNMTMAWGLEGRVPFLDHELVELAATCPPEYKIAHEGKGVLKQAARRVIPSEVIDRPKGYFPVPALTHLEGPYLDMDRDALYAPTAKERGLFNTDAVDALLANPNGKLTPLRGNELWQIALLELWLQRHGVTGPVA

SEQ ID NO: 25085 - protein, 295 aa, Wolbachia endosymbiont strain TRS of Brugia malayi
MSVLVGKDTRLICQGFTGAQGTFHSEQAISYGTKMVGGVTPGKGGSSHLNLPVFNTVAEAKEKTDANATVIYVPAKFAAAAILEAIDAEIELIVCITEGIPILDMVRVKHALISSKSRLIGPNCPGIITPEECKIGIMPGHIHKRGHIGIMSRSGTLTYEAVAQTTAVGPGQSTCIGIGGDPIHGMTFVDCMELFLKDEDTHGIVVIGEIGGNEEEDVSHFVKTEKTKKPIVGFIAGQTAPPGRRMGHAGAIISSSGGSAGAKLEVMSSAGIAIAETPAMIGKKILEVMHKAHVA

SEQ ID NO: 25086 - protein, 174 aa, Ustilago maydis 521
MSSQWEIRFSNSRRLPYFYDHVSQQSTWEIPQGHTEESIRSLPGAKYLDPANAPGSAADKPDKVRASHLLIKHAGSRRPSSWKEANITRSKQDAIEQLKKFEQELQQDSSKDKFASLASVHSDCSSARAGGDLGFFQRGQMQKPFEDAAFGLKPGELSSIVDTDSGVHLIYRTA

SEQ ID NO: 25087 - protein, 429 aa, Streptomyces coelicolor A3(2)
MSSTNRTVVVTGIGATTPLGGDAASTWEGLVAGRSGVRPLEQEWAADQAVRIAAPAAVDPSEVIPRPQARRLDRSAQFALIAAQEAWKDAGYAGKAGESPAEDGAAHVDPDRLGAVIASGIGGVTTLLDQYDVLKEKGVRRVSPHTVPMLMPNGPSANVGLAVGARAGVHTPVSACASGAEAIGYAIEMIRTGRADVVVAGGTEAAIHPLPIAAFGNMMAMSKNNDDPQGASRPFDTARDGFVLGEGAGVLVLESAEHAAARGARVYAEAVGQGISADSHDIVQPEPEGRGISAALQNLLDGNDLDPAEIVHVNAHATSTPAGDIAELKALRKVLGDDVDHMAVSGTKSMTGHLLGGAGGVESVATVLALYHRVAPPTINVENLDPEAEANADIVRGEARKLPVEGRIAALNDSFGFGGHNVVLAFRSV

SEQ ID NO: 25088 - protein, 398 aa, Burkholderia sp. 383
MEFEMLETETNGTIIKVVGVGGAGGNAVQHMINRGVQGVDFIVMNTDAQALSRSRASSVIQLGNTGLGAGAKPEMGRAAAEEARERIADALRGAHMVFITAGMGGGTGTGAAPVVAQIAKEMGILTVGVVSKPFEFEGGKRMRVAEAGSQQLEDHVDSLIVVLNDKLFDVMGDDAEMDKCFQCADDVLNNAVAGIAEIINVDGLVNVDFEDVKTVMGEQGKAMMGTATVAGVDRARLAAEQAVASPLLEGVDLSGARGVLVNITSSRSLRLSETREVMNTIKSYAAEDATVIFGAVYDDAMGDALRVTVVATGLGRAAKKQQSAPMTLLRTGTDNQPVSAVSHGYAPTHHVSTADYGALDTPAVWRNSRETAASHVQALQEKGVDTYDIPAFLRKQAD

SEQ ID NO: 25089 - protein, 445 aa, Wolbachia endosymbiont of Drosophila ananassae
MSTPITVAYGDGIGPEIMEAVLSILRGAEAKISIDIIEIGERVYSKEWSHGISPSGWESIERTKILLKSPTTTPQGKGHKSLNVALRKNLGLYANIRPCISYHPVIENKFGKFDIVVIRENEEDVYTGIEHRLTGDSYQCTKIITRSGSEKICRYAFEYAKKHNRKKVTCLTKDNIMKMTDGTFHAAFDRIAKEYQDIKAEHYIVDIGMARVATEPENFDVIVTENLYGDILSDIVAQTSGSVGLAGSSNIGNEYAMFEAVHGSAPDIAGKNIANPSGLLNAAVHMLIYIGQVGTAKLIYDAWLKTLEGGIHTADLYKEKRSKQKVGTKEFAEAVIDNLGKKPAELTIGSGSDSKINLDSKINKVQDNYEQDYKVKKLVGSDITLAWDKSSNVDQIVGLFESSNPQIIAIYSKGLAIWPGSSKSSSDQITCSLSRIAKKTITIVT

SEQ ID NO: 25090 - protein, 493 aa, Kluyveromyces lactis NRRL Y-1140
MSEFTGIPTDTGTGGNSLDTDLNTPYDKANMAWIMVAGSFVWLMVPGIGLLYSGLSRKKHALSLLWASIMTISVVTFQWYWWGYSLVFSHNTRGNGFIGTLSEFGFKNVLGAPSAAGTVPDILFAWFQGMFAMVTGILMVGGACERARLFPMMVFLFLFITIVYCPIACWTWNPEGWLATLGALDYAGGGPVHICSGHGALIYALILGRRNDPLTKSGVPKYKPHSVTSVVLGTVFTWIGWIGGFNPGSAGNATIRAWYSAYSTNLAAACGALTWMFIDYFRSGRKWTTVGLCSGAISGLVGITPAAGFVPLWASVIIGIVTAAGCNLAVDLKNLLKIDDGLDVYALHGVGGCIGSVLTGIFAADYINALAGVESSPIAGGWINHNYKQVGYQLAAVCATIAWTCVVTACLLLILDRIPFLRLRLRPEEEELGTDEAEIGEFTYEEDAVYIPEPIRSKSIAEAPPANIDDKIHTGNNSSSELQSEPKTTSANA

SEQ ID NO: 25091 - protein, 118 aa, Triticum aestivum
SSLPVSSRSEEGGLRRRLSSLSLKIQDSPTWSFSRSKSLSSMGDYVRTCWAWILSRKLIFATDLEMNDQKTKLLGSHNRGTWSHVFYKLRSEIRRFISTSDHATLPKTYHRSTPQVFS

SEQ ID NO: 25092 - protein, 489 aa, Kluyveromyces lactis NRRL Y-1140
MSEFTGIPTDTGTGGNSLDTDLNAPYDKADMVWIFIAGSFVWLMVPGIGLLYSGLSRKKHALSLLWASIMTIAVVTFQWYWWGYSLVFSKTRGNGFIGTLSMFGFKDVLGAPSAVGVVPDIVFAWFQGMFAIATGILMVGGACERARLFPMMVFLFLFITIVYCPIACWTWNPEGWLAALGALDYAGGGPVHICSGHGALMYALILGKRNDPLTKSGVPKYKPHSVTSVVLGTVFTWLGWIGAFNPGSAGNTTIRAWYSAYSTNLAGSCGALTWMFIDYFRCGRKWTTVGLCSGAIAGLVGITPAAGFVPLWASVIVGIVTAAGCNFAVDLKHILRIDDGLDVYALHGVGGCIGSVLTGIFAADYINALAGVESSPIAGGWINHNYKQVGYQLAAMCASVAWTCVVTACLLLILDRIPFLRLRLRPEEEELGTDEVEIGEFTYEEDAVYIPEPIRSKSIAEAPAAIIDDKVQTGNSSSEELQSEPKTNA

SEQ ID NO: 25093 - protein, 485 aa, Mesorhizobium loti MAFF303099
MKTLKDKNLFREAGLIGGEWVAAGSGKTVDVIDPATQAAIGTVPDMAGSDTRAAIDAAASAYGDWKKKTNAERADLLEAWHGLMLAHLDDLALILTTEQGKPLDEAKGEIRYGASFVKWFAEEARRINGHTIPSPTQDRRIIVLKEPVGVCGIITPWNFPNAMITRKVAPALAAGCTVVIKPSEFTPYSALALGVLAERAGIPAGVINIVTGMPAEIGNEIMANETVRKISFTGSTRVGSLLMRGAADSVKRLSLELGGNAPFIVFDDADLDLAVEGALVSKFRNGGQTCVCANRILVQAGVYEAFAAKLSARVNAMTVGPGTQPGVAIGPMINMAAVEKINRHVEDALAKGAAIITEKPALPEGPQYVAPLVLSGATKDMQLAGEETFGPVAPLFRFETEEEAIALANGTPYGLASYFYTENLKRAWRVGEALEFGMVGLNTGSVSMEVAPFGGIKQSGLGREGAQAGIEEYLEMKSFHIGGLG

SEQ ID NO: 25094 - protein, 347 aa, Mesorhizobium loti MAFF303099
MKSYSIAMIPGDGIGRDVTAAAWTVLEAAAKHAGFALTGTEFPWSCKFYKDTGRMMPEDGIETLRGFDAILLGAVGWPAEVPDSVSLHGLLLPIRKAFVQYANIRPHRLLPGVTGPLRAEGFDILCIRENTEGEYSGAGGRVHQGTLDEVAVETSIFTRAGVERILRFGFEQARTRNGKLASVTKSNAQKYSMVFWDEITRKLAAEYSDVAVTSYHVDALAARMIMAPESLDVVVASNLFGDILTDIGAAIQGGLGYAASANINPDHSAPSMFEPVHGSAPDIAHLGIANPIATIWSGAMMLDHLGEKPAADRVMKAVEVATARGIGTIPAKDRTEAITAAVVAALT

SEQ ID NO: 25095 - protein, 137 aa, Brassica rapa subsp. pekinensis
SVMLSSVTLKPAGFTVEKMSVRGLPSLTRAPSSFKIVASGVKKIKTDKPFGVNGSMDLRDGLDASGRKGKGYGVYKFVDKYGANVDGYSPIYNEDEWSASGDVYKGGVTGLAIWAVTLAGILAGGALLVYNTSALAQ

SEQ ID NO: 25096 - protein, 945 aa, Tropaeolum majus
MMMERLDNRSSRRVECFIFCLLILPIIFHSVSAQPGFVSVACCADSGFTDNTLINWITDESWFPDKQGCRNFAPPVANYTGYKKARIFAIDSGKRCYNLPTIKDQDYLIRGSFLFGDSLSSPFGTSFNVLVGVTPIARVSTSDKLEVEGIFRANRDYIDFCLAYEKGEPYISNLELRALENSNFLKLESPVVLKLVDRVDLGGSTGEGIRFKDDKYDRIWKPDSYLNRTIITNANVSINNLNVTVPIKALQSAVTNENRLEFLKNDLDIGDYKYSVTLYFLELVENVQPGQRLFDIYINNALKWENFDISANGSDYKEVSFYATANGFLNVSLVKVPNGLGFGPICNAYEILQVRQWIQQSNLNDVNVIVNVKEELLKHNKRNVLWESWSGDPCLPYPWDGLVCYSVNGSSVITELNLSSRKLQGPIPSSIIQLTYLKDLNLSYNGFTGTIPSFTASSMLTSVDLRNNDLKGSLHESIGALQHLKTLDFGCNPQLDKELPSNFKKLGLTTDKGECGSQGPKHSTRAIIISIVTCGSVLFIGAVGIVIVFFYRRRSAQGKFKGSRHQISNNVIFSIPSTDEPFLKSISIEEFSLEYITTVTQKYKVLIGEGGFGSVYRGTLPDGQEVGVKVRSSTSTQGTREFDNELTLLSTIRHENLVPLLGYCCENGQQILVYPFMSNGSLQDRLYGEAAKRKVLDWPTRLSIALGAARGLTYLHSLAGRSLIHRDVKSSNILLDQSMTAKVADFGFSKYAPQEGDSCASLEVRGTAGYLDPEYYSTQQLSAKSDVFSFGVVLLEIISGREPLNIHRPRNEWSLVEWAKPYIRESRIDEIVDPTIKGGYHAEAMWRVVEVALACIEPFSAHRPCMADIVRELEDGLIIENNASEYMKSIDSIGGYSFGGGSNRFSIIVTDKEKKTIPPPPSPPTPNPSEPSPVNTQALTPPEPR

SEQ ID NO: 25097 - protein, 249 aa, Chlamydophila abortus S26/3
MLSDCYNNPFLSDFCLGKRPLRIASRKSILAQAQVHECVRLLRSWFPKLWIQIHTISTRGDKDKTTPIRLVENSQFFTDTVDKLVIRGNCHLAVHSAKDLPDPPATPVVAITKGLDPSDLLVYAERYLWQRFPKVPRLGSSSSRRGETLKMLFPTGRILDIRGTIEERLEQLENGKYDAIVVAKAAVLRLHLQLPYTKVLPPPYHPLQGRLAITAGKDIEAWKTFLLPLNTATTNQETLLSSNLICYDD

SEQ ID NO: 25098 - protein, 384 aa, Thermoanaerobacter tengcongensis MB4
MAFKKDKPVYIVDTTLRDGEQTAGVVFANNEKIRIAQMLDEIGIDQLEVGIPTMGGDEKETVAKIAKLGLKASIMAWNRAVVKDVQESLECGVDAVAISISTSDIHIEHKLKKTRQWVLDSMTEAVRFAKKEGVYVSVNAEDASRTDMNFLIEFARCAKQAGADRLRFCDTVGFLDPFKTYEMVKAIKDAVDIEIEMHTHNDFGMATANALAGVKAGAKFVGVTVNGLGERAGNAALEEVVMALKYVYKMDLGIDTSRFREISEYVALASGRPLPPSKAIVGKNVFAHESGIHVDGALKNPYTYEVFDPQEVGLERQIVIGKHSGTAALINKFKEYGRVLTEEEANLLLPHVRKMAIQLKRPLFDKELMYLYEDVIVKGKAKAI

SEQ ID NO: 25099 - protein, 134 aa, Arabidopsis thaliana
  misc_feature (32)..(32): Xaa can be any naturally occurring amino acid
  misc_feature (38)..(40): Xaa can be any naturally occurring amino acid
  misc_feature (44)..(44): Xaa can be any naturally occurring amino acid
  misc_feature (46)..(46): Xaa can be any naturally occurring amino acid
  misc_feature (53)..(53): Xaa can be any naturally occurring amino acid
  misc_feature (55)..(55): Xaa can be any naturally occurring amino acid
  misc_feature (81)..(81): Xaa can be any naturally occurring amino acid
  misc_feature (116)..(116): Xaa can be any naturally occurring amino acid
KNRPAHASQKRRETTRIFFSSSILSSAAVNTXPGPATXXXPFTXLXSSPSFPXTXKTNKDITSISSNGGRVSCMKVWPPIXKKKFETLSYLPDLSDVEFAKEVYYLLRNKWIPFVXFQLKHRFLYREHGNTSGY

SEQ ID NO: 25100 - protein, 334 aa, Salinibacter ruber DSM 13855
MSIKLGINGFGRIGRLCFRALLEREEDEIEIVGINDLTDAETLATLLKYDSVHGQFPGDVHLEDSTLVVDEQEFPVFSKKDPTNLPWGDHDTDVVIESTGVFRTYDKASQHLEAGADQVVISAPAKSEVDAMVVLGVNDEILTGDEKVVSNASCTTNCLAPLVKVLDDAFGVESGLMTTVHAYTASQNIVDGPHGDLRRARTAAESIIPTTTGGAKAVGKVLPHLDGALDGMAMRVPTPDGSVTDLTAVVEQDVTVEDVNEAFYEAANGALDGILAYSDDPIVSRDIIHDPHSCIYDAPWTKVAGSQVKLVGWYDNEWGYANRTVDLVERLMNV

SEQ ID NO: 25101 - protein, 1264 aa, Magnetococcus sp. MC-1
MLDKSLLDLLWVTLCIGLVLLMQAGFLCLESGLTRSKNSINVAMKNLVDFSVSVTAFLALGYPLMFGTSMEGWLGWGTPFSIGSEEPLQMVFFLFQAMFCSTSVTIVSGAVAERLGFRAYLFLAAGMALLIYPIVGHWAWNGLDRGLSLGWLGQAGFVDWAGSTVVHAVGGWFSLALLLVIGPRTGRFNPDGSVNPITASNLPLTTLGALILWFGWIGFNGGSTLSLDARIGPVVLATCLGAVGGSMGALLWSWWREGRPSVLSAINGTLAGLVAVTAGAHALSPLAALGAGLLAAPVALLMENWMLRHGIDDAVGAVPVHLGAGVWGTLAVALLGDLHKLGTGLSRLEQLWAQLQGVLAAALVAFVIPWLVLRVINRRFPMRVTPEQEWQGLNISEHGTQTELSSFLGVLRAQAEGGDLSLRAEVDPFSEVGLIADRYNHVMDAMEAAVAKTRAVFQTAGDAILIIDPHSGQITAHNPMAEAVFGRSSAAFAHLTLSDLVVGVTPQRFWLGLHEEGEGRLPDGHTFPLELAITRASHGDGEMLIGTFRDIRARKQAELAIKASEARFRTLFASAALGMALIDAKQRVVDANPALMQMLELSHHRDALPPLAQLAHPQDQQEVAARLDAVIEGRSPQENCEVRCLCEARHLTIWTRMVISPIVLESNLTPMVVVIVEDVTQRRRSEEALRLAATVYESTNESVVIFNGEGRVEQVNQAFCRLSGYTAREVRGLELRHLLSARYEKSQFDEMAQALALTGHWSGEVMGQRKQGALASERLSLSLVRRPDGSTQNTIAVFTDLTEQKAQEELIWRQANFDPLTSLPNRRLFQDRLHQALAQADRSAGRVALFFLDLDRFKPINDTMGHQAGDELLQKCAERINAAVRSSDTVARLGGDEFTVILPNIQNGQDLSRIAEGIIKTLTEPFYLKAGEANISTSVGVAVYPDDSQDDEGLMRAADAALYQAKDHGRNNVQFFTESLNQQILERIALEKGLRRGLGAGELFLVYQPQVEVSSGRLSGAEALVRWRLPTGEVVMPDRFIPMAEESGLIVQVGEVVVSLAVQQIRAWLDAGFEPPRISINASPKQFHLDGGGLTSILMSTCDAYQISPSRLAVEIVESGLMANPERSGEILAGLAKLGVEVELDDFGTGYSSLARLSRLQIQALKLDRRFLVGIPEDPQNRILVTAMVQMARGMGIEVIAEGVEDLRQMGFLQDLGCHRAQGFGIARPMEPEAFVVFCQTPKLEHPPYGNCIVGWAAPEPVRT

SEQ ID NO: 25102 - protein, 110 aa, Magnetococcus sp. MC-1
MESLVADIIEEQFAADVIMATGMVLVKFWAPWCGNSRKMIPVYAAVAQQLQGKLRCVRLDIDHNPTPSRRYGIRGVPVFMLFSNGHIVDTRTGVMTEAECLVWLAGLMNV

SEQ ID NO: 25103 - protein, 88 aa, Oryza sativa
LLDSLNIHSSFWDFVGLSFYTTEEELKNVFSPFGAVEEARLVRDNQTGRPKGFGFVKYSSQADAEKAVKAMDGRIIRGRLIFVEIAKE

SEQ ID NO: 25104 - protein, 443 aa, Crocosphaera watsonii WH 8501
MNLPPTLSQPRLLRLFKLIFYPLDYLEDNYQRYGDIFVAGKSETPFVYISNPQGIQTILTRDKTDFKTGGGSGFLSTLLGDNSLLFLQGERHRRERKLLMPPFHGERLKSYANLIYSISDKVTDKLQINRSFNVRDIMQEITLKVILKAVFGITEGERYQRLQELLKSWLSFFDSPANAILIFFPWLRKNWGNWTPWGRFLQIKAEIQELIYTEIRERREQKKYEGTDILTLLMLAKDEEGKPLSDQELHDELITLLIAGHETTASALTWALYWIHFCPDVEDKLRFHFSNLNNNTDLLDIVKLPYLDAVCKETLRIYPVLLTTFIRVLQTPLELMGYQFKPGTVFAPAIYLVHHREDIYPNSQQFRPERFLERNFSPYEYFPFGGGSRRCIGMELAKMEMKIVLYTILSKHKLKLPSSRPLKAVRRGLTVAPPSNFKMILSN

SEQ ID NO: 25105 - protein, 326 aa, Candida intermedia
SIVGRPRHQGIMVGMGQKDSYVGDEAQSKRGILTLRYPIEHGIVNNWDDMEKIWHHTFYNELRVAPEEHPVLLTEAPMNPKSNREKMTQIMFETFNVPAFYVNIQAVLSLYSSGRTTGIVLDSGDGVTHVVPIYAGFSLPHGILRLDLAGRDLTDYLMKILSERGYAFTTTAEREIVRDIKEKLCYVALDFEQEMQTSAQSSAIEKSYELPDGQVITIGNERFRTAEALFRPSDLALEAAGIDQTTYNSIMKCDVDVRKELYGNIVMSGGTTLFPGIAERMQKEITALAPSSMKVKIIAPPERKYSVWIGGSILASLSTFQQMWIS

SEQ ID NO: 25106 - protein, 135 aa, Ralstonia solanacearum
MRMLHTMLRVGDLQRSIDFYTKVLGMHLLRTSDNPEYKYSLAFVGYGPETGNTVIELTYNYGVSAYELGTAFGHLAIEVDNAAQACEQIRAAGGKVTREAGPVKGGSTIIAFVEDPDGYKIELIQARSMPDGNRH

SEQ ID NO: 25107 - protein, 699 aa, Candida albicans SC5314
MSSRVARAQCANCTCSPGLISRANRKSIYKRLSLNRRNSTPGSGSGCTSREGSIFTFNPSLCLPDAKEVNTSKRLESLRKQMKEHDLGIYIVPSEDQHQSEYVSAYDQKRSFISGFSGSAGIAIITRDMNSVGDTFEGTAALSTDGRYFTQAVDELDFNWILLKQGAKDEPNWKEWTIKQAVQLSLDSGSTVRIGVDPTLITYKLYKEFQSILDKELAKNEKVKIEFTAVKENLINKIWEQFEELPSRNFREIKSLDINFTGRNVQDKLADVKKHLTGDIKGIVISALDEVAWLLNLRGSDIQYNPVFYSFVILTEESTTLYIGENRLSEDIVESLKTAGITIEPYESFYSSLTTVSTKLSESNKKFYIPDNANWEVVRNLKCEFSQGLSPVEELKAIKNNVELEGAKIAHLKDGRALIKFFAWLEEQVIEKQELIDEIEADEKLTEFKQQEDNFVGLSFDTISATGANGAVIHYKPTKGQCSTINPRKLYLNDSGSQFLEGTTDVTRTVHFQKPSAEEITNYTLVLKGNIALSTLRFPQNTTGNLIDAIARQYLWKYGLNYAHGTSHGVGAYLNVHEGPIGIGPRPNAAAYALKAGNLISNEPGYYQEGDYGIRIENVMFIKESDLRYDGKAYLEFETVTKVPYCRRLIDIHLLNDEEISWINEYHADIWNSFYENFDKNSYTYKWLKRETEPLVKSK

SEQ ID NO: 25108 - protein, 170 aa, Zea mays
AAVDGDGADVEDGGGDSSERDFPSYGSGGKNVYVEGSWDNWKSRKAMQKSGKDHSLLLVLPAGVYRYRFVVDGERRCLPDLPCEIDAMGNAVNLLDVNDYVPESVESVAEFEPPPSPDSSYSFQAPEDKDFAKEPPVLPSQLHLGGLNSQNSEESCARPQHIVLNHLFIE

SEQ ID NO: 25109 - protein, 506 aa, Burkholderia vietnamiensis G4
MNPVPAYTSDADVGHYLDGAPVAGRSGRFQDVLNPALGRAVRRVALADGDEVQRAVASAHAAFPEWAATPPIRRARVLHRFLQLMNEHRDTLAAIITAEHGKVFSDAQGEVARGIDIIEFACGVPQLLKGDFTDQVSTGIDNWTMRQPLGVVAGITPFNFPCMVPCWMFPVALATGNTFVLKPSERDPSAALFMADLLTQAGLPAGVFNVVQGDKGAVDALLDHPDVQAVSFVGSTPIAAYVQQRAVQSGKRVQALGGAKNHLVVMPDANLEQAVDALIGAAYGSAGERCMAISIAVLVGDVADRIVPAVAERARKLVIGDGMSPEVEMGPIVTGEALKRIEGYIEQGVSEGAQLVVDGRGLRVPGREQGFFTGGTLFDHVTPDMRIYKEEIFGPVLGCVRVKDFGAAVDLINAHEFGNGVACFTSDGGIAREFARRIQVGMVGINVPIPVPMAWHGFGGWKKSLFGDMHAYGEEGVRFYTRQKSVMQRWASSIGKGAEFAMPTAK

SEQ ID NO: 25110 - protein, 484 aa, Mycobacterium avium subsp. paratuberculosis K-10
MSRDDWISADEGPRRTVSTTIPVFNPSTEEQIAEVPDSDQAAVDAAVARARETFELGVWRKAPASHRANVLFRAARIIEERKDELAALESQDNGMNLTAAGHIIPVSVDMLKYYAGWVGKIHGESANLVSDGLLGTWETYHTFTQLEPVGVVGLIIPWNGPFFVAMLKVAPALAAGCSAVLKPAEETPLTALKLEEIFREAGLPDGVLNVITGYGETTGAALTAHPDVDKISFTGSTEVGRLIVKAAAGNLKRLTLELGGKSPLIMFDDANLDKAIMGAGMGLLAGSGQNCSCTSRIYVQRGIYDQVVEGLAEFAKMLPMGGSDDPNSVLGPLISEKQRQRVEGIVNDGVAAGAKVITGGKPMDRKGYFYEATIITNTTPDMRLIREEIFGPVGCVIPFDDEDEVIAAANDTHYGLAGAIWTENLSRAHRVVNELRAGQIWVNSALAADPSMPISGHKQSGWGGERGRKGIEAYFNTKAVYIGL

SEQ ID NO: 25111 - protein, 298 aa, Ralstonia solanacearum
MNDPYPSPKPADKPRSLLERLTDLISPEPESRAELLEILQDAHARNLIDADSLSMIEGVFQVSDLCARDIMIPRAQMDAINIADAPAEFIPFVQQAAHSRFPVYEGSRDNIIGILLAKDLLRYYTDEGFDVRDMLRPAVFIPESKRLNVLLRDFRVNRNHIAIVVDEYGGVAGLITIEDVLEQIVGDIEDEYDFDQEEDNILPTADGHMRVRGLTEISQFNEAFGTHFSDEDVDTVGGLLANHLGRVPHRGEKIVLGTLQFDVLRADARQVQVLLVRHLAAPAPGAAAPADPSRSNPA

SEQ ID NO: 25112 - protein, 130 aa, Rickettsia prowazekii
MSCYNEITTLLEFDSNDINTTQRINMVNNVTDSSFKNEVLESDLPVMVDFWAEWCGPCKMLIPIIDEISKELQDKVKVLKMNIDENPKTPSEYGIRSIPTIMLFKNGEQKDTKIGLQQKNSLLDWINKSI

SEQ ID NO: 25113 - protein, 577 aa, Bacillus cereus G9241
MNRGRDVMSKFTVASNGSLETTLRGVEVLSTPLLNKGVAFTQEEREELGLKGLLPPAVLTLEEQARRAYEQFCSQPDDLLKNVYLTALHDRNEVLFYRILTDHLREMLPIVYTPTVGVAIQRYSHEYRKPRGVYLSINDPSGIEEAFANIGATAENIDLVVVTDGEGILGIGDWGVGGINIAIGKLAVYTAAVGIDPSRVLPVILDVGTNREELLDNPFYIGNRHPRITGEAYDEFIDTFVQAVNKQFPKALLHWEDFSSRNARKILDKYRHDICTFNDDIQGTGAVSLAAVLSAVKASGVPLSEHRVVVFGAGTAGIGIADQVRDAMVRVGVSEEESYKCFWCIDRNGLVTDNMEDLLDFQMPYARKEAEVSEWKQNGVIGLAEVVKHVKPTILIGTSTVAGAFKEEIIKDMASHVERPIILPMSNPTPLAEAKPADLIEWTEGKALVATGSPFEPVTYNGVTYVIGQSNNALIFPGLGLGTIVVRASVMTDGMFAAAAEAVASMVDTSQPGAPILPEVEELRNISEMVAIEVAKVAVAEGVARENLSDNDIKIAVKEAIWEPEYRQIKAVEKVRI

SEQ ID NO: 25114 - protein, 165 aa, Zea mays
  misc_feature (150)..(150): Xaa can be any naturally occurring amino acid
MEEDKRAEEARRAKEAGNDAYRKSFLETAVEHYTRGALLDPRDISFLTNRAAAYFHMGEYKECVRDCEGAVERGRDLSAANKLIAKALLRKASALLELATCSGDYAPAIRALQQSLTEHYSEETHEKLNKAVVVKKEFEEQERLDQETVXSHRERGLDVARLTHC

SEQ ID NO: 25115 - protein, 485 aa, marine gamma proteobacterium HTCC2207
MQLHDNSLLKTQAHIDGQWVDADSGETLAVVNPANGETIAEVVKCGTAETRRMIEAAAVAQKQWAKSTIKERAAVLRRWFDLVMENQEDLAQILTAEQGKPLAEARGEVAYGANYIEWFSEESKRVYGDTIPQPSNDKRIVVIKQPVGVVACITPWNFPNAMLTRKIAPAIAAGCAVVCKPANATPLSALALMELAVRAGFPRGLMNIVTGRTAQIGAELTGNPLVRKVTFTGSTPVGKQLMAECAQTVKRTSMELGGNAPFIVFDDADIDAAVQGTLVSKYRNAGQTCVCSNRIIVQAGIYDEFVRKLTVATQNLVIGNGTEEGVTVGPLIDEKAANNVCDFIDDAVTKGAKVALGGGRSDLGGAFVLPTILTDVSRDMRVFSEEIFGPVAPVFKFETEAEVVAMANDTEFGLAAYFYSRDIGRVWRVAEQLEYGIVGVNEGVISNEMAPFGGVKESGSGREGSKYGMDDYMDLKYICMGGIDQ

SEQ ID NO: 25116 - protein, 483 aa, Guillardia theta
MSDDLSKRSLRELVSQPYKYGFHTDIENEEFPKGLDEDIIKEISKLKCEPSYMLDFRLKSYILWKKMSLPEWACLTYLNINYQDIVYYSAPKNSTKLDSLEDVDKKILETFDKLGIPLNEQKKLANVAVDAIFDSVSVGTTFKQELSNVGVLFCPLSEATNKYSTLVEKYLGSVVPIGDNYFAALNSAVFSEGSFCYIPPNVKCPLELSTYFRINNENSGQFERTLIIADFNSYVSYLEGCTAPMYDKNQLHAAVVELIALENAEIRYSTVQNWYSGDTNGKGGIYNFVTKRGLCAGKSSKISWTQVETGSAITWKYPSCILVGEDSVGEFYSVALTNNYQQADTGTKMIHVGRGSKSRIISKGISAGYSKNTYRGQVKININALGSINNSQCDSMLIGPYSQANTYPYIQVSNAMSRVEHEASTSKIEEEQLFYFLQRGISVEQAISLLISGFCRDVFVKLPMEFAVEADKLLSVKLEGTVG

SEQ ID NO: 25117 - protein, 248 aa, Candida glabrata CBS 138
MSTSPVSLKVNAALFDVDGTIIISQPAIAAFWRDFGKDKPYFDAEHVIHISHGWRTYDAIAKFAPDYADEEYVNKLEGEIPEKYGEHSIEVPGAVKLCTDLNKLPKEKWAVATSGTRDMAQKWFKILNIERPEYFITANDVKQGKPFPEPYLKGREGLGFPINKEDPSKSKVVVFEDAPAGIAAGKAAGCKIIGIATTFDVDFLKEKGCDIIVKNHESIRVGGYNPETDEVEFIFDDYLYAKDDLLEW

SEQ ID NO: 25118 - protein, 592 aa, Bacteroides fragilis YCH46
MKQSISERIHALRMWFKPNIQAFIIPSTDPHLSEYVAPHWKSREWISGFTGSAGTVVITEKKAGLWTDSRYFLQAAEQLQGSGIDLYKEMLPETPSITKFLSDELQPGKSVGIDGKMFSVEQVESMQAELSAKNIQIVFCPDPMDELWENRPPMPESPAFVYDIKYAGKSCSEKIAAIRTELKKKSAESVMLSALDEIAWTLNLRGNDVHCNPVVVSYLLITEKKAVLFIAPEKVTEEVRNYLEEQQIEIQNYSDTEIYLSDLNSSSILMNPAKTNYSVFSSVNPQCRIIRGEAPVALLKAIRNEQEIKGIHAAMQRDGVALVKFLRWLESAVPSGTETELSIDRKLHAFRATQDLYVGESFDTIAGYKEHGAIVHYSATEESNATLHPKGFLLLDSGAQYLDGTTDITRTIALGELTTEEKTDYTLVLKGHIALAMAVFPSGTRGAQLDVLARMPLWSHKMNFLHGTGHGVGHFLSVHEGPQSIRMNENPIVLQPGMVTSNEPGVYKGGSHGIRTENLTLVCSAGEGLFGEYLKFETITLCPICKKGIIKELLTADEVDWLNNYHQQVYEKLSPKLNEEEKAWLKEATAAI

SEQ ID NO: 25119 - protein, 433 aa, Neisseria meningitidis Z2491
MPSETARPLYADTCAAHTLVWFRQNLRIRDNAALCAAVAEGLPVIGIWIDDAETDNPRRAAFYRQSAAELAQGLAGRGIPLYTAASPAELVRLAVRLNIRAVIADESHTFADKLADNALWHELNKHGIALTFVNDRAVFGKTDLIPDGGTAHTDFDRYREVWLDRFSKQPPAGPDLFAAYRQPFPENLSAPPPAALSDGIFLPQNSGETAAWRQWRRFLEQADSYSVLKDFPSRKHTSLMGAYLSAGCISPRLLARESLERRLNAWADNIIRRDFFLQLALQHTDDDPSDGNPEHTLRLTLWQQGRTGIPIIDAAMRCLHKTGSLHPALRRLSADFFCHVLNLPRREGEIWFARQLTDFDAAINQGNWRLAASRHTCPDIAAAAHKTDPDGTFVRRHIPELAHLSADTVHTPWRFACSVDTHGYPAHPVAGIP

SEQ ID NO: 25120 - protein, 485 aa, Thermoplasma acidophilum
MENGVRYSDLIERLDMSRVTRFYWLLTILATIGGFLFGYDTSNIGSALPLLERIYPGISGFVEGYLVAGASLGAAVGAIIAAGLTDRYGRKYLLIADAAIYAAGALLSAFTVDLVMLLLSRTLIGIAVGADSGIATAYIAEYAPKARRGSLGILQQWMITIGILAAYLIGMATLFFAPGLAYAVGWRIMLGVAAIPAIIGLAFRFMMPESPRWLLVNGKYKEASASLKRLGLNMSEEDLKSVKLSQPHKITPGVKRALLIVGLFFVFQQITGINIPFYYGPVVLENLHIVGKSTSLVYSIYYSIAASAILAIINVAATYIGFRYIDSVGRRKLALMGYAGMTFFGILGGILLYLKLDIGLFIAFAGFIIFFAFGVGGTGWMIQGEYFPTSMRGLYASLGAFIDWIANFAIIELFPVMDSAITIKNVEFVFGVLSLIALILFYYIMPETKGLSVEQIDTLFENNSLGQMKHASISMKKESVPADPK

SEQ ID NO: 25121 - protein, 198 aa, Cucumis sativus
AIPWIFAWTQTRFHLPVWLGFGAAFKHIIQKNVKNLQMLQEMYNEWPFFRVTIDLVEMVFAKGDPGIAALYDKLLVSEDLWSFGERLRANYEETKSLLLKIAGHSDLLEGDPYLKQRLRLRDSYITTLNVCQAYTLKRIRDPNYHVKVRPHISKEIMEASKPADELIHLNPQSEYAPGLEDTLILTMKGIAAGMQNTG

SEQ ID NO: 25122 - protein, 484 aa, Synechococcus elongatus PCC 7942
MAAPILFWHRRDLRLSDNIGLAAARAQSAQLIGLFCLDPQILQSADMAPARVAYLQGCLQELQQRYQQAGSRLLLLQGDPQHLIPQLAQQLQAEAVYWNQDIEPYGRDRDGQVAAALKTAGIRAVQLWDQLLHSPDQILSGSGNPYSVYGPFWKNWQAQPKPTPVATPTELVDLSPEQLTAIAPLLLSELPTLKQLGFDWDGGFPVEPGETAAIARLQEFCDRAIADYDPQRNFPAEAGTSGLSPALKFGAIGIRQAWQAASAAHALSRSDEARNSIRVWQQELAWREFYQHALYHFPSLADGPYRSLWQQFPWENREALFTAWTQAQTGYPIVDAAMRQLTETGWMHNRCRMIVASFLTKDLIIDWRRGEQFFMQHLVDGDLAANNGGWQWSASSGMDPKPLRIFNPASQAKKFDATATYIKRWLPELRHVHPKDLISGEITPIERRGYPAPIVNHNLRQKQFKALYNQLKAAIAEPEAEPDS

SEQ ID NO: 25123 - protein, 327 aa, Nostoc sp. PCC 7120
MAETLFFNALREAIDEEMARDSSVFVLGEDVGHYGGSYKVTKDLYKKYGELRILDTPIAENSFTGMAVGAAMTGLRPIIEGMNMGFLLLAFNQISNNAGMLRYTSGGNFKIPLVIRGPGGVGRQLGAEHSQRLETYFQAVPGLKIVTCSTPYNAKGLLKSAIRDDNPVLFFEHVLLYNLKEDLPEKEYYLPLDKAEIVRSGKDVTILTYSRMRHHVTQAVKTLEKQGYDPEVIDLISLKPLDLETIGASIRKTHKVIIVEEAMRTGGIAAELIASINDRFFDELDAPVLRLSSQDIPTPYNGTLERLTIVQPEQIVEAVQKMIALRV

SEQ ID NO: 25124 - protein, 777 aa, Synechococcus sp. RS9917
MLNVTSAPEQPQTDAVRAAEPCDQPVQRVHPIRTIEDYGIDLPDWLRECLTHVPPGEGYSCPTDPEALLAAAFDFAFQLHQGQFRASGDPYIVHPVAVADLLRDIGASAPVIAAGFLHDVVEDTDLTPAQLESHFGAEVRELVEGVTKLGGLHFTNRTEAQAENLRKMFLAMASDIRVVLVKLADRLHNMRTLGALKEEKRQRIARETREIYAPLANRLGIGRFKWELEDLAFKLLEPDAFREIQQEVATKRSEREERLGVTVKLLSDRLAAVGLDSCEVSGRPKHLYGIWSKMQRQQKAFHEIYDVAALRILTPNVESCYRALAVVHDTFRPIPGRFKDYIGLPKPNGYQSLHTAVIGRHRPIEVQIRTLEMHQVAEFGIAAHWKYKEGGSPAAGGDTERFNWLRQLVDWQQEGGADDHNDYLASIKEDLFDEEVFVFTPKGDVVGLRKGSTAVDFAYRIHSEVGNQCHGVRINDRLSPLSTPLQNGDFITILTSKTAHPSLDWLNFVATPTARNRIRQWYKRSHRDETIQRGKDLLEKELGRNGFDALLHSDAMTRVAERCNLHSTDDLLAALGFGAVTLHQVLNRLREEIRLQTAAAAQPLSNEDVARRLVEQAEASSPRPSQGSTVPILGVEGLDYRLGGCCSPLPGEAIVGTVALGNHGITIHRQECANVEAIPSERRLPVSWNPAVTRHGLRFPAQLRIEVIDRVGILKDILMRLSDGSINVSDARVKTAYDKPARIDLRVEISSVEQLQRTMAQIRSMADVLDIARTGQS

SEQ ID NO: 25125 - protein, 252 aa, Brassica napus
  misc_feature (80)..(80): Xaa can be any naturally occurring amino acid
  misc_feature (106)..(106): Xaa can be any naturally occurring amino acid
  misc_feature (175)..(175): Xaa can be any naturally occurring amino acid
  misc_feature (184)..(184): Xaa can be any naturally occurring amino acid
  misc_feature (193)..(193): Xaa can be any naturally occurring amino acid
  misc_feature (196)..(196): Xaa can be any naturally occurring amino acid
  misc_feature (206)..(206): Xaa can be any naturally occurring amino acid
  misc_feature (209)..(209): Xaa can be any naturally occurring amino acid
  misc_feature (218)..(218): Xaa can be any naturally occurring amino acid
  misc_feature (242)..(242): Xaa can be any naturally occurring amino acid
MPPPPRPTSLPSVTELEVYSDTFEPSVISTAPCNPLLLGGVGVRGLDIHGKVVIFTVIGVCIDADAVPSLSFKWKRKTTXELKQSVPLFREIVTGSFEKFIKVTMXLPLTGQQYSEKVTENCVAIWKSLGIYTDYEAKAVKKFLEVFKDRTFPPGASILFALSPNGYLTIVFSKXDSIPKTGKXVIENKLLAXAVXESIIGKKGVXPGXRLSLAERLXQLMKENKVEKDATKTDNQDEANDXSLGDKLAKEN

SEQ ID NO: 25126 - protein, 550 aa, Rhodobacter sphaeroides 2.4.1
MTGQGAAPGPVKERLWIYDTTLRDGQQTQGVQFSTPEKRQIAEALDRLGVDYIEGGWPGANPTDSEFFAALPRVRARVTAFGMTKRAGRSAENDDVLAAVLDAGTDTVCLVGKTHEFHVTTALGVTLEENLEAIRASVAHVVAKGREAILDAEHFFDGYRANPAYALDCLQAALGAGARWVVLCDTNGGTLPAEVGRIVAEVIAAGVPGDRLGIHTHDDTGTAVAATLAAVDAGARQVQGTLNGLGERCGNANLTTLIPTFLLKEPYASRFETGIDREALSGMVRVSRMLDDILNRVPRRASAYVGASAFAHKAGLHASAILKDPATYEHVDPALVGNVRVIPMSNQAGQSNLRARLAEAGLEVPSGDPRLGRILETVKAREDQGYAYDSAQASFELVARRELGLLPSFFEVKRYRVTVERRRVGEGTMTLSEAVVVVLIDGQRVLSVSESLDENGTERGPVNALSKALAKDLGRWQSVIDDMRLVDFKVRITQGGTEAATRVIIDSEDGQGRRWSTVGVSPNIVDASFEALLDAINWKLVRDARQEDSR

SEQ ID NO: 25127 - protein, 317 aa, Methylococcus capsulatus str. Bath
MSEPKHSRVLILGSGPAGYTAAVYAARANLRPVLVTGIQMGGQLTTTTEVDNWPGDADGVMGPDLMERMRRHAERFDTEIVFDHIHTADLSERPFTLTGDAGVYTCDALIIATGASARYLGLPSEEAYKGRGVSACATCDGFFYKGKHVAVIGGGNTAVEEALYLSNIAAKVTVVHRRDKFRSEKILSDKLLERAANGNVSIEWNSVLEEVLGDDMGVTGMRIRNVQDGTSKDIALEGVFIAIGHSPNTEIFAGQLGMRNGYIVVKGGSEGGATATTVEGVFAAGDVSDSIYRQAITSAGSGCMAALDAEKFLDSLG

SEQ ID NO: 25128 - protein, 576 aa, Bordetella parapertussis
MRASKYHLNTLKEAPAEAEIASHQLMTRAGMIRKLAGGIYTYMPLGLKVIRKIEGIVREEMNAAGAIELLMPVVQPAELWMESGRWEQYGAELLRIKDRHQRDFVLQPTSEEVITDIARNEIQSYRQLPLNFYHIQTKFRDERRPRFGLMRGREFTMKDAYSFDRDEAGAQRSYDIMYAAYQRIFQRLSLEFRAVAADTGSIGGSRSHEFQVIADTGEDLIVYNPESDYAANIELAEAPALLAARAAPAQDLEAVPTPGAAKCEDVAKLLGLPLARTIKSIVLAVDQPEGPAQVWLLLLRGDHELNEIKAGKLPGLAGFRFATETEIVDHFGCKPGYLGPIKTARPVHVVADRTVANMADFVCGANREDYHYQGANWGRDLPEPELVADLRNVVEGDPSPDGKGALSIQRGIEVGHVFFLGTKYSEALKATFLDDNGKPAVLQMGCYGIGVTRIVGAAIEQNHDARGIIWPRAIAPYEVVICPVGWGKSETVRDTALALYEALRARGVDVMLDDRDSRPGVMFAEWELIGVPLRVTVGERGLNEGVVELQARREAEAAKVPVDQALAQTLAKLDLL

SEQ ID NO: 25129 - protein, 113 aa, Glycine max
MRSLLLALFLVLAFHRGEAAVSCNAVVGDLYPCLSYVVQGGNVPANCCNGIRTLNSQAQTPVDRQGVCRCIKNAIGGVSFSSNNVNNAQSLPAKCGVNLPYSISPSTNCDSIN

SEQ ID NO: 25130 - protein, 289 aa, Synechococcus elongatus PCC 7942
MAAAILDGRALAAQRRQQLREQVEAIAPAVGRRPGLAVIMVGDNPASAVYVRNKERACEQTGIVSFGKHLPGDSSEAEIRALIEELNQDDRVDGILVQLPLPSHLDAVPLLLAIDPEKDADGLHPLNLGRLLRGEEGLRSCTPAGVMELLAANQIDPAGKKAVVIGRSILVGKPLAMMLLEANATVTIAHSRTPNLPEVCRQADIVVAAVGRPELVGADWIKPGAVVVDVGINRLEDGRLVGDVDYEAASAITSWITPVPGGVGPMTVAMLLHNTVLSYCRRSGQPFLS

SEQ ID NO: 25131 - protein, 406 aa, Nostoc sp. PCC 7120
MTLRVAVVGSGPAGSSAAETLAKAGIETYLFERKLDNAKPCGGAIPLCMVSEFDLPPEIIDRQVRKMKMISPSNREVDINLIKEDEYIGMCRREVLDGFLRNRAAKLGANLINATVHKVDIPGNNSDPYTIHYVDHNEGGAQGVTKTLKVDLIIGADGANSRIAKEMDAGDYNYAIAFQERIRLPEDKMAYYNDLAEMYVGNDVSTDFYAWVFPKYDHVAVGTGTMQVHKASIKQLQAGIRTRASEKLAGGKIIKVEAHPIPEHPRPRRVVGRIALVGDAAGYVTKSSGEGIYFAAKSGRMCAETIVEVSQNGSRIPTENELKIYLKRWDKKYGLTYKVLDILQTVFYRSDATREAFVEMCGDLDVQKLTFDSYLYKTVVPANPITQLKITAKTIGSLIRGNALAP

SEQ ID NO: 25132 - protein, 126 aa, Triticum aestivum
  misc_feature (69)..(69): Xaa can be any naturally occurring amino acid
  misc_feature (82)..(82): Xaa can be any naturally occurring amino acid
RVAGRGVLAHKQAIPFRRYCRGVGRTAQVKNRQPNGQGRWPAKSAKFVLDLLKNAESNAEVKGLDVDAXYISHIQVNQAQKXRRRTYRANGRINPYMSNPCHIELILSEKEEPVKKEAESQIARKA

SEQ ID NO: 25133 - protein, 230 aa, Vibrio angustum S14
MKNTRIVLLRHGQSVWNKENRFTGWANVSLSELGENEARNAGIKLKENGFNFNFCYTSMLDRAIKTSNLALEQLDSLWIPVEHDWQLNERHYGDLQGLNKAETAEEFGDEQVHIWRRSYDIEPPQVSEDSFFYPGNDRRYQELQHSQLPHGESLKDTYDRVIPFWNESIVPNVKQGSDILIAAHGNSLRALIKYLDNIPDDKITKLEIPTGAPLVYEFNEQMKPVKSYYL

SEQ ID NO: 25134 - protein, 326 aa, Candida mucifera
SIVGRARHPGMMVGMNQKDSYVGDEAQSKRGILTLKYPIEHGIVTNWDDMEKIWHHTFYNELRVAPEEHPVLLTEAPVNPKSNREKMTQIVFETFNAPAFYVSIQAVLSLYASGRTTGIVLDSGDGVTHVVPIYAGFSLPHAIMRINLAGRDLTDNLMKLLTERGYSFTTTAEREIVREIKEKLCYVALDFEQELQTASQSSSLEKSYELPDGQVITIGNERFRAPEALFHPSVLGLESAGIHETTFNSIMKCDVDVRKELYNNIVMSGGTTMYPGIAERMQKEITALAPSSMKIKIVAPPERKYSVWIGGSILASLGTFQQMWIS

SEQ ID NO: 25135 - protein, 406 aa, Haemophilus somnus 2336
MRRAVVTGFGIISSIGNNKQEVLEALKKGKSGIEVMPDFVKMGMRSHIAGTIKLNPAELIERKIFRFMGDAAAYAYLSMKEAIEDAGLTEDQVSNDRTGLVIGAGTGSGHNQMVACDAVRGPRGVKAIGPYAVTKTMASSVSACLATPYKIRGVNYSISSACATSAHCIGHAVELIQLGKQDVVFAGGAEELSWECATEFDAMGAVSTKYNETPEKASRAYDAHRDGFVIAGGGAVVVVEELEHALARGAKIYAEIVGYGATSDGYDMVAPSGEGAERCMKQALATVDTPVDYINVHGTSTPVGDVKELGAIRNVFADQKPAISSTKSMTGHSLGAAGAHEAIYSLLMLEHDFIAPSINIETLDEQAVGMNIVTETKENAGLETVMSNSFGFGGTNACLVFKRYKK

SEQ ID NO: 25136 - protein, 467 aa, Listeria monocytogenes str. 1/2a F6854
MLYSEDDKRKQESYRIPLFGSEEESTSIPKYVLKKEPMEPRIAYQLVKDQLMDEGNARQNLATFCQTYMEKEAEILMAETLEKNAIDKSEYPQTAELENRCVNILADLWNAPKDMSYLGTSTVGSSEACMLGGLAMKFRWRNNAEKRGLDIQAKRPNLIISSGYQVCWEKFCVYWDVDMRVVPMDKNHLSLDVDKVFDLVDEYTIGVVGILGITYTGKFDDIQLLDEKVEAYNATNEHQLVIHIDGASGAMFTPFVNPELPWDFRLKNVVSINTSGHKYGLVYPGVGWILWKDKEYLPKELIFEVSYLGGSMPTMAINFSRSASQIIGQYYNFLRYGFEGYREIHEKTKKTALYLAKTVEKSGYFEIINDGANLPIVCYKMKEGLDVEWTLYDLADQLLMKGWQVPAYPLPADLSDTIIQRFVCRADLGYNVAEEFAADFADAIHNLEHARVLYHDKERNDSYGFTH

SEQ ID NO: 25137 - protein, 260 aa, Desulfitobacterium hafniense Y51
MPENRVVELTVCNGVGVITINNPPVNALTLEVRGQLKETLNEVEKNTGIRVLVITGAGPKCFVAGADIKDFPNQFKEGPRENATIYKEMFSYLENTPRPVICAVNGLALGGGLELALACDIRIADEKAKLGLTEVLLGLLPGLGGTQRLARLVGPAKAKELLFSGKIVKADEALRIGLVNEVVPAGESLNEALKLAEKLAKGAGIAMGYDKLLINKGLELSLADALEMEMHYVEKVFETEDLREGLDAFINKREAVFKNR

SEQ ID NO: 25138 - protein, 69 aa, Glycine max
MADWGPVVIAVVLFVLLSPGLVFQLPGKSRVVEFGNMQTSAVSILVHTIIFFGLITIFLVAIGVHIYTG

SEQ ID NO: 25139 - protein, 130 aa, Platanus x acerifolia
THKGADDKAYRCVYEEEDPEGKVGVSLQKDLMAIAGEALKSNITTIGPLVLPASEQLLFLFTLVGRKLINPKWKPYIPDFKQAFEHFCIHAGGRAVIDELQKNLGLSAEHVEASRMTLHRFGNTSSSSLW

SEQ ID NO: 25140 - protein, 331 aa, Aspergillus oryzae
MAGKALKDVKSLNTCPGCGQIKRAHVLCPHCVETHPTDIFSLAVTNKQILSASGVSALKVHSTADPDFPLVQSIDEAHKLGCHHVVTDGNGSRSVSVGFGGEIRVWSCHDGNWSENKTVSAGNAGSTGVWAIALSGDGQYLAGVSQDGHIRVWDLDANGEQIRYYETKGSFGTCIDLSADGRFIASGHENGSVYIFSTETGRMPFSLSGLVKPVRAVAFSPGGKFLAAAGDSNVIVLYDTSSGEQVANLPGHSAWVLSLSWSHTGEYLLSGSFDGKVKVWSIDTRTCVATHSETERAVWNVKWLPKIGKSEGFATAGASRSISFYREATGG

SEQ ID NO: 25141 - protein, 409 aa, Bacillus cereus G9241
METIVQKFGGTSVGSVERIQHVANLIIEEYERGHSIVTVVSAMGKSTDELVALANAITENPSKREMDMLLSTGEQVTISLLTMALQAKGYNAISLTGWQAGITTESVHNSARITDIHTDRIQSYLAEGTIVIVAGFQGVSENHEITTLGRGGSDTTAVALAAALNATKCDIYTDVTGVYTTDPRVVKDAYKLDEISYDEMLELANLGAGVLHPRAVEFAKNHNVILEVRSSMEQENGTIVKGECNMEQQSIVKGIAFEDNITRITLKGLEQGSLSTVFSTLAAAHINVDIIIQSITNEGTVHLSFSIHSNDLRETLEVLEQNQEALHYESVEYENHLAKVSIVGSGMVSNPGVAANMFTTLKEEDIHIKMVSTSEIKVSVVIDRLHLVTGVEALHQSFMAKIEPLVQMI

SEQ ID NO: 25142 - protein, 391 aa, Bartonella quintana str. Toulouse
MAKSKFERTKPHVNIGTIGHVDHGKTSLTAAITKYFGEFKAYDQIDAAPEERARGITISTAHVEYETEKRHYAHVDCPGHADYVKNMITGAAQMDGAILVVSAADGPMPQTREHILLARQVGVPAIVVFLNKVDQVDDAELLELVELEIRELLSKYDFPGDDIPIVKGSALAALEDKDKSIGEDAVRLLMSEVDNYIPTPERPVDQPFLLPIEDVFSISGRGTVVTGRVERGVIKVGEEIEIIGIRPTSKTTVTGVEMFRKLLDQGQAGDNIGALLRGVDREGIERGQVLAKPGSVTPHTRFKAEAYILTKDEGGRHTPFFTNYRPQFYFRTTDVTGIVTLPEGIEMVMPGDNVAMDVSLIVPIAMEEKLRFAIREGGRTVGAGIVSKIIE

SEQ ID NO: 25143 - protein, 447 aa, Candida glabrata CBS 138
MATNEEFIRTQIFGTVFEITNRYSDLNPVGMGAFGLVCSATDTLTNQQVAIKKIMKPFATAVLAKRTYRELKLLKHLRHENLICLQDIFLSPLEDIYFVTELQGTDLHRLLQTRPLEKQFVQYFHYQILRGLKYVHSAGVVHRDLKPSNILINENCDLKICDFGLARIQDPQMTGYVSTRYYRAPEIMLTWQKYDVEVDIWSAGCIFAEMIEGKPLFPGKDHVHQFSIITDLLGSPPSDVIDTICSENTLKFVTSLPHRDPIPFSERFKTVEPDAVDLLEKMLVFDPKKRITAADALAHPYLAPYHDPTDEPVAEAKFDWHFNDADLPVDTWRVMMYSEILDFHKIGGTDGQIDTSATFDDQVAAATVAAAQAQAHALAQAQMSQNMIDPNQLLNEDGTPVSGSIAENSSNSATTNLNGAAAGMNSASDTINEYANQAVHFANEFQQ

SEQ ID NO: 25144 - protein, 578 aa, Burkholderia sp. 383
MKASRFFIGTLKEAPADAEIVSHKLMVRAGMIRRVAGGIYNYLPVGLRSIRKVEAIVREEMNRAGGIELLMPAVQPAELWQESGRWEQYGPELLRFKDRKDNDFVIGPTHEEVITDIARNQIKSYRQMPVNFYQIQTKFRDEIRPRFGVMRGREFIMKDAYSFDKDAAGLNESYRKMYDAYVRIFTRLGLEFRAVAADSGSIGGNFSHEFHVIADTGEDAIAYCPTSEFAANIEAAEALPLIAERAAPAEAMEKVATPGKAKCEAVAELLAIPLERTIKSIVLATDNEGAEPTIWLVMLRGDHDLNEIKVSKLPGLKNHRFATEQEIVEWFGTPPGYLGPVGTKKPVKVIADRTVANMSDFVVGANEVDYHIAGVNWGRDLPEPDVADVRNVKKGDPSPDGKGVIDICRGIEVGHVFQLGTKYSEAMGATFLDESGKPQPMLMGCYGVGVTRILGAAIEQNFDDKGIIWPESIAPFEVVLCPMGYDRSDMVRETADKLYAELVAAGIDVILDDRGERPGVMFADWELIGVPHRLVIGERGLKEGKIEYQGRRDAEATLLPADAAAATVAEKIRAALAR

SEQ ID NO: 25145 - protein, 171 aa, Triticum aestivum
  misc_feature (82)..(82): Xaa can be any naturally occurring amino acid
TRPPKSVNDIHKRGGTVLGSSRGGHDTHKIVDNIQDRGINQVYIIGGDGTQKGAYEIFKEIRRRGLKVAVAGIPKTIDNDIXDKSFGFDTAVEEAQRAIDAAHVEASSAENGIGLVKLMGRYSGFIAMYATLASRDVDCCLIPESPFFLEGEGGLFEYIERRLKENQPHGH

SEQ ID NO: 25146 - protein, 616 aa, Triticum aestivum
MGSHGKPPLPYAYKPLPSDADGERAGCTRWRVCAVALTASAMVVVVVGATLLAGFRVDQAVDEEAAGGFPWSNEMLQWQRSGYHFQTAKNYMSDPNGLMYYRGWYHMFFQYNPVGTDWDDGMEWGHAVSRNLVQWRTLPIAMVADQWYDILGVLSGSMTVLPNGTVIMIYTGATNASAVEVQCIATPADPTDPLLRRWTKHPANPVIWSPPGVGTKDFRDPMTAWYDESDDTWRTLLGSKDDNNGHHDGIAMMYKTKDFLNYELIPGILHRVERTGEWECIDFYPVGRRTSDNSSEMLHVLKASMDDERHDYYSLGTYDSAANRWTPIDPELDLGIGLRYDWGKFYASTSFYDPAKKRRVLMGYVGEVDSKRADVVKGWASIQSVPRTIALDEKTRTNLLLWPVEEIETLRLNATELSDVTLNTGSVIHIPLRQGTQLDIEATFHLDASAVAALNEADVGYNCSSSGGAVNRGALGPFGLLVLAAGDRRGEQTAVYFYVSRGLDGGLHTSFCQDELRSSRAKDVTKRVIGSTVPVLDGEAFSMRVLVDHSIVQGFAMGGRTTMTSRVYPMEAYQEAKVYLFNNATGASVTAERLVVHEMDSAHNQLSNMDDHSYVQ

SEQ ID NO: 25147 - protein, 724 aa, Thiomicrospira crunogena XCL-2
MSEQNEQASQLYIALISVHGLIRGQNLELGRDADTGGQTLYVLELAQALANHPAVGKVDLFTRQVIDSAVSEEYAQPIEPVSDKFNIVRIAAGPDQYIAKERLWDYLDAYTDNMMDHLRLQKKMPDIIHSHYADAGYVGYHLANQLAIPLIHTGHSLGRVKRARLLASGLSADEIESVYNMTRRIDAEEETLASAERVITSTHQEIEEQYELYDFYQPEQMRVVPPGTNLNHFMPPKGDELTSDLYFDLTKHLKTPEKPIILALSRPDARKNITALIDAYGQSKPLQALANLVIIAGNRDDIDDLEDGARHVFHDLLVAIDRYDLYGKVTLPKHHQRDQVPFIYRIAAASGGVFVNPALTEPFGLTLIEAAASGLPIVATEDGGPRDIIGNCENGILVDPLETETITDALLKLLGNQNLKQTYIENGLKGVFTHYAWEAHANTYLDLICPIVKENERLERKLSERRAELYRDRAFVTSLDQNLIGDTASLQNLIQLLRSHRKTTLFIVATGRRLDSALRLLKHYHIPEPDILISSSGTEISYAPKLTTDTAWEKHIDYHWMPHKIRSMLDKYPGLKKQPKSEQNHFKISYIIDTSMADVEEIKQLLHWEEQSVNVQLSFGKYLDILPIRASKGMALRYVANRWQIPLDRIFVAGGSGSDEDMMRGNALAAVVANRNKEELSQLVDIDRIYFAKKPFEEGILEALEYYDFFDSCTAPEEFSREAN

SEQ ID NO: 25148 - protein, 276 aa, Thiomicrospira crunogena XCL-2
MSSRLLLCTDMDRTIIPNGAQKEPATARQDLKTFCDRPEVTLVYVTGRHQVLVQNAIEEYQLPYPDYVISDVGTKIYQTQQNEWQVLDQWESTIDQDWHGKTHQDLLDILSLLDGLELQEPSKQNTHKLSYYVSLSTDIDRLLKEAETLLQAQHVEASLIWSIDEAENIGLLDVLPKNATKLHAIQFLQHFLDYSLDEVVFAGDSGNDLPVLTSEIHSVLVANASDDIKKQAIQLAHANNTMDALYLAQNQSDQNGNYAAGVLQGVGHYIPAFQNI

SEQ ID NO: 25149 - protein, 367 aa, Pisum sativum
MASILYSLILFGLITLSLSLDMSSGRSNKEVMTMYEKWLVKHQKVYYGLGEKNQRFQIFKDNLIFIDEHNAPNHSYRVGLNEFSDITNKEYRDTYLSRWSNNNIKNKITSVRYAYKAGHNNKLPVSVDWRGALTPIKNQGSCGACWAFSAVAAVEAINKIVTGSLVSLSEQELVDCDRTKNKGCNGGNQVNAYRFIVENGGLDSQIDYPYLGRQSTCNQAKKNTKVVSINGYKNVQRNSESALMEAVANQPVSVGIEAYGKDFQLYQSGVFTGSCGTSLDHAVVVVGYGSENGKDYWLVKNSWGTNWGERGYLKIERNLKNTNTGKCGIAMDATYPTKLRENSEVTNSGYEKLQMLVPVLETPTNVA

SEQ ID NO: 25150 - protein, 471 aa, Psychrobacter arcticus 273-4
MSQHSSLPNDSLIDQAMNSTINSPTANTPATAQTKKRHKPPHFERTDDMRVVVTGMGAVTPLGLDVESSWAKLLKGESGITAISHFDASGYRAQIAGVVKDFDAKQYMNAKDARRYDEFIHYAVAASSMALHQAGFIEEVSAADAPVQGVDQERFGVIIGSGIGGIQNIENSRDTLREKGSSKVSPFIIPGSIVNMAAGLVAIKHCLKGPNLATSTACTTATHAIGLAARLIAYGDADVILAGGSEKGSSPLGISGFGAMHALSTRNDEPTRASRPFDKDRDGFVLGDGAGVMILESLAHAKARGATILAELVGFGMSDDASHITAPPEDGSGAARAMRNALNDAGIEPSVVGYVNAHGTSTPAGDVAESIAIETVFSPVKDTILVSSTKSMTGHLLGAAGGVEAIFTVLALQHQQVPPTINLDNIEDNCNLDYVANQSRQVDNLQYAVSNSFGFGGTNGSLIFARWPVNQ

SEQ ID NO: 25151 - protein, 601 aa, Gloeobacter violaceus PCC 7421
MGLIVQKYGGTSVGSAERMRSVAERIARTHRQGHDLVVVVSAMGHTTDALVKMACEMHGEPDPREMDMLLTTGEQQSVALLTMALHALGCKAISLTGAQVGVVTEPNHTRARIRRVQTGRINELLAAGYVLVVAGFQGICHSRFWEITTLGRGGSDTSAVALAAVLKANRCEIYTDVPGVLTTDPRLVGDAALLEEITSEEMLELASLGAQVLHPRAVEIARNYAVPLVVRSSWSDAPGTIVLSPRLPVDRAIDNLETERPVDAVYIDNHQAKIALLRVPDRPGVAAALFGHLAKAGIDVDLIIQSIHHPNAPEPTNDIAFTVQRSDLAAAVATSETAAAALGGCAVVVDPVPTKVSIRGAGIIGRPGVVAQMFKALAEARINIQMISTSETSLSCVIAGEQAEKAGEVLCGQFGLRAPVYEEPPVVSGARPVAQAVRGVALDTNQAQVAILQIPDRPGVAAEIFQCLAQEGIAVDMIVQSQRGADTNDIGFTVSRSAVRAAQRALASLCMGFAGCGGVVVRESVAKLSLVGAGIVGTPGVAARMFETLASLGTNIEMISTSTIKVSCIVEAACCEASLQAVHRAFGLGSGAMVAVEGRSS

SEQ ID NO: 25152 - protein, 605 aa, Psychrobacter arcticus 273-4
MNKQAIHDRIDHLRQTLAAQDLTAIIVPSADPHLSEYLPEYWQARLWLSGFSGSVGTLVVTADFAGLWTDSRYWVHAAEQLDGTGISLEKLAPGQPNHIDWLAAHLAEGDSVAVDGNVLSIAEQDRLLDAFDANDITLITERDVLTEVWTDRPALPSASLYAHNAQFLAQSATAKLTAVRAGMAETGATHHLLSSLDDIAWLTNLRGSDVDYNPVFLAHMLIDADKATLFIDNNKVSADIAQSLKDSGITLADYEAVQDALGTLTADNLLLLDPSKIAVGTLSKMGDGVGFIEQMAPSTLLKSVKSNADIDHVREAMRQDGAALCEFFAIFEQRLKAGERLSELDIDSMLIDVRSQQPHYVSPSFPTIAGFNENGALPHYRATPEKFSYLDVTEGEGGLLLIDSGAQYQNGTTDITRVVGIGQVSSEHKRDFTTVLKAHIALARAHFPDGIASPLIDAICRAPLWQAQMDYGHGTGHGVGYFLNVHEGPQVIAYSASTPKERAMKEGMISSNEPGLYREGKWGIRIENLVVNMQVVNPTESEFGDFLNFETITYCPIDTRLIEPSLLDQVESDWLNDYHRQVYAELKDRVDGAALEWLTERTQAI

SEQ ID NO: 25153 - protein, 249 aa, Xanthomonas campestris pv. vesicatoria str. 85-10
MTRKLVLLRHGQSQWNLDNRFTGWVDVELTDQGRQEAVAAGKLMKDEGLQFDVAHTSVLKRAIHTLQGALKELDQDWLPVSKSWRLNERHYGGLQGLDKAETAAKHGEEQVKIWRRSYDIPPPAMDVNDPGHPCHDRRYATLDRNALPGTESLATTLVRVLPYWHDAIAPQLKAGQTVLVTAHGNSLRALYKYLNDVSNEQILELNIPTGIPLLFELDDNLQVRSFRYLGDPEAAKRAAEAVANQGKAK

SEQ ID NO: 25154 - protein, 175 aa, Triticum aestivum
MGPTVMASSATSVAPFQGLKSTAGLPVSRRSNGASLGSVSNGGRIRCMQVWPIEGIKKFETLSYLPPLSTEALLKQVDYLIRSKWVPCLEFSKVGFIFREHNASPGYYDGRYWTMWKLPMFGCTDATQVINEVEEVKKEYPDAYVRIIGFDNMRQVQCVSFIAFKPPGCEESGKA

SEQ ID NO: 25155 - protein, 207 aa, Oceanobacillus iheyensis HTE831
MNELSKIEQAIEDLRNGKLIIVADDADREAEGDLVGLSEFVTPEKVNFMTKYGRGLICVPITEERALELDLHAMATNNTDTYGTQFTVSVDYYTNSTGISTADRADTIRALAEPLSKAADFKRPGHMFPLIAKNAGVLERRGHTEAAVDLARLSNSIPSAYICEILNDDGTMARYPALETLAKDWDLTLITVEDLVQYREKEIAIEN

SEQ ID NO: 25156 - protein, 486 aa, Gibberella zeae PH-1
MGSLSYNNSPDLGWVVQKFGGTSVGKFPDKIAKDIVRLLAVYVKLRGVGAAICSDEEQQNELVEQARGLMLDICNDHVFAAESFIKDQNLRETLIQTVKDECQELVEYIVAAKRFNLEINSRAKDRVISFGEKLSCRFMTTLLQDVGVESEYVDLCDAFHYDAAGRLDDRFYRTATEAFTRKIAACENRVPVVTGFFGNVPGSLIDGDIGRGYTDLCAALLSVGVKAEELQVWKEVDGIFSADPSKVPTARLLSSITPSEAAELTFYGSEVIHHLTMDQVIRAEPPIPIRIKNVKNPRGNGTIVVPDRMRSASHQLTRGSPTPKAEAEHRKPKRPTAVTIKDHISVINVHSNKRSISHGFFARVFSILNHYSISVDLISTSEVHVSMAIHASSQQVEAFANAAAELADCGDVSILTDMAILSLVGAEMKNMVGIAGRMFSTLGEHNVNLEMISQGASEINISCVISARDATRAMNVLHTHLFTFLE

SEQ ID NO: 25157 - protein, 81 aa, Gaertnera arenaria
  misc_feature (9)..(9): Xaa can be any naturally occurring amino acid
TPQDEMRAXMSYFHETIWKGVPKFLRRVDTALKNIGINERVPYNAPVIQFSSWMGGDRDGNPRVTPEVTRDVCLLARMMAA

SEQ ID NO: 25158 - protein, 394 aa, Vibrio cholerae O1 biovar eltor str. N16961
MLTQEHINIIKSTIPLLESAGPALTQHFYQRMFSHNPELKHIFNMTHQKTGRQSVALFEAIAAYAKHIDNLAALTSAVERIAHKHTSFNIQPEHYQIVGHHLLETLRELAPDAFTQPVEEAWTAAYFFLAQVFIDREGALYLERKQALGGWRDGRTFVVREKQVESAYVTSFVLVPADGGAVLDYQPGQYIGIEVTPEGSDYREIRQYSLSHASNGREYRISVKREGVGSDNPGLVSHYLHNNVKVGDSVKLYAPAGDFFYVERERPVVLISAGVGATPMQAILHTLAKQNKSGVTYLYACNSAKEHTFAQETAQLIAQQGWMQQVWYRDESADDVLQGEMQLAELILPIEDGDFYLCGPIGFMQYVVKQLLALGVDKARIHYEVFGPHAQLAA

SEQ ID NO: 25159 - protein, 81 aa, Gaertnera arenaria
TPQDEMRAGMSYFHETIWKGGPKFLRRVDTALKNIGINERLPYNAPLIQFSSWMGGDRDGNPRVTPEVTRDVCLLARMMAA

SEQ ID NO: 25160 - protein, 199 aa, Glycine max
MSPATSSAVGTLSGGLLPHGAHRRRPLPTARLLPPRWSRLQVNAARHRRLATPPRAQSAPSPGYLPDSEFYKIEAILRPWRVSHVSSGLLEMGIRGVTVSDVRGYGAQGGSTERYEGSEFSEDTFIAKVKMEIVVCKEQVEPVIDKIIEKARTGEIGDGKIFLIPVADVVRVRTGERGVHAEKMIGGLSDKLPPVITIS

SEQ ID NO: 25161 - protein, 230 aa, Heliobacillus mobilis
MEAMANEVNSYGTQKEQVRQYFDGDAFQRWAAISKGESKNFAQQKLIEGRQAIHRCLLDWIGPIKGKRLIDAGCGAGLLSETFADQGAIVKGIDISQKMIQMAQNRNQGRDNLEFEVSDLLSACGEYDILVSMDVVIHYPLSDMPKLLGHILSLTKERAYISFAPSTAWFRFLKMIGERMSGSSRTTSAYLHPMTDIERILNELGYEITREKLVSNIIYNSMLLEIKPKR

SEQ ID NO: 25162 - protein, 336 aa, Aspergillus oryzae
MADMADLLADADDTSDSEEEEEEDLESAKKQLAAGYMPKTRVLMLTSRGVTSRHRHLLADLAGLLPHTHKESKLDTKKKTAGYNLLLNDLADLHSCNVIFFLEARKRGQDLYLWLARPPNGPTLKFHVNNLHTMGELNAGFSGNCLKGGRGVVVFDRSFDEQGPVMSQPGNEYRGLVREMLRGVFSVPKRGVKGMKPFIDRIIGVFGVDGKIWIRVYEIRESEAGGKKKSEDGEEAAKPVPKGKDGLPEVSLVEVGPRFVLTPIVILEGSFGGPVIYENKEYVSPNQVRHDIRISKAARHAKRRDTQTDRFAKRTNLGLGEGQRKPGPLDNKQLFA

SEQ ID NO: 25163 - protein, 81 aa, Gaertnera capitulata
  misc_feature (15)..(15): Xaa can be any naturally occurring amino acid
  misc_feature (19)..(19): Xaa can be any naturally occurring amino acid
  misc_feature (77)..(77): Xaa can be any naturally occurring amino acid
  misc_feature (80)..(80): Xaa can be any naturally occurring amino acid
TPQDEMRAGMSYFHXTIGXGVPKFLRRVDTALKNIGINERVPYNAPVIQFSSWMGGDRDGNPRVTPEATRDVCLLAXMMXA

SEQ ID NO: 25164 - protein, 227 aa, Hordeum vulgare subsp. vulgare
MNDTDVSRQIQQMVRFIRQEAEEKAGEISVSAEEEFNIEKLQLVEAEKKKIRQEYERKEKQVDVRKKIEYSMQLNASRIKVLQAQDDLVNKMKEDAMKELLNISSNHHEYRNLLKELVVQGLLRLKEPAVLLRCRKEDHHNVESVLHSAKNEYASKADVHEPEILVDHSVYLPPSPSHDDKHGQICHGGVVLASRDGKIVFENTVDARLEVVFRKKLPEIRKLLVAA

SEQ ID NO: 25165 - protein, 162 aa, Trema orientalis
MSSSEVDKVFTEEQEALVVKSWAVMKKNSAELGLKFFLKIFEIAPSANNLFSYLKDSPIPLEQNPKLKPHAMTVFVMTCESAVQFRKAGKVTVRESNLKRIGAIHFKNGVVHEHFEVTRFALLETIKEAVPEMWSPEMKNAWGEAYDQLVAAIKFEVKPSST

SEQ ID NO: 25166 - protein, 371 aa, Prochlorococcus marinus subsp. pastoris str. CCMP1986
MSFGNNPNFDQSKDILPSQNAKIEVIGVGGGGSNAVNRMIDSDLEGVSFRVLNTDAQALLQSSADRRVQLGQNLTRGLGAGGNPSIGQKAAEESKDELQQTLEGSDLVFIAAGMGGGTGTGAAPVVAEVAKQSGALTVGIVTKPFSFEGKRRMRQAEEGIARLAENVDTLIVIPNDRLKDVIAGAPLQEAFRNADDVLRMGVKGISDIITCPGLVNVDFADVRSVMTEAGTALLGIGIGSGRSRALEAAQAAMNSPLLEAARIDGAKGCVINITGGKDMTLEDMTSASEIIYDVVDPEANIIVGAVIDESMEGEIQVTVIATGFETNQPLKQQRIKNRLSNQPLYNISDNKDTGTNIPEFLRLRQNKKDIE

SEQ ID NO: 25167 - protein, 839 aa, Vibrio parahaemolyticus RIMD 2210633
MNSPLTIPVKNALSHIVVVGNGMVGQHLVEQLVQKNAHLEHRITVIGAERFIAYDRVQLSSLFAGKSHDDLMLSNQEWYDMHGIQLVLGSQVTGIDREQKRILLDGEDVLGYDQLVLATGSYPFVPPIEGKDRDNVFVYRTLDDLSQIKKACEGARTGAVIGGGLLGLEAANALKLLGLETHVIEFAPRLMPVQLDDGAGLVLKEKIEALGLTVHTSTGTERICDGETAKHRMVFKDKDPLEVDVIVFSAGIRPQDELARLAELEVGERGGIVINNQCQTSDENIYAIGECALWEQKIFGLVAPGYTMARTTADVLTGMPSEGFKGADMSTKLKLLGVDVASIGDAQMQTEGAQEMVLQDAVAGIYKKLVVDASGTQLLGAILVGDNSDYDALLHCYLNKTVLPDHAANLLFDTGMLDGEMPDSAIICSCHNVTKGDLVAEIQAGTTNLTDLKANTKAGTGCGGCSNMVKSVLDTQLAAMGVEVNNHLCEHFELSRQEMFHICQVEQIKDFDTLIALHGKGHGCDICKPTAASVFASLWNEHIMEPQHQSLQDSNDAFMANLQKDGSYSIVPRVPGGEITPDKLIVLGEVAQQYDLYTKITGGQRVDLFGAQLEQLPEIWQTLIDAGFETGHAYGKSVRTVKSCVGSTWCRYGVDDSVGLAIELENRYKGLRAPHKLKFAVSGCTRECAEAQSKDIGVIATENGWNLYVCGNGGMRPRHADLFASDLSKSELITMIDRVLMFYVSTADRLQRTSVWMENMEGGLDYLKQVILDDSLNLCDSLDEQMARVVDTYQCEWKSTLDNPQKLQRFRPFLNSTSGSKVLPYQRVRGQRIPVKQEV

SEQ ID NO: 25168 - protein, 409 aa, Desulfitobacterium hafniense Y51
MRVLVQKFGGTSVSSAERRAQVAAKVSEAVREGYSPVVVVSAIGRSGDPYATDTFINLVNGITLESPKREMDLLMSCGEIISGVVLTSTLKSMGLEAILLTGGQAGIITNDCYGDARIIRVEPKGILDHLSEGRVVVVTGFQGVTEDGQVTTLGRGGSDTTASALGVALNAEAIDIYTDVEGIMTADPRIVEDARILDVVTYNEICHLAHQGAKVIHPRAVEIAMQRNIPIWIKCTFSDARGTLVTSIQPDMGAGTDITGDRTITGIAHTPNVTQIQVPTHDVADVLQVDKQIFKGMALADISVDFISVQPESVLYTVPDEIAEKAMKILDNLGFKPTAVPGCAKVSIVGAGIAGVPGVMANMVEALSDAGVRILQSADSHTTIWVLVNKEDMVPAVQALHKKFLLGAC

SEQ ID NO: 25169 - protein, 572 aa, Escherichia coli CFT073
MKQTVAAYIAKTLESAGVKRIWGVTGDSLNGLSDSLNRMGTIEWMSTRHEEVAAFAAGAEAQLSGELAVCAGSCGPGNLHLINGLFDCHRNHVPVLAIAAHIPSSEIGSGYFQETHPQELFRECSHYCELVSSPEQIPQVLAIAMRKAVLNRGVSVVVLPGDVALKPAPEGATTHWYHAPQPVVTPEEEELRKLAQLLRYSSNIALMCGSGCAGAHKELVEFAGKIKAPIVHALRGKEHVEYDNPYDVGMTGLIGFSSGFHTMMNADTLVLLGTQFPYRAFYPTDAKIIQIDINPASIGAHSKVDMALVGDIKSTLRALLPLVEEKTDRKFLDKALEDYRDARKGLDDLAKPSEKAIHPQYLAQQISHFAADDAIFTCDVGTPTVWAARYLKMNGKRRLLGSFNHGSMANAMPQALGAQATEPERQVVAMCGDGGFSMLMGDFLSVMQMKLPVKIIVFNNSVLGFVAMEMKAGGYLTDGTELHDTNFARIAEACGITGIRVEKASEIDEALQRAFSIDGPVLVDVVVAKEELAIPPQIKLEQAKGFSLYMLRAIISGRGDEVIELAKTNWLR

SEQ ID NO: 25170 - protein, 734 aa, Haloarcula marismortui ATCC 43049
MAKDLERDLGLLSVVAISIGAMVGSGIFILPALAVKDAGAGIIAAYLLAGVLVLPAALSKAEMATAMPEAGGTYVYIERSMGPLLGTVSGLGTWFSLSFKGALALVGGVPYLVLLFDLPIRPVAITLAAVLILVNILGAEQTGRLQIGIVAVMLVAIGWFVAGGGPAVNTATYGGMWEYGVEGIFAATGLVFVSFAGVTKIASIAEEVEDPDRVIPLGMLGSLAFTTLLYVLVVAVVVGVIPLDQLAGSTTPIADAAEATLGTAGVAAVVLAAILALVSTANAGILSSSRYPFAMSRDGLAPDLLSTVSDRFGTPVTAITLTGGVMLLLILFVPILEIAKLASAFKILVFALINVALIGFRESDAPDYDPSFEVPLYPWTPIFGTLTGFALLTQMGLIAIVGAVGIVIASVVWYLGYVRPRVTREGAIKESVRRSIGDRALDRTEETLDETAETSVLVALPEGASRQSEATLLEVGAALSPTDSSLSVVQFDEVPDQQPLDYASGVQSPDDLEFECRTDTLAAALDTPVEYGELVSHHPERAVANAVDERGVDVLLVERGASFEDSLLGDSIDRIRKQADCDTIAVDAQPLDALETITLITTRGPYDPLKVRVGNAVATATGTDLQFLYPLDERQSAEERQQLEAYHDDLLDLCDVPTERTFVDRDDLSAAMDAADNDRTLLIHASNGGLSARTSNDNGTTQSAIQDSNHASMEVDTKRHPGGVVGRLLERLAF

SEQ ID NO: 25171 - protein, 406 aa, Photorhabdus luminescens subsp. laumondii TTO1
MSSVDILVPDLPESVADATVAVWHKKQGDRVERDEVLVEIETDKVVLEVPASEAGVLEAILEEKDATVLSRQLLGRIRLGDSTGKPAEIKEKTEATLAKRQTAGLDEESNDALSPAVRRLIAEHDLDAKAIKGSGVGGRIVREDVEKYMADNEKVASKPAESSAASAQGSLLPHRSEKRVPMTRLRKRVAERLLEAKNNTAMLTTFNEVNMKPIQEMRKQYGEAFEKRHGVRLGFMSFYVKAVVEALKRYPEVNASIDGTDVVYHNYFDISIAVSTPRGLVTPVLRDADALSMADLEKRIKELAIKGRDGKLTVEELTGGNFTITNGGVFGSLMSTPIINPPQSAILGMHAIKDRPMAVNGQVEILPMMYLALSYDHRLIDGRESVGFLVTIKEMLEDPARLLLDV

SEQ ID NO: 25172 - protein, 760 aa, Oryza sativa
MASTVTTPSRPVSAGCHRRSPRRSAPVVLSLGGGPRRRTPSSTSCSALASPAKQGTAKLPPPQPTASRTAAADAERERERTDYNEVAAALESIYKLSPAVVEEKDADEEDEKSKQTKRKRKGRVGRSRNATVTVRSSRRRRRGQRMDLGKRVEMRRREEEEGGGGAGKVEDEERGFEEMLLREHAVSTDMGSLDWKRMKIPPVLTSAQSIRLFRIMQPMKAIMEMKENLENEVQSEPNDAQLAEAMNMSVLQMRRHLEVGRAARNKLIKHNLRLVLYTINKYYPDMSNDERFDDICQAGANGLITAIDRFEPKRGFRISTYALFWIRHSIVRAITLSNFTRFPFAMESERQEIHRAREELAFELGRAPTEEEVMKKVGLSPARYRDVVRMTRPTYSLHARNRVTQEELINEVTDDDAIGVDTSSHNTLLRLAIDDLLDSLKPKESVVIRQRFGLDGRGKRTLSEIAGNLNISREMITDTKYTEMIPCYRYRNGRRACTVRRWRVRRWEYINAGAYVFAALLLAVALTALSADGGGGGGASRTALAVAAVALALVAAVNAHDLAAHLAGVDCRVGLVRYDAQLGLVELLVPALHVAGCVLAVVAMAFLLSQGERETHAANTLLAAALVWLLGSILNSCQVYERADGRAQLLQSSVQVPMLLGSLLFLVGAVVNRRRRPEPPVLVGRSWAWTMCVLGSVLWLVAAVFNMGKVFVMHQSDAPRLEKLRGGAQERLSRDREGRLPLNWEEAARSRRVALPAELR

SEQ ID NO: 25173 - protein, 105 aa, Rubrivivax gelatinosus PM1
MAKIVTPAELEQLIASGKPVVADFFADWCQPCKMMAPTVDAAAEAFAGRAEVVKVNIEADDGLMPKYGLRGVPTFIVFRGGKQAAAKSGALGRSAFLDWAGAQIG

SEQ ID NO: 25174 - protein, 240 aa, Gibberella zeae PH-1
MGSTPEYIQPPQELTFDGFLFDMDGTIIDSTEAVVKHWETIGNEIGVAPEVILETSHGRRSIDILKILAPKKANWDYVRDMEGRLPKYHGHEAVEIPGARSMLEALIARSSPWAIVTSGTVPLVTGWLRARDLPTPLPEHLVTAESVENGKPDPACYRLGRERLGLQAEDAQILVLEDSPAGIRAGKAAGCKVLGLVTSHTVEQVVAAEPDWVVRDLSSVEVLRSEGGKVTIKISNALRL

SEQ ID NO: 25175 - protein, 564 aa, Oryza sativa
MARAAVSTAPLSRVHSPPPLIPRHPHSHSRVGLLHPQRKALTTAAALPPAADLPPLSLPAAAAAAAALAAAVSLSDPERRRRAQAEAAGGGDKEAVRAYFNSTGFERWRKIYGSATDGVNRVQLDIREGHARTVAATLSMLRDSPVPLAGATVCDAGCGTGSLAIPLASQGASVLASDISAAMVSEAQRQAEAAAMAASDTFRMPRFEVRDLESLEGKYDIVVCLDVLIHYPREEAKQMIRHLASLAEKRVLISFAPRTLYFDFLKRVGELFPGPSKATRAYLHSERDIEDALRDAGWRVANRGFISTQFYFAKLFEAVPIAAASQSGTKWSAKISQTNPSHFDRANGVSCRYLLLGSAAALPRPPHEIEISLMFSTARFFLPVRPRPDATISGGRKPYLVAVSARPRRGGSRRNRSWGDGGGDDKDGAADDRIDANFFGDARDEPDPEPEDAAASGRRPSSPAPEQEPAGQLRGSDVLRALERAAAAKEAKRRKRAGARPAARRQDAGERRGGELTAAGAARPIEIRREWATRIRELELRVKQLVDKHHHSPPPVEAKRRSQR

SEQ ID NO: 25176 - protein, 588 aa, Methanosarcina acetivorans C2A
MRIAILNKDKCQPRRCSKECEKYCPRVRTGDETIVFEDDGKPVISEELCVGCGICINKCPFDAIMIIGLPEALQEPTHRYGPNGFALFGLPVPRIGKVTGILGPNGIGKSTSVQILSGTLVPNFGQGKGDWDTVLEHYAGTALHDYFKDVVDGKVKVSQKPQYVDLIPKAFKGKTSELLEKTDERGFLDELIDRLDLRGVVERKISELSGGELQRVAIAACAARDAQFYFFDEISPYLDIYQRINVARLVQEISKDRAVLVVEHDLAILDMLTDVIHIAYGEPAGFGVITLPKSVRVGINQYLKGYLPEENIRIRPEAIRFEVHPPREDAQFQSMVSFNSFSKQYGDGFSLKATGGSLREGEVLGIVGPNGIGKSTFVKVLAGEIKPDEGDPGIEVKISYKPQYIKADTPVSVQDFLRGITKRFGTSYYEVEIANPLQLERIYESLLTELSGGELQRVAIAACLSQEADLYILDEPSAHLDVEQRSMVTKVINRFAENNQKTAMVVDHDIYMIDMLSQRLLVFEGKPSVYGEAHGPFSMESGMNRFLENLGITFRRDEETRRPRVNNLGSRLDREQKESGNYYYSAKD

SEQ ID NO: 25177 - protein, 199 aa, Triticum aestivum
  misc_feature (120)..(120): Xaa can be any naturally occurring amino acid
MEALYLLASLATTLLTSAVLSLLLLLRLPFARRPATGGAGAARLYEGRVRHSRRRPAGHAFEYAVRYALVDLDLLPLPGHLSAADARGIAYTSGPVRLLTVPKSVGYEQNPLSVYYCYDXQRKNKMMKMCIAEVTNTPWGEKVMFTFQPGSDLVAKPLHVSPFMDMLGNWSIRANAPGDNLYVAIAVQHPTLGNYFTAA

SEQ ID NO: 25178 - protein, 545 aa, Helicobacter pylori J99
MLTQLKTYPKLLKHYEEIKEVHMRDWFSKDKERASRYFVQLESLSLDYSKNRLNDTTLKLLFELAKDCSLKEKIEAMFKGEKINTTEKRAVLHTALRSLNDAEILLDNMEVLKSVRSVLKRMRAFSDSVRSGKRLGYTNQVITDIVNIGIGGSDLGALMVCTALKRYGHPRLKMHFVSNVDGTQILDVLEKINPASTLFIVASKTFSTQETLTNALTARKWFVERSGDEKHIAKHFVAVSTNKEAVQQFGIDEHNMFEFWDFVGGRYSLWSAIGLSIMIYLGKKNFNALLKGAYLMDEHFRNAPFESNLPVLMGLIGVWYINFFQSKSHLIAPYDQYLRHFPKFIQQLDMESNGKRISKKGEIIPYDTCPVVWGDMGINAQHAFFQLLHQGTHLIPIDFIASLDKKPNAKGHHEILFSNVLAQAQAFMKGKSYEEALGELLSKGLDKDEAKDLAHHRVFFGNRPSNILLLEKISPSNIGALVALYEHKVFVQGVIWDINSFDQWGVELGKELAVPILQELEGHKSNAYFDSSTRHLIELYKNYNQ

SEQ ID NO: 25179 - protein, 387 aa, Synechococcus elongatus PCC 7942
MGRVGVLLLNLGGPERLEDVGPFLYNLFADPEIIRLPFPWLQKPLAWLISSLRTRKSQENYKQIGGGSPLRRITEEQATALRQSLSDRGQAAQVYIGMRYWHPFTEEAIAQIKADGIDRLVILPLYPQFSISTSGSSFRLLQRLRDRDPEFQKIDCSVVPSWYERSGYLQAMAELIAQELDKLEQPEQGHVFFSAHGVPVSYVEEAGDPYQREIEDCTRKIMETLGRSNPWTLAYQSRVGPVEWLQPYTEDALEELAERGVKDLVVVPISFVSEHIETLEEIDIEYREIAEEAGIERFLRVPALNTHPLFIQDLSDLVEQTLEQPRFRLEDVTLLPKKVKLYPQERWEWGITLNAEVWNGRIAMLGFLALLVELLTGRGPLHALGLL

SEQ ID NO: 25180 - protein, 227 aa, Hordeum vulgare subsp. vulgare
MNDTDVSRQIQQMVRFIRQEAEEKAGEISVSAEEEFNIEKLQLVEAEKKKIRQEYERKEKQVDVRKKIEYSMQLNASRIKVLQAQDDLVNKMKEDAMKELLNISSNHHEYRNLLKELVVQGLLRLKEPAVLLRCRKEDHHNVESVLHSAKNEYASKADVPEPEILVDHSVYLPPSPSHDDKHGQICHGGVVLASRDGKIVFENTVDARLEVVFRKKLPEIRKLLVAA

SEQ ID NO: 25181 - protein, 405 aa, Alkalilimnicola ehrlichei MLHE-1
MRRVVVTGMGVVSCIGNDRETVTEALRAGRSGIKYKPEYEEVGLRSQVAGSVDIDLSDHIPRKSLRFMGDAAAFSYIAMEQAMRDAGLSADEISNPRVGLIAGSGGASTANVVQAAETLKNRGVRKIGPYGVTRTMGSTVSACLATPFRIKGLNYSITSACATSAHCIGSAMEQIQLGKQDLIFAGGGEEEHWSLSMLFDGMGALSTKYNETPEKASRTYDADRDGFVIAGGGGMLVIEALDHALARGAKIYAELVGYGATSDGHDMVAPSGEGAARCMRQALETVEGPVDYVNAHGTSTPVGDLAELKAMREVFGEQVPPVSATKSLTGHSLGAAGVQEAIYSLAMLEEGFIAPSINIETMDPEAEGMPIVTEPREGVELNTVMSNSFGFGGTNSTLVFRRYDG

SEQ ID NO: 25182 - protein, 108 aa, Psychrobacter arcticus 273-4
MSDLIINTTDANFDQDVLQSDVPVLVDFWATWCGPCKAIAPILEDLATEYQGKVKIVKVDVDNNPQAASRFGIRNIPTLFVFKGGEKVDSVMGLQPKAELAKVLDKHL

SEQ ID NO: 25183 - protein, 81 aa, Gaertnera longevaginalis
  misc_feature (13)..(13): Xaa can be any naturally occurring amino acid
  misc_feature (75)..(75): Xaa can be any naturally occurring amino acid
TPQDETRAGMSYXHETIWKGVPKFLRRVDTALKNIGINERVPYNAPLIQFSSWMGGDRDGTPRVPPEVTRDVCLXARMMAA

SEQ ID NO: 25184 - protein, 617 aa, Cichorium intybus
MKTAEPLSDLEDASNRTPLLDHPAPPPAAVKKQSFVRVLSSITLVSLFFVLAFVLIVLNQQDSTNATANLALPEKSSAQHYQSDRLTWERTAYHFQPAKNFIYDPNGPLFHMGWYHLFYQYNPYAPIWGNMSWGHAVSKDMINWFELPVALTPTEWYDIEGVLSGSTTALPNGQIFALYTGNANDFSQLQCKAVPLNTSDPLLLEWVKYENNPILFTPPGIGLKDYRDPSTVWTGPDGKHRMIMGTKINRTGLVLVYHTTDFTNYVMLEEPLHSVPDTDMWECVDLYPVSTINDSALDIAAYGPDMKHVIKESWEGHGMDWYSIGTYDVINDKWTPDNPELDVGIGLRVDYGRFFASKSLYDPLKKRRVTWGYVAESDSADQDLNRGWATIYNVARTIVLDRKTGTHLLHWPAEEIESLRYDGREFKEIELAPGSIMPLDIGPATQLDIVATFEVEQETFMRTSDTNGEYGCTTSAGATERGSLGPFGIAVLADGTLSELTPVYFYISKKTDGSVATHFCTDKLRSSLDYDGERVVYGSTVPVLDGEELTMRLLVDHSVVEGFAMGGRTVMTSRVYPTKAIYEGAKIFLFNNATHTSVKASLKIWQIASVRIQPYPF

SEQ ID NO: 25185 - protein, 564 aa, Vibrio parahaemolyticus RIMD 2210633
MTALITQWLARDPDPKTREELQHLVDTNNEQELSDRFGSRLAFGTAGLRGKVGAGPNRMNRLVIQETATGLGHYLLEQVQDAASRGVVIGYDGRPDSKQFAHDTASVLTALGIKVYLTYQVAATPIVAFGVRTMNAAAAVVVTASHNPPEYNGFKVYWENGAQIIPPHDSGIAAKIDEATTKPLPLMSLDDAKQQGLLVWLEDDYYQTYRKTMNENALLTPDSNTDISIAYTAMHGVGADMAETLLADAGFKKVASVAEQREPDGTFPTVNFPNPEEAGAMDMVMALGKSVDADIACANDPDADRFAVAVKRPDGEYQMLTGDQVGSLFGDYLLEQQPNSLVGNTIVSSRLLSSIAKAHGAEYYQTLTGFKWLTNVAMSQETEQHPFLFAYEEALGYTVGNKVWDKDGLSAIVAFSQLTGKLKAQGKTLWDKLEALYRQHGFYFNAQRSIALDPNSPPIGDKLRANPPSEIAGKKVSVTEDLKTSVRTFEDGSEETIDLPASDVLIYHLEDKSRVIVRPSGTEPKLKCYYEVISDFPADMSYEQAQQAAEAKMNALIDAHQKSL

SEQ ID NO: 25186 - protein, 81 aa, Gaertnera longevaginalis
TPQDEMRAGMSYFHETIWKGVPKFLRRVDTALKNIGINERLPYNAPLIQFSSWMGGDRDGBPRVTPEVTRDVCLLARMMAA

SEQ ID NO: 25187 - protein, 416 aa, Thermotoga maritima
MPEKSLYEMAVEQFNRAASLMDLESDLAEVLRRPKRVLIVEFPVRMDDGHVEVFTGYRVQHNVARGPAKGGIRYHPDVTLDEVKALAFWMTWKTAVMNLPFGGGKGGVRVDPKKLSRNELERLSRRFFSEIQVIIGPYNDIPAPDVNTNADVMAWYMDTYSMNVGHTVLGIVTGKPVELGGSKGREEATGRGVKVCAGLAMDVLGIDPKKATVAVQGFGNVGQFAALLISQELGSKVVAVSDSRGGIYNPEGFDVEELIRYKKEHGTVVTYPKGERITNEELLELDVDILVPAALEGAIHAGNAERIKAKAVVEGANGPTTPEADEILSRRGILVVPDILANAGGVTVSYFEWVQDLQSFFWDLDQVRNALEKMMKGAFNDVMKVKEKYNVDMRTAAYILAIDRVAYATKKRGIYP

SEQ ID NO: 25188 - protein, 279 aa, Triticum aestivum
MAAGAAASFGLMDKAYFVGRGEILSWVNATLQLSLNKVEEAASGAVQCQLLDMVHPGLVPMHKVNFDAKTEYDMIQNYKILQDVFNKLRIGKNIEVNKLVKGRPLDNLEFLQWLKRYCDSVNGGIMNENYNPVERRSKGCKERTHKGPNKSSKSLQANRLSSANSADGGALNSNTDLASPVGKVCNAVNEEHYMEQIQQLSEKIADLKVSVDNTEKERDFYFSKLRDIEILCQRPELEHLPMTKGIRKILYAADAKDSSLPEANEIITRSPGMFSDEAE

SEQ ID NO: 25189 - protein, 118 aa, Brassica napus
  misc_feature (40)..(41): Xaa can be any naturally occurring amino acid
  misc_feature (43)..(43): Xaa can be any naturally occurring amino acid
  misc_feature (46)..(46): Xaa can be any naturally occurring amino acid
  misc_feature (58)..(58): Xaa can be any naturally occurring amino acid
EQGYEIPEPTAPGKTYSQYLKDLAEKDPQAFICHFYNIYXXHXPGXRMIGRKVAERIXEGRELEFYKWDGELSQLLQNVREKLNKVPQEWTREEKNHCLEETDKSFKYSGEILRLILS

SEQ ID NO: 25190 - protein, 308 aa, Salmonella sp.
INGFGRIGRIVFRAAQKRSDIEIVAINDLLDAEYMAYMLKYDSTHGRFDGTVEVKDGHLIVNGKKIRVTAERDPANLKWNEVGVDVVAEATGIFLTDETARKHITAGAKKVVLTGPSKDNTPMFVKGANFDKYAGQDIVSNASCTTNCLAPLAKVINDNFGIIEGLMTTVHATTATQKTVDGPSHKDWRGGRGASQNIIPSSTGAAKAVGKVLPELNGKLTGMAFRVPTPNVSVVDLTVRLEKAATYEQIKAAVKAAAEGEMKGVLGYTEDDVVSTDFNGEVCTSVFDAKAGIALNDNFVKLVSWYDN

SEQ ID NO: 25191 - protein, 93 aa, Methanosarcina acetivorans C2A
MAGDFMKPMLLDFSATWCGPCRMQKPILEELEKKYGDKVEFKVVDVDENQELASKYGIHAVPTLIIQKDGTEVKRFMGVTQGSILAAELDKLL

SEQ ID NO: 25192 - protein, 309 aa, Listeria innocua
MKRKIIVGSRRSKLALTQSNWVIKKLKENYPEIDFEIKEIVTKGDRILDVTLSKVGGKGLFVSEVEQALSDEVIDFAVHSMKDVPSSLKDGLVIGAIPKRESPLDCFVFNEVSTLDDLPKGAVIGTSSLRRAAQLLKHRPDFVVKPIRGNIDTRLQKLHAENFDAIILAKAGLARMGWLENTSLKLEDISPELCLPAVGQGALAIECRETDLQICDMLASIHHEETGICVEAERVFLKKLNGGCEIPIAGFATKTGDSVHFKGLVGNADGSIILESERTGASPAEIGNQVAEELLSEGADTIIKELRNI

SEQ ID NO: 25193 - protein, 308 aa, Salmonella bongori
INGFGRIGRIVFRAAQKRSDIEIVAINDLLDAEYMAYMLKYDSTHGRFDGTVEVKDGHLIVNGKKIRVTAERDPANLKWDEVGVDVVAEATGLFLTDETARKHITAGAKKVVMTGPSKDNTPMFVKGANFDTYAGQDIVSNASCTTNCLAPLAKVINDNFGIVEGLMTTVHATTATQKTVDGPSHKDWRGGRGAAQNIIPSSTGAAKAVGKVLPELNGKLTGMAFRVPTPNVSVVDLTVRLEKAASYEEIKKAMKAASEGAMKGVLGYTEDDVVSTDFNGEVCTSVFDAKAGIALNDNFVKLVSWYDN

SEQ ID NO: 25194 - protein, 293 aa, Ralstonia solanacearum
MSILINKDTKVITQGITGKTGQFHTRGCRDYANGKNAFVAGVNPKKAGEDFEGIPIYASVKEAKDQTGATVSVIYVPPAGAAAAIWEAVDADLDLVVCITEGIPVRDMMEVKDKMRKQNKTTLLLGPNCPGLITPDEIKIGIMPGHIHRKGRIGVVSRSGTLTYEAVGQLTALGLGQSSAVGIGGDPINGLKHIDVMKMFNDDPDTDAVVMIGEIGGPDEANAARWIKDNMKKPVVGFIAGVTAPPGKRMGHAGALISGGADTAQAKLDIMEECGIKATKNPSEMGRLLKALL

SEQ ID NO: 25195 - protein, 320 aa, Salmonella enterica subsp. enterica serovar Typhi str. CT18
MRQTKTGILLANLGTPDAPTPEAVKRYLKQFLSDRRVVDTPRLLWWPLLRGVILPLRSPRVAKLYQSIWMDGGSPLMVYSREQQQALAARLPDTPVALGMSYGSPSLESAVDELLASDVDHIVVLPLYPQYSCSTVGAVWDELGRILARKRRIPGISFIRDYADDGAYIDALAKSARESFARHGEPDLLLLSYHGIPQRYADEGDDYPQRCRDTTRELVSALGLPPEKVMMTFQSRFGREPWLTPYTDETLKMLGEKGTGHIQVMCPGFAADCLETLEEIAEQNREIFLEAGGKKYAYIQALNATPEHIDMILKLTAPYR

SEQ ID NO: 25196 - protein, 229 aa, Platanus x acerifolia
TGPLEGCKLIRKENSSYGFVDYFDRRSAALAILTLNGRHLFGQAIKVNWAYASGQREDTSGHFNIFVGDLSPEVTDATLFACLSVYPSCSDARVMWDQKTGRSRGFGFVSFRNQQDAQSAINDLTGKWLGSRQIRCNWAAKGAGANDDKQNTDAKSVVELTSGTSEDGQETINDDAPENNPQYTTVYVGNLAPEVTQLDLHRHFHALGAGVIEEVRVQRDKGFGFVRYS

SEQ ID NO: 25197 - protein, 136 aa, Arabidopsis thaliana
  misc_feature (45)..(45): Xaa can be any naturally occurring amino acid
  misc_feature (55)..(55): Xaa can be any naturally occurring amino acid
  misc_feature (76)..(76): Xaa can be any naturally occurring amino acid
KSYAAFPVTRKTNKDITCIASYGGRVICMKVWPPIGKKKIETLSXYLPDLIDLEXTKEVDYLLRNKQISCVEFHTXHGSVYREHGNTLGYYDGRCWTMWKLPLFGCTDSAQVLKEAEECKKEYPGAFIMIIGFDNT

SEQ ID NO: 25198 - protein, 168 aa, Brassica napus
MKFNVANPTTGCQKKLEIDDDQKLRAFYDKRLSQEVSGDALGEEFKGYIFKIMGGCDKQGFPMKQGVLTPGRVRLLLHRGTPCFRGHGRRTGERRRKSVRGCIVSQDLSVLNLVIVKKGEKDLPGLTDTEKPRMRGPKRASKIRKLFNLTKEDDVRKYVNTYRRRSQT

SEQ ID NO: 25199 - protein, 477 aa, Bacillus licheniformis ATCC 14580
MKGKRSNAWLYFFGALGGVLYGYDTGVISGAILFMKDELGLNAFTEGLVVSAILIGAIFGSGLSGRLTDRFGRRRAIMSAAVLYCIGGLGTALAPSTEYMVAFRIVLGLAVGCSTTIVPLYLSELAPKESRGALSSLNQLMITIGILLSYLINYAFSDAGAWRWMLGLALIPSIGLLIGIFFMPESPRWLLTKGKEEKARRVLSKMRGGERVDQEVKEIKEAEKQDQGGLKELLEPWVRPALIAGVGLAFLQQFIGTNTIIYYAPKTFTNVGFEDSAAILGTVGIGTVNVLMTLVAIRFIDRIGRKPLLLFGNAGMVISLIVLSFSNLFFGNTSGAAWTTVICLGVFIVVFAVSWGPIVWVMLPELFPLHVRGIGTGVSTLMLHAGNLIVTLSFPVLMEAMGISYLFLCYAAIGIAAFLFVFFKVTETKGKVWKRSSRICGTSTAESRQLTHSRLNDRQKDGQGPILFCVKRPADHG

SEQ ID NO: 25200 - protein, 509 aa, delta proteobacterium MLMS-1
MSNDDIMHFSQLPLAPAVSQAVAEIGYETPTPIQAAAIGPLLAGRDLLGQAQTGTGKTAAFALPLLSRLDTSRKYPQLLVLAPTRELALQVADEIQAYSRHLPGFQVLPLYGGQNMAQQLRALQRGVQAVVGTPGRIQDHLRRGTLKLDRLTAVVIDEADEMLKMGFVDEVEKILAQTPPQRQVALFSATMTQEIMRIARRHLKDPEEIRLKTRTTTVETISQHYWLVQGLQKLDALTRILEAEAVEAMLIFVRTKVATVELAEKLAARGFASAALNGDMTQGLREKTVEQLKDGTLDIVVATDVAARGLDVQRISHVVNYDIPYDTESYVHRIGRTGRAGRQGQAIIFVAPREMRMLHAIEKATRQQIARLQLPSRREVNQRRIDQFKEKIIAASRQPGLEFFEELIAQATAEAEIDSQQLAAGLAYLLQQARPLLPEEGGPPPAEEQQQRPRPQGPRKPAPTGRLRGQYPGRRESPSRKGKAQGKAQGKRTPQGRTGGGPTTHRKKP

SEQ ID NO: 25201 - protein, 487 aa, Porphyra yezoensis
MPTLPPPLFLPLPQLAFRLSTPPTAIMSGLSAKLQPVFDSIKARNPNEPEFLQAAEEILHSLGPVVEAEGGDKFIPVTKALFEPERVIQFRVAWYDDAGELQVNRGFRVQMNSAIGPYKGGLRLHPTVNLSILKFLATEQVLKNAVTTLPLGGGKGGSDFNPKGRSEAEVRRFCQSFMGALARHIGPDTDVPAGDIGVSGREIGYLFGAYKRVTNRFEGILTGKGPTFGGSLIRPESTGYGVVMFVREMLKVKGDTLEGKVVVISGSGNVAQYATQKVNALGGKVIALSDSKGVLVDEEGITDKKLAEVMDIKNVRRTSLKAFTEKFSTAKWTDFSEQYTDEDEKSNPLWEIKCDVALPCATQNELNADGARALVDNGVSIVAEGANMPSTPGAIEVLRSAKVAFAPGKASNAGGVATSGLEMSQNSQRMAWSAEKVEEELDGIMTRIHADCVETAKAYDRAGDYVFGANVTGFLKVAEAMLAQGLA

SEQ ID NO: 25202 - protein, 395 aa, Phytophthora infestans
MKTLMEPERLIQFRVPWIDDEGSSRVNRGFRVQFSSALGPYMGGLRFHPETTHGTAKFLGFETIFRNALAGPYGGAHGGSDFNPMDKSESEIMRFCQSYMTELVNYIGPHTDVPTAGVGVGPQEIGYMFGQYKRMRQLHPGGTEGILSGGAYHYPQVTGYGVAHFANRILETRGETLKGKRCLISGSGTVALNVARKLLDFGAIPIGMSDNFGYVIEDQGFSSKSLEELKRIKEERNARLGAYIMSSTTANYHPSEEGRLWETPCDYAFPCAIQNDVDADAVRLLVKNGCKGIFEGANFPCTDEAISLIKQHGLAFGPNKASNGGSFALITKNLGSSTQMLDDEVDVIVKEYMDKLHDRVAASAEEFNAGGDLHVGANITAFMSVAAAMFRQGVV

SEQ ID NO: 25203 - protein, 494 aa, Staphylococcus aureus subsp. aureus MRSA252
MTEWTREERYQRIEDVDTDYFKTLKQQVDQSKFRQQFHIQPETGLLNDPNGLIFYKGKYYVSHQWFPLGAVHGLKYWYNYTSDDLINFKAEGPILNPDTKYDSHGVYSGSAFEYNGHLYYMYTGNHRDNHWQRHASQMIARLKEDGSVEKFPKPVISQQPEGYTSHFRDPKVFKYGEKYYAIIGAQNNDQQGRLLLYNTEDIINWHYLGEINTELDDFGYMWECPDYFNVDNQDVILICPQGIEPKCDQFNNIYQSGYILGKFDIEKLTYEHENFVELDNGFDFYAPQTFLDEKGRRVLIGWMGLPEIEYPTDNEGWAHCLTIPRVLNVENGQLKQRPYPALEKLRHNKETALGYANKFTRKLHPYEGKQYELIIDILDNDATEVYFELRTSKTSSTLIAYNKRENKITLDRSDSGLLPTNVEGTTRSTILETPLKQLQIFVDTSSIEIFCNDGERVLTSRIFPTEDALGIKTSTESGQVYLQFTKYDLKDEHK

SEQ ID NO: 25204 - protein, 246 aa, Oryza sativa
MDSEHWISSLAAAKRFYAAQLGHVDDMAGIGMEEVEMEMEDDGEGMELELEMQLEEATWPDVACPYCYEDHDIASLCAHLEEDHPYEPHTSPCPICFEKITRDMLNHITMQHGYLFKSGRRMRRFDIPESQALSLLSRDLRDAQLQALLGGGHRQRRSNTTATNISADPLLSSFGLGFSTLDSEERSKAPVPIRDDTSIHKDTPAQPWESRIDSSLTSEEREQKRKQATDRATFVQGLVLSTLFED

SEQ ID NO: 25205 - protein, 607 aa, Gibberella zeae PH-1
MPDKLTRIAIVNSDKCRPRKCRQECKKSCPVVRSGKLCIEVQPESKLAFISESLCIGCGICPKRCPFDAINIINLPTNLENQVTHRYGPNSFKLHRLPMPRPGQVLGLVGTNGIGKSTALKILSGKLKPNLGRHDNPPDWEEVIKHFRGSELQNYFTKLLEDDLKAVVKPQYVDQIPRAVRGPNKSVRYLIESRATLGNMEEMANVLELNHIMDRDINLLSGGELQRFAIGTVAVQQADVYMFDEPSSYLDVKQRLSAALVIRSLLRDNDYVIVVEHDLSVLDYLSDYICVLYGRPAVYGVVTLPYSVREGINIFLDGHIPTENLRFRDESLTFRIAETTDEFQIDKSRAFTYPKMEKTLGNFKLNIDAGDFTDSEIIVMMGENGTGKTTFCRLMAGALKPDSNKSVPEMRISMKPQTITPKFDGTVRQLFFKKIKQSFLSPQFQTDVVKPLKLDDFIDQEVKNLSGGELQRVAIVLALGIPADIYLIDEPSAYLDSEQRIIASRVIKRFIMHSKKTAFIVEHDFIMATYLADRVIVFDGQPGIDAHANKPESLLTGCNTFLKNLNVTFRRDPTNYRPRINKNGSQLDQEQKMSGNYFFLEENPESS

SEQ ID NO: 25206 - protein, 326 aa, Synechococcus elongatus PCC 7942
MAETFMFNALRAAIDEEMARDPNVFVLGEDVGHYGGSYKVTKDLYQKYGDFRLLDTPIAENGFTGMAVGAAMTGLRPIVEGMNMGFLLLAFNQIANNAMLRYTSGGNFTIPIVFRGPGGVGRQLGAEHSQRLEAYFHAVPGLKIVACSTPYNAKGLLKAAIRDNNPVLFFEHVLLYNLKEDLPDEEYICPLDKAEIVRPGKDVTVLTYSRMRYHCLQAVKTLEKEGFDPEVIDLISLKPFDFEAIEASVRKTHRVVIVEECMKTGGIAAELSAAIMERCFDELDAPVVRLSSQDIPTPYNGKLENLTIVQPEQIVAAVKDLLTAKV

SEQ ID NO: 25207 - protein, 458 aa, Nostoc punctiforme PCC 73102
MVMTNPTVENLVIIGSGPAGYTAAIYAGRANLKPVVFEGFQAGGLPGGQLMTTTEVENFPGFPQGITGPELMDQMKAQAERWGAELYTEDVISVDLSQRPFTVRSQEREIKTNSIVIATGATAKRLGLPNEHEFWSRGISACAICDGATPIFHGAELAVIGAGDSAAEESIYLTKYGSKVNMLVRTDKMRASKAMQDRVLSNPKIQVHWNTEAVDIYGNGHMEGVKVRNTKTGEESKLHAKGLFYAVGHTPNTSLFKGQLELDEVGYVVTKPGSVETSLEGVFAAGDVQDHEFRQAITAAGTGCMAAMLAERWLSASGLIQEFHQQPEIADNELEHQPAKKTEAEEEAGFNLDETRHQGGYALRKLFHESDRLLLVKYVSPGCGPCHTLKPILNKVVDEFDSKIHFVEIDIDKDRDIAENAGVTGTPTVQLFKNKELVKEVKGVKQKTEYRQLIESNL

SEQ ID NO: 25208 - protein, 374 aa, Nostoc sp. PCC 7120
MTPTAQTTASARRVVFPFTAIVGQEEMKLALLLNVIDPKIGGVMIMGDRGTGKSTTIRALADLLPEIPVVANDPFNSDPSDPDLMSDEVRQKSGTGAEIPIEFKKVQMVDLPLGATEDRVCGTIDIEKALSEGVKAFEPGLLAKANRGILYVDEVNLLDDHLVDVLLDSAASGWNTVEREGISIRHPARFVLVGSGNPEEGELRPQLLDRFGMHAEIHTVKEPALRVQIVEQRSEFDQNPPTFLEKYNPEQTALQKKIVEAQKLLPEVKLDYDLRVKISEVCSELDVDGLRGDIVTNRAAKALTAYEGRTEVTVDDIRRVITLCLRHRLRKDPLESIDSGYKVEKVFARIFGVELLEDDSSQKNGAGQIKTGVR

SEQ ID NO: 25209 - protein, 344 aa, Haloarcula marismortui ATCC 43049
MGTHVIEAGFPVNSDAEFEAVRDIAESTQVTTCGLARVVEKDIEAALDSGVDMVHTFVSTSDVQLQDSMHATRQEALDTAVDCVEMIKDAGVECMFSPMDATRTDEDFLVEVIEATSAAGADWINIPDTCGVATPRRFYDLIEIVDDCTDAYIDVHTHDDFGLASANAISGFEAGASQAQVSVNGIGERAGNAAYEEVVMALESLYDVDTGIDTTRITELSRIVEEKSDIGVPANKPVVGRNAFSHESGIHAAGVIENSDTFEPGVMTPEMVGATRELVLGKHTGAHSVRERLVDAGYDPSEAEVREVTRRVKEYGAEEQVTMSVLERFAEEIGVTEESEEVRA

SEQ ID NO: 25210 - protein, 585 aa, Haloarcula marismortui ATCC 43049
MSERASVPKEEEETEPETEQEPVTTGAQSVIRALENAETDYVFGVQGGAIMPVYDALYDSDINHVTMAHEQGASHAADAYGVVTGDPGVCFATSGPGATNLVTGIADANMDSDPVIALTGQVPTEFVGNDAFQETDTVGITQPITKESYFAADSDTVGDDVSEAFALADAGRQGPTLVDLPKDVTQGETEVEPGSPETPETYEVPEEADDENVQEAAEALAEADRPVILSGGGVIKADASSALREFAKEYEIPVITTMPGIGSFPEDHELSLEWAGMHGTGYANMAISNTDCMLAIGTRFDDRLTGGVDSFAPDAEVIHVDIDPAEISKNVYADYPLIGDARNVLRQLFDAMPRAPDADEWRDQCQTWKDEYPMDYDTPDDEPLKPQYVVEQFSEMTPDDTIVCTGVGQHQMWASQFWEYTEPRTWVSSHGLGTMGYGVPAAIGAKLAAPDQEVVCFDGDGSFLMTVQGLSVAVREQLDITYVVLNNEAVGMVRQWQDGFYEGRRMASEYPWIPQFDKLAEAFGARGFTLESYDNVEETIQEARDYDGPSVIDAHIDPGENVFPMVPSGGDNGQFALNEDHLDMI

SEQ ID NO: 25211 - protein, 162 aa, Vibrio cholerae O1 biovar eltor str. N16961
MMRDITPDLCDKYESQVTLLNLPLQNFGQRSAFWGEIVTVRCYHDNSKVRDVLSQNGKGKVLVVDGHGSCHKALMGDQLAILAIKNDWEGVIIYGAVRDVVAMSEMDLGIKALGTSPFKTEKRGAGQVNVTLTMQNQIVEPGDYLYADWNGILMSETALDVA

SEQ ID NO: 25212 - protein, 311 aa, Shewanella sp. MR-4
MFFEGAEKKLEIRLTPKLASLRLREYGFWSTLVACANAEILSTSSNHACDAYLLSESSLFVWDYKILILTCGNSTLIEAACYFINALGAEHIAALCYQRKNEYQAQLQSTSFADDIAKLRLLIPGEAFRMGHLDSHHHYVFCAENQSVSSSETSLELMMYHIRGELAEYLKLPTQTEHGIYLQLGLQQLFGDFQLDMHCFQPAGFSLNAIRGADYFTLHITPSMGQGDNSYVSFETNLDLAVYPHPVVARLLDLFSPISWDLINFNQPINTAGFPAHICLGQGLVTTGSGSQISFRHYQQLEPQILQPEFI

SEQ ID NO: 25213 - protein, 357 aa, Cryptococcus neoformans var. neoformans B-3501A
MPTVLLTGITGFLSAHVAHTFLKHDWIVHGTLRSSSKVALVEVIPEYSPYISSGKLKLFVVGPLENADYTEAMKGVDAVVHTASPVEFGGENFRESHLKPALEGTRGVLRAVAKEKNVKSVVYTSTFGAVGDHRYHPTEIKGKVVTEDNWNPYTLEELDKMVESGESGNPTFPPGYLFYKGAKKYAELAAWECQKEAREQGAEWSLVTMNCVMIWGPPIQPLTSLSHGGMSTEFLWMLAGGKDAHIMDSLYPYYVDVRDAAEAHYQATVRRAQGRFIISAGPYDFQEFADMLRELYPEQKERFALGAPGKYMYRDPGVYVLTNEKSQRELGITYRPKQETLKDAFDRFFALEKQGLK

SEQ ID NO: 25214 - protein, 490 aa, Medicago truncatula
MASFTCSASDLNTLLGSGANSTAAAEYICNGFNAVANKFIDTTYAVDNTYLLFSSYLVFAMQLGFAMLCAGSVRAKNTMNIMLTNVLDAATGGIFFYIFGFAFAFGTPSNGFIGKHFFGLSDFPSQSFDYGYFLYQWAFAIASAGITSGSIAERTQFVSYLIYSSFLTGLVYPIVAHWFWSADGWGSPVRSENLLFGSGVIDFAGCGVVHLVGAVAGFWGALIEGPRIGRFDHEGKGVSMRGHSGTLVVMGTFLLWFGWYGFNPGSFLNILKIYGESGNYYGQWSAIGRTAVTTTLAGCTAALTTLFGKRLQTGHWNVTDVCNGLLGGFAAITAGCSVVDPWAAIICGFIAAWVLIGCNMLAEKFQYDDPLEAAQLHGGCGTWGIIFTALFAKKQYVKEVYGGSPDRPYGLLLGGGGRLLAAHLVQILAIVVWVSVTMGTLFFILHKLNLLRSSHEEEMSGLDLTSHGGLAYEYHEELEERRPKKRGIEI

SEQ ID NO: 25215 - protein, 168 aa, Avena agadiriana
VMASSATTVAPFQGLKSTAGLPVSRRSSGSLGSVSNGGRIRCMQVWPIEGIKKFETLSYLPPLSEEALLKQIEFLIRSKWVPCLEFSKVGFIFREHGSTPGYYDGRYWTMWKLPMFGCTDASQVIKEVEEVKKEYPDAYVRIIGLDNIRQVQCVSFIAFKPPGCEESG

SEQ ID NO: 25216 - protein, 110 aa, Magnetococcus sp. MC-1
MSEHVTSTTDSQFETDVLQAETPVLVDFWAEWCGPCKQVAPFLDQLAQDKVGSLKVVKLNIDENPNVPGRFGVRGIPTLMIFKGGQIQASKIGAMPKSKLYEWVDEALAG

SEQ ID NO: 25217 - protein, 308 aa, Salmonella sp.
INGFGRIGRIVFRAAQKRSDIEIVAINDLLDAEYMAYMLKYDSTHGRFDGTVEVKDGHLIVNGKKIRVTAERDPANLKWNEVGVDVVAEATGIFLTDETARKHITAGAKKVVLTGPSKDNTPMFVKGANFDKYEGQDIVSNASCTTNCLAPLAKVINDNFGIIEGLMTTVHATTATQKTVDGPSHKDWRGGRGASQNIIPSSTGAAKAVGKVLPELNGKLTGMAFRVPTPNVSVVDLTVRLEKAATYEQIKAAVKAAAEGEMKGVLGYTEDDVVSTDFNGEVCTSVFDAKAGIALNDNFVKLVSWYDN

SEQ ID NO: 25218 - protein, 314 aa, Synechococcus sp. RS9917
MAAGQSGQLLSAWLADRYRHSSAATWRQRLQSGELGLNGRLLQGDVVVAAGDRIRWQRPPWVEPAIPEHWQTLHDDGDVLVINKPSGLPVMPAGGFLVHTLSHQLVLWSREQGEPLAPKPVHRLGRFTSGLLVCARRPESRAWLSRLLRDSTADGAASACRKVYRALTEPLPPDWPLGESREVTVAIGRHPHPLLGEIWCAADPSVATALPSRSSFTLLERRPESCLVEVVIASGRPHQIRIHAATAGAPLLGDPLYLPGGGASDQSLPGEGGYHLHAHRLQLASPDGGLLDLEAPLPEPLRDQARLNSIRREK

SEQ ID NO: 25219 - protein, 562 aa, Vibrio angustum S14
MNNDKRPLYIPYAGPALLETPLLNKGSAFSVEERMFFNLEGLLPEAIESIEEQTERAYQQYRKFENDMDKHIYLRNIQDTNETLFYRLVENHITEMMPIIYTPTVGSACEDFSNIYRRGRGLFISYPNRDRIEDMLNNASRQNVKVIVVTDGERILGLGDQGIGGMGIPIGKLSLYTACGGISPAYTLPVVLDVGTNNPQRLSDPMYMGWRHTRISGKEYDAFLEEFIQAVKQRWPEALIQFEDFAQKNAMPLLERYKNKVCCFNDDIQGTAAVTVGSLLAACKAAGTKLSEQRVTFLGAGSAGCGIAEAIIAQMVSEGISDAQARSQVFMVDRWGLLIDKMPNLLNFQQALVQKKEQLVDWDVTENNISLLDVMRNAKPTILIGVSGVPGLFSEEVIREMYAHCERPIIFPLSNPTSRVEATPFDIIRWTDGNALVATGSPFEPVIYEGKTYPIAQCNNSYIFPGIGLGVLAVNARRVTDEMLMESSRALAECSPLAIHGDGALLPPLEDIQKVSRKIAFAVAKKAVEQHKAPKNSDERIREKIDANFWKSEYRRYKRTSF

SEQ ID NO: 25220 - protein, 115 aa, Glycine max
MARGAAIPLVLVAMVATMLLVATDAAISCGQVTSALSPCISYARGNGANPTAACCSGVRSLAGAARSTADKQAACKCIKSAAGGLNAGKAAGIPSKCGVSVPYAISANVDCSKIR

SEQ ID NO: 25221 - protein, 168 aa, Avena strigosa
VMASSATSVAPFQGLKSTAGLPVSRRSNAGLGSVSNGGRIRCMQVWPIEGIKKFETLSYLPPLSEEALLKQIDFLIRSKWVPCLEFSKVGFIFREHGSTPGYYDGRYWTMWKLPMFGCTDASQVIKEVEDVKKKYPDAYVRIIGFVNIRQVQCVSFIAFKPPGCEESG

SEQ ID NO: 25222 - protein, 327 aa, Haloarcula marismortui ATCC 43049
MTHEIAVIPGDGIGQEVTPAAVEVLEAIDGVDFDFVEGEAGDAVKEETGDALPEETRELAADADATLFGAAGETAADVILPLRQVVGSFANVRPARSYPGLDAVQPDTDIVFIRENTEGVYKGIESEISEGVTTCTRVITEDASEKIAEYGFSYAKQNSYDDVTIAHKANVMRTTDGLFLDAASAVGEDRDASYDTALMDALAMHLVMNPQDYGVVICPNLAGDMLSDLAAGLVGGLGLLPSANIGEENALFEPVHGSAPDIAGEGIANPSAMILSAAMLLDHLGYDEQGDAVRTAVESVLDSGPRTPDLGGDASTEDVTAAVIDEL

SEQ ID NO: 25223 - protein, 308 aa, Salmonella typhimurium
INGFGRIGRIVFRAAQKRSDIEIVAINDLLDAEYMAYMLKYDSTHGRFDGTVEVKDGHLIVNGKKIRVTAERDPANLKWDEVGVDVVAEATGIFLTDETARKHITTGAKKVVLTGPSKDNTPMFVKGANFDKYEGQDIVSNASCTTNCLAPLAKVINDNFGIIEGLMTTVHATTATQKTVDGPSHKDWRGGRGASQNIIPSSTGAAKAVGKVLPELNGKLTGMAFRVPTPNVSVVDLTVRLEKAATYEQIKAAVKAAAEGEMKGVLGYTEDDVVSTDFNGEVCTSVFDAKAGIALNDNFVKLVSWYDN

SEQ ID NO: 25224 - protein, 168 aa, Avena clauda
VMASSATTVAPFQGLKSTAGLPVSRRSSASLGSVSNGGRIRCMQVWPIEGIKKFETLSYLPPLSEEALLKQIDFLIRSKWVPCLEFSKVGFIFREHGSTPGYYDGRYWTMWKLPMFGCTDASQVIKEVEEVKKEYPDAYVRIIGFDNIRQVQCVSFIAFKPPGCEESG

SEQ ID NO: 25225 - protein, 504 aa, Solanum tuberosum
MSSRGGGIAESPYLRNYRVGKTLGHGSFGKVKIAEHLLTGHKVAIKILNRRKMKTPDMEEKLRREIKICRLFVHPHVIRLYEVIETPTDIYVVMEYVKSGELFDYIVEKGRLQEDEARKIFQQIIAGVEYCHKNMVVHRDLKPENLLLDARRNVKIADFGLGNIMRDGHFLKTSCGSPNYAAPEVVSGKLYAGPEVDVWSCGVILYALLCGTLPFDDENIPNLFKKIKSGVYTLPSHLSPLARDLIPRMLIVDPMKRISVPDIRQHQWFKIHLPRYLAVPPPDARQHLKKLDEEILQQVSRMGLDRDQLLDSLQKRIQDDATVAYYLLYDNRSMASSGYLGAEFQESVDCYSPGLFPNLDLQLSTGNGVSEESLRRPFRKEKMWLVGLQSPANPKEIMNQVLGTLLELNVRWKKIGHYNMKCLWCHDLHLHSMANNHMNDDDHFISNATAISTHLQPQPTVKFEMQLYKTEDEKYLLDLQRISGPQFLFLDFCAGFIRQLEGPQ

SEQ ID NO: 25226 - protein, 116 aa, Haloarcula marismortui ATCC 43049
MSPRARREPNLEGLMWPLGGQQTTMASKSGKTGSSGRFGARYGRVSRRRVAEIESEMNEDHACPNCGEDRVDRQGTGIWQCSYCDYKFTGGSYKPETPGGKTVRRSIRAALSEDEE

SEQ ID NO: 25227 - protein, 298 aa, Triticum aestivum
  misc_feature (130)..(130): Xaa can be any naturally occurring amino acid
  misc_feature (150)..(150): Xaa can be any naturally occurring amino acid
MKSLGLKIAASLKKNSGFPADGCLENDDTLSLKSTSVRAQDHPTTNSVIPVDSVVAAEIISTDLSCVVDTLSNEEDDAELDLDSPTEGFSSISEAIEDIRQGKLVIVVDDESRENEGDLILAASLVTPEXAMAFIVRHSTGIVCVSMKEXDLERLNLPLMVSTKENEEKLCTAFTITVDAKEGTTTGVSAKDRAKTVMTLASPYSKPEDFNRPGHIFPLKYRDGGVLKRAGHTEASVDLAVLAGLPPVGVLCEIVDEDGSMARLPKLRVFAEKNNLKIVSIADLIRYRRKRDRLIERA

SEQ ID NO: 25228 - protein, 139 aa, Erwinia carotovora subsp. atroseptica SCRI1043
MNTVCGSCQTTNRLPEERVDDHAKCGRCGETLFSGDVINATEATLDKLLQDDLPIVIDFWAPWCGPCVNFAPVFENVAQERSGKIRFIKVNTEAEPALSARFRIRSIPTLMIFKQGQMVDILNGALPKAQFESWLDESL

SEQ ID NO: 25229 - protein, 315 aa, Mycobacterium avium subsp. paratuberculosis K-10
MVKPNLTLEIPDLRGKFAVVTGANSGLGFGLAKRLAAAGAEVVLAVRDPAKGDQAVAAIRREVPQAKLTIRQLDLSSLRSVAALGEQLTAEGRPIDILINNAGVMAPPRRQQTSDGFELQFGTNHLGHFALTGRLLALLRAADSARVVTVSSIAATQRKLDFADVNAEHGYQPMYSYGVAKLAQLMFAVELDRRSRLGGWGLMSNAAHPGLAKTNLLSGASYGRSAPTLQARLTRLTWRLLPFMWLDIDEAVKPTLYAAVSPDAQGARYYGPRGFYETARGGVTFARVPPLARSEPEMARLWRLSEQLSGVDYPG

SEQ ID NO: 25230 - protein, 348 aa, Solanum tuberosum
ADFGLGNIMRDGHFLKTSCGSPNYAAPEVVSGKLYAGPEVDVWSCGVILYALLCGTLPFDDENIPNLFKKIKSGVYTLPSHLSPLARDLIPRMLIVDPMKRISVPDIRQHQWFKIHLPRYLAVPPPVARQHLKKLDEEILQQVSRMGLDRDQLLDSLQKRIQDDATVAYYLLYDNRSMASSGYLGDEFQESVDCYSPGLFPNLDLQLSTGNGVSEESLRRPFRKEKMWLVGLQSPANPKEIMNQVLGTLLELNVRWKKIGHYNMKCLWCHDLHLHSMANNHMNDDDHFISNATAISTHLQPQPTVKFEMQLYKTEDEKYLLDLQRISGPQFLFLDFCAGFIRQLEGPQ

SEQ ID NO: 25231 - protein, 115 aa, Glycine max
MKSSGALATLVLLILLLATTSEAAISCSDVIKDLRPCVSYLVSGSGQPPAACCSGAKALASAATTSEDKKAACNCIKSTSKSININSQLAQALPGNCGITLPVAISPNADCSKVG

SEQ ID NO: 25232 - protein, 465 aa, Cyanidioschyzon merolae strain 10D
MNQQLNLDRWLNREYAYGFSTSFDYEPFPIGLNEQIVKMISAKKCEPQFMLDFRLKAYHIWKQMPRPQWARVAYETINFEQILYYAAPSTTEDDVQSTLAKLGVKPSSKVALDPVFDSVSLGTGFHQALKDAGVIFCSISEAIQKYPSLVKKYLASVVPIGDNFFSALNSAVFSDGSFCYIPQDTACPMELSTYFRLQKEGSGQFERTLIIAEKGASVSYLEGCTAARYDRHQLHAAVVELIALDHASIKYSTVQNWYSGDQEGKGGIYNFVTKRGLCAGEGAKISWTQVETGSAITWKYPSCILAANNTRADFYSVALTDGYQQADTGSKMIHLGANSKSRIISKGICGGKSMNTYRGQVKMTSAAQKAWNHSQCDSLILGKKATANTYPYIEIANVSARVEHEATTTQIGEEQLFYLQQRGINVQDAVNQMVLGFCQQVFLQLPMEFATEVNELLTIKLEGNC

SEQ ID NO: 25233 - protein, 578 aa, Streptococcus pneumoniae TIGR4
MSLQKLENYSNKSVVQEEVLILTELLEDITKNMLAPETFEKIIQLKELSTQEDYQGLNRLVTSLSNDEMVYISRYFSILPLLINISEDVDLAYEINHQNNIDQDYLGKLSTTIKLVAEKENAVEILEHLNVVPVLTAHPTQVQRKSMLDLTNHIHSLLRKYRDVKLGLINKDKWYNDLRRYIEIIMQTDMIREKKLKVTNEITNAMEYYNSSFLKAVPHLTTEYKRLAQAHGLNLKQAKPITMGMWIGGDRDGNPFVTAKTLKQSALTQCEVIMNYYDKKIYQLYREFSLSTSIVNVSKQVREMARQSKDNSIYREKELYRRALFDIQSKIQATKTYLIEDEEVGTRYETANDFYKDLIAIRDSLLENKGESLISGDFVELLQAVEIFGFYLASIDMRQDSSVYEACVAELLKSAGIHSRYSELSEEEKCDLLLKELEEDPRILSATHAEKSELLAKELAIFKTARVLKDKLGDDVIRQTIISHATSLSDMLELAILLKEVGLVDTERARVQIVPLFETIEDLDHSEETMRKYLSLSLAKKWIDSRNNYQEIMLGYSDSNKDGGYLSSCWTSTRLNNN

SEQ ID NO: 25234 - protein, 229 aa, Triticum aestivum
RTRGLRAAFPAMDPQLLERALEASGDDLDDAIKSLKELHLMESNQANLPATGSAFENGPTAVQPSVEGIVTSGGVDTATEHQPAADGQQPSNSGPEWVDLFVREMSNASDMDDARARASRALEALTKSILEGAGAEAAQSLHQENMMLKEQMTAVLSQNAVLKRAVAIQHERQKEFDERSHEVQGLKQLVLQYQEQLRTLEINNYALQMHLKQAQQSSSMPGRYNPDVF

SEQ ID NO: 25235 - protein, 331 aa, Streptomyces coelicolor A3(2)
MTTNPDGGRHARNDSALLTTPFDSHARAQEVIDGVDLTGRRAVVTGGASGLGAKTVRALAAAGAEVTIATRHPQSAEPLVQEAAAAGAGRVHAEALDLSDVASVDSFARAWRGPLDILVANAGIMALPTRTLTPYGWEMQLATNYLGHFALATGLHAALRDAGSARIVVVSSGAHLGTPFEFEDPHFARRPYDPWAAYGQSKTADVLFTVGARRWAADGITANALNPGYILTRLQRHVDDETMRAFGVMDDQGNVKPLPYYKTPEQGAATSVLLAASPLLNGVTGRYFEDNQEARTVEDGDDQPGGVAAHALDPEAADRLWEYGADTLSAG

SEQ ID NO: 25236 - protein, 519 aa, Streptococcus mutans
MLKKKLVCLLIGLIAFLGSLKIYAGSSESAEYQQTNHYNTPKGFMNDIQTIFKGSDGYYHMYYLLNSNYKLANDGTEWYHVRTKDWEHFENLGVAIPKFVNGWSAVATGSIFQNSNQFFKDLPTSAIVAYFTSYTDTGQHQYVAYSLDNGSSYQPYNNGKPVMTSQTKEQNARDPYIWYDSNSKRLMMYLAEGDKIGIYASSDGKNWAYQGATVLNQYTLGGKDLGLVECPNLKTFYDSATNTTKHVLFFGANGYQYGSTTGTYYMVGHLDTQGNFVPEQNAERLDQGSDYYGANFYQESDRVVKSIAWMGNWDYLQGQILDDQGQESKHLGSVSSARDITMVKRDDKYVLESYLKNNNSRTNTVSYQSNADTAKLADDGYHKTLLSVSRWHSQELSLKFQANAATLNGHIRLIFKQADAQVSLDYNTDNGYYEVKRTSSKIIGSQKVNYERSYVVDSHWNGQKEFNIYLVADKSSLEFALPNGQTYSMVKLSTASDMDIVIETSGSNRLQADLANLET

SEQ ID NO: 25237 - protein, 309 aa, Legionella pneumophila subsp. pneumophila str. Philadelphia 1
MSAKIIRIATRQSPLALWQANHVREMLVKQWPNLSIELLPMITSGDRFLKDKLLSAGGKGLFVKELEEALLDKRADLAVHSTKDMPAQLPDGLLLTAICKRDNPFDALISPQFKSLAALPKNAIIGTSSLRRQSQLLAYNPNLQIKTLRGNIHTRLSKLESGEYQAIILAAAGLERMGLAHHITQLIPDDIMLPTCAQGALCIECRTDDLEIQELVHGLNDPISALCVHTERRVNAKLGGNCHIPFAVYCTITEEKLLLLRAKVLNMDGSQMIDDEQQGKIAEAEVIADRCTESLMTKGAMSLLSTIPS

SEQ ID NO: 25238 - protein, 69 aa, Zea mays
MADWGPVLIGLVLFILLSPGLLFQIPGKGRIIEFGNFQTSGLSILVHAVIYFALLAIFLLAVGVHIYLG

SEQ ID NO: 25239 - protein, 608 aa, Bartonella quintana str. Toulouse
MYQSFEAITNPAYAAERIYSLRKELNRLGLDGFLVPRADEHQGEYVPLHAQRLSWLTGFTGSSGIALILKNKAIIFTDGRYKLQVRQQTDPLIFEYEDLMTYPPSQWLEKNGQKLSIGFDPWLHTIAATTALRKALEMKANGKLVAIQKNPIDLIWHNQPQPPQSALSIHPLKYAGCNSDEKLILIRQDIQKANADAFIFTDPSSIAWIFNIRGNDVSNTPFALCFALIPLKETPVLFIDRKKIGEEQKRYLEHYAKLYEPEQLILTIKDYVQKGMIFSLDPRITCEKLHIAIKEKRGSFITLTDPAALPRAVKNNIELSGARKAHLRDGVALIRFFSWLDKQTPGTTNEISAAQKLEEFRIITAKEMGEKLEDLSFDTISAAGANGAIVHYRVTTQTNKQLNAGELYLIDSGGQYRDGTTDVTRTVAIGDVGTEEKRCFTLVLKGMIALSTARFPQGTRGQDIDVLARIALWKAGFDYAHGTGHGVGSYLSVHEGPQNLSRNGSQELIPGMILSNEPGYYREGAFGIRIENLMIVKPAQKINGGDIEMLSFETLTNCPIDCRLILPELLTPQERQWLNDYHAHVYHINASYLNEDDKKWAKKATMPL

SEQ ID NO: 25240 - protein, 328 aa, Myxococcus xanthus
MPELMYREALNQALAEEMERDANVYLIGEEVGRYNGAFKVSQGLLDKFGSARIIDAPIAELGFTGLSVGAAMVGLRPVVEMMTWNFAILAMDQIVNNAAKLRHMSGGQLRCPIVFRGPGGAGGRLSSQHSQALEANYAHFPGLKVIAPATPADAKGMLKAAIRDENPVLMFEGERLYAIKGEVPEGEHVVPLGKADVKREGSDVTIITWSRMYYFCMQAAEELAKEGISVEVLDLRTLRPLDEEAILASVRKTNRAVIVEEGWALAGVGASVVDIIQSKAFDDLDAPVERVTGLDVNMSYAANLENATQPDAPKIIAAVKKVLYREGA

SEQ ID NO: 25241 - protein, 324 aa, Streptomyces avermitilis MA-4680
MSEQALRLGTRRSKLAMAQSGQVADAVRQVTGRPVELVEITTYGDTSREHLAQIGGTGVFVTALRDALLRGEVDFAVHSLKDLPTAQPDELALAAVPVREDPRDVLVARDGLTFEELGAPSPKGTARVGTGSPRRMAQLNAYARSHGLAVETVPIRGNVDSRIGYVRSGELDGVVLAAAGLHRIGRIDEVTEFLPVDTVLPAPGQGALAIECAADNADLIAALAELDDPFTRAAVTAERSLLAALEAGCSAPVGALADLLADGQIVTEMRLRGVVGTTDGSTLVQLSTTGPVPETHDQAMALGRELAAEMLAKGAAGLMGEREH

SEQ ID NO: 25242 - protein, 237 aa, Synechococcus sp. RS9917
MAPDQLLEQTKAEKQEVKGYFESTGFDRWNRIYSDSDDVNKVQRNIRIGHQKTVDEVLQWIQTSGVFRDVSFCDAGCGVGSLALPLAAMGAGSVQASDISDAMVQEAKRRAQEAGLALDTLHFHTSDLDSLSGSFHTVCCLDVFIHYPQAPAEAMVRHLCSLCEERLIVSFAPFTPVLALLKGIGQLFPGPSKTTRAYTLREEGIVRAAMACGFQPMRRSLNTAPFYFSRLIEFKRA

SEQ ID NO: 25243 - protein, 496 aa, Silicibacter sp. TM1040
MPRARKSCPIATDTNEAEMRNYPDLKLFIGGTWRDTPETLSVVNPATEEELGRLPCARISDLEDALAAAQKGLEIWRNTPPRSRADLILRAARLLRDRQEEIAQSITAEHGKPLAQARLEVIRGAEFFEWDAAEAMRTYGRVIPSAAGTKISVHHHPIGVVAAFSPWNFPMSQPARKIAGALASGCSLILKAAEETPAGAIHIVRAFQDAGLPDGVLNLVFGRPAEISAYLIPQPCVRLVALTGSTAVGRQLTALAAQSDTRVLMELGGHAPVIVCEDTDVQKAALSGAIRKMRNAGQVCTSPTRFFVHQDIFDEFATTFTQRAAATRVGNGMHDGIEMGPTANARRIPVLTDLVNDALAQGATLCTGGTRVGERGYFFAPTVLTHVPDSARIMREEPFGPIAVLNTVRNLDEAIAQANAVDYGLAGYAFTNRADYIARMIDEVEVGNFSINTLEASLPETPFGGVKSSGYGREGGTEGLESYLTTRNVWQSSDIT

SEQ ID NO: 25244 - protein, 345 aa, Zea mays
  misc_feature (157)..(157): Xaa can be any naturally occurring amino acid
PTRPPTRPPTRPRTRGIFPLKYREGGVLKRAGHTEASVDLAMLAGLPPVAVLCEIVDDADGSMARLPKLRVFAEKENLKIISICCRYRRKRDRLIERASVARLPLKWGNVHAYCYKSVIDGIEHIAMVKGDKSLPDIICTLSALLCDVLLFVHHLIXTINHMPNDGQGDIGDGQDILVRVHSECLTGDIFGSERCEYGNQLAGGGGGGEKAGRGVLVYLRGHEGRGIGLGHKIRAYNLQDDGRDTVEASEELGLPVDSREYGIGAQILRDLGVRSMKLMTNNPAKYSGLKGYGLSIAGRVPLITPITSENRRYLETKRTKMGHVYGLANAQANQANGSQSTEENH

SEQ ID NO: 25245 - protein, 543 aa, Synechococcus elongatus PCC 7942
MNIHTVATQAFSDQKPGTSGLRKQVPVFQKRHYLENFVQSIFDSLEGYQGQTLVLGGDGRYYNRTAIQTILKMAAANGWGRVLVGQGGILSTPAVSNLIRQNGAFGGIILSASHNPGGPEGDFGIKYNISNGGPAPEKVTDAIYACSLKIEAYRILEAGDVDLDRLGSQQLGEMTVEVIDSVADYSRLMQSLFDFDRIRDRLRGGLRIAIDSMHAVTGPYATTIFEKELGAAAGTVFNGKPLEDFGGGHPDPNLVYAHDLVELLFGDRAPDFGAASDGDGDRNMILGNHFFVTPSDSLAILAANASLVPAYRNGLSGIARSMPTSAAADRVAQALNLPCYETPTGWKFFGNLLDADRVTLCGEESFGTGSNHVREKDGLWAVLFWLNILAVREQSVAEIVQEHWRTYGRNYYSRHDYEGVESDRASTLVDKLRSQLPSLTGQKLGAYTVAYADDFRYEDPVDGSISEQQGIRIGFEDGSRMVFRLSGTGTAGATLRLYLERFEGDTTKQGLDPQVALADLIAIADEVAQITTLTGFDQPTVIT

SEQ ID NO: 25246 - protein, 302 aa, Haloarcula marismortui ATCC 43049
MIVTVTYNPAVDQTIQFDEQMAPERVMRANKAQFDAGGKGINAAQFLTAMDRPCVATGLLGGFTGSFIRETLQDDGVETAFIDVDGTTRLNTTAIAAVEEYKLNQAGPTVGESVVDALLEQVRAQSPDRVLIGGSLPPGLSPNAIDRIAAGGDWETIVDTGGDVLRELDAQYGLCKPNRAELGDATGADVSTVEGCADAADAFRDRGFDRVLASLGADGAVLVGDTGRLYAEALDIDVVDTVGAGDALLSGVLSAWEAGADDETALRTGVAVSSQVVQRAGTAVPDLNDIGSLRDGVTVRRL

SEQ ID NO: 25247 - protein, 116 aa, Zea mays
MGRTQSVVAVVVVAAVLLLAAAATTLYAAITCGQVSSAIAPCLSYARGTVSGPSAFCCSGVRNLKSAVSTASDRRSACNCLKNSVRGVSCLYFGNACSIPFKCCVSIPYTISTFTY

SEQ ID NO: 25248 - protein, 319 aa, Listeria innocua
MKRIAILTSGGDAPGMNAATRAVVRKAIYEGLEVYGINYGFLGLVNGDIRKLELGSVGDLLHRGGTFLYSARYPEFATEEGQLKGIEQLKKHQIDGLVVIGGDGSYHGAEALTKRGFPTIGIPGTIDNDISGTDFTIGFDTALNTVLDALDKIRDTATSHERTFIIEVMGRDAGDIALWSGLAGGAEAIIVPEESFNMDDVVDRLNKGRERGKKHSIIVVAEGVMSGNEFAKQLAEYGDYHARVTVLGHVQRGGSPTAFDRVLASRLGARSVELLLENRGGLAVGIRENRIVENNIGEILKEKHTLDQKLFDLASILSI

SEQ ID NO: 25249 - protein, 356 aa, Arabidopsis thaliana
MSDISQDLLEEILSRVPITSLRAVKSTCKRWKDLLNDPSFSKKYGGKRDNEFLAIMTSGSRASLMSVNLHGPRDNKDLEDPFIKQIGELNQDQIFKVFHCDGLLLCITNEDNTRLVVWNPYLAQTRCIQPIDKFYIYDWYCLGYDKDKNHKILVVYSPMFGRIEYEIYSFLSKSWIVLSFPTDWQISRDECLSLKGNTYFIAYKKMEVEEVGFQEFLLCFDFTNERFGPLLPLPFQCYNQTSLVLSTVQEEQLAVLCKRCDAYETKIWITTKIEPNAVSWSYFLKFDFKVDISGGSFFVDVEEKVAVLFCINREKEKGINNKTYMIGEDGYYKEVDLGESNWCPSMCSYVPSCVQV

SEQ ID NO: 25250 - protein, 625 aa, Musa acuminata
MDGCDCIEPQWPADELLIKYQYISDFFIALAYFSIPLELIYFVKKSSFFPYRWVLIQFGAFIVLCGATHLINLWTFALHSRTLAIVMTVAKVSTAVVSCATALMLVHIIPDLLSVKTRELFLKNKAEELDREMGLIRTQEETEGNVRMLTHEIRSTLDRDTVLKTTLVELGRTLDLKDCMLWMPSHSGTSLQLSHTLHHQIPTGSAVPINLPVVNQIFSSNHAMIIPHTCRLARIWPLSVRHVPPEVAAVRVPLLHLSNFQISDWSELSTKSYAVMVLILPSDSGRKWHVHELELVEVVADQVAVALSHAAILAESMRARDLLTEQNVALYLARQEAELAIRARNDFLAVMNHEMQTPLHATITLSSLLLETELSPEQRSMVETVLKSSSLLATLINDILDLSRLEDGRLELEIGDFNLHSVFREVMNFIKPIRAVKKLQVSLMLSPDLPLYAIGDEKRLMQIMLNVAANAVRFTKEGDISLTASVARTDYLREFRALDFYPVASDGHFYLRVTIKDTGCGISHQDLPNLFTKFSQSQNVSSQGYSGNGLGLAICERYVSLMQGHIWVESDGIGKGCTATFVVRLRLCENPDGSQQKILPLPWKKQTQKFSSSRGMPTDPGGLFD

SEQ ID NO: 25251 - protein, 296 aa, Neisseria meningitidis MC58
MSVLINKDTKVLVQGFTGKNGTFHSEQALAYGTKVVGGVTPGKGGQTHLNLPVFNTMKEAVKETGADASVIYVPAPFVLDSIVEAVDSGVGLVVVITEGVPTLDMLKAKRYLETNGNGTRLVGPNCPGVITPGECKIGIMPGHIHTPGRIGIISRSGTLTYEAVAQTTKLGLGQSTCIGIGGDPIPGMNQIDALKLFQEDPDTDAIIMIGEIGGTAEEEAAEYIQSNVSKPVVGYIAGVTAPKGKRMGHAGAIISGGKGTAEEKFAAFEKAGIAYTRSPAELGTTMLEVLKAKGLA

SEQ ID NO: 25252 - protein, 229 aa, Wolbachia pipientis
LEELQKYVDTLIVIPNQNLFRIANEKTTFADAFQLADNVLHIGIRGVTDLMVMPGLINLDFADIETVMSEMGKAMIGTGEAEGEDRAISAAEAAISNPLLDNVSMKGAQGILINITGGGDMTLFEVDAAANRVREEVDENANIIFGATFDQAMEGRVRVSVLATGIDSCNDNSSVNQNNIPVEEKNFKWPYNQIPTLETKEYASTEQTNERVKWGSNVYDIPAYLRRKK

SEQ ID NO: 25253 - protein, 330 aa, Streptococcus pneumoniae TIGR4
MLDLYKAQQQLTAIGDEFGVKVTFFHGRGGTVGRGGGPTYEAITSQPLKSIKDRIRLTEQGEVIGNKYGNKDAAYYNLEMLVSAAINRMITQKKSDTNTPNRYETIMDQVVDRSYDIYRDLVFGNEHFYDYFFESSPIKAISSFNIGSRPAARKTITEIGGLRAIPWVFSWSQSRVMFPGWYGVGSSFKEFINKNPENIAILRDMYQNWPFFQSLLSNVDMVLSKSNMNIAFEYAKLCEDEQVKAIYETILNEWQVTKNVILAIEGHDELLADNPYLKASLDYRMPYFNILNYIQLELIKRQRRGELSSDQERLIHITINGIATGLRNSG

SEQ ID NO: 25254 - protein, 388 aa, Nostoc punctiforme PCC 73102
MGRVGVLLLNLGGPDKLEDVGPFLYNLFSDPEIIRLPFRWLQKPLAWFIASRRTRTSQQNYKQIGGGSPLRRITEAQGEALKKQLGYLGQEANIYVGMRYWHPYTEEAIAQITQDNIEHLVILPLYPQFSISTSGSSFRLLDKLWQEEPKLQPIEYTVIPSWYKQPGYLQAMAELIAQELEQFPNPDEVHIFFSAHGVPKSYVEEAGDPYQQEIEECTALIMQTLNRPNAHTLAYQSRVGPVEWLQPYTEDALKELGAQGVKDLVVVPISFVSEHIETLQEIDIEYREVAEESGIHNFRRVPAPNTHPVFINALAELVIDALKNPSFKLSQAAQMKKMVKMYPQERWEWGLTTSAEVWNGRIAMLGFIALIIELITGHGFLHMIGLLQ

SEQ ID NO: 25255 - protein, 613 aa, Burkholderia xenovorans LB400
MSQTVGDFIIERLHAWGVRRIYGYPGDGINGVFGALNRAQTEAARHRKKGSDDSAHAIEFVQVRHEEMAAFMAAAHAKFTGELGVCIATSGPGASHLLTGLYDARMDHMPVLAIAGQQARAALGGHYQQELDLVSMFKDVAGAFVEQATVPAQVRHLVDRAVRTALSERKVTALILPNDLQDLPYEAPGRKHGTLHSGVGYRAPRLVPYPDDLQQAADILNAGKKVAILVGAGGLHATDELIAVAEKLGAGVAKALLGKAALPDDLPWVTGSIGLLGTKPSYDLMAECDTLLMIGSGFPYAEFLPKEGAARGVQIDIKADMLSLRYPMEVNLVGDSAETLRALLPLLEEKKDRAWRKRVEGWSADWWKTLDKRAHEPGKDAVNPQLTVWELSKRIASNAIVTSDSGSVANWYARDLKVQRGMMCSLSGGLASMGAAVPYAIAAKFAYPERPVIALVGDGAMQMNNMAELITVSKYWRGWSDPRWICMVLNNQDLNQVTWEQRAMEGDPKFEASQDIPCVPYHKFAELIGLKGIYVDDAQQMGAAWDDALAADRPVVIEVKADPNIAPLPPHITLAQAKAFASTLMKGDPNEGNVIVETAKQVLDAVLPGHHSK

SEQ ID NO: 25256 - protein, 479 aa, Pseudomonas fluorescens PfO-1
MTKRYDNYINGEWVAGNDYSANINPSELSDTIGDYAKADLAQVNAAIDAARAAFPAWSTSGIQARHDSLDKVGTEILARREELGTLLAREEGKTLPEAIGEVTRAGNIFKFFAGECLRLSGDYVPSVRPGVNVEVTREALGVVGLITPWNFPIAIPSWKIAPALAYGNCVVLKPADLVPGCAWALAEIISRAGFPAGVFNLVMGSGRVVGEALVNSPKVDGISFTGSVGVGRQIAVNCVSRQAKVQLEMGGKNPQIILDDADLKQAVELSVQSAFYSTGQRCTASSRLIVTAGIHDKFVEAMAERMKSIKVGHALKAGTDIGPVVSQAQLEQDMKYIDIGQSEGARLVSGGGLVTCDTEGYFLAPTLFADSEASMRISREEIFGPVANIVRVADYEAALAMANDTEFGLSAGIATTSLKYANHFKRHSQAGMVMVNLPTAGVDYHVPFGGRKGSSYGSREQGRYAQEFYTVVKTSYIGS

SEQ ID NO: 25257 - protein, 289 aa, Listeria monocytogenes str. 1/2a F6854
MTHVTLPILEDWEGLSLTTILQEKFHLGKKARHEIRMSQNVLLNNKPLDDWNTPLFVGASLSLPIFLHDKIPVYEYDLEIIYEDDFLLVVNKPVDMKTHPNDSYETDTCANAVQYYLEKTGQDTNALAVHRLDQTTSGLVLFAKNKLAIAGLSWQMENRAIHRTYLAAVDGTWGLVMQTINKPIGEDRHHGSRRQISPYGQPAVTHVKVLENDNEKNTSLVECQIETGRTHQIRVHLSGIGHPIIGDTLYGGSPRANRIMLHAEKLHLNHPFKGKEMNFSAPAGDDWVF

SEQ ID NO: 25258 - protein, 588 aa, Arabidopsis thaliana
MGSTPTDLPGEDVADNRSGVGGGISDVYGEDSATLDQLVTPWVTSVASGYTLMRDPRYNKGLAFTDKERDAHYLTGLLPPVILSQDVQERKVMHNLRQYTVPLQRYMALMDLQERNERLFYKLLIDNVEELLPVVYTPTVGEACQKYGSIFRKPQGLYISLNEKGKILEVLKNWPQRGIQVIVVTDGERILGLGDLGCQGMGIPVGKLSLYTALGGIRPSACLPITIDVGTNNEKLLNDEFYIGLKQRRATGQEYAEFLHEFMCAVKQNYGEKVLVQFEDFANHNAFDLLSKYSDSHLVFNDDIQGTASVVLAGLIAAQKVLGKKLADHTFLFLGAGEAGTGIAELIALKISKETGAPITETRKKIWLVDSKGLIVSSRKESLQHFKQPWAHEHKPVKDLIGAVNAIKPTVLIGTSGVGQTFTKEVVEAMATNNEKPLILALSNPTSQAECTAEQAYTWTKGRAIFGSGSPFDPVVYDGKTYLPGQANNCYIFPGLGLGLIMSGAIRVRDDMLLAASEALAAQVTEEHYANGLIYPPFSNIREISANIAACVAAKTYDLGLASNLPRAKDLVKFAESSMYSPVYRNYR

SEQ ID NO: 25259 - protein, 634 aa, Bipolaris oryzae
MPPKRKSNGIPHNVKSANKYTDASGNAPNKRSRIAKPLDKASTNSAPLIDAIVRNSKNGAPGDAVKKEEGNFDHSRPEERAGIVDRQYYPAEMSNERCAMYNANEIPRPIAILEKTLKDTKQRRDKIQSGNENGHGDAVMHWFKRDLRVRDNTGLSKAAELAKSKGIGLVAVWIMSPQDWEAHLVSPPKCDFELRSVQLLKQELEELDIPLYIETVHERKNIKKRLVEMALEWNVKSVFCNLEYEPDELRREERLVRMMLEKGINMDPQHDDCVVPPGSLKTGTGKQYAVYTPWYRAWIAYLHAHPHLLNERSMPEKNPTGFREKFTKLFDSRVPDLPDCKSLTAEEKERFHHLWPAGEAAAIDRLERFLTEKVIKYKDTRNFPALNSTGRISAHHAAGTLAARTSVRMARDINSVKKLDGGKEGIKGWIGEVAWRDFYRHVLVHWPYVCMNKPFKYEYTNIEWEYNDAHFEAWTQGRTGYPIVDAAMRCLKHTGYMHNRLRMITASFLAKHLLLDWRLGEQYFITHLIDGDFASNNGGWGFSASTGVDPQPYFRIFNPWTQSEKFDEQGEFIRLWVKELEDVQGAAIHNPYQAKGEAAKIAKKNGYPEPIVEHKFARERCLARYKAGIGRETA

SEQ ID NO: 25260 - protein, 102 aa, Cyanidioschyzon merolae strain 10D
MLHIDELTFENEVLQSEKLVLVDFWAPWCGPCRMIGPILEEIAKEFNLKVVQVNTDENPNLATFYGIRSIPTLMLFKKGQRVDTVIGAVPKSILIHTINKYL

SEQ ID NO: 25261 - protein, 250 aa, Enterococcus faecalis
GAILVVSAADGPMPQTREHILLSRNVGVPYIVVFLNKMDMVDDEELLELVEMEVRDLLSEYDFPGDDVPVIAGSALKALEGDESYEEKILELMAAVDEYIPTPERDTDKPFMMPVEDVFSITGRGTVATGRVERGEVRVGDEVEIVGIKDETSKTTVTGVEMFRKLLDYAEAGDNIGALLRGVAREDIERGQVLAKPATITPHTKFKAEVYVLSKEEGGRHTPFFTNYRPQFYFRTTDVTGVVELPEGTE

SEQ ID NO: 25262 - protein, 525 aa, Zea mays
MALGAAYHHYLQLAGDHGTATHALLLGVLIFLVIRLVSARRTGTTSANKRKQQQRLPLPPSPPGKLPIIGHLHLIGAETHISIRDLDAKHGRNGLLLLRIGAVPTLFVSSPSAADAVLRTQDHIFASRPPSMAAEIIRYGPSDVAFVPYGEYWRQGRKLLTTHMLSTKKVRLVMDKIRAAATAAPPAAVDLSDLLSGYTNDVVCRAVLGASHRNQGRNRLFSELTEINVSLLGGFNLEDYFPPNMAMADVLLRLVSVKARRLNQRWNDVFDELIQEHVQSRPSGESEESEADFIHVLLSIQQEYGLTTDNLKAILVDMFEAGIETSYLTLEYGMAELINNRHVMEKLQTEVRTTMRSPDGKKLDMLAEEDLGSMPYLKATIKETLRLHPPAPFLLPHYSTADSEIDGYFVPAGTRVLVNAWALGRDRTTWEKPEEFMPERFVQEPGAVDVHMKGKDLRFIPFGSGRRICPGMNFGFATMEIMLANLMYHFDWEVPGSAAGVSMDESFGLTLRRKEKLLLVPRIAS

SEQ ID NO: 25263 - protein, 351 aa, Rickettsia sibirica 246
MTNSIRIGTRKSPLALIHTNLVIQQIKQFFPDINCEIVPIITSGDLIQNKPLYDIGGKALFLKEIEQALLDKKIDLAVHSLKDVPGRIPEPLVIAAVLEREDPRDVFVCLKYKSIEELPQNAVIGSSAVRRKAFIQKIRPDLKVTVFRGNVDSRIKKLMTGEVDATILAYTGLKRLEVFNPEYCHLIEYSQMLPCIGQGVIAVEIRKDDNAMLEICNQINHLPTFELIKPERAFLEYLDANCRTPIAAYSQYLDANPRHLSKLAYREVFEGNAEALATAAYKSNRTDASTGLTYKLPLEVEFGKVSNIQTNFMLGNLDGSKITFHTETTNIKTSTEAGIKAAKMMLEAICK

SEQ ID NO: 25264 - protein, 423 aa, Oryza sativa
MDKLSGSARLIIVSDLDHTMVDHHDEENLSLLRFGALWESVYCQDSLLVFSTGRSPTLYKELRKEKPMLTPDITIMSVGTEITYGEAMVPDDGWEEYLNNKWDRNVVVEETAKFSELKLQPETEQRPHKVSFFVDKKSAQEVIKSLSGNMEKCGLDVKIIYSGGQDLDILPQGAGKGQALAYLLKKLSSCGKPPNNTLVCGDSGNDAELFSIPGVHGVMVSNAQEELLQWYAENAKGNPKIIHATERCAAGIIEAIGHFKLGPSVSPRDVGFPYVKEDHIKPTDAVVKFYVLYEKWRRAEVPKSDSVVQYFKNITHANGVIIQPSGLECSLHASVDALSSCYGEKQGKKYRTWVDRLFVSQSGSDSWLVRFDLWEAEGDARLCCLTSLALNVKPETPAGFLITHVHKTWLKGYSSADEQSSKL

SEQ ID NO: 25265 - protein, 250 aa, Enterococcus faecium
  misc_feature (62)..(62): Xaa can be any naturally occurring amino acid
  misc_feature (66)..(66): Xaa can be any naturally occurring amino acid
  misc_feature (169)..(169): Xaa can be any naturally occurring amino acid
  misc_feature (175)..(175): Xaa can be any naturally occurring amino acid
  misc_feature (203)..(203): Xaa can be any naturally occurring amino acid
GAILVVSAADGPMPQTREHILLSRQVGVPYIVVFLNKVDMVDDEELLELVEMEVRDLLTEYXFPGXDVPVVAGSALKALEGDASYEEKILELMAAVDEYIPTPERDNDKPFMMPVEDVFSITGRGTVATGRVERGQVRVGDEVEVVGIAEETSKTTVTGVEMFRKLLDXAEAGDXIGALLRGVAREDIQRGQVLAKPGTITPXTKFSAEVYVLTKEEGGRHTPFFTNYRPQFYFRTTDVTGVVELPEGTE

SEQ ID NO: 25266 - protein, 502 aa, Haloarcula marismortui ATCC 43049
MRALSDVGEVQFLDTTLRDGEQAPGVSLTPDDKADIARSLDAARIDVIEAGSACTGPGERETISRVAGLDLDSTVTSFCRGIQNDIDLALDCGVDGINLVVPASDKHVEQKVGTSKSENVDNTVELVEYAVDHGLWVEVIGEDGSRADLDYLEELLGAAVEAGADRICWADTVGHATPDRALECVSRLSDLGPVSTHTHDDLGLAVTNALVSIAAGADLVHGTINGIGERAGNVALEEVAIALDHGYGVESMALTEVYDLAQLIANRTGIPLAPNKAVVGENAFTHESGIHTDGTLKDDSMYEPYPPEKVGRERRLALGKHAGRAGVEAALDEHDVEVTDDQLSEIVSRVKEIGDRGKRVTDADLLTIADEVTDDARARRVELLGLTAVSGSDTPTASVRLSVDGEERKEAAVGSGPVDAAMNAAEVALSHTADATLEDYHVDAITGGTDALVTVEIEMSRGDDHVVVSASDSDITRASVRAMVDAMDRLVADDEEPLVADD

SEQ ID NO: 25267 - protein, 448 aa, Chlamydomonas reinhardtii
MEARTVSVLAGLAHRVASAAWRSASGLRTCTTTTPTYGRTSVYVKEALDLLDFDPQVEKAILNPDREVTVNLVVPMDNGEVNMFPAYRVQHNNALGPFKGGIIYHPGVTLENMRNLASLNTWKFSLLNVQFGGAKGGVGVDPRSLSERETEKLTRKYVQALQEVIGPHTDIPAPDINTDEHHMAWIFDQYSRLRGFAPAAVTGKPTWLHGIVGRDKAGGRGAAIATREFLTRSLRRKVAGTSFLIQGFGKLGSWTAQILQQEMGAKIVGVSCSETAVYNEEGLDIPALRAHVAAGGLLKDFPGGTGVLNDDSFLDLPADVFIPCAVDGTIHAGNVHRCVNFKAVVEAANGALTPEADAALRKAGVPVLPDLIANGGAVVVSFFEWVQNNQNMQWEEDDVKRELDRYLTDAFEALLREQSLHAGCSLRTAGYLVALRRLQQADSVRGHS

SEQ ID NO: 25268 - protein, 331 aa, Legionella pneumophila subsp. pneumophila str. Philadelphia 1
MRRGLLLLNLGTPNNADIRAVKLYLREFLTDKRVIDLPTIPRYILVYCLILPFRSPKSAQAYQSIWTEKGSPLLYHSQNLVTKLQSALKDEYKIALGMRYGTPSITTALAELKDCHSLTILPLFPQYSSAATGSAIEKTLSHLANQEIIPSIKIIRDFYQRPEYIQAQAKIMKPYIKDNFHLLFSYHGIPERHIHKSGCDTLCPQTCTPIYDKNQACYRAQCYQTSLLLAKELQLGTHQYTTAFQSRLGKTPWIKPYTDEIFAELISKGIKNIVVSCPSFVADCLETLEEIGIRAKEQWEKLGGEQFILTPCMNDHPEWIKAIQSIVNEQF

SEQ ID NO: 25269 - protein, 250 aa, Enterococcus gallinarum
GAILVVSAADGPMPQTREHILLSRNVGVPYIVVFLNKMDMVDDEELLELVEMEVRDLLSEYDFPGDDVPVIAGSALKALEGDPSYEEKIMELMAAVDEYVPTPERDTDKPFMMPVEDVFSITGRGTVATGRVERGQVRVGDEVEIVGIADETAKTTVTGVEMFRKLLDYAEAGDNIGALLRGVAREDIQRGQVLAKAGTITPHTKFKAEVYVLTKEEGGRHTPFFTNYRPQFYFRTTDVTGVVELPEGTE

SEQ ID NO: 25270 - protein, 590 aa, Bartonella quintana str. Toulouse
MTINLHRPDIAELKPRITVFGVGGGGGNAVNNMINAGLQGVDFVVANTDAQALAMSKAERVIQLGAAVTEGLGAGALPEVGQAAADECIDEIIDHLADSHMVFITAGMGGGTGTGAAPVVARAAREKGILTVGVVTKPFQFEGARRMKTAEAGIEELQKSVDTLIVIPNQNLFRIADEKTTFADAFAMADQVLYSGVASITDLMIKEGLINLDFADVRSVMHEMGRAMMGTGEASGEGRSLAAAEAAIANPLLDDTSMRGARGLLISITGGRDMTLFEVDEAANRIREEVDADANVIFGAIDDESLEGVIRVSVVATGIDREVNDVVQPSHPQLQRQATSIRKNDPGMSQTSFHLQSPPLRSESMVEVIEALEIEKGKSIGEQFRPKSQIFSQPVDTVAARNANSVSYGSNVVHGQISNATRPQFSRCSQQSMAASVSMEATAHILDEMIGVVKQKENQVQQKEMQQMRARSAPMRMPELKDFPPVAHGQSERSSTADQGPRNLWQRLKQSLTHREEAEPQAHLEPAVRSSQQQNVHVYNKNSQAFPQDASVYVPRRSGELHPHVPQDQRTFISEEDQLEIPAFLRRQVN

SEQ ID NO: 25271 - protein, 509 aa, Staphylococcus aureus subsp. aureus MRSA252
MSSHIQIFDTTLRDGEQTPGVNFTFDERLRIALQLEKWGVDVIEAGFPASSTGSFKSVQAIAQTLTTTAVCGLARCKKSDIDAVYEATKDAAKPVVHVFIATSPIHLEHKLKMSQEDVLASIKEHVTYAKQLFDVVQFSPEDATRTELPFLVKCVQTAVDAGATVINIPDTVGYSYHDEYAHIFKTLTESVTSSNEIIYSAHCHDDLGMAVSNSLAAIEGGARRIEGTVNGIGERAGNAALEEVALALYIRNDHYGAQTALNLEETKKTSDLISRYAGIRVPRNKAIVGQNAFSHESGIHQDGVLKHRETYEIMTPQLVGVSTTELPLGKLSGKHAFSKKLKALGYDIDKEAQIDLFKQFKAIADKKKSVSDRDIHAIIQGSEHEHQALYKLETLQLQYVSSGLQSAVVVIKDKEGHIYQDSSIGTGSIVAIYNAVDRIFQKETELIDYRINSVTEGTDAQAEVHVNLLIEGKTVNGFGIDHDILQASCKAYVEAHAKFAAENVEKVGN

SEQ ID NO: 25272 - protein, 348 aa, Staphylococcus aureus subsp. aureus MRSA252
MTYNIVALPGDGIGPEILNGSLSLLEIISNKYNFNYQIEHHEFGGASIDTFGEPLTEKTLNACKRADAILLGAIGGPKWTDPNNRPEQGLLKLRKSLNLFANIRPTTVVKGASSLSPLKAERVEGTDLVIVRELTSGIYFGEPRYFNNHEALDSLTYTREEIERIVHVAFKLAASRRGKLTSVDKENVLASSKLWRKVVNEVSQLYPEVTVNHLLVDACSMHLITNPKQFDVIVYENLFGDILSDEASVIPGSLGLSPSASFSNDGPRLYEPIHGSAPDIAGKNVANPFGMILSLAMCLRESLNQPDAADELEQHIYNMIEHGQTTADLGGKLNTTDIFEILSQKLNH

SEQ ID NO: 25273 - protein, 352 aa, Amycolatopsis methanolica
MTSTTFRRSDQMRVGVLTGGGDCPGLNAVIRAVVRKGIEAHGWEIVGFRSGWRGPLTGDSRPLGLDDVEEILIRGGTILGSSRTNPYKEEGGVEKIRAVLADQGVDALIAIGGEDTLGVAKKLTDDGIGVVGVPKTIDNDLAATDYTFGFDTAVHIATEAIDRLRTTAESHYRAMVVEVMGRHAGWIALHAGLAGGANVILVPERPFSVEQVVEWVERRFEKMYAPIIVVAEGAVPEGGAEVLRTGEKDAFGHVQLGGVGTWLADEIAERTGKESRAVVLGHTQRGGTPTAYDRVLATRFGLHAVDAVADGDFGTMVALRGTDIVRVKLAEATAELKTVPPERYEEAEVFFG

SEQ ID NO: 25274 - protein, 81 aa, Arrabidaea pubescens
TPQDEMRAGMSYFHETIWKGAPKFLRRVDTALKNIGINERVPYNAPLIQFSPWMGGDRDGNPRVTPEVTRDVCLLARMMAA

SEQ ID NO: 25275 - protein, 424 aa, Thiomicrospira crunogena XCL-2
MFEIAKQRLSDVFKHIDVEEEVITRLSVPKRSIKASIPVRMDDGSLRIFTGYRVQYDDTRGPTKGGIRYHPRVNEDEVTSLSFWMTVKCAVAGLPFGGAKGGITVNPKELSQLEIERLSRGYIRAFADVIGETRDIPAPDMYTNATIMGWMADEYSIISRQQVPGIITGKPVHLNGSEGRTQATGQGALFCLNEYARRQGWDIKNTTVAVQGFGNAGYHFARLAQQEGYRVIAVSDSSGGILTPSGLNIDDVKQYKDQTSELQAVYCDGSVCKVIEHEKLTNEELLELEIDVLVLAAMENQVTQENVDNIQAHTILEIANGPVSPQADEVLYAKNIQIIPDVLANAGGVTVSYFEWVQNRAGFYWEADEIRVKLSKIMKRESNTIYDLAIRYETSLRTAAYIHGIERLAGAINQRGNRKFFKKN

SEQ ID NO: 25276 - protein, 543 aa, Medicago truncatula
MASHLLNHSKKLRNASSLLHHDRALLLRMFCSDVQPRNPDVWKTQLQERESSARNHVSESSPNFTKLSFGVQKRNMSTMKRGYMRESLLNREISQNSQVLSRRSYSSASDLPPHQEIGMPSLSPTMTEGNIARWLKKEGDKVSPGEVLCEVETDKATVEMECMEEGFLAKIVRKEGEKEIQVGEVIAITVEEEADIAKFKDYQPSASESSAPPAKETPAPPPPKKEVAEEPAREPEPKVSKPSAPPSSGDRIFASPLARKLAEEKNVNLSSIKGTGPDGLIVKGDIDDYLASGAKEVSAPSKAKPAADAALDYTDIPVSQIRKITASRLLLSKQTIPHYYLTVDTCVDKLMSLRTQLNSLQEASGGARISVNDLVIKAAALALRKVPQCNSSWTNDYIRQYHNVNINVAVQTDHGLFVPVVRDADKKGLSTIGEEVKQLAKKAKENSLKPQDYEGGTFTVSNLGGPFGVKQFCAIVNPPQSGILAVGSAERRVVPGSGAEEFKFASFIAVTLSCDHRVIDGAIGAEWLKAFKGYIENPETMLL

SEQ ID NO: 25277 - protein, 314 aa, Saccharophagus degradans 2-40
MTDVQHHQVIVLGSGPAGYTAAIYAARANLKPVVITGMQQGGQLTTTTEVENWPGGVADLQGPDLMVQMQQHAERFDTDIIFDHIHECDLSKRPFTLKGNNTYTCDALIISTGASAQYLGLPSEEAFMGKGVSACATCDGFFYRDKKVIVVGGGNTAVEEALYLSNIASEVTLVHRRDSLRSEKILQERLFAKEKNGNVKIMWNQNLDEVLGDDSGVTGARLKSSIDGSTQEIDASGVFIAIGHKPNTDIFQGQLEMKDGYIVIKSGLNGEATSTSVPGVFAAGDVADHIYRQAITSAGFGCMAALDAEKFLDS

SEQ ID NO: 25278 - protein, 411 aa, Chlamydophila abortus S26/3
MIPTALILLIIFFTLCSGFVSLSQIALFSLPTSLISHYKRSRYKNQQLVASLLSHPHHLLITLIFLDIGLNIGIQNCVAILVGDQASWLLIVGFPLALTLVLCEILPKAVALPYNTQIAYFVAPLILVFTKVLRPLLYWAISGINYVVQWILSSQKMDIIQPQELKEVLQSCKDFGVVNQDESRLLYGYLSLSDCSVKERMKPRQDVLFYDIQTPLDNLYDLFSEQHCSRVPVCNDNLQNLLGICTAKALLLHGKPLQSSEDLLPLLKKPYYMPETISAKTALCHLAAEGETLGMIIDEYGSIEGLITQEDLFEIVSGEIIDQRSEKVLYTMSGKDVIIAAGTLELSDLSEIFNINLPTHNNSATLGGWLTEQMESIPITGTKITWNNLMFQVLDAAPNRIRRVYIRKMHD

SEQ ID NO: 25279 - protein, 555 aa, Arabidopsis thaliana
  misc_feature (395)..(395): Xaa can be any naturally occurring amino acid
MEISNAMLLVAIVTGYWLWFKRISRWLKGPRVWPLLGSLPGLIEQRDRMHEWITENLRACGGTYQTCIFAVPFLAKKQGLVTVTCDPKNLEHMLKTRFDNYPKGPTWQSVFHDLLGQGIFNSDGDTWLFQRKTAALEFTTRTLRQAMGRWVNRGIKLRFCPILATAQDNAEPVDLQDLILRLTFDNICGLAFGKDTRTCAPGLPENGFASAFDRATEASLQRFIIPKFMWKLKKWLGLGLEVSLSRSLGEIDEYLAAVINTRKQELMSQQESGTHQRHDDLLSRFMMKKTESYSDTFLQHVALNFILAGRDTSSVALSWFFWLITMHPTVEDKIVREICSVLIETRGTDDVASWTEEPLGFDEIDRLVYLKAAISETLRLYPSVPEDSKHVENDXDVLPDGTFVPAGSSVTYSIYAAGRMKSTWGEDCLEFNPERWISPIDGKFINHDQYRFVAFNAGPRICLGKDLAYLQMKTIAAAVLLRHRLTVVPGHKVEQKMSLTLFMKNGLLVNLYKRDLQGIIKSLVVKKSDGVSNGQCNGVIGEGVAVYLNTGVAVV

SEQ ID NO: 25280 - protein, 439 aa, Glycine max
MAAGTGLFAEILDGDAYKYYADGEWKKSASGKSVSIINPTTRKTQYKVQACSQEEVNKVMDLAKSAQKLWAKTPLWKRAELLHKAAAILKEHKTPIAECLVKEIAKPAKDAVMEVVRSGDLVSYTAEEGVRILGEGKFLVSDSFPGNERTKYCLTSKIPLGVILAIPPFNYPVNLAVSKIAPALIAGNSIVLKPPTQGAVSALHMVHCFHLAGFPKGLINCVTGKGSEIGDFLTMHPGVNCISFTGGDTGISISKKAGMIPLQMELGGKDACIVLEDADLDLVAANIIKGGFSYSGQRCTAVKVVLVMESVADALVEKVKAKVAKLTVGPPEDDCDITPVVSESSANFIEGLVLDAKEKGATFCQEYKREGNLIWPLLLDNVRPDMRIAWEEPFGPVLPVIKINSIEEEIHHCNASNFDPQRCVITKDVIKNQQYYNQA

SEQ ID NO: 25281 - protein, 158 aa, Listeria innocua
MNVHDFSEKAMNGKEIALSDYKGKVLLIVNTASKCGLTPQLEGLEKMYKKLGGDNFEILGFPCNQFLRQDPGSDEEILEFCQMNYGVTFQMFSKIKVKGKDAAPLYKYLTEQTGGKKVEWNFAKFLIDENGEVVERFPSKMKPEDFEDKVEALVAAVK

SEQ ID NO: 25282 - protein, 229 aa, Wolbachia pipientis
LEELQKYVDTLIVIPNQNLFRIANEKTTFADAFRLADNVLHIGIRGVTDLMIMPGLINLDFADIETVMSEMGKAMIGTGEAEGEDRAISAAEAAISNPLLDNVSMKGTQGILINITGGGDMTLFEVDAAANRVREEVDENANIIFGATFDQAMEGRVRVSVLATGIDSCNDNSSVNKNKIPAEEKNFKWPYNQIPTLETKEYASTEQTNERVKWGSNVYDIPAYLRRKK

SEQ ID NO: 25283 - protein, 348 aa, Sulfitobacter sp. EE-36
MTQQRPAHAQPDHPTVPAPKVGILLANLGTPDNYDYWSMRRYLSEFLSDRRVIDYSPWKWQPLLQLVILSKRPFTSGAAYKSIWNHEAGESPLMTITKQQTANIKDAMQARYGDAVMVDYCMRYGNPSTQSKVAAMTAAGCQKILFFPLYPQYAGATSATANDAFFAALAKEKWQPAARTVEPYFDRPDYIEALATSIEKAYAKMETKPDKLLCSYHGVPLRYLMEGDPYHCQCQKTTRLLKERLGWDDTQIMTTFQSKFGPEEWLQPYTVEEVARQAEAGNKKIAVCAPAFSADCIETLEEINEEIKESFEHAGGEEFHYIPCLNDDDLHIKALSNVIEENLQGWID

SEQ ID NO: 25284 - protein, 290 aa, Oceanospirillum sp. MED92
MSVLINKDTKVICQGFTGGQGTFHSEQAIAYGTKMVGGVTPGKGGTTHLGLPVFNTVAEAVAETGAEASVIYVPAPFCKDSILEAANAGIKLIVCITEHIPVMDMLECKVRCDELGVRLIGPNCPGVITPGECKIGIMPGHIHLPGKVGIVSRSGTLTYEAVKQTTDAGFGQSTCVGIGGDPIPGSNFIDILEMFQNDPQTEAIVMIGEIGGSAEEEAAEFIKANVTKPVVSYIAGVTAPAGKRMGHAGAIISGGKGTADEKFAALEDAGVKTVRSLAQIGDALKEVTGW

SEQ ID NO: 25285 - protein, 229 aa, Wolbachia pipientis
LEELQKYVDTLIVIPNQNLFRIANEKTTFADAFQLADNVLHIGIRGVTDLMIMPGLINLDFADIETVMSEMGKAMIGTGEAEGEDRAISAAETAISNPLLDNVSMKGAQGILINITGGGDMTLFEVDAAANRVREEVDENANIIFGATFDQAMEGRVRVSVLATGIDSCNDNSSVNKNKIPAEEKDFKWPYNQIPTLETKEYASTEQTNERVKWGSNVYDIPAYLRRKK

SEQ ID NO: 25286 - protein, 349 aa, Rubrobacter xylanophilus DSM 9941
MAEVRRVGMLTGGGDAPGLNGVIRAVTVKCVEDYGYEVVGIKRGWRGLLAPQEDSVEKLTVDGVRYILDEGGTVLLSSRTNPYKKEGDAEKVVKNMQEFGIDALVAIGGDDTLGVASRLHKDFGVQVVGCPKTIDNDLSGTDICFGYDTAVSIATEALDRVRTTAKSHERILVVEIMGRHAGWITYGAGLAGAANVTLIPEVEPDIDAIADLFKKRAERGERWGVVAVSEGVTIGEEYITQSAERDEFGHVRLGGIGETLAKELKERTGIDTRHVVLGHLQRGGTPTAYDRILSTRYGLRAAEAVKNGEWGKMVALRGSDIVTVPLEEATGETRTVPEDLYGVLKTFFG

SEQ ID NO: 25287 - protein, 424 aa, Magnetococcus sp. MC-1
MQITGMYWGSKLLKYVGFPTSKVLGPEASAGELQSMIDEAGGLLVKPIFKGGVGKKGKAGLLGIAKDVQTALKEKERLYFAEHQHGNAYAKAEGVTFESFVEAKYEVYFSITDSTKYRAPTVTITHHGGVDIEELPPEKIATVPFDPLTGFKGFVVSNALTRLGAPNEIISPLVQNLPKLWDLYHNYGMTTLELNPIRMMPDASGRLVPVACDFKCSFDGDDPNVERLNLPTDLDMADYSNFEMEVNQLRTYQGQSDVYVINDQGSITAMTFGGGANALVTEQLGDRATISSDFGGNPPYQKMYDISRITMKYWIKQSNVFFIIGGKANNTDIFETFRGMADALREYFGEYGPTPLYVVVGRGGPNLIRGMGYLKDTLDALGLPYRFFGYDSAMSEVVNYAKDIDDWMANGGRQQVADKLGCDA

SEQ ID NO: 25288 - protein, 403 aa, Oceanospirillum sp. MED92
MSIEIKAPTFPESVADGTIATWHKQPGEACSADELIVDIETDKVVLEVVAPEDGVIAEVLKGEGDTVLSDEVIAKFEAGAAGSAAAPAAAEEAAPAGDADKVGPAARKLIEEHGLDASQIPGTGKNGGITKEDVQNFMKNGAPAAAPAAAPAPAAAPAATAAPVNVPAGERVEKRVPMTRLRATIAKRLVEAQQNAAMLTTYNEVNMKPVMELRKQYKDLFEKTHNGTRLGFMSFFVKAATEALKKFPAVNASIDGNDMVYHGYQDIGVAVSTDRGLMVPVLRDTDAMSLADVESTIADFGKRGREGKLGMDDMQGGTFTITNGGVFGSLMSTPILNPPQTAILGMHKIQERPMAVNGQVEILPMMYLALSYDHRMIDGKEAVQFLVTIKDLLEDPARMLLEV

SEQ ID NO: 25289 - protein, 163 aa, Gossypium hirsutum
MATYEGKVFTEEQEALVVKSWTVMKKKTAELGLKFFLKIFEIAPSAKKLFSFLRDSNVPLEQNTKLKPHAMSVFVMTCESAVQLRKAGKVTVRESNLKKLGATHFKYGVVDEHFEVTKFALLETIKEAVPDMWSDEMKNAWGEAYDRLVAAIKIEMKACSQAA

SEQ ID NO: 25290 - protein, 229 aa, Wolbachia pipientis
LEELQKYVDTLIVIPNQNLFRIANEKTTFADAFQLADNVLHIGIRGVTDLMIMPGLINLDFADIETVMSEMGKAMIGTGEAEGEDRAISAAEAAISNPLLDNVSMKGAQGILINITGGGDMTLFEVDAAANRVREEVDENANIIFGATFDQAMEGRVRVSVLATGIDSCNDNSSVNKNKIPAEEKNFKWPYNQILTLETKEYASTEQTNERVKWGSNVYDIPAYLRRKK

SEQ ID NO: 25291 - protein, 308 aa, Salmonella sp.
INGFGRIGRIVFRAAQKRSDIEIVAINDLLDAEYMAYMLKYDSTHGRFDGTVEVKDGHLIVNGKKIRVTAERDPANLKWDEVGVDVVAEATGIFLTDETARKHITAGAKKVVLTGPSKDNTPMFVKGANFDKYEGQDIVSNASCTTNCLAPLAKVINDNFGIIEGLMTTVHATTATQKTVDGPSHKDWRGGRGASQNIIPSSTGAAKAVGKVLPELNGKLTGMAFRVPTPNVSVVDLTVRLEKAATYEQIKAAVKAAAEGEMKGVLGYTEDDVVSTDFNGEVCTSVFDAKAGIALNDNFVKLVSWYDN

SEQ ID NO: 25292 - protein, 591 aa, Arabidopsis thaliana
MAKLNRSNIGLSLLLSMFLANFITDLEASSHQDLNQPYRTGYHFQPLKNWMNGPMIYKGIYHLFYQYNPYGAVWDVRIVWGHSTSVDLVNWISQPPAFNPSQPSDINGCWSGSVTILPNGKPVILYTGIDQNKGQVQNVAVPVNISDPYLREWSKPPQNPLMTTNAVNGINPDRFRDPTTAWLGRDGEWRVIVGSSTDDRRGLAILYKSRDFFNWTQSMKPLHYEDLTGMWECPDFFPVSITGSDGVETSSVGENGIKHVLKVSLIETLHDYYTIGSYDREKDVYVPDLGFVQNESAPRLDYGKYYASKTFYDDVKKRRILWGWVNESSPAKDDIEKGWSGLQSFPRKIWLDESGKELLQWPIEEIETLRGQQVNWQKKVLKAGSTLQVHGVTAAQADVEVSFKVKELEKADVIEPSWTDPQKICSQGDLSVMSGLGPFGLMVLASNDMEEYTSVYFRIFKSNDDTNKKTKYVVLMCSDQSRSSLNDENDKSTFGAFVAIDPSHQTISLRTLIDHSIVESYGGGGRTCITSRVYPKLAIGENANLFVFNKGTQSVDILTLSAWSLKSAQINGDLMSPFIEREESRSPNHQF

SEQ ID NO: 25293 - protein, 304 aa, Wolbachia pipientis
GALPDIGKGAAKESIDEIMEHIRDSHMLFITAGMGGGTGTGAAPVIAKAAREARAVVKDKGAKEKKILTVGVVTKPFGFEGVRRMPTAELGLEELQKYVDTLIVIPNQNLFRIANEKTTFADAFQLADNVLHIGIRGVTDLMIMPGLINLDFADIETVMSEMGKAMIGTGEAEGEDRAISAAEAAISNPLLDNVSMKGAQGILINITGGGDMTLFEVDAAANRVREEVDENANIIFGATFDQAMEGRVRVSVLASGIDSCNDNSSVNKNKIPAEEKNFKWPYNQIPTLETKEYASTEQKRVCFN

SEQ ID NO: 25294 - protein, 447 aa, Salmonella typhimurium
MDQTCSLESFLNHVQKRDPHQTEFAQAVREVMTTLWPFLEQNPRYRHMSLLERLVEPERVIQFRVVWLDDKNQVQVNRAWRVQFNSAIGPYKGGMRFHPSVNLSILKFLGFEQTFKNALTTLPMGGGKGGSDFDPKGKSEGEVMRFCQALMTELYRHLGPDTDVPAGDIGVGGREVGFMAGMMRKLSNNSSCVFTGKGLSFGGSLIRPEATGYGLVYFTEAMLKRHGLGFEGMRVAVSGSGNVAQYAIEKAMAFGARVVTASDSSGTVVDESGFTPEKLARLCEIKASRDGRVADYARDFGLTYLEGQQPWSVPVDIALPCATQNELDVDAARVLIANGVKAVAEGANMPTTIEATDLFLEAGVLFAPGKAANAGGVATSGLEMAQNAARLSWKAEKVDARLHHIMLDIHHACVEYGGDNKHTNYVQGANIAGFVKVADAMLAQGVI

SEQ ID NO: 25295 - protein, 411 aa, Glycine max
MNALAATNRNFRRAAHILGLDTKLENSLLIPFREIKVECTIPKDDGTLVSYVGFRIQHDNARGPMKGGIRYHPEVDPDEVNALAQLMTWKTAVADIPYGGAKGGIGCNPRDLSVSELERLTRVFTQKIHDLIGIQRDVPAPDMGTNSQTMAWILDEYSKFHGHSPAVVTGKPIDLGGSLGREAATGLGVIFATEALFAEYGKSISDMTFVIQGFGNVGTWAAKSIYERGGKVIAVSDISGAIRNPNGIDIPALLKHKEGNGNLKEFSGADIMDPDELLVHECDVLIPCALGGVLNKENAADVKAKFIIEAANHPTDPDADEILSKKGVIILPDIYANAGGVTVSYFEWVQNIQGFMWDEEKVNRELKKYMTKAFRNIKAMCQIHNCDLRMGAFSLGVNRVARATLLRGWEA

SEQ ID NO: 25296 - protein, 318 aa, Wolbachia pipientis
KSLCDKKIQLGINLTKGLGAGALPDIGKGAAEESIDEIMEHIRDSHMLFITAGMGGGTGTGAAPVIAKAAREARAVVKDKGAKEKKILTVGVVTKPFGFEGVRRMRAAELGLEELQKYVDTLIVIPNQNLFRIANEKTTFADAFQLADNVLHIGIRGVTDLMIMPGLINLDFADIETVMNEMGKAMIGTGEAEGEDRAISAAEAAISNPLLDNVSMKGAQGILINITGGGDMTPFEVDAAANRVREEVDENANIIFGATFDQAMEGRVRVSVLATGIDSCNDNSSVNKNKIPAEEKNFKWPYNQIPTLETKEYASTEQ

SEQ ID NO: 25297 - protein, 485 aa, Burkholderia xenovorans LB400
MSESATVFKNLIAGEWTESVSGKTFANINPADTRDVVGQFQASVVADAQAAIQAASSAFAQWRRTPVTARARIVNKAADWLESHADTFAQELTREEGKPLAQSRDEILRSAQVLRFYAVEAQSFTGETFPSDDPEQHVYTQREPLGVVTVITPWNFPISIPARKIAPALMAGNTVIFKPSSDAPLIGYRLAEAFAQAGIPAGVLNFITGRASDIGAAITESPVVRAISFTGSTAAGEHIHRSVPITTRTQMELGGKNPLIVMDDADLDRAVDLAVKGGLSLSGQACTGTSRILVMESVRETFTAKLVERVKSLKIGSGVTPGMDLGPLANRKQLESVLGYVASGKEQSTHLIGGEQLTGEGFEHGYYVTPAVFSDVPESARIYREEIFGPVLAITSVTGYDDAIAKANDTEYGLSAAIATSNPRYMHRFADEIEAGTVKINRTTTGNVINAPFGGLKRSSTSTFRESGRAGLEFYTQIKTVYRGL

SEQ ID NO: 25298 - protein, 456 aa, Triticum aestivum
MHTAYLKLLHSLCAAASPLLSPLTTLRRYSARRRGGSGGGISSSRMNALAATSRNFKQAAKLLGLDSKLEKSLLIPFREIKVECTIPKDDGTLASYVGFRVQHDNARGPMKGGIRYHHEVDPDEVNALAQLMTWKTAVANIPYGGAKGGIGCSPGDLSISELERLTRVFTQKIHDLIGIHTDVPAPDMGTNAQTMAWILDEYSKFHGYSPAVVTGKPVDLGGSLGRDAATGRGVLFATEALLAEHGKGIAGQRFVIQGFGNVGSWAAQLITEAGGKVIAISDVTGAVKNSNGIDIAKLMKHSAENRGIKGFDGGDAVDPTSLLTEECDVLIPAALGGVINKDNADAIKAKYIIEAANHPTDPEADEILAKKGVLILPDILANSGGVTVSYFEWVQNIQGFMWDEEKVNRELKTYMTRAFRDTKEMCRSHHCDLRMGAFTLGVNRVARATVLRGWEA

SEQ ID NO: 25299 - protein, 587 aa, Rhodopirellula baltica SH 1
MTLGLQSHAVKIEMIARFCGGDSNRSRFGLLGRIKSSSSVRITSMLHESSDNAAFPRLTEEELACLEDIGTVRQFSDGEQLFDLGEMDYSFFAIRSGAVSILDHSHGEPREVALHEANSFAGDVDLLTGRPAVISAVARGDCETIEVTACRIRRMLGEIPSLSDKLLDAFQLRRARLEASGFLGIRLAGSSHSKETMHLQEFFYKNKVPHTLFDTDTDAGKELLREWDVAENETPVLGCGKRVVRKPSLADVAECLGICRDIPDELYDVLIVGAGPAGLAAAVYGASEGLRTLVVDRMGPGGQAGQSSRIENYMGFPSGLTGADLANRGYLQALKFGAQFTAPVSVASIVRDDKGVHVVSFCTGQKVRTRTVLIATGASYQRLPLDACERYEGMGVYYSATSVEARLCRESTAVVVGGGNSAGQAAMFLSQHANDVRLLLRGNDLRKGMSSYLADRIEKQSNIEVMCHTEICEMAGDKHLERVEIRNNQTEERATLECPSAFIFVGAKPHTEWLPDSVALDDRGFVMTGPMIHHHDKLPEGRTPCELETTSPGVFACGDVRSGTTKRCAFAVGDGALAITCVHQYLQ

SEQ ID NO: 25300 - protein, 250 aa, Granulicatella adiacens
  misc_feature (86)..(86): Xaa can be any naturally occurring amino acid
GAILVVSAADGPMPQTREHILLSRQVGVPYIVVFLNKVDMVDDEELLELVEMEVRDLLSEYDFPGDDTPVVAGSALRALEGDASYXEKILELMAAVDEYIPTPERDVDKPFMMPVEDVFSITGRGTVATGRVERGQVRVGDEVEIVGISEETSKTTVTGVEMFRKLLDYAEAGDNIGTLLRGVTRDNIERGQVLAKPGTITPHTKFKAEVYVLTKEEGGRHTPFFSNYRPQFYFRTTDITGVCVLPEGVE

SEQ ID NO: 25301 - protein, 336 aa, Mycobacterium avium subsp. paratuberculosis K-10
MADQEMTMREALNLALDQALAADERVFLLGEDIADPGASGPTAGLSTKYGRDRVLDTPISEAAIVGAAIGAAIDGLLPVAEIMIMDFIGIAADQLINNAAKLRFMTAGRTSAPLTVRTQVYAGLSTGATHSQSLEAWFMHIPGLKVIVPATPRDGKGLLSSAIFDPDPCLFIETIRLQGKKGLVPVDPGFRIPLGQADIKRPGTDVSLIGYGRPVHDALAAAAMLGDQGVSAEVVDLRTLVPLDVDTVVASVRRTRRAVIVHDAVQFAGPGAEVAAILHSRLFSELAAPVERVAARFVPNPAAAALEAQVYPSPERIAVAALKTLGRTLTGATAHG

SEQ ID NO: 25302 - protein, 346 aa, Cyanidioschyzon merolae strain 10D
MQTQPIFPFTAIVGQEEMKLALLLNVIDPKIGGVMIMGDRGTGKTTTIRALIDILPSIPVVKGDLFNSHPSDPELMSTDVQKKIANQEPLVIEYIKVPMVDLPLGATEDRLCGTIDMEKALVEGVKSFEPGLLAKAHRGLLYVDEVNLLDDHLVDILLDAAASGWNTVEREGISIRHPARFVLIGSGNPEEGELRPQLLDRFGLHTSISTVKDAKLRVKIVEERSAFDRDPEKYLQRWQEAQEKLSNQIVHAQQLLPHVTISESYKVLISQICAELDIDGLRGDIVTNRAACAHAALRNCKQVEIQDIEKVIVMSLRHRLRKDPLSTMDSGERIQQMWQSAISDMP

SEQ ID NO: 25303 - protein, 366 aa, Arabidopsis thaliana
MALSAIGFEGYEKRLEVTFFEPSIFQDSKGLGLRALTKSQLDEILTPAACTIVSSLSNDQLDSYVLSESSFFVYPYKVIIKTCGTTKLLLSIPPLLKLAGELSLSVKSVKYTRGSFLCPGGQPFPHRSFSEEVSVLDGHFTQLGLNSVAYLMGNDDETKKWHVYAASAQDSSNCNNNVYTLEMCMTGLDREKAAVFYKDEADKTGSMTDNSGIRKILPKSEICDFEFEPCGYSMNSIEGDAISTIHVTPEDGFSYASFEAVGYDFNPLDLSQLVTRVLSCFEPKQFSVAVHSSVGANSYKPEITVDLEDYGCRERTFESLGEESGTVMYQTFEKLGKYCGSPRSTLKCEWSSNNSCSSEDEKDEGI

SEQ ID NO: 25304 - protein, 250 aa, Abiotrophia defectiva
  misc_feature (203)..(203): Xaa can be any naturally occurring amino acid
GAILVVSAADGPMPQTREHILLSRQVGVPYIVVFLNKVDMVDDEELLELVEMEVRDLLSEYDFPGDDTPVIAGSALKALEGDANYEAKVLELMEQVDAYIPEPERDTDKPFMMPVEDVFSITGRGTVATGRVERGQVRVGDEVEIVGIEEETSKTTVTGVEMFRKLLDYAEAGDNVGTLLRGVTRDQIQRGQVLSKPGSITPXTKFEAEVYVLSKEEGGRHTPFFSNYRPQFYFRTTDVTGVVTLPEGTE

SEQ ID NO: 25305 - protein, 454 aa, Streptococcus pneumoniae R6
MVEIKNLSLDYGEEHILDDISLSIAEGECVLFTGKSGNGKSSLINSINGLAVRYDNAKTKGEIIIDGKNIKNLELYQISMLVSTVFQNPKTYFFNVNTTLELLFYLENIGLAREEMDRRLKDMLKIFPIKNLLNRNIFNLSGGEKQILCIAASYIAGTKIIVMDEPSSNLDIKSISVLAKMLKILKEKGISIIVAEHRIYYLMDIVDRVFLIDKGKLKKTYTRSEFLKLDKNELNALSLRDKELSKLKVPYLKEGGEYQIKNLSYKFTDDECLSLKDISFKLGKIYGIIGSNGRGKSTLLRCLIGLEKKSKEEIYFKGEKLSKKERLKNSSLVMQDVNHQLFTDEVFNELRLGVKNFDEEKAKIILKDLGLDEFIERHPMSLSGGQKQRLAIASVMCKNSPFIFFDEPSSGMDYSNMIKISELINKYKTMDKIIFIVSHDIEFLNEVADEIFEL

SEQ ID NO: 25306 - protein, 194 aa, Arabidopsis thaliana
MGIFFSKAEPPPPMVLVPPLFDYPPIAARTRMAVPAYELMFGKVSLQNLFEDYFDQAGNMTSRIMLKPLEDPHVDLIATVSAAADRNSGTEVKGDALFRWQRELDDPHTFVDLLVSTSNPLLQLRLCAYHPKYRIGAFGTLPLLMGNRVHSEDYGVMGVRYGSENLSVGASFVPISLSSEVPFGAWLVGRKGSL

SEQ ID NO: 25307 - protein, 322 aa, Methylococcus capsulatus
MRGSSFPGFPSTVASHTLRIATRKSPLALWQAEYVASRLRAAHPDLRVELVGMTTRGDKLLDAPLAKVGGKGLFVKELEQGLLEGRADIAVHSMKDVPVEFPEGLHLAAILEREDPRDALVSHRYRSFAELPADARIGTSSLRRQCQIKCRLPGCSLYDLRGNVNTRLAKLDAGEFDAIVLASAGLKRLGFQERIAETLTPEQCLPAIGQGAIGVECRSTDTRTNALLVPLHHPPTAWCVLAERAMNRRLDGGCQVPIAGFAQLEGDTLSLRGLVGNPDGSGIIRAEAVGHPSTFEALGKRVAEHLLDQGADEILRRVYATP

SEQ ID NO: 25308 - protein, 250 aa, Photorhabdus luminescens subsp. laumondii TTO1
MAVTKLVLVRHGESEWNRENRFTGWTDVALSEKGRAEAQQAGQLLKEEGFVFDFAYTSVLKRAIHTLWNILDQVDQQWLPVEKSWKLNERHYGALQGLDKAETAAKYGDDQVKLWRRGFAITPPDLTKDDERFPGHDPRYANLKPEELPVTESLATTIERVIPYWEEVIKPRVAQGEKVIIAAHGNSLRALVKYLDNMSEETILELNIPTAVPLVYEFDENMKPIKHYYLGNADEIAAKAAAVANQGKAK

SEQ ID NO: 25309 - protein, 146 aa, Arabidopsis thaliana
  misc_feature (15)..(15): Xaa can be any naturally occurring amino acid
  misc_feature (27)..(27): Xaa can be any naturally occurring amino acid
  misc_feature (64)..(64): Xaa can be any naturally occurring amino acid
  misc_feature (102)..(102): Xaa can be any naturally occurring amino acid
  misc_feature (115)..(115): Xaa can be any naturally occurring amino acid
  misc_feature (129)..(129): Xaa can be any naturally occurring amino acid
MAASMLSCAVEVTSXDEAPMVAPFTGXKIFAAYPVPRMTNQDITSIARNGGRVSCMKVWPTHRXKKFETVSYIADLRDVELTKDVDYLVRNKWIPCVEHESXHCSAYCEHGNTQXYYDGLDWTMWKLAXTGCTCSAQVLKEAEECT

SEQ ID NO: 25310 - protein, 743 aa, Haemophilus influenzae
MVAVRGSHLLNPQDFVIEQWCTGLKLAEQTEKSLIDAWYYARDLMNAYPDEMKNATLMLQSGVEMVEILHELNMDAETLLTAMLFPIVANKLTDWESLKEKFGAKITKLLKGVLEMDNIRQLNASHSANALQVDNVRRMLLAMVDDFRCVIIKLAERITFLRDAEHRCAEEDKVLAVKECSYIYAPLANRLGIGQLKWELEDYCFRYLHPEQYRAIAKLLQERRLDREHYIADFVSELSGYLRENIEQVEVYGRPKHIYSIWRKMQKKHLEFSGLYDVRAVRIIVQKLQDCYTALGIVHTQFKHLPKEFDDYVANPKPNGYQSIHTVVLGKGGKPIEVQIRTQQMHDDAELGMAAHWKYKEGNTGSMSAYEEKIAWLRKLLAWQDDITDSGEVLAELRSQVFDDRVYVFTPKGEVVDLPTGSTPLDFAYAIHSEIGHRCIGAKVAGRIVPFTYQLQMGDQIDIITQKNPNPSRDWLNPNLGFTHTAKSRAKIQAWFKKQDRDKNIPAGKELLDNELALLNLSIKQVEPYALPRYNLKNLDDLYAGIGSGDIRLNNLIHFLQSKLIKVTAEEADQEILRHVANKSAVNSQQKSEKNNGCVIVEGVDNLMHHIARCCQPIPGDAIVGYITMGRGISIHRADCEQFLDLQAAHPERVVESIWGENYASGFHINIRIVAGDRNGLLRDITTVLANEKISVLGVSSRADTKKQLATIDMEIELHNVESLSKILARLAKLDDVIEAKRL

SEQ ID NO: 25311 - protein, 648 aa, Zea mays
MIHPLVLSLPSPAIISRPRRHRHHTTTPSLPSHSRSLHHYRLLRVTPLVASCGDRRRIVRGASATMGLFTVTKKATTPFEGQKPGTSGLRKKVTVFQQPHYLQNFVQSTFNALPADQVKGATIVVSGDGRYFSKDAVQIITKMAAANGVRRVWVGQNSLMSTPAVSAVIRERIGADGSKATGAFILTASHNPGGPTEDFGIKYNMGNGGPAPESVTDKIFSNTTTISEYLISEDLPDVDISVVGVTSFSGPEGPFDVDVFDSSVNYIKLMKTIFDFEAIKKLLTSPKFTFCYDALHGVAGAYAKHIFVEELGADESSLLNCVPKEDFGGGHPDPNLTYAKELVERMGLGKSSSNVEPPEFGAAADGDADRNMILGKRFFVTPSDSVAIIAANAVQSIPYFASGLKGVARSMPTSAALDVVAKNLNLKFFEVPTGWKFFGNLMDAGMCSICGEESFGTGSDHIREKDGIWAVLAWLSIIAFKNKDNLGGDKLVTVEDIVRQHWATYGRHYYTRYDYENVDAGAAKELMANLVSMQSSLSDVNKLIKEIRSDVSEVVAADEFEYKDPVDGSVSKHQGIRYLFGDGSRLVFRLSGTGSVGATIRVYIEQYEKDSSKTGRDSQEALAPLVDVALKLSKMQEYTGRSAPTVIT

SEQ ID NO: 25312 - protein, 402 aa, Arabidopsis thaliana
MSSIGGEASFFDAVAAQIIPKAVTTSTPVRGETVAKLKVAINGFGRIGRNFLRCWHGRKDSPLEVVVLNDSGGVKNASHLLKYDSMLGTFKAEVKIVDNETISVDGKLIKVVSNRDPLKLPWAELGIDIVIEGTGVFVDGPGAGKHIQAGASKVIITAPAKGADIPTYVMGVNEQDYGHDVANIISNASCTTNCLAPFAKVLDEEFGIVKGTMTTTHSYTGDQRLLDASHRDLRRARAAALNIVPTSTGAAKAVSLVLPQLKGKLNGIALRVPTPNVSVVDLVINVEKKGLTAEDVNEAFRKAANGPMKGILDVCDAPLVSVDFRCSDVSTTIDSSLTMVMGDDMVKVVAWYDNEWGYSQRVVDLAHLVASKWPGAEAVGSGDPLEDFCKTNPADEECKVYD

SEQ ID NO: 25313 - protein, 444 aa, Bacteroides fragilis YCH46
MNAAKVLEDLKRRFPNEPEYHQAVEEVLSTIEEEYNKHPEFDKANLIERLCIPDRVYQFRVTWVDDKGNVQTNMGYRVQHNNAIGPYKGGIRFHASVNLGILKFLAFEQTFKNSLTTLPMGGGKGGSDFSPRGKSNAEVMRFTQAFMLELWRHIGPETDVPAGDIGVGGREVGFMFGMYKKLSHEFTGTFTGKGREFGGSLIRPEATGYGNIYFLMEMLKTKGTDLKGKVCLISGSGNVAQYTAEKVLELGGKVVTMSDSDGYIYDPDGIDRAKLDYIMELKNLYRGRIREYAETYGCKYVEGARPWGEKGDIALPSATQNELNGDDARKLVANGVIAVSEGANMPSTPEAIKVFQDAKILYAPGKAANAGGVSVSGLEMTQNSIKLSWSSEEVDEKLKSIMKNIHEACVQYGTEPDGYVNYVKGANVAGFMKVAKAMMAQGIV

SEQ ID NO: 25314 - protein, 183 aa, Xanthomonas axonopodis pv. citri str. 306
MSQTLYDIPVTRIDGQPTTLADYRGKVLLVVNVASKCGLTPQYEGLEALYRDKRAQGLEVLAFPANDFNGQEPGSEAEIAQFCQLTYDVTFPMFAKIAVAGDQAHPLYGALTSTHPHTTGEGPMREKLAGYGIAPNPAPGVVWNFEKFLIGRDGKIIDRFAPDIPADDARLRAAIDAALATRS

SEQ ID NO: 25315 - protein, 140 aa, Zea mays
  misc_feature (126)..(126): Xaa can be any naturally occurring amino acid
LAPLTAITRPAISLKEKSAAMKTTSSGIAVVLLVAMLAVHSALADISCSDVLNDLSPCLPFLQGKAAKPSESNNQCCDGVRALYAAADTRPDRQATCRCLKAAYVQVHAVLSAAQELPGDCGPLAXPTTSPPDIDCDKIE

SEQ ID NO: 25316 - protein, 118 aa, Brassica napus
MAGLMKLACLVLACMIVAGPITSNAALSCGTVSGYVAPCIGYLAQGAPALPRACCSGVTSLNNLARTTPDRQQACRCLVGAANAFPTLNAARAAGLPKACGVNIPYKISKTTNCNSVK

SEQ ID NO: 25317 - protein, 408 aa, Guillardia theta
MARDKFERSKPHVNIGTIGHVDHGKTTLTAAISATLSQYTGKSKKFDEIDSAPEERARGITINTAHVEYETDKWYYAHVDCPGHADYVKNMITGAAQMDGAILVCSAANGPMPQTREHILLAKQVGVPYIVVFLNKADMVDDEELLELVQLEVQELLEKYDFPGSEIPFVAGSALLALEAVANNPTIKRGEDKWVDTIYQLMDKVDEYIPTPERETDKAFLMAVEDVFSITGRGTVATGRIERGKVKVGDTIEIVGLRETRNTTITGLEMFQKSLDEALAGDNVGILVRGIQKTDIERGMVLAAPGSITPHTKFEGEVYVLTKEEGGRHTPFFSGYRPQFYVRTTDVTGTIAQFTSDDGSTAEMVMPGDRIKMTAQLIHPIAIEKGMRFAIREGGRTVGAGVVSKIIE

SEQ ID NO: 25318 - protein, 464 aa, Arabidopsis thaliana
MESGSMKTPLVNNQEEARSSSSITCGLLLSTSVAVTGSFVYGCAMSYSSPAQSKIMEELGLSVADYSFFTSVMTLGGMITAAFSGKIAAVIGRRQTMWIADVFCIFGWLAVAFAHDKMLLNIGRGFLGFGVGLISYVVPVYIAEITPKAFRGGFSFSNQLLQSFGISLMFFTGNFFHWRTLALLSAIPCGIQMICLFFIPESPRWLAMYGRERELEVTLKRLRGENGDILEEAAEIRETVETSRRESRSGLKDLFNMKNAHPLIIGLGLMLLQQFCGSSAISAYAARIFDTAGFPSDIGTSILAVILVPQSIIVMFAVDRCGRRPLLMSSSIGLCICSFLIGLSYYLQNHGDFQEFCSPILIVGLVGYVLSFGIGLGGLPWVIMSEVFPVNVKITAGSLVTVSNWFFSWIIIFSFNFMMQWSAFGTYFIFAGVSLMSFVFVWTLVPETKGRTLEDIQQSLGQLS

SEQ ID NO: 25319 - protein, 683 aa, Chlamydomonas reinhardtii
MKALRSGTAVARGQAGCVSPAPRPVPMSSQAMIPSTSSPAARAPARSGRRALAVSAKLADGSRRMQSEEVRRAKEVAQAALAKDSPADWVDRYGSEPRKGADILVQALEREGVDSVFAYPGGASMEIHQALTRSDRITNVLCRHEQGEIFAAEGYAKAAGRVGVCIATSGPGATNLVTGLADAMMDSIPLVAITGQVPRRMIGTDAFQETPIVEVTRAITKHNYLVLDIKDLPRVIKEAFYLARTGRPGPVLVDVPKDIQQQLAVPDWEAPMSITGYISRLPPPVEESQVLPVLRALQGAAKPVIYYGGGCLDAQAELREFAARTGIPLASTFMGLGVVPSTDPNHLQMLGMHGTVFANYAVDQADLLVALGVRFDDRVTGKLDAFAARARIVHIDIDAAEISKNKTAHVPVCGDVKQALSHLNRLLAAEPLPADKWAGWRAELAAKRAEFPMRYPQRDDAIVPQHAIQVLGEETQGEAIITTGVGQHQMWAAQWYPYKETRRWISSGGLGSMGFGLPAALGAAVAFDGKNGRPKKTVVDIDGDGSFLMNVQELATIFIEKLDVKVMLLNNQHLGMVVQWEDRFYKANRAHTYLGKRESEWHATQDEEDIYPNFVNMAQAFGVPSRRVIVKEQLRGAIRTMLDTPGPYLLEVMVPHIEHVLPMIPGGASFKDIITEGDGTVKY

SEQ ID NO: 25320 - protein, 497 aa, Mesorhizobium loti MAFF303099
MSAHFARSHRHEALDRLADRRLLRELAYVDGHWTASEAAESFEVTDPATGSTVAFVAALDARQTTQAIDAAALAFPAWRSLLPQERSRILRKWFELIITAKDDLALLMTLEQGKPLQESLGEIDYAASFVEWYAEEAKRLNAESVTSHLANAEMMVRREPLGVVGIVTPWNFPSAMLTRKAAAALAAGCTIVAHPSSETPLSALALAELGERAGLPAGVFNIVTGKAATIVGRMCEDTRVRAMSFTGSTEIGRLIAAQSAPTMKRLVMELGGHAPLIVFADADLDKAVSIAIDAKFATSGQDCLAANRIYVQRPIHDRFCAAFAKRIEALRTGNGLDDMTDIGPLLHERAVQKVEEQVADALAHGARCLAGGKRHQAGPLFYQPTLLADVSDAALIMREETFGPVAAVTPFDSEDEVIARANATEYGLVAYVVTDNGARQQRMGRALDYGMVAINRVKITGAPIPFGGVKQSGIGREGSRHGLEAFTDLKYLCLDVA

SEQ ID NO: 25321 - protein, 515 aa, Glycine max
MAGTEAKKTESKKPAAKQSGAKKKEVKKETGLGLTHRKAENFGEWYSEVVVNAEMIEYYDISGCYILRPWSMAIWEIMQEFFDPEIKKMKIKNCYFPLFVSPGVLQKEKDHVEGFAPEVAWVTKSGESELEIPIAIRPTSETVMYPYYSKWIRGHRDLPLKLNQWCNVVRWEFSNPTPFIRSREFLWQEGHTAFATKDEADAEVLEILELYRRIYEEYLAVPVIKGKKSELEKFAGGLYTTSVEAFIPNTGRGIQGATSHCLGQNFAKMFEINFENEKGEKAMVWQNSWAYSTRTIGVMVMVHGDDKGLVLPPKVASVQVIVIPVPYKDADTQGIFDACSATVNTLNEAGIRAESDSRDNYSPGWKYSNWEMKGVPLRIEIGPKDLANKQVRAVRRDNGAKIDIASADLVVEIKKLLDTIQQNLFDVAKQKRDECIQIIHTWDEFVQALNQRKMILAPWCDEEEVEADVKARTKGEMGAAKTLCSPFDQPELPEGTKCFASGKPATKWTYWGRSY

SEQ ID NO: 25322 - protein, 471 aa, Xanthomonas axonopodis pv. citri str. 306
MSSWLRRKSIDQVTVHEAGRQLVRSLSWPHLIALGIGAIVGTGIYTLIGVGADKAGPAVLLSFVAAGIVCACAALAYAEMATMMPAAGSAYTYSYTALGESIAWVVGWSLVLEYSLVVSTVAVGWSGYFVGFLQWLGVGLPQALIAGPHAGGIVNLPAVAITFLVAGLLMAGTKESATLNAVLVVLKIIALGVFVAIALPAFNSANLQPFMPYGFSKAMGPDGIERGVMAAAAIIFFAFYGFDAISTAAEETKNPGRDLSIGIVGSMIGCTLIYVLVALAAVGAMSFTVFGKSPEPLALILRELGHGKAALVIGAVAIIALPTVLLAFLYGQSRIFFVMSRDGLLPRGLSKVNARTGTPVAITLFTAVLVAALAGVARLDEIAALANAGTLAAFTAVAACLLVLRVREPGRARAFRTPLAWVVGPVAIGGCLYLFWSLPSKTQGWFLLWNALGVVVYLAYGRRNSRLNQAG

SEQ ID NO: 25323 - protein, 715 aa, Nostoc sp. PCC 7120
MSELWTYFFNSTPFIPHGHCYLWQTDLVWLHIISDGLIALAYYSIPATLFYFVRKRQDLPFYWIFLLFSGFIVACGTTHIMEVWTLWYPTYWVSGFLKAITAIISVFTALTLIPLVPKALLLPSSAQLERANKDLQNEIGERLKVEAELRKYQNHLEELVTIRTNEITNANEKLQQQINERQHIVEILRESEERYRYLAEAIPQLVWTADANGECDYFNQNWCDYTGLNLEESLGSGWLAALHLEDLERSYETWSKAVETGALYENEYRFKRAADGSYRWLLGRGLPLKDHQGRVVKWFGTCTDIHEQKQILEERARLLELEQTARAEAETANRIKDEFLAVLSHELRTPLNAILGWSKLLQERKLDPTRTFQALATIERNATLQVQLIEDLLDISRILQGKLVINITKVNLVTVILAALETMRLAAESKLIQVLTNFPPNIGQVMGDSARLQQVVWNLLSNAVKFTPNGGKIEVTLDKMEGYAQIVVSDTGKGIQPEFLPYVFDYFRQADSSSTRRFGGLGLGLAIVRKIVEIHGGTVTAQSLGEEQGASFTVRLPILPEEDGSVTYQQHRSASLVTNSLPLEGIKVLVVDDDADSRDFLAFILEQEGADVSLATSALEVLQLLPEIKPDVLVSDISMPDMDGYTLIRQMRTWTAEQGGAIPAIALTAFARQYDREQALQAGFQLHLPKPLNAEEFIAAVVELVKSQHSIVSFH

SEQ ID NO: 25324 - protein, 509 aa, Pseudomonas fluorescens PfO-1
MTLHRVARFADVPEDRGLEVKIGDCKIVLLRVAGQLRAFQGQCPHAGAPLAEGALCHGRLICPWHKAAFRAEDGALCEPPALDSLKRYPLELRGDEVWVDDQPLPDPHTPPQDDPRTFVIVGAGAGGTACAAALREKGFGGRIVLIDREPDAGYDRTVLSKFVLSGEMPAAETPPLRDEDFYREQHINRVSGEVSGLDADTKTLHLSDGRTLNYSAAVLATGATPNALELPGVDLPQVFVLRSKAQAQYIMDAAQSGQRAVIIGDSFIALECASALRQHGLEVTVLARHAIPFAVQFGEAVGKAIRALHEENGVKFITDHEAREITGDGKVEAVLLDNGLRLSADLVLAGIGVHPATEAFGDLPREDDQSLLVDASLRVTESLWAIGDIATFPLNGKPQRIEHWRLAQQHARIAAANLLGGEEHYLDVPYFWTWHFGRNYDYLGHAEGWDAVEFIGKPEQPPFIGLFGSKGVVVAAVACEEERAMALLAERMKQPLPMDEAWRLIRAVR

SEQ ID NO: 25325 - protein, 229 aa, Wolbachia pipientis
LEELQKYVDTLIVIPNQNLFRIANEKTTFAGAFQLADNVLHIGIRGVTDLMIMPGLINLDFADIETVMSEMGKAMIGTGEAEGEDRAISAAEAAISNPLLDNVSMKGAQGILINITGGGDMTLFEVDAAANRVREEVDENANIIFGATFDQAMEGRVRVSVLATGIDSCNDNSSVNKNKIPAEEKNFKWPYNQIPTLETKEYASTEQTNERVKWGSNVYDIPAYLRRKK

SEQ ID NO: 25326 - protein, 390 aa, Oceanospirillum sp. MED92
MFEMLDSVPQNAVIKVIGVGGGGGNAVKHMECGDLEGVEFVCANTDAQALSSMSSQTVIQLGNTLTKGLGAGANPEVGRQAAMEDRERISEMLSGTDMVFITAGMGGGTGTGAAPIVAEVAKEMGILTVAVVTKPFPFEGRKRMSIALEGIKELRECVDSLIIIPNEKLMQVLGRNCSLLNAFQSANDVLKGAVQGISDLITRPGMINVDFADVRTVMSEMGMAMMGTGHAKGENRAAEAAEKAIKSPLLDNVDLRGASGILVNITAGMDLSLGEFTEVGNQVEEYASENATIVVGTVIEPEMSDEIKVTVVATGLDKPQETVRPVTDSVKKIDGSLDLEQIDLPTVLRRKKNEALDGPAQIQDEVLQQTGTEGEGAYLDIPTFLRKQAD

SEQ ID NO: 25327 - protein, 237 aa, Prochlorococcus marinus subsp. marinus str. CCMP1375
MQVEGLQKLKESEKAEVATYFNGTGFERWNRIYSKSDEVNKVQKNIRIGHQKTVDDVLTWIKEIGEISDMSFCDAGCGVGSLCLPLVALGAGSVSASDISEAMVEETQRRAKIGGLDLNRLNFKISDLESLNGSFDTVICLDVFIHYPQKAAEEMVHHLCGLSKKSLIVSFAPYTPLLALLKTIGQFFPGPSKTTRAYILREKGIINAARACGFEVKRRKLNQAPFYFSQLIEFVKK

SEQ ID NO: 25328 - protein, 377 aa, Aspergillus nidulans FGSC A4
MVAETKLYDALGIKPDASQEDIKKAYRKAALKYHPDKNKDDAKAAEKFKEVSQAYEVLSDPEKRKVYDQFGLEYLLRGGPAPTPGGGGPNPFEGGGMPGGFSFGGMPGGGTRTFHFSTGPGGSGGFQFSSADDIFRNFTKASGGMGGFDDDDIFSMLGGGLGGGARSGGPRFRSSRGASASGNGAGAGFQRQSQRAPTPEPTVVEKQLPLTLEEIMSGCKKTVTVKSKTFDASGKRTVQDVTLEATIKPGLRTGSKIKYRGVGDQEEGGRQDVHLIVTEKEHPNFKRHGDNLITTVDLSLKEALTGWTRIVRTIDGKSLRVSKPGPTPPGYEEKFPGLGMTISKKPSERGDLIVRVNVEFPKTLSSSAKEVLRDILP

SEQ ID NO: 25329 - protein, 317 aa, Wolbachia pipientis
SLCDKKIQLGINLTKGLGAGALPDIGKGAAEESIDEIMEHIRDSHMLFITAGMGGGTGTGAAPVIAKAAREARAVVKDKGAKEKKILTVGVVTKPFGFEGVRRMRTAELGLEELQKYVDTLIVIHNQNLFRIANEKTTFADAFQLADNVLHIGIRRVTDLMIMPGLINLDFADIETVMSEMGKAMIGTGEAEGEDRAISAAEAAISNPLLDNVSMKGAQGILINITGGGDMTLFEVDAAANRVREEVDENANIIFGATFDQAMEGRVRVSVLATGIDSCNDNSSVNKNKIPAEEKNFKWPYNQIPTLETKEYVSTEQ

SEQ ID NO: 25330 - protein, 655 aa, Arabidopsis thaliana
MSYSFIWMLFVIHISCVLSADGNHILCSPSFTCGNQRGLLYPFWIAGRKECGHPDFELDCNAGVPELSISSVKFRILGADYDSGIITLARSDNIDDPCLPNSFTTSFNETVLPLASTTDLLTIYYDCNRNVSSFVSTFVKELDCPDDGTDDRRNYYLTRNLTFLPPSLKLEGNSFLLNDFGGSCSRNVSNPASRTALNTLESTPSTDNLKIALEDGFALEVNSDCRTCIDSKGACGFSQTSSRFVCYYRQEPQNPTRNKVILKLFFIVIYVLGIGAASFAMMGVILVVTCLNCLIRRQRKTLNDPRMRTSDDSRQQNLKALIPLKHYSYAQVTSITKSFAEVIGKGGFGTVYRGTLYDGRSVAVKVLKESQGNGEDFINEVASMSQTSHVNIVTLLGFCSEGYKRAIIYEFMENGSLDKFISSKKSSTMDWRELYGIALGVARGLEYLHHGCRTRIVHFDIKPQNVLLDDNLSPKVSDFGLAKLCERKESILSLMDTRGTIGYIAPEVFSRVYGRVSHKSDVYSYGMLVLDIIGARNKTSTEDTTSSTSSMYFPEWIYRDLEKAHNGKSIETAISNEEDEIAKKMTLVGLWCIQPWPLDRPAMNRVVEMMEGNLDALEVPPRPVLQQIPTATLQESSTFSEDISAYTEICSINVA

SEQ ID NO: 25331 - protein, 452 aa, Chlorobium tepidum TLS
MNKQVDVLVIGGSAAGIVAATTGKAFYASKSFLIVRKEPEAVVPCGIPYIFGTLDGVHQNIVPTAPLANADVELLIDEVVSIDREAKSATTAGGVVISWDKLVLATGSEPKTPDWLEGRDLDGVFVIPKNRDYLCRLRSRLEEPRRVAIIGGGFIGVELADELAKKGHDVTLVEILPHVLSMAFDSDLSLKAEELLVKRGVKLKTGEKLKKLAGQASVSKVILESGEEIEVDIVILATGYAPNVELARSAGIKINELGAIRVDEYMRTEDKNIFAVGDCAEKFSFITRIVKGLMLASTACSEARIAGMNLFGLSRLRTFSGTIAIFSTAIGGTTFAAAGVTEQLARERGFEVVSAGFTGIDKHPGTLPETSNQYVKLIVNSENGLVLGGAVMGGQSAGELINVIGVIIETKMTVNELLTLQFGTHPLLTGPPTAYALIKAAEAVEMKLRHFK

SEQ ID NO: 25332 - protein, 318 aa, Wolbachia pipientis
KSLCDKKIQLGINLTKGLGAGALPDIGKGAAEESIDEIMEHIRDSHMLFITAGMGDGTGTGAAPVIAKAAREARAVVKDKGAKEKKILTVGVVTKPFGFEGVRRMRTAELGLEELQKYVDTLIVIPNQNLFRIANEKTTFADAFQLADNVLHIGIRGVTDLMIMPGLINLDFADIETVMSEMGKAMIGTGEAEGEDRAISAAEAAISNPLLDNVSMKGAQGILINITGGGDMTLFEVDAAANRVREEVDENANIIFGATFDQAMEGRVRVSVLATGIDSCNDNSSVNKNKIPAEEKNFKWPYNQIPTLKTKEYASTEQ

SEQ ID NO: 25333 - protein, 480 aa, Pseudomonas fluorescens PfO-1
MQLKDTQLFRQQAFIDGAWVDADNGQTIKVNNPATGEILGTVPKMGAAETRRAIEAADKALPAWRALTAKERAGKLRRWFELMIENQDDLARLMTLEQGKPLAEAKGEIVYAASFIEWFAEEAKRIYGDVIPGHQPDKRLIVIKQPIGVTAAITPWNFPAAMITRKAGPALAAGCTMVLKPASQTPFSAFALAELAQRAGIPKGVFSVVSGSAGDIGSELTSNPIVRKLSFTGSTEIGRQLMSECAKDIKKVSLELGGNAPFIVFDDADLDKAVEGAIISKYRNNGQTCVCANRLYIQDSVYDAFAEKLKVAVAKLKIGNGLEEGTTTGPLIDEKAVAKVQEHIADAVSKGATVLAGGKPMEGNFFEPTILTNVPKDAAVAKEETFGPLAPLFRFKDEADVIAMSNDTEFGLASYFYARDLGRVFRVAEALEYGMVGVNTGLISNEVAPFGGIKASGLGREGSKYGIEDYLEIKYLCLGI

SEQ ID NO: 25334 - protein, 876 aa, Arabidopsis thaliana
MSYMPTSCLVLFFLLFLFHPLPWALSKEDLGWCEALFQCGNNTAGFPFWGGNRAKPCGHPLLELRCLNNITSLNISNHEYNVFHIDQTSNTLRLARTDLLGSFCSAEFNTPTFPREIFKLFPTYKSLTVLYNCDPKLSYRSSYTCPDLGLFSMSQSLDYQNSCQDSFKVNVPTSFVPEEKEMNLTHLESALRKGFEVKLVIDEIPCQECSSSRGICGFNSTTQICCNVTSLSGGVTCVPQHQPSADELRRRCSERFSCGNQRNLYYPFWIPGREYCGHPDFKLDCSGGFAELNIASVNFRILNMSYDSSNKRLARSDYLNDLCPPNPLNDEPLIETVLQFSADTELLTLYYDCQLNSSATSPFPSSYFGELGCDEGRSYYVTRNLSSPLLDRFRGVLNNLREMCKRKVSVPASGPALNTLQTNPNSNNLKMALEHGFELQDNSNCSMCVLSGGSCGYNQNSSLFVCYCKDGPQDNQCDINLDVAIIIGIFVALCTIGGFIAFLVLLCPCCKVRIFRNRKTSDDRRQEKLKALIPLKHYTYAQVKRMTKSFAEVVGRGGFGIVYRGTLCDGRMVAVKVLKESKGNNSEDFINEVSSMSQTSHVNIVSLLGFCSEGSRRAIIYEFLENGSLDKFISEKTSVILDLTALYGIALGVARGLEYLHYGCKTRIVHFDIKPQNVLLDDNLSPKVSDFGLAKLCEKKESVMSLMDTRGTIGYIAPEMISRVYGSVSHKSDVYSYGMLVFEMIGARKKERFGQNSANGSSMYFPEWIYKDLEKADNGDLEHIEIGISSEEEEIAKKMTLVGLWCIQSSPSDRPPMNKVVEMMEGSLDALEVPPRPVLQQIHVGPLLESSWITEESSSISEIENRNLQVCEKILS

SEQ ID NO: 25335 - protein, 229 aa, Wolbachia pipientis
LEELQKYVDTLIVIPNQNLFRIANEKTTFADAFQLADNVLHIGIRGVTDLMIMPGLINLDFADIETVMSEMGKAMIGTGEAEGEDRAISAAEAAISNPLLDNVSMKGAQGILINITGGGDMTLSEVDAAANRVREEVDENANIIFGATLDQAMEGRVRVSVLATGIDSCNDNSSVNKNKIPAEEKNFKWPYNQIPTLETKEYASTEQTNERVKWGSNVYDIPAYLRREK

SEQ ID NO: 25336 - protein, 412 aa, Legionella pneumophila str. Lens
MNSRRVVITGMGMLTPVGLNVEETWRSILAGVSGVGLVEDFDTTEYPTKIWAKVKNFNVENHMPIKDARKMDVFTQYGMAAADEAMLDSGLKIDEALSRRIGVAVGAGIGGIQTITNNQDKLVAGGPRKVSPFFIPAGIINMVAGQISIKHNLKGPNISVVTACTTGTHNIGLAGRIIAYGDADVMICGGAEMTTTPLCLAGFSAVRSLSKRNDEPEKASRPWDKDRDGFVMGEGAGILVLEEYEHAKARGAKIYAELVGFGMSGDAYHITAPDEDADGASRAMEAAIQDAGIDPRQVDYINAHGTSTYLNDLNETKAIKRVFENHAYDLAVSSTKSMTGHLLGAAGAVEAIISILAIRDQVAPPTINLDNPDEGCDLNYVAHVPQSRTINYVLSNSLGFGGTNGSLLFKRI

SEQ ID NO: 25337 - protein, 68 aa, Arabidopsis thaliana
AVVVTSPAQATFFAPFTALKAAVLLPGAAKTNKDITSIASNGGRVSCIKLWPPIGKIYFETLSYLPDL

SEQ ID NO: 25338 - protein, 160 aa, Citrullus lanatus
IIAKGHYTERAAASLLRTIVQIVHTCHSMGVIHRDLKPENFLLLSKDEDSPLKATDFGLSVFYKQGEVFKDIVGSAYYIAPEVLKRRYGPEVDIWSVGVMLYILLCGVPPFWAESEHGIFNAILRGHIDFTSDPWPTISPAAKDLVRKMLNSDPKQRLTA

SEQ ID NO: 25339 - protein, 229 aa, Wolbachia pipientis
LEELQKYVDTLIVIPNQNLFRIANEKTTFADAFQLADNVLHIGIRGVTDLMIMPGLINLDFADIETVMSEMGKAMIGTGEAEGEDRAISAAEAAISNPLLDNVSMKGAQGILINITGGGDMTLFEVDAAANRVREEVDENANIIFGATFDQAMEGRVRVSVLATGIDSCNDNSSVNKNKIPAEEKNFKWPYNQIPTLETKEYASTEQTNERVKWGSNVYDIPAYLRRKK

SEQ ID NO: 25340 - protein, 377 aa, Coleochaete scutata
MADGEEVSALVCDNGSGMVKAGFAGDDAPRAVFPSIVGRPRHQGVMVGMGQKDAYVGDEAQSKRGILTLKYPIEHGIVTNWDDMEKIWHHTFYNELRVAPEEHPVLLTEAPLNPKANREKMTQIMFETFSVPAMYVAIQAVLSLYASGRTTGIVLDSGDGVTHTVPIYEGYALPHAILRLDLAGRDLTDYMMKILTERGYAFTTTAEREIVRDIKEKLAYVALDFEQEMQTAQNSSSLEKSYELPDGQVITIGSERFRCPEVLFNPALIGMESAGIHETTYNSIMKCDVDIRKDLYGNIVLSGGTTMFPGIADRMSKEITALAPSSMKIKVVAPPERKYSVWIGGSILASLSTFQQMWIAKSEYDESGPSIVHRKCF

SEQ ID NO: 25341 - protein, 467 aa, Listeria monocytogenes str. 1/2a F6854
MTSVMWFRRDLRVSDNKALYHACKEDDLLLLFQVNPAQFITGSPSHQAFFASVAHFKQEVDKTALLQIMFGEPVECLKQLKETLPSWDKVYFNRDETGYGAERDEAAKTFFDEQEIEVQAFHDSYLHSAEEVKKSPTEYYKIFTPYYKKWREEIKETPFKVTLKADNIRKENLFPKYEEQFAEMTCDLPILDSGEKTANTRLANFIKHDVADYDKARDFPELDKTSHLSRYLRTGEISVRTIWQALQENEATEGRAIFEKELCWRDFYNMIYVSFPNQKNEPIQENYRFIEWENNREFFKAWQDGKTGFPLVDAAMRQLKETGWMHNRLRMVTASFLTKDLLIDWRFGEKYFQQMLIDYDPASNIGGWQWAASTGTDAVPYFRIFNPTTQSQKFDPTGKFIRKYVKELANLPDKYIHQPEKMSEIEQKEYGLLLGKDYPFPLIDHKERRKLAIARYEFSKEHYRGNI

SEQ ID NO: 25342 - protein, 309 aa, Prochlorococcus marinus subsp. pastoris str. CCMP1986
MTATTFRNKNSNWTISDIPNLDGKTAFITGANSGLGYYTAKALAEKNAHVLLACRSLEKANSAIDKLKSLNPKGKFTPVELDLSDLNNVSEIGLKISSEFENLDLLINNAGIMHPPKTLSKQGFEIQFAVNHLAHMLLTLKFLPLIEKKENSRIVTVTSGAQFFGKVGWNNLKAENYYNKWESYATSKLANVMFALELNEKIKQKNILSLAAHPGIAKTNLFSAQKPKPSPIETFSLELFSPIFQSAEMGALPQLLAATSPMAKGGDHYGPKFNFRGHPKLSPTSPFALNKKERKNLWEKSLEILNSFL

SEQ ID NO: 25343 - protein, 362 aa, Frankia sp. CcI3
MSGAGASGDVGASGDVRASGDVDALLLVSFGGPEGPGDVLPFLRNVTRGRDIPASRLAVVAEQYHLFGGRSPLNEQNRALVTALRAELPGLPVYWGNRNWAPYLTDTVAQMAADGIRRAACFVTSAFSSYSGCRQYREDLAAAAAAVGDRAPELVKLRLFFDHPGFVEPMVDRGVAALADLPAKVRSDAHLIFTAHSLPLAQARASGRGEGAYARQLRATAAVIIEGIERITGVRHPFDLAFCSRSGSPGVPWLEPDVRDRLAQLAAAGAASAVIIPLGFVSDHVEVRYDLDVGALERARELGLPATRAGTVGVDPRFVSMVGELIEELRRPGGVRRSLTGLGPWPADCPAHCCEPLGPPRT

SEQ ID NO: 25344 - protein, 364 aa, Spirogyra sp. SVCK 253
  misc_feature (8)..(9): Xaa can be any naturally occurring amino acid
  misc_feature (136)..(136): Xaa can be any naturally occurring amino acid
  misc_feature (148)..(148): Xaa can be any naturally occurring amino acid
  misc_feature (219)..(219): Xaa can be any naturally occurring amino acid
  misc_feature (325)..(325): Xaa can be any naturally occurring amino acid
DNGSGMVXXGFAGDDAPRAVFPSIVGRPRHQGVMVGMGQKDSYVGDEAQSKRGILTLKYPIEHGIVTNWDDMEKIWHHTFYNELRVTPEEHPVLLTEAPLNPKANREKMTQIMFETFNVPAMYVAIQAVLSLYASXRTTGMVLDSGDXVTHTVPIYEGFALPHAILRLDLAGRDLTNHLVSILTERGYSFTTSAQREIVRDIKEKLAYVALDLNRRLPXAQSSSSIEKSYELPDGQVITVGAERFRCPEVLFNPGLLGMEAAGIHDTAYNCIMKCDVDIRKDLYGNIVLSGGTTMFPGIAERMTKEISALAPPTMRIKVVAPPEXKYSVWIGGSILASLSTFQQMWIVKSEYDESGPSIVHQQC

SEQ ID NO: 25345 - protein, 222 aa, Medicago sativa
MAASITAITVENLEYPAVVTSPVTGKSYFLGGAGERGLTIEGNFIKFTAIGVYLEDIAVASLAAKWKGKSSEELLETLDFYRDIISGPFEKLIRGSKIRELSGPEYSRKVMENCVAHLKSVGTYGDAEAEAMQKFAEAFKPVNFPPGASVFYRQSPDGILGLSFSPDTSIPEKEAALIENKAVSSAVLETMIGEHAVSPDLKRCLAARLPALLNEGAFKIGN

SEQ ID NO: 25346 - protein, 130 aa, Triticum aestivum
  misc_feature (49)..(49): Xaa can be any naturally occurring amino acid
LFSAIAARRAHAASSLALLVVALVLSAAPAPAEGAVANCGQVLIYLAPXISYVMGRVSVPGAACCSAVRALNASAATPADRKTTCTCLNHQAIGMSGIKPNLVAGIPGKCGVNIPYIISQGTDCSKVRYA

SEQ ID NO: 25347 - protein, 197 aa, Medicago sativa
KSYFLGGAGERGLTIEGNFIKFTAIGVYLEDIAVASLAAKWKGKSSEELLETLDFYRDIISGPFEKLIRGSKIRELSGPEYSRKVMENCVAHLKSVGTYGDAEAEAMQKFAEAFKPVNFPPGASVFYRQSPDGILGLSFSPDTSIPEKEAALIENKAVSSAVLETMIGEHAVSPDLKRCLAARLPALLNEGAFKIGN

SEQ ID NO: 25348 - protein, 373 aa, Zea mays
MGDGAPPPGALYSFGTPWPELNQGLTYTDTFRCADADAATTLIEFYSTNHKSSAPLPGWIKRIRNGQITVDGEVVTDPDMTLEPFAPYLLEVLYEDDDMVALNKPSGLQVLPKGLFQQRTVLAQLQLKDWKMASSCRFKRKDVQSHPVPVHRLGRGTSGLLLCAKTKVAKVRLASYFAEGAINAAKKRDKSEFSEERKISKFYRALVTGILDDDEVVVTQPIGLVHYPGVAEGLYAACSSGKPAMSKVCVLERLAHQNHTLVQVEIHSGRPHQIRIHLAYIGHPLVDDPLYGIGGHPNFVEPESTGTDSSFASDGGYERPLQPVPGDCGYHLHAHWLVLCHPTTNKMVKITAPLPQILQTREERRAAAEQTGG

SEQ ID NO: 25349 - protein, 424 aa, Hordeum vulgare
MVVTVAATGPDTAETLHSTTFASRYVRDQLPRYRMPENSIPKEAAYQIISDELMLDGNPRLNLASFVTTWMEPECGKLIMDSVNKNYVDMDEYPVTTELQVCWEKFARYFEVELKEVKLTEGYYVMDPKKAVEMVDENTICVAAILGSTLTGEYEDVKLLNDLLVEKNKETGWNVPIHVDAASGGFIAPFLQPELEWDFRLPLVKSINVSGHKYGLVYPGVGWVIWRSKDDLPEELIFHINYLGADQPTFTLNFSKGASQIIAQYYQLIRLGFEGYKHIMENCKLNAAVLKEGIDATGRFDVLSKADGVPLVAIRLKDSTNFSVFDISENLRRFGWIVPAYTMPADAEHVAVLRIVIREDFNRSLAQRLLADINKIIGELDAHAVHAIKLSTAAAGGDGASKSAVDAATEAFKDLAGKKKAGVC

SEQ ID NO: 25350 - protein, 175 aa, Oryza sativa
MGPTVMASSATSVAPFQGLKSTAGLPVSRRSTNSGFGNVSNGGRIKCMQVWPIEGIKKFETLSYLPPLTVEDLLKQIEYLLRSKWVPCLEFSKVGFVYRENHRSPGYYDGRYWTMWKLPMFGCTDATQVLKELEDAKKAYPDAFVRIIGFDNVRQVQLISLIANKPPGRAEFGGN

SEQ ID NO: 25351 - protein, 398 aa, Lactococcus lactis subsp. cremoris
MFQYNTVEEALTALKAGEIIIVTDDENRENEGDLICAAEMISPEKINFMASQAKGLICSPMSEKYAKSLHLSAMTERNTDNHGTAFTVSVDHVETSTGVSAFDRSLTIRKLADEESSVEDFRRPGHVFPLIARKNGVLERNGHTEATVDLLRLAGLKEVGVCVEIMAEDGSMMRTEELQEKAKEWDLNFITIKAIQKYRKQNEQLVEQVTRAKLPTKYGYFEIFGFVNKINGEHHVALVKGDIGEGEAVLCRVHSECLTGDAFGSMKCDCGEQLEQALTQINVEGRGILLYLRQEGRGIGLINKLRAYSLQDEGLDTIEANLALGFEEDAREYSIGAQILKTLGVKSLRLMTNNPQKINDFSKYGLPVKERVPIQIKENEFDQDYLKVKQTKMGHLFD

SEQ ID NO: 25352 - protein, 926 aa, Xanthobacter autotrophicus Py2
MTSAVWSIEAPGDEEVKDRPLREDIRLLGRILGDTVREQEGEEVFDLVERIRQTSIRFHRDDDETAREELGALLEQLSSQRAVDIIRAFSYFSHLANIAEDEHHIRRNRAHAIAGSAPRAGSLAYSLARAEALGIGPQQLTEFFSGAHMSPVLTAHPTEVRRKSTLNREMEIAALLDRRERVVPTPAEQEQDEETLRRAVLTLWQTALLRRIKLTVLDEVANGLSYYDYTFLSELPRLYCSIEDHVSQGGSEVALPSFLRIGSWIGGDRDGNPFVTADVLKETVRVHRDRILAHYEQELTELGAELSLGARLIKVSPELAELAARSPDRSQEHREEPYRLALAYVLGRLRLTARHLKGEAPEGTEAEDAGSLAPYVNAAALKADLDIIYASLCDNGSKVLARGRLRLLRRAVDCFGFHLACIDLRQNSDVHERVVADLFEKVAPGTNYVGLDEEARIALLLQELATARPLASPFLAYEDETQSELAILRMAAEAHRALGREVIPNCIISKAEGVSDLLEVALLLKEVGLVTAEGTTALNIIPLFETIGDLQVCAKVMDRVLSLPAYRKLVSSRGDEQEVMLGYSDSNKDGGFVTSGWELYKAEIGLIEVFRAHNVRLRLFHGRGGSVGRGGGPSYDAILAQPGGAVNGQIRITEQGEIIASKYSNPDMGRRNLEILVSATLEASLLQPQFNAPRTEFLTAMEEISDTAFSAYRNLVYETEGFEDYFWSSTVISEIATLNIGSRPASRAKTRSIEKLRAIPWVFSWAQCRLMLPAWYGFGSAVEAFAERRPDYGLSFLQAMYREWPFFRTQLSNMDMVLSKSSLAIASRYAELVPDVELRTQIFGRIRAEYERTIKYVLAIMGQQKLLEDNPLLDRSIRNRFPYLDPLNHLQIELLRQHRANSGDDKVLHGIQLSINGISAGLRNSG

SEQ ID NO: 25353 - protein, 529 aa, Plantago major
MTADHQKSSVASFAVSSGDAGKLGLSSTLDTLPKKPLKRNKYALAISILASMTSVLLGYDCGVMSGATQFIQEDLIITDVQVELLVGTINIYSLVGSAVAGRTSDWVGRRYTIVFASTIFFLGAILMGFATNYAFLMVGRFVAGIGVGYALMIAPVYAAEVAPASCRGFLTSFPEVFINFGVLLGYVSNFAFAKLPLTLGWRMMLGVGAVPSVLLGVGVLYMPESPRWLVLQGRLGDAKKVLDKTSDSLEESKLRLADIKEAAGVPLDCHDEIVQVQKRSQGQGVWKELLLHPTKPVLHILICGVGIHFFQQGIGIDSVVLYSPRIYEKAGIKNTSDKLLATIAVGVSKTFFILITTFFVDRFGRRPLLLTSCAGVALSMFALGTSLTIIDRNPDGNIKGLLIFAVILTMAIVGFFSMGLGPIAWVYSSEIFPLKLRAQGCSMGVAMNRFMSGVILMSFISLYKAITIGGAFFLFGGITTVAFIFFYTLFPETQGRTLEEMEELFGTFFSWRTRMKELDAKKKTGSEAT

SEQ ID NO: 25354 - protein, 575 aa, Guillardia theta
MPNILKNRDTTGAFALIDSLVRHGVKHIFGYPGGAILPIYDELYAWEKEGFIEHILVRHEQGAAHASDGYARSTGNVGVCFATSGPGATNLVTGIATAHMDSVPMVIITGQVGRSFIGTDAFQEVDIFGITLPIVKHSYVVRETKEMGKIVAESFFIAKYGRPGPVLIDIPKDVGLEKFDYQIVNPNNINLAGCPVLKNYDQNRISQAANLIKQSSQPLLYIGGGAVTSNSHNEINELINLVKIPVATTLMGKGIIDESHPLSLGMLGMHGTVYANYAVSECDLLIALGARFDDRVTGKLDEFACHAQVIHVDIDPAEIGKNRTPQIGIVGEIKDFVRDLIECLKNDINFDSEQSQAWRSRIIRWRKEYPLLVPKNINNLSPQEVIHEISTEATNAYFTTDVGQHQMWAAQFIKTSQKRWITSAGLGTMGYGLPAAIGVQIAHPNEQVICISGDASFQMNIQELGTVSQYGLPIKIFIINNKWQGMVRQWQQAFYGERYSHSNMEKGAPNFTKVAEAFGLRSLKIKSRNDLKLRIKEALDYDGPILVDIQVIADENCYPMVAPGKSNAQMMGINS

SEQ ID NO: 25355 - protein, 530 aa, Plantago major
MNSEHHNSGGLASFSVDAGKSQKPDAASVLDTLPKKPVTRNKYALAISILASMTSVLLGYDTGVMSGATLYIKDDLKISDVQVELLVGTINIYSLVGSAVAGRTSDWVGRRYTTVFASVVFFVGAILMGIATNYVFLMAGRFVAGIGVGYALMIAPVYAAEVAPASCRGFLTSFPEVFINFGVLLGFVSNYAFAKFPLKLGWRMMLGVGAIPAVFLAIGVIYMPESPRWLVLQGRLGDARRVLDKTSDSLEESKLRLADIKEAAGIPEDCNDDFVQVQKHSQGQGVWRELLLHPTKPVLHILICGVGIHFFQQGIGIDSVVLYSPRIYDRAGITDTSDKLLATIAVGISKTFFILITTFYVDRFGRRFLLLVSCAGVALSMFALGTVLTIIDRNPDAKQTGVLVLVVLLTMVIVGFFSMGLGPIAWVYSSEIFPLKLRAQGCGLGVAMNRFMSGVILMSFISLYKEITIGGSFFLFGGITTLGWIFFFTLFPETRGRTLEEMEGLFGTFFKWRTTMKELDAKKRSGTDGA

SEQ ID NO: 25356 - protein, 311 aa, Arabidopsis thaliana
MELLFLLCSIIYTSITSIFFSLLLPFRFLLHRLLPSRAAVDPNVSFYEGTVWHDRLRPVRHSFRYSVRYALFDLDKAITTPPDHFSADEARRVSRTTGPIFLLTIPPSVGYEQNPLSLYYCYDLEGSSKRLSKCIAQVTNTPWGERVTFVFDPESDLVAKSLQVSPFMDMLGNWKIRANEPGDDLSVSIASQHPHFGNYFSATLKAKRIPLSRVSDPAVFFWLMPHKVAIWIYWHALQLWWKSVPFIQHPRYSNPSYREEAAKRDQELRCPGLDGSDSDKTNKFDGLKGDGCSSSFGGCRFAWRDANWPWS

SEQ ID NO: 25357 - protein, 398 aa, Vibrio cholerae O1 biovar eltor str. N16961
MFEPMMEMSDDAVIKVVGVGGGGGNAVEHMVRESIEGVEFMSINTDAQALRKTSVGTVIQIGGNITKGLGAGANPQVGRDAALEDKERIKEFLTGADMVFIAAGMGGGTGTGAAPVIAEVAKELGILTVAVVTKPFSFEGKKRLAFAEQGIEELSKHVDSLITIPNEKLLKVLGRGITLLEAFASANNVLKNAVQGIAELITRPGMINVDFADVRTVMSEMGHAMMGSGVARGEDRAEEAAEMAISSPLLEDIDLAGARGVLVNITAGLDMRLDEFETVGNTVKAFASDNATVVIGTSLDPDMADEIRVTVVATGIGNEKKPDITLVAGGKSKVAPVSAPVTSRVEEKAAQPLHERVEVKTQPAAAPSHSSASQSVAPKPEKESGYLDIPAFLRRQAD

SEQ ID NO: 25358 - protein, 153 aa, Pavlova lutheri
MGELPRRIQKETQRLLSEPVAGISASPYQDNLRYFNVVLAGPATSPFEGGIFRLELFLPEEYPMAPPKVRFLTKIYHPNIDKLGRICLDILKDKWSPALQVRTVLLSIQALLSAPNPEDPLDAGVADHWKSNEAAAIEEAKRWTQQYATGSLP

SEQ ID NO: 25359 - protein, 334 aa, Magnetospirillum magnetotacticum MS-1
MPAFPFTAIVAQEEMKRALLIAAVDPSVGGVLVFGDRGTGKSTAIRALAALLPKIRAVVDCPYSCAPESPAAECPHCARGRGKSHLIPVPVVDLPLGATEDRVVGALDLERALTRGEKAFEPGLLARANRGFLYIDEVNLLEDHLVDLLLDVAASGVNTVEREGLSLRHPARFVLVGSGNPEEGELRPQLLDRFGLACEVTTPTDIPTRIEVVRRRDAYERDRDGFCAGHAKAEKALQKTILSARERLDAVTVPDTALEDAARLCLALGTDGLRGELTLMRTARALAALDGAEAVTTEHLRQVEPSARVTACAESLDKSGRKRGWPGREEVWDG

SEQ ID NO: 25360 - protein, 469 aa, Zea mays
MGKRSGGRKLPFFTRSSSSSSKRNRSARRLPSLPKQDNATRALLASPSAASPSATPGSAAAGQTAQLPPPLSVTAGGGVAVSGKVNKKKAGTRLWMRLDRWSASEIVELDKASIIRRAGLPPRDLRILGPVFSRSSSILAREKAMVINLEFIRAIVTAEEVLLLDPLMHEVLPFVDQLRQHLPLRSRVGENGECAPDGNGEKQKGSLNEATGAEHELPFEFHVLEVALEVVCSSLDLSVSDLERHATPVLDELTKNVSTRNLERVRNLKSHLTRLLARVQKVRDEIEHLLDDNEDMEHLYLTRKQVQNQQVEALMSSAASNSIVLAGTGVPRLNSSFRRSLSIATSMHLDNDVEDLEMLLEAYFMQLDGIRNRILSVREYIDDTEDYVNIQLDNQRNELIQLQLTLTIASFGIAANTFIAGAFAMNIPGSLFNTDGSLFWPFVGSTSSGCFVITVLLLGYAWWKKLLGP

SEQ ID NO: 25361 - protein, 240 aa, Brassica napus
  misc_feature (11)..(11): Xaa can be any naturally occurring amino acid
  misc_feature (30)..(31): Xaa can be any naturally occurring amino acid
  misc_feature (160)..(160): Xaa can be any naturally occurring amino acid
GRVGNNVYTLXMCMTGLDGEEASVFWKDGXXGTMTDNSGIRKILPKSQICDFEFEPCGYSMNSIEGDAISTIPVTPEDGFSSASFEAVGYDFNPLDLSQLVTRVLSCFDPNQFSVAVPSSVGANASNPEISVALEDYGCREGPFEPLGEKSGPVLYPPFXKLGKYCGSPRSPLKCGWGRPHSSTTGAEKAEGIYPTHLWAFCFRPFFYIIVMNKMPCEVGGLPPPPLWALCFGRLLCLGL

SEQ ID NO: 25362 - protein, 501 aa, Pediococcus pentosaceus
MIWNRKTRYTPYEQWPATKLPQLVAQARQSKWRMQHHIQPTSGLLNDPNGFSYFDGQWHLFYQVFPFGPVHGLKSWQHVTSKNLVDWHDEGLAIRPDTPYDSHGAYTGTALPIDDQLFIMYTGNVRTADWQRESYQLGAWMDTDNHIKKLSRPLIAHAPAGYTSSFRDPDLIRNDHGYYALIGAQTTTEIGAILVYFSKDLTTWTCQGELNVPANARGYMIECPKSGLDRSTARLIVLSQGLSQATIPYQNIYPNMYLVADQLNLAQAQFTEPHALTQLDDGFDVYATQAINAPDGRALAVSWIGLPEISYPTDRENWAHCLSLVKELTLKDGHLYQNPVAAVDDLRTTAHDLVFEQQRATVAALNGSFELLLTVPADKTVTVNIADQQESGQLQVTVDANHGQVMIDRRHTGNSFAEDYGQTRQVELTAHKTIKIRLIIDVSVFECYIDNGYSVMTGRFFLNATPSRLNVQGDTTAVTGKVWEWRQSEHTGVDNNETKIK

SEQ ID NO: 25363 - protein, 433 aa, Methylococcus capsulatus str. Bath
MPLIFGVCCLVVAAAHMVPAARAAAGEFFNGLLGKRMTKSADVLFVLLGAIMVLAMHAGFAFLEVGTVRRKNQVNALVKILSDFAMSTIAYFFIGYELAYGVDFFDSALALTVDNGYGLVKFFFLLTFAAAIPAIVSGGIAERSKFNPQLAATFLLVGFVYPLFEGIAWNSNLGFQGWLQTRFGAQFHDFAGSVVVHAVGGWIGLAAVLLLGPRRGRYHRDGMIAAHPPSSIPFLALGAWILTVGWFGFNVMSAQNLNGISGLVAVNSLMAMVGGTLAALLAGRNDPGFVHNGPLAGLVAVCAGSDLMHPIGALAVGAVAGFLFVYLFTLTQNRWKIDDVLGVWPLHGLCGAWGGIAAGIFGQSALGGIGGISFMAQVLGTGLGVAIALAGGLAVYGAAKTLIGLRLTPEEEFDGADLTLHRISSSPEKEAGW

SEQ ID NO: 25364 - protein, 378 aa, Thiomicrospira crunogena XCL-2
MEYKNYTAYQHGSEPAVGVLITNLGTPDAPTKEALRPYLKEFLMDPRVVEPPPARWLWKLILNLIILNTRPAKSAEAYQEVWGKYGDGSPLLDISNRQLMDIEEKVRAHFSGRVEFALGMRYGNPSIASALKSLQDRNVQRLIVVPLYPQYAGATTASTFDAVSAELQQWRWIPELRFVRNYHKHPGYIKALANSIREHQAEHGKPDLLVMSYHGIPQRYFDNGDPYPCECRATSRLVAEELGLNSDEYMVTFQSLFGKEEWVKPYTDATLKSLPDKGVKHLQVICPGFSADCLETIEEIDQENREYFEEAGGEKFSYIPALNDRDDHTTALTQIILQQTRGWPERDGFDAEADKEERALQAKLADQLEKKLSDEFGQ

SEQ ID NO: 25365 - protein, 229 aa, Wolbachia pipientis
LEQLQKYVHTLIVIPNQNLFRIANEKTTFADAFQLADNVLHIGIRGVTDLMVMPGLINLDFADIETVMSEMGKAMIGTGEAEGEDRAISAAEAAISNPLLDNVSMKGAQGILINITGGGDMTLFEVDAAANRVREEVDENANIIFGATFDQAMEGRVRVSVLATGIDSCNDNSSVNQNNIPAEEKNFKWPYNQIPTLETKEYASTEQTNERVKWGSNVYDIPAYLRRKK

SEQ ID NO: 25366 - protein, 347 aa, Synechococcus elongatus PCC 7942
MLSLAIATLVVLLGSAICSASEAALLSLPLIRVRQLAESRRPAALALLAIKEQISRPLAALVVLNNLFNILGSIIIGSLAAQVLQSAWIGIFSAVLTLLIILFGEIVPKTLGTRFAQTLALVSAQPLRWLTRLLLPIIWLLEHFTAPFNEGSPQLTTDEQEIQLLASIGHQEGAIEQDELEMIQRVFQLNDLNASDVMTPRVAITYLWGEDQLETVKAEILASQHSRIVIVDDSIDAVCGIALKTELLAALLAGQGDLLLSALARPAHFVPETVRADKLLKTFQKVREHLFIVLDEYGGVAGVVTLEDVLEVLTGEIVDETDRNVDLRAIARFRRRQILHQRGLDEA

SEQ ID NO: 25367 - protein, 229 aa, Wolbachia pipientis
LEELQKYVDTLIVIPNQNLFRIANEKTTFADAFQLADNVLHIGIRGVTDLMVMPGLINLDFADIETVMSEMGKAMIGTGEAEGEDRAISAAEAAISNPLLDNVSMKGAQGILINITGGGDMTLFEVDAAANRVREEVDENANIIFGATFDQAMEGRVRVSVLATGIDSCNDNSSVNQNNIPAEEKNFKWPYNQIPTLETKEYASTEQTNERVKWGSNVYDIPAYLRRKK

SEQ ID NO: 25368 - protein, 278 aa, Lycopersicon esculentum
MSESLKRNYCVGGELGRGRFGTVFKCYSSATGELFAVKSIDKRLIADDAIDRQCLYNEAKIMHLLSPNPNVVRVFDIYEDDTHLDMVLELCNSGDLFQRLSSQPIFSESDAVDVMVPLMKAIAHCHRLGVAHRDIKPDNILFTDSNELKLADFGSAECFHEGQLMSGVVGTPYYVAPEVLAGRNYSEKIDIWSAGVILYIMLAGVPPFFGDSASEIFEAVLRANLRFPPRIFHSVSPAAKDLLRRMLSKDVSRRFSAEQVLRHPWMTSNGEIRTVAPF

SEQ ID NO: 25369 - protein, 318 aa, Wolbachia pipientis
KSLCDKKIQLGINLTKGLGAGALPDIGKGAAEESIDEIMEHIRDSHMLFITAGMGGGTGTGAAPVIAKAAREARAVVKDKGAKEKKILTVGVVTKPFGFEGVRRMRTAELGLEELQKYVDTLIVIPNQNLFRIANEKTTFADAFQLADNVLHIGIRGVTDLMIMPGLINLDFADIETVMSEMGKAMIGTGEAEGEDRAISAAEAAISNPLLDNVSMKGAQGILINITGGGDMTLFEVDAAANRVREEVDENANIIFGATFDQVMEGRVRVSVLATGIDSCNDNSSVNKNKIPAEEKNFKWPYNQIPTLETKEYASTEQ

SEQ ID NO: 25370 - protein, 318 aa, Wolbachia pipientis
KSLYDKKVQLGINLTKGLGAGALPDIGKGAAEESIDEIMEHIRDSHMLFITAGMGGGTGTGAAPVIAKAAREARAVVKDKGAKEKKILTVGVVTKPFGFEGVRRMRTAELGLEELQKYVDTLIVIPNQNLFRIANEKTTFADAFQLADNVLHIGIRGVTDLMIMPGLINLDFADIETVMSEMGKAMIGTGEAEGEDRAISAAVAAISNPLLDNVSMKGAQGILINITGGGDMTLFEVDAAANRVREEVDENANIIFGATFDQVMEGRVRVSVLATGIDSCNDNSSVNKNKIPAEEKNFKWPYNQIPTLETKEYASTEQ

SEQ ID NO: 25371 - protein, 336 aa, Cycas revoluta
AGFAGDDAPRAVFPSIIGRPRHTGVMVGMGQKDAYVGDEAQSKRGILSLKYPIEHGIVTNWDDMENIWHHTFYNELRVAPEEHPILLTEAPLNPKANREKMTQIMFETFNVPAMYVAIQAVLSLYASGRTTGIVLDSGDGVTHTVPIYEGYALPHAILRLDLAGRDLTDSLMKILTERGYSFTTTAEREIVRDMKEKLGYVALDFEQELEIAKTSSAIERNYELPDGQVVTIGAERFRCPEVLFQPSLIGMESAGIHETTYNSIMKCDVDIRKDLYGNVVLSGGSTMFPGIADRMSKEITALAPSSMKIKVVAPPERKYSVWIGGSILASLSTFQQ

SEQ ID NO: 25372 - protein, 102 aa, Pseudomonas fluorescens PfO-1
MQVNISGHQLEVTQPLREYIELKLKKLEGHFDKITNVQVTMCVEKLKQKIEATLHIPGNEVVANAEHTDMYAAIDALTDKLDKQLKKHKEKTQSLLQGATGR

SEQ ID NO: 25373 - protein, 402 aa, Oenococcus oeni PSU-1
MGAVTPLGSSVNEFVSGLRKQQVGFRPISTFDSSATGVTLAGEAADFDPLVRLSKKDLRRMDRFSQFAVYSALEAYQQAGLEDQTPDPERFGVIYGSGIGGLTTIQEQVIRMHDLGADRVSPMFVPTAIANMAAGNLAIRFHAQNICMTIVTACSSGANAIGEAFRAIESGRADIMLTGGSEASINEIGIGGFAALSTLSKATDPTKASLPFDKNRNGFVMGEGGGTLILESLEHAQKRGAEILGELVGYGASEDAYHITSPDPAGTQAARAMRLAIEEAGLKAEQIGYINAHGTATHGNDFAEAAAINQVFSKDQQVLVSSSKSMTGHLLGAAGAIEAVATVSALRDGQLPVNVGITEQDPECQVNLVTEENAQTKVDYALSNSFGFGGHNAVLAFKKWSD

SEQ ID NO: 25374 - protein, 695 aa, Oryza sativa
MAVAGAFRRSTSTALQALTALSVLAALLQVEGQMYGPEEAAQTAQCPPFSWGHLKNVSPPFRRHGDPPDCGYKSHELVCSDTKATIRINNATYYVTRIIHWSLFVVVDTDLLNSHNSSCPLPRRQHQPPHERISMAPTSDGVQVIELAPFTNRWAAFVNCSKEITRNVRYKPVACLSTSHSFVYVLTGSESETVYVESLEPSCGYLGMTPLDDRGASINASLSYADVLKYMRKGFAIGISSSSGTYHFDFRACLAESVSIFRQTMVPSSDIYIKNRLLAILLAYGPFWQCIMAPVKLPRVAYEFAIYGTGPAMSILTWIAVLCRFLLAPLVVLTFLSHKYWKARITIDAVEKFLRMQEMLSPMRYGYTDIIAITSHFRDRLGQGSYGTVYKGVLLPGNIHVAVKMLNGNSNCNGEEFISEVSTIGRIHHVNVVRLVGFCSEEMRRALVYEYMPRGSLDKYIFSSDKSFSRDKLNEIALGIARGINYLHQGCDLQILHFDIKPHNILLDKNFVPKVADFGLARLYPRDKSFVPVSAARGTVGYIAPEMISRSFGVISSKSDVYSFGMLLLEMAGGRRNADPNAENSSQAYYPSRVYRQLTRQETGEITAAADMHELEKKLCIVGLWCIQMRSCDRPMMSEVIEMLEGGVDCLQIPPRPFFCDDDYIPAMESLYLSSELELAAISEEKDEESITELN

SEQ ID NO: 25375 - protein, 297 aa, Haloarcula marismortui ATCC 43049
MTEIIDGNAVAQSIRDDLVASIDRLADAGHRPSLATVLMSEDPASETYVSMKQDDCEEVGIEAIDIDIDSDADAAELYDTIEDLNADEDVNGILVQMPVPDHVEDRSVLRAIDPMKDVDGFHPENVGRLVAGDARYKPCTPHGIQKLIESAGVDTEGKDAVVVGRSDIVGKPMANLLIQKAPGGNATTTVCHSRTENLAERTRNADILVAAAGVPEMIDGKMIQEGATVIDVGINRVDADTEKGYELVGDVEYESAKEVAGAITPVPGGVGPMTRAMLLYNTVKATGLQHDIDVDLP

SEQ ID NO: 25376 - protein, 336 aa, Podocarpus macrophyllus
AGFAGDDAPRAVFPSIVGRPRHTGVMVGMGQKDAYVGDEAQSKRGILTLKYPIEHGIVSNWDDMEKIWHHTFYNELRVAPEEHPVLLTEAPLNPKANGEKMTQIMFETFNVPAMYVAIQAVLSLYASGRTTGIVLDSGDGVSHTVPIYEGYALPHAILRLDLAGRDLTDALMKILTERGYSFTTTAEREIVRDVKEKLAYVALDYEQELETAKTSSSIDKSYELPDGQVITIGAERFRCPEVLFQPSLIGMEAAGIHETTYNSIMKCDVDIRKDLYGNIVLSGGSTMFPGIADRMSKEITQLAPSSMKIKVVAPPERKYSVWIGGSILASLSTFQQ

SEQ ID NO: 25377 - protein, 119 aa, Frankia sp. CcI3
MSIYDTIGGATAVQAAVDDFYVRVTADPVLAPLFANRDLPRLKEHQRAFIAAVIGGPEVYRGRDMAAVHATLGLTDAHFDAVVDHLLAALTGLGVPTETTGQIGAALAPLRSDVVTISK

SEQ ID NO: 25378 - protein, 92 aa, Prochlorococcus marinus subsp. pastoris str. CCMP1986
MVRILIKSPCSASLIIQYGIKNWPIWEREPCNFSWIYREKEICYIIEGEAKIKTEAGESYLIKSGDLVEFPEGLSCEWKIIKSLKKHFRLGE

SEQ ID NO: 25379 - protein, 90 aa, Arabidopsis thaliana
  misc_feature (13)..(13): Xaa can be any naturally occurring amino acid
TDQTNFVFNFPQXFFFLKQRTFFQVTEAKAIPKLSNRKLRFPVIGGEPPAGPLPKTLPQGGIETILIDRKMTNCNPSGAPIPFFLAEKFN

SEQ ID NO: 25380 - protein, 108 aa, Ralstonia eutropha JMP134
MSEQIKYVSDASFDADVLQSDKPVLLDFWAEWCGPCKMIAPILDEVAKDYGDKLQIAKINVDENQQVPAKFGIRGIPTLILFKNGAVAAQKVGALSKSQLTAFLDGNL

SEQ ID NO: 25381 - protein, 457 aa, Trichodesmium erythraeum IMS101
MIKLPGPKSPALTQILQWTAKPIKFMEKCAREYGDTFEVKLNYPIVFISHPKAIEEIFKANPKKFDCGSSNKLAQPLLGDYSLLLLDDIPHQRQRKLLMPPFHGKRMQAYGELICNVAQEVASKWEIGQVFSMREFTAEISLKVILQAVFGLYEGERYSKLEKLLGSLLESLSSPLKTSMLFFQFLQIDLGPWSPWGNFIKNREEIYELLCAEISERRQKLDPERSDILTMLLLARDEEGEGMSDIELRDELMTLLIAGHETTATSLSWAFYWIHHQPEIYQKLSRELETFGDDLNPMTVINLPYMNAVCSETLRIYPVVIIVSPRKTKLPITIMGQTYPAGTALTPCIYLTHHREDLYPEPKKFKPERFLERQYSSYEFLPFGGGNRRCIGAAFAMFEMKIVLATILRRYSLALAEKQEVKPLRRGLTLAPAGGVKMVMTGKLMQTEKKFPSVATV

SEQ ID NO: 25382 - protein, 215 aa, Beta vulgaris subsp. vulgaris
MAAPPARARADYDYLIKLLLIGDSGVGKSCLLLRFSDGSFTTSFITTIGIDFKIRTIELDGKRIKLQIWDTAGQERFRTITTAYYRGAMGILLVYDVTDESSFNNIRNWIRNIEQHASDNVNKILVGNKADMDESKRAVPTAKGQALADEYGIKFFETSAKTNLNVEEVFFSIARDIKQRLADSDTRQEAQPSITIKPADQSGNQAAAKSACCGS

SEQ ID NO: 25383 - protein, 510 aa, Eustoma grandiflorum
MAVGNGVLLHIARSLMLFFHVQKLVQYLWMNSRRHRLPPGPIGWPVLGALPLLGTMPHVALANMAKKYGPVMYLKVGSCGLAVASTPEAAKAFLKTLDMNFSNRPPNAGATHLAYNAQDMVFADYGPRWKLLRKLSNIHILGGKALQGWEEVRKKELGYMLYAMAESGRHGQPVVVSEMLTYAMANMLGQVMLSKRVFGSQGSESNEFKDMVVELMTVAGYFNIGDFIPSIAWMDLQGIQGGMKRLHKKFDALLTRLLEEHTASAHERKGSPDFLDFVVANRDNSEGERLHTVNIKALLLNMFTAGTDTSSSVIEWALAELLKNPIILKRAQEEMDGVIGRDRRFLEADISKLPYLQAICKEAFRKHPSTPLNLPRIASQACEVNGHYIPKGTRLSVNIWAIGRDPSLWENPNEFNPDRFLERKNAKIDPRGNDFELIPFGAGRRICAGTRLGILLVEYILGTLVHSFDWELPSSVIELNMDEPFGLALQKAVPLAAMVTPRLPLHIYCP

SEQ ID NO: 25384 - protein, 303 aa, Streptococcus pneumoniae R6
MYDTIIIGAGPAGMTAALYAARSNLKVALIEGGLPGGQMNNTSDIENYPGYANISGPELAEKMFEPLENLGVEHIYGYVENVEDHGDFKKVMTDDQTYETRTVIVATGSKHRPLGVPGEEELNSRGVSYCAVCDGAFFRDQDLLVVGGGDSAVEEALFLTRFAKTVTIVHRRDQLRAQKVLQDRAFANEKISFIWDSVVKEIKGENRVESVVFENVKTGQVTEQAFGGVFIYVGLDPLSDFVKELNIQDQAGWIVTDSHMKTAVDGIFAVGDVRLKDLRQVTTAVGDGAIAGQEAYKFITEHS

SEQ ID NO: 25385 - protein, 200 aa, Zea mays
MHVVTQELFLASPARAVLLLGFHAGRSSWSLPPERRRNLRGLPELRASSDKAAAGTAMPVPLAPYPAPPAPFTPPNGAQSQLVCTGCRNLLMYPAGATSVCCAVCSTVTAVPAPGTEMAQLVCGGCHTLLMYIRGATSVQCSCCHTVNLAMEANQVAHVNCGNCRMLLMYQYGARSVKCAVCSFVTSVGTSPGAEQKPSS

SEQ ID NO: 25386 - protein, 670 aa, Bartonella quintana str. Toulouse
MATKVKQKDNTEVKGQASVDSPLLDFSDDAIKKMVKLAKKNGYVTMDELNAVLPPDEVTSEQIEDTLAMFSEMGINVVDDEDEGESEHYEEEVTVEGGDLVEVTRNAIATTTKREVTDRTDDPVRMYLREMGAVELLSREGEIAIAKRIEAGRETMIAGLCESPLTFQALIIWREELKEQRILLREIIDLEMTYAGPEAKQAPVIERSEIGKIKEEKSFSGTRDMEENITRDIGVEDDEEEDDDVNLSLAAMENELCPQVMETLDFIAEAYIKLRKLQDQHVESSLAERKEGTLSLSQKKKYIQLKSELIQAVKSLSLNQNRIEALVEQLYDINKRLIHNEGKLKRIANNYGVSHEEFLKEYQGRELDADWINYIATLSGRGWKEFSMREVKEIQSLRSEIQNLAQETAISIGEFRRIVTQVQKGERESTIAKKEMVEANLRLVISIAKKYTNRGLQFLDLIQEGNIGLMKAVDKFEYRRGYKFSTYATWWIRQAITRSIADQARTIRIPVHMIETINKIVRTSRQILHEIGREPTPEELSSKLSMPLEKVRKVLKIAKEPISLETPVGDEDDSHLGDFIEDRNALLPIDAAIQANLRDTTTRVLASLTPREERVLRMRFGIGMNTDHTLEEVGQQFSVTRERIRQIEAKALRKLKHPSRSRKLRSFLDS

SEQ ID NO: 25387 - protein, 116 aa, Bacillus licheniformis ATCC 14580
MSGQMYKVEIVTRPTNFEKLKTELAKIGVTSITFYNVHGCGLQKGHTELYRGVKRESNVYERLKVEIVVSKVPVEKVAETAQNVLKTGEPGDGKIFIYEIKNTINIRTGEEGPDAL

SEQ ID NO: 25388 - protein, 529 aa, Xanthobacter autotrophicus Py2
MTINLQMPDIRELRPRITVFGVGGAGGNAVNNMITAGLHGVEFVVANTDAQALSLTKAERVVQMGVAVTEGLGAGSQPEVGRAAAEEVIDEIRDHLSGSHMVFITAGMGGGTGTGAAPVVARAARELGILTVGVVTKPFHFEGARRMRVAEHGISELQKSVDTLIVIPNQNLFRVANEKTTFADAFAMADQVLYSGVACITDLMVKEGLINLDFADVRAVMRDMGKAMMGTGEASGDKRAIQAAEAAIANPLLDETSMRGAGGLLISITGGKDMTLFEVDEAATRIREEVDPDANIILGATFDEVLDGIIRVSVVATGIDPAVIPDQVSPGAERFPDLAGRKISNAGRAAVEATREAQIRTAVASISAEDLIGMEDAQAQAAQAHAAYAPQSFAPAAPAPQQAVAIDDVTIRAAAPKPSYFAEPEPAAPPAPMVEDEFAPYIPPQGQRPRSQRMPRVDELPLPGQNQIRAQRGEPPVEQPQPDKKRMTLLQRLAHVGRREEEPEPPASRPAEHARPRAPSGGAAAGSPA

SEQ ID NO: 25389 - protein, 374 aa, Methanosarcina mazei Go1
MNEIITWILIVICLTQSAVFSGLTIGIFGLGRLRLEIEAEANNKNAIKILQVRRDSNFLLTTLLWGNVGVNVLIAQLTDSVMAGTFAFLFSTFGITCFGEIMPQAYFSRNALDIGAKLTPLVRFYQMLLYPVAKPTALVLDWWLGREKLELFREQAMRIMLEKHIESGKTDIGTFEGIGALNFLSIDDVSISDEGSIIDSRSIISLPVENNRPVFPPFNREPSDPFLQKIEASGKKWVIITSPENEPVMVLDADGFLRDAVYKKGPFLPLIYCHFPVVVKSPETRLEKVIRQFKVYPQYPEDDVIDQDLILYWGEEKRIITGSDILGRLLRGIVVECELGSGCEIPVPPSQPGFVRRTAFRRGKKKEIENLKRK

SEQ ID NO: 25390 - protein, 180 aa, Zea mays
  misc_feature (117)..(117): Xaa can be any naturally occurring amino acid
MGSRIELIRKHLKQEEEDDDELFFVLVPAIYASLYSEKRPVHTSCRSGAQKIREMLDGHESWCKSEFRMEPEIFRAVASYLRREGLLQDTSNMSIEEHLGIFMYMISQNASNGDLTXEFQHSGETIHRKISEFFGIIPALTQRFVKLPSVTQPHVKITSIPRFWPYFQIALVQLMGHTSP

SEQ ID NO: 25391 - protein, 163 aa, Saccharomyces cerevisiae
MSEFYKLAPVDKKGQPFPFDQLKGKVVLIVNVASKCGFTPQYKELEALYKRYKDEGFTIIGFPCNQFGHQEPGSDEEIAQFCQLNYGVTFPIMKKIDVNGGNEDPVYKFLKSQKSGMLGLRGIKWNFEKFLVDKKGKVYERYSSLTKPSSLSETIEELLKEVE

SEQ ID NO: 25392 - protein, 112 aa, Psychrobacter arcticus 273-4
MKLITAILKPFKLDDVREALSDIGVKGVTVTEVKGFGRQKGHTELYRGAEYVVDFLPKVKVEVAVIDEMVEPAIEAITRIASTGKIGDGKIFVTNLEQVIRIRTGETGPDAI

SEQ ID NO: 25393 - protein, 508 aa, Caulobacter crescentus CB15
MAISLSAPRTTELKPRIVVFGVGGAGGNAVNNMIEAGLEGVEFVVANTDAQQLQFAKTDRRIQLGVQITQGLGAGAHPEVGMSAAEESFPEIGEHLDGAHMVFITAGMGGGTGTGAAPIIAKCARERGILTVGVVTKPFHFEGRHRMRLADSGIQELQRYVDTLIVIPNQNLFRVANERTTFAEAFGMADQVLHSGVRSITDLMVLPGLINLDFADVRTVMTEMGKAMMGTGEGTGEDRALMAAQNAIANPLLDEVSLKGAKAVLVNVTGGMDMTLLEVDEAANAISDQVDPEANIIFGAAFDPSLEGVIRVSVVATGMDGASIAQIEPKPVSRNISAAPLIAETSRPAPQPEPARPTARYEAARPAERPVAFAPEPAPEPEIVMSAPQPEPEAELYYDEPTVAEEPRVSAAPARSVNRIVDPLVDDVAEEPLFPENNYYEERRPQKQGGFFSMFGGGRQRYEQQASAPQAQARSAQSARPQLQPIETPQADDAEDLEIPSFLRRLAN

SEQ ID NO: 25394 - protein, 420 aa, Psychrobacter arcticus 273-4
MQNQIFELQYALDTFYLLMCGALVMWMTAGFTMLEAGLVRSKNTVEILTKNIALFATACTMYMICGYAIMYDGNLFLSGIAGTESLVADALATSAENGFDGDAVYSSASDFFFQVVFVATCMSIVSGAVAERMKLWSFLLFAVVMTGVIYPLEGSWTWGGKAVFGLYSLGDLGFSDFAGSGIVHMAGAAAALAGVLLLGARLGKYGSKGEIRAIPGANLPLAALGTLILWMGWFGFNGGSVLKLGDIASANSVAVVFLNTNAAAAGGAIGALLIARLIFGKADLTMLLNGALAGLVAITAEPLTPSALQATLFGMTAGIIVVLSILLLDKIKIDDPVGAISVHGVVGLFGLLIVPLTNPAASLIGQLAGAATIFAWVFVSSLIIWSIIKFVIGLRISEEEEYQGADIAECGMEAYPEFIR

SEQ ID NO: 25395 - protein, 560 aa, Psychrobacter arcticus 273-4
MPNQRPLYIPFSGPALLETPLLNKGSAFSSEERDSFNLTGLLPHNIETIEEQSLRAYHQLRSFTTDIDKHIYLRNIQDTNETLFHHLIEQHIEEVMPLIYTPTVGQACEKFSQIYRRKRGLFISYPDRHKIDDMLQNATKQKVKVIVVTDGERILGLGDQGIGGMGIPIGKLALYTACGGISPAYCLPILLDVGTNNQQLLDDPMYMGWRNQRISGDEYNEFVDLFIQAVKRRWPEVLLQFEDFAQENATPLLNRYRDQLCCFNDDIQGTAAVSVGTLIAACLNKGQKLSQQKIAFLGAGSAGCGIAEHIIRQMQREGLTEEQARKQVFMVDRYGLLTDSMTELQKFQAPLVQKESAIESWDKSQKLGLAQVVKQAKITVLFGVSGQKGLFTREVIEALCVNTEHPIVLPLSNPTSRVEATPQEVTSWSRGKAIVATGSPFPNTTFEDQSFEISQCNNSYIFPGIGLGVLAAHATGISDNMLMSASQALADISMEYEKAPGAILPPIKFIREISEKIAYAVALQAIEDKLALPVTAENLERRLKANFWLPRYHNYRRTSF

SEQ ID NO: 25396 - protein, 161 aa, Methylococcus capsulatus str. Bath
MEFTTAGLCDQFHGTHPLQIVEPLFRPFGAVSRFHGRITTLKVFEDSVLIRETLAQEVDGRVLVIDGGASHRCALLGGNLARLAADNGWQGIIVYGCVRDSVELGTVPIGIRALHTHPLDSHKRGGGDRDCLITFASVNFRTDHYLYADEDGIVVSEEKLI

SEQ ID NO: 25397 - protein, 635 aa, Vibrio cholerae O1 biovar eltor str. N16961
MKVGKVMAIEIYVPDIGADEVEVTEILVKVGDKVAEEQSLITVEGDKASMEVPASQAGIVKEIKVVAGDKVSTGSLIMVFEAEGAAAAAPAPAPQAAAPVAAAPAAAALKEVQVPDIGGDEVEVTEIMVKVGDVVAEEQSLITVEGDKASMEVPAPFAGTVKEIKIAAGDKVSTGSLIMVFEVAGAAPLAAPVQAAAPAAAAAPAVAALKEVQVPDIGGDEVTVTEIMVNVGDSISEEQSLITVEGDKASMEVPAPFAGTLKEIKVATGDKVKTGSLIMVFEVAGAAPVAAPVQAAAAPAAAPAQAATPAAAAPATSGEFQENHEYSHASPVVRRLAREFGVNLAKVKGSGRKNRILKEDVQNYVKEALKRLESGAQAAASGKGDGAALGLLPWPKVDFSKFGDTEVQPLSRIKKISGANLHRNWVMIPHVTQWDNADITELEKFRQEQNAMEAKRDTGMKITPLVFIMKAAAKALEAFPAFNSSLSDDGESLILKKYVNIGIAVDTPNGLVVPVFKDVNKKGIYELSKELAEVSKKARGGKLTAADMQGGCFTISSLGGIGGTAFTPIVNAPEVAILGVSKSEMKPVWNGKEFAPRLQLPLSLSYDHRVIDGAEGARFITYLNECLSDIRRLVL

SEQ ID NO: 25398 - protein, 361 aa, Zea mays
MLRAARYLLGSPGASGFGSRSTAEEVTPDLGATTAIITGATSGIGAETARVLAKRGARVVIPARSAKAAEDVRARIVAECPAAAVLVLPLDLSSLASVRAFADRFLALGLPLHLLINNAGKFSHGQLALSEDGVEMTFATNYLGHFLLTKLLAGRMAETAAATGVQGRIVNVSSSVHGWFAGDWAEYLHLVTRRKIPYDATQAYAVSKLANVLHTRELAARLQEMGANVTANCVHPGIVRTRLNRDRDGVLTDLVFLLLSKLLKTIPQAAATTCYVAAHPRVAGVSGRYFADCNEALPSPAATDRHEAARLWRVSEAIIDGCTNSQPQRDCTTSPLLRLLPAQTQSQSPTGASSSPRRRAC

SEQ ID NO: 25399 - protein, 334 aa, Podocarpus macrophyllus
  misc_feature (179)..(179): Xaa can be any naturally occurring amino acid
AGYAGDDAPRAIFPSIIGRPRHTGVMVGMAHKESSIGDEAQNKRGILTLRYPIEHGIVTNWDDMENIWQHTFYNELRVPPEEHPVLLTEAPLNPKANREKMTQIMFETFNVPAVYVGIQAVLSLYASGRTTGIVLDSGDGVTHTVPIYEGYALPHAIQRMDLAGRELTDWLMKILTERXYSFTTTAEREIVRDIKEKLGYVALDYEQELHVLTSSLEKNYELPDGQILTVGAERFRGPEALFRPSFVGMETPGVHMATHSSIMKCDVDIRKELCGNIVLSGGSSMFPGMAERMSKEICTLAPSSMRVKVVAPPERKYSVWIGGSVLASLSSFQK

SEQ ID NO: 25400 - protein, 310 aa, Spiroplasma citri
MIYSLTLNPAIDQVIEVPNFQLGETNKAISEYEVIGGKGINVAVMLQHLGYPTTALGFLGRDNKEMFEHYLVNQKVAAFFREVNGKNRTNIKIKSLEIKQETELNGLAFSPSDDDVMALLTILKTELTKNDCLIISGSLPRDCPSDLYQTISTYCDENEILFVVDATKDVLLSTLSAKPFLIKPNLAELNELFETNYQFNQKTEIVTLGKKLQEKGAQNVLISSGKDGSILITPTNVYVGNTATGQLINSVGAGDSMVAGFVGTYLATNDYQEAMLTSICAGSATAFSQGIADKLLVESLKQQIKIRTFK

SEQ ID NO: 25401 - protein, 189 aa, Lycopersicon esculentum
MESALKDLSTPTGGVEDVYGEDCATEDQVITPWTIAVSGYNLLRDPRYNKGLAFTERERDADYLRGLLPPVISSQELQEKKLMQSIRQYDVPLHKYVAMMELQERNERLFYKLLIDNVEELLPIVYTPTVGEACQKYGSLFKRPQGLYISLNEKGRILEVLKNWPEKSIQVIVVTDGERILGLGDLGCQ

SEQ ID NO: 25402 - protein, 482 aa, Brevibacterium flavum
MNANVRVFILNSLAMNDPQRPPTLLWFRDDLRLSDNAALKWAADHGPVIGLFIDETINRSIGAAARWWREQSLNALAQDLSFYGVPLLRRTGNPLEILPKIVSEMEVKAVTWNRRYHQPLCEVDATLKKNLRDQGIEVHSHPGFLLTEPWEVSTATGTPYKVFTPFSKAAWEVARGHAYETVKNNVTVPSHLTGPEGVELPIPEMEQPFWATTLVKECAPGEKNASEKLFDFLEHLQDYPQARDSLARSATSKLSAHLRFGEISIHRVWAETAAIDSEGTELFLKELLWRDFAWHRLYALPHMDTQNVRMQFNRFGWSWDPSEKDKLNTPSTPLIPTKADQFHEDLAAWRAGKTGIPLVDAGMRELWATGSMHNRVRMVVASFLTKNLQIHWRHGEEWFWETLVDADPASNAFNWQWAAGSGDDASPYFRIFNPVTQAKKFDPDETYIRRWVPEYGTPSYPDPIVDLKESRQIALDAYSAIK

SEQ ID NO: 25403 - protein, 526 aa, Candida albicans
MSANIQALMKSYVNFDEHTSGSAARGILIGMFAAFGGFLFGYDTGTISGVLSMDYVKARFPNNKTDFTSGESSLIVSILSVGTFVGSLIAPLFSDRIGRRWTLILSTLIVFNLGVLLQTVATEKKLLIAGRAIAGTGVGLISSVIPNYISETTPKWARGAVTASYQWMITWGLLIAACANKGSQGRKDSGSYRIPIGIQFLWALILGIGFLFLPETPRYWVSKSEETKAKDSLRRIRNLPVDHPDLVSEYDDIKANFDFESKYATSSWTQVFKNVNKQHHRLFTGVAIQALQQLTGINFIFYYGTQFFKRSGIEDPFLIQLATNIVNVGMTVPGIILVETWGRRPLLMAGSVVMAVSQLIVAIVGVAASSHAANQCLVAFSCIFIAGFAATWGPLCWAICGESFALNVRSKSISLCTASNWLWNFGIGYATPYMVDSGKGNADLGSKVFFIWGGCNVIGGLFAYFMVYETKSLTLEQVDELYLKVDHAWQSKGFVPSVHAFRDDGDIEHISSDGKAEMVEVDENSV

SEQ ID NO: 25404 - protein, 404 aa, Frankia sp. CcI3
MVYDKIVVTGLGAMTPLGGDLAATWDGLVAGASGVAVIEDEWARELPVRLAAQLPVDPAATLPRKDSRKLDRGEQMAIVTARQAWADAGSPEVAPERLAVVIGTGYGGVQSTLGQHRILEQAGARRMSPHTVIMLMPNGPAAWVSIDLGAKAGARTPVSACASGAEAIATGMEMIQHGLADVVVAGGVEAPVDTLPLAAFAQMKALSTRHSDPAAASRPFDADRDGFVLGEGAGLLVLERAGFAAARGARVYAVAAGAATNSDALDIVTADPAGQRRAIEAALAGAGLTPTDIDLVHAHATSTPVGDPLEAEAITQTIGTHPAVTATKSMTGHMLGAAGAVGAIATVLSIRDGVIPPVRNLDRLNPTIKLDVVSGPARHETVRAAVANAFGFGGHNVSLAFTAP

SEQ ID NO: 25405 - protein, 459 aa, Streptococcus pneumoniae R6
MSKIVVVGANHAGTACINTMLDNFGNENEIVVFDQNSNISFLGCGMALWIGEQIDGAEGLFYSDKEKLEAKGAKVYMNSPVLSIDYDAKVVTAEVEGKEHKESYEKLIFATGSTPILPPIEGVEIVKGNREFKATLENVQFVKLYQNAEEVINKLSDKSQHLDRIAVVGGGYIGVELAEAFERLGKEVVLVDIVDTVLNGYYDKDFTQMMAKNLEDHNIRLALGQTVKAIEGDGKVERLITDKESFDVDMVILAVGFRPNTALADGKIELFRNGAFLVDKKQETSIPGVYAVGDCATVYDNARKDTSYIALASNAVRTGIVGAYNACGHELEGIGVQGSNGISIYGLHMVSTGLTLEKAKAAGYNATETGFNDLQKPEFMKHDNHEVAIKIVFDKDSREILGAQMVSHDIAISMGIHMFSLAIQEHVTIDKLALTDLFFLPHFNKPYNYITMAALTAEK

SEQ ID NO: 25406 - protein, 260 aa, Methanosarcina mazei Go1
MDKKIVIPGDLLSDDVKKSGYGTYVKNDKIYSSLCGIESLKEDKVGVIPLAGAYIPSVNDVVIGVVIVVTPSNWILDIAAPYDGLLHVSEYPRRVESREMPEILDVGDSVILRVRDVDSSMKIELALRDPNLHKLRTGQIVEVEPVKVPRVIGHGGSMISMLKKETNCSIFVGQNGRIWIDGKDEDIELLSKALRKIEAEAQRSGLTDRIYNFLKNERMKEKESKPVEFLKNEKTDVSVAKEDHSEDIYRKIDVLLDPKN

SEQ ID NO: 25407 - protein, 150 aa, Bradyrhizobium japonicum USDA 110
MRYLHTMLRVRNLDVALKFYQDALGLKEVRRIENDKGRFTLVFLCSADDLEALKKQPQTRGAPLVELTYNWDEEKYGEDRFFGHLAYEVDDIYATCEKLMKAGVTINRPPRDGNMAFVRSPDLHSIELLQKGEPKAPQEPWSSMPNTGHW

SEQ ID NO: 25408 - protein, 215 aa, Haemophilus influenzae
MNQSILSPFGNTAEERVLNAINAFKNGTGVLVLDDEDRENEGDLIFPAETITPEQMAKLIRYGSGIVCLCITDERCQQLDLPPMVEHNNSVNKTAFTVTIEAAKGVSTGVSAADRVTTIQTAIADNAVLTDLHRPGHVFPLRAANGGVLTRRGHTEASVDLARLAGFKEAGVICEITNDDGTMARAPEIVEFAKKFGYSVLTIEDLVEYRLAHNI

SEQ ID NO: 25409 - protein, 317 aa, Bartonella quintana str. Toulouse
MVQPHIRLLIVGSGPAGYTAAIYAARGMLEPVLVTGLQQGGQLTITTDVENYPGFADPIQGPWLMEQMAKQAENMGTKVVYDSIIKADLLKRPFILYGDSGTQYCCDALIIATGAQVRWLGLESEQTFMGGGVSACATCDGFFYRDKDVIVVGGGNTAVEEALYLSHLAKRVSIVHRRNHFRAEKILQDRLFACDNVRVIWDHVVEEIVGLPAHASMGAVVTGVRLKNIKTGQKIKVDTDGIFIAIGHDPAVSLFEGQLKQKPGGYLWTAPDSTATSIAGVFAAGDVVDNIFRQAITAAGMGCMAALEAERFLDLQI

SEQ ID NO: 25410 - protein, 445 aa, Bacteroides fragilis YCH46
MNIEKIMSSLEAKHPGESEYLQAVKEVLLSIEDIYNQHPEFEKSKIIERLVEPDRIFTFRVTWVDDKGEVQTNLGYRVQFNNAIGPYKGGIRFHASVNLSILKFLGFEQTFKNALTTLPMGGGKGGSDFSPRGKSDAEIMRFCQAFMLELWRHLGPDMDVPAGDIGVGGREVGYMFGMYKKLTREFTGTFTGKGLEFGGSLIRPEATGFGGLYFVNQMLQTKGIDIKGKTVAISGFGNVAWGAATKATELGAKVVTISGPDGYIYDPNGISGEKIDYMLELRASGNDIVAPYADEFPGSTFVAGKRPWEVKADIALPCATQNELNGEDAKNLIDNNVLCVGEISNMGCTPEAIDLFIEHKTMYAPGKAVNAGGVATSGLEMSQNAMHLSWSAAEVDEKLHSIMHGIHAQCVKYGTEPDGYINYVKGANIAGFMKVAHAMMGQGII

SEQ ID NO: 25411 - protein, 408 aa, Chara connivens
MAQEVFQRTKPHVNIGTIGHVDHGKTTLTAAITMTLAVNSTCTPKKYDEIDAAPEERARGITINTAHVEYETALRHYAHVDCPGHADYIKNMITGAAQMDGAILVVSAADGPMPQTKEHILLAKQVGVPSIVVFLNKEDQVDDEEILQLVDLEVRESLINYEFPGDKVPVVSGSALMALQALTEKPNTSRGENKWVDKIYELMDAVDSYIPTPKRDIEKPFLMPIEDVFSIQGRGTVATGRIERGILKLGDIVELIGLNEKIRSTVVTGLEMFRRLLEQGFAGENIGVLLRGIEKKDIERGMVIAQPGTIEPHTRFEAQVYILRKEEGGRHSPFFAGYRPQFFVRTADVTGVIEAFEYDNGDKTRMVMPGDRVKMIVNLICPIAIEKKMRFAIREGGRTIGAGVVYKY

SEQ ID NO: 25412 - protein, 382 aa, Methylococcus capsulatus str. Bath
MKFELVDSFSPNAVIKVIGVGGGGGNAVNHMVSSQIEGVDFICANTDAQALRNLGARTVIQLGNNLTKGLGAGANPDIGRQAALDDRERILEVLDGADMVFITAGMGGGTGTGAAPVIAEIAKEAGILTVAVVTKPFPFEGRKRRLVADKGIAELSQFVDSLITIPNEKLLPVLGKDVSLMAAFAAANDVLLGAVQGIAELITRPGLINVDFADVRTVMSEMGVAMMGTGVGSGPTRARDAAERAIASPLLEDISLSGAKGILVNITGGLDLAIGEFDEVGNAVKDYASDEAMVVIGTVIDPEMQDEVRVTVVATGLSGQSQMVSEAPLKLVHKQTGEIDYEQMQRPTVLRKQPKHEPRGEPSKEMDLEYLDIPAFLRRQAD

SEQ ID NO: 25413 - protein, 410 aa, Codium fragile
MIREKFERIKPHLNIGTIGHVDHGKTTLTAAITMALAVKGYTKAKNYMDIDSAPEEKARGITINTAHVEYETDVRHYAHVDCPGHADYVKNMITGAAQMDGAILVVSGADGPMPQTKEHILLAKQVGVPAIVVFLNKADQVDDDELLELVELEIQETLTTYEYPGEEIPIITGSAITALESLTAKYVLRIGNKWVQKIYDLMETVDEYIPTPKRDTEKPFLMAIENVVSITGRGTVATGRVERGMIEVGQTVELVGLKNTKEAIITGLEMFHKTLEKSVAGDNVGILLRRIQKEEIQRGMVLAKPSSILPHQHFKAQVYILKKEEGGRHTSFFAGYRPQFYVRTTDVTGHIKTFQGKIDNTQIQMVMPGDRIQMEVELIRPIAIETRMRFAIREGGKTVGAGVVTTIVQA

SEQ ID NO: 25414 - protein, 466 aa, Arabidopsis thaliana
MAGLKIWQAIFITIALIIIVVLSVLSFCLIWKKKSRRSKTLSLPIIQTPVVSKEIKEVRIEHVVSTSSNFDPQDENNNESDKFLLNLEMEKNRENGLSSSRSGSGKEGYLCVANRSTSSLYEMATPSPSPLSGLPESHLGWGHWFTLRDLEIATNRFSKENVIGEGGYGVVYRGELVNGSLVAVKKILNHLGQAEKEFRVEVDAIGHVRHKNLVRLLGYCIEGTNRILVYEYMNNGNLEEWLHGAMKHHGYLTWEARMKVLTGTSKALAYLHEAIEPKVVHRDIKSSNILIDDRFNAKISDFGLAKLLGDGKSHVTTRVMGTFGYVAPEYANTGLLNEKSDVYSFGVLVLEAITGRDPVDYARPANEVNLVEWLKMMVGSKRLEEVIDPNIAVRPATRALKRVLLTALRCIDPDSEKRPKMSQVVRMLESEEYPVPREERRVRRTQEENSDTDRSRPVSRSQSKRL

SEQ ID NO: 25415 - protein, 409 aa, Cyclotella meneghiniana
MGPEKFARAKPHINIGTIGHVDHGKTTFTAAITATLANDGESFAKAYSDIDGAPEERARGITINTAHVEYQTRDRHYAHVDCPGHADYVKNMITGAAQMDGAILVVSAADGPMPQTREHILLAKQVGVPHIVVFLNKQDQVDDDELLELVELEVRELLSTYDFPGDDIPICPGSRLQAIEAISSNPTLKRGDNPWVDKIYALMDAVDAYIPTPERDVEKTFLMAIEDVFSITGRGTVATGRIERGVIKVVDNVEIVGIGDTKTTTITGIEMFQKTLEEGFAGDNVGILLRGVTRENIERGMVLAKPGTITPHTNFESEVYVLTKEEGGRHTPFFTGYSPIFYVITTDVTGSIDQFTADDGSIVEMVMPGDRIKMTAELIYPVAIEEGMRFVIREGGRTIGAGVVSKIVK

SEQ ID NO: 25416 - protein, 728 aa, delta proteobacterium MLMS-1
MSNSKGLYVMMFSIHGLVRGQSPELGRDADTGGQVKYVLELARALEQRQEVERVELVTRLIADKIVSKDYAKPVEPLGDQARLIRIQCGGRKYIRKELLWPHLDEMVDKTVKYLKKEGRIPDIFHGHYADGGYVARELAAFFGVPLVFTGHSMGAHKKGKLLGEGLSEEEINRRYQMDYRIGVEERIIRDSEQIIVSTSHEIDKQYALYESFAAGSYNVVPPGIDLETFYPYYHNDFEHGHGGDELARQTRAMLLQELDRFWSETHKPFILALCRPDQRKNISGLIKAYGEDKELQAIANLAIFAGIRKDITQMEENERHVLTRMLLLMDTYDLYGKLAIPKKHDFTLEVPELYRLAAERRGVFVNPALVEPFGLTLVEAAATGLPLVATRDGGPSDIIANCENGILIDPTDSGAIAEACRKVLVDRELWDHYSRNGIMGVRKHYSWEAHCATTMEVYQRALEAMPTVRSRPSSKMPRAIGKRLAQVDRLLISDIDHTLVGDEAAMRELLELLEQHRQLVGWGVATGRSLEVTRELLSRYQIPEPDIIIAAVGTEIYYGPEFNPDNGWRQHLRHQWKPAEIRKALAGLSFLHPQENGDQHPFKVSYLMPDERDLLAKVHFTLQERKLHYTLEFSHGQFLDILPYRASKGKALRYLSYKWNIPLTKVMICGDSGSDAQMLRGETCGVVVGNYSRELEPLRGMRKLYFSKKEYAAGILDGIKHYKFLEKK

SEQ ID NO: 25417 - protein, 868 aa, Xylella fastidiosa Dixon
MSASPTVERWIVLKFGGTSVSRRHRWDTIAMVVRKRLEEHGTRVLIVVSALSGVTNELTAIAQGVVDSAQRVAALEQRHRDFLAELGLDAQAVLGTRFAMLSDLLQDARAVTRSLDWQAELLGQGELLSSTLGAAYLGASGVDIGWMDARDWLTALPPQPNQSEWSQRLSVSCQWKSDVEWRTRFDAQRAQVLITQGFISRHQDGGTAILGRGGSDTSAAYFGALLGAACVEIWTDVPGMFSANPKEVPDARLLTRLDYYEAQEIATTGAKVLHPRSIKPCRDTDVPMLILDTERPDVLGTRIDAEVEPVLGVKAISRRDGIVLVSMEGIGMWQQVGFLADVFTLFKKHGLSVDLIGSAETNVTVSLDPSENLVNTDVLTALSTDLSQICKVKIIVPCAAITLVGRGMRSLLHKLSEVWATFGKERVHMISQSSNDLNLTFVIDETDADGLLAVLHFKLIESGAMPVQDRAVFGSPWREIIGHVRTRVMPWWHSARMRLLAMRDEEGIGPCYVYHLPTVRERARQLNSVAAVDQRYYAIKANPHPAILRTLIEEGFGLECVSLGELRHVFAVVPHLVPSRVLFTPSFASRVEYEQAFLLGVNVTLDNVEALRLWPEVFRDRTLWLRIDLGYGDGHHEKVTTGGKTSKFGLSVKRIDEFIDVAKTLNITVTGLHAHLGSGVERGNHWSRMYDELAGFASRIGSVSTLDIGGGLPIPYRPDDEPFDVGAWGASLAEVKALHPKFQLVIEPGRFLVAEAGVLLTRVTQVIEKDDILRVGLEAGMHTLIRPALYDAWHGVENLSRLDETPHVLCDVVGPICESSDVFGRRRRLPAATASGDLMLIADAGAYGFSMASTYNLRGLPAEVVLDA

SEQ ID NO: 25418 - protein, 359 aa, Nostoc sp. PCC 7120
MSKSRRIGILTSGGDCSGLNAVIRAVVHCASGKGWEVFGIRQATLGLMARPPQVSKLEIDQVDPLLTSGGTMLGTTNKGDPFAFPMPDGSFCDRSSEIIAGYHQLDLDALIGIGGDGSLAILRRLAQQGAINLVGIPKTIDNDIGITEHAIGFDTAVNIATEALDRLHFTAASHSRVMILEVMGRDAGHIALAAGIAGGADVILIPEILYSMDDICYHIKHRQEEGKNYCLIIVSEAVRTQDGEILTLTNRLGQSRYGGIGEYLADQISDRIGAETRVTVLGHIQRGGIASPLDRLVASAFGVAAVNLIEAAKYDYMVAWQNRQVITVPIEEAIAQYKAVNPEDALVKTARGLGIYLGE

SEQ ID NO: 25419 - protein, 118 aa, Glycine max
  misc_feature (86)..(86): Xaa can be any naturally occurring amino acid
TYNIGVPSIDMGEGLGHLAMAPKDIIKWVDPIRAKGGTITGDPGPVKGGTTVIALVKDPEGFPLGLIQRPPVHDPFGKVRLRVGDXKRSIKFNEKALALKVVRKVDNPESKSTLALLG

SEQ ID NO: 25420 - protein, 410 aa, Arabidopsis thaliana
MTMISDLSKDLVEEILSKAPITSLGAVRSTHKQWNALSKGRLLYKAEAKDQFLGFMVMDHRFLSMIFHLNGILKGDGEGFDRPSIREVGDIVNQIDISKVFQCDGLVLCVPSDNSSVVVWNPYLGQTKWIEAREPHDESDMFALGYDKDKNHKILRLYDECYYYYEVYNFKTESWGEEDHLPGWDIDSYNRGVSLNGNTYFLTQEQRAKDKYRVFLLCFNFTTEKFENFIAMPFKYHRKYVGTLSCVGNEKLAALYQRWDTGEMAIWVTTKIESNEVLWSNLFKVDMKPLVRFGFQQCKDEAGSFFIDEEKKLAVVFNLDKKRGKRNNKTRCYHTAYIIGEKGYLKKEVLGEAVEVRKDVYRSALVCSSSYVPSLEKINQIEEEEEDKCKSIKMVDTKRQRKKRKRKSKR

SEQ ID NO: 25421 - protein, 130 aa, Oceanospirillum sp. MED92
MRLLHTMLRVTDLKASIEFYTELMGMQLLRSKDYPEGKFTLAFLGYGDEAEHTALELTHNWDTDAYDLGNGFGHLAIEVDDVYAACDAIKAKGGEVVREAGPMKHGSTVLAFVKDPDGYMIELLGSKRSD

SEQ ID NO: 25422 - protein, 308 aa, Exiguobacterium sibiricum 255-15
MRKIIVGSRSSKLAMTQTKWVIEQLKQAGAPYEFEIKNIITKGDRILDVTLSKVGGKGLFVKEIEQQMIDEDIDFAVHSMKDLPSELPTGLIIGATPSRVDARDALITTTGGGLDSLPEGAIVGTSSLRRGSQLLKLRPDLKIESIRGNIDTRLEKLKTGPFDGILLAAAGLQRMGWSEDIVSEYISTDDMIPAVGQGILAIECRANDQEVRDLLNLIHDQMTEKVAFAERSFLAAIEGSCHVPVGGFATINEDLSTTLVGFLGSVDGQQILLERETSLDPMQLGQTVATRLLDAGGREILASLPDDL

SEQ ID NO: 25423 - protein, 562 aa, Chlorobium tepidum TLS
MSTMNYKKYAPYPTVGLKDRTWPDKTITKAPIWCSVDLRDGNQALPIPMSVDEKVEFFRLLVSVGFKEIEVGFPSASATEFAFVRKLIENNLIPDDVSIQVLTQSREHLIRRTFEAIKGAKNAIVHLYNSTSRQQRDIVFRMSREEIITIAVAGTRLVRELKEASGNPGIRFEYSPESFTGTELEYALDVCHAVMDEWGASATNKVILNLPSTVELSTPNVYADRIEWFCRHIKNRDAVLLSVHAHNDRGTAVATSELAVMAGADRIEGALFGNGERCGNMDIIIMALNLMTQGVDPELDFSNLPHIKQVYSRCTRMTVHPRHPYSGDLVYTAFSGSHQDAISKGMKAHQRAADGVWDVPYLPIDPEDVGCNYEAIVRINSQSGKGGIAYVLEKEYGIQIPKWMQPDFGAVVQEVTDRTGEELSAEQIHELFQKEYIGATEPYLMKKCTISWSDEDPDRNDEVATIVSASMVGPQGEFSFRAKGNGPLDAFVRGMVSHTGIDFHVDEYAEHAIGHSSDAMAIAYIRLSFDDVALVCGSGIDSNISLASIKAIVSALNRYKKA

SEQ ID NO: 25424 - protein, 176 aa, Dendrobium grex Madame Thong-In
LPSLNAGGARLMKSTGTIGNRVASINVENAETNRRALRELLFCAPGALQYLSGVILFEETLYQKTAGGKPFVEVLNEGGVLPGIKVDKGTVELAGTNGETTTQGLDDLGKRCAKYYEAGARFAKWRAVLKIKSHSAFPAFYQSECLWTSSHAIICQENGLEAKHGHQKKRISLSII

SEQ ID NO: 25425 - protein, 244 aa, Nostoc sp. PCC 7120
MRLHIILGPTSVGKTDRSVVLAKQTKAPVIVLDRIQIYQEIATGSGRPLIDELEGTTRIYLEERQLADGNLNTLESLSLALQHIDRLSSQHKLLILEGGSISLCTALWKSRILENYQTTIEYVKVENEELYQSRLWRRMQNALISNPRRPSLIEELSRVWQDPHKLALVRTVVGYDVLIHWCQKYGLSPDQMWKSFQDNSFYINLMQEMFLAYMQYSQNQRQAFDQLAVEYKQQQALLASTVTL

SEQ ID NO: 25426 - protein, 386 aa, Aspergillus nidulans FGSC A4
MFGTRTVQPAKSLFRRAAAQPSIVRSPIAARSFATVQQDIFKPTKYGGKYTVTLIPGDGIGAEVAESVKTIFKADNVPIEWEQVDVSGVDTGNKHSEELFKESIASLRRNKLGLKGILFTPVERSGHQSFNVALRQELDIFASVVLIKNIPGYKTRHDNVDLCIIRENTEGEYSGLEHQSVQGVVESLKIITRAKSERIAKFAFSFALANNRKKVTCIHKANIMKLADGLFRSTFHKTAENYPTLEVNDMIVDNASMQAVSRPQQFDVMVMPNLYGGILSNIGAALVGGPGVVPGCNMGRDVAVFEPGCRHVGLDIKGKDQANPSAMILSGSMLLRHLGLDDHANRISKAVYDVIGEGKTRTRDMGGQATTHEFTRAVLDKMEAAL

SEQ ID NO: 25427 - protein, 112 aa, Brassica napus
MQDQLVCHGCRNTLLYPRGATNVRCALCNTINMVPPHPHPPPPHAHAGMDMAHIVCGGCRTMLMYTRGASSVRCSCCQTVNLVPATPPTNQPAHVNCGNCRTTLMYPYGAPS

SEQ ID NO: 25428 - protein, 117 aa, Triticum aestivum
  misc_feature (86)..(86): Xaa can be any naturally occurring amino acid
MARVALLAVFSVLAALAVAEMASGAVTCSDVTSAIAPCMSYATGQASSPSAGCCSGVRTLNGKASTSADRQAACRCLKNLAGFVQXISMGNAANIPGKCGVSVSFPINNNVNCNNLH

SEQ ID NO: 25429 - protein, 326 aa, Synechococcus elongatus PCC 6301
MAETFMFNALRAAIDEEMARDPNVLVLGEDVGHYGGSYKVTKDLYQKYGDFRLLDTPIAENGFTGMAVGAAMTGLRPIVEGMNMGFLLLAFNQVANNAMLRYTSGGNFTIPIVFRGPGGVGRQLGAEHSQRSEAYFHAVPGLKIVACSTPCNAKGLLKAAIRDNNPVLFFEHVLLYNLKEDLPDEEYICPLDKAEIVRPGKDVTVLTYSRMRYHCLQAVKTLEKEGFDPEVIDLISLKPFDFEAIEASVRKTHRVVIVEECMKTGGIAAELSAAIMERCFDELDAPVVRLSSQDIPTPYNGKLENLTIVQPEQIVAAVKDLLSAKV

SEQ ID NO: 25430 - protein, 380 aa, Burkholderia vietnamiensis G4
MTLASTLDIIAELKAGRMVILVDEEDRENEGDLVIAAEFVTPEAINFMARYGRGLICLTLTQERCKQLHLPLMTYRNGTQYGTAFTVSIEAAEGVTTGISAADRAHTIATAVAHDVRPEHIVQPGHVFPIMAQPGGVLVRAGHTEAGCDFTALAGLTPAAVICEIIKDDGTMARLPDLLEFAKEHDLKIGTIADLIQYRSRTESIIERIAERTMQTAHGTFRAVLYRDQPSGSPHIALVRGAPAPDVDTPVRVHEPLSVLDLLETGISTHSWTLDAAMREIAERDLGVIVLLNCGDTKEHLIDVFKAFDEEQKAAALKRRPVDFKTFGIGAQILRDVGVGKMQVLSNPRKLGSMSGYGLEVTGFIPMPGDEAKSCPASNA

SEQ ID NO: 25431 - protein, 109 aa, Oryza sativa
MSGVWVFKNGVVRLVEKQQATAGTAVAGGRRKALVHTPSGQVVSSYAALEARLTALGWERYYEDPSLFQFHKRGSLDLISLPADFSAFSSVHMYDIVVKNRDSFRVVDA

SEQ ID NO: 25432 - protein, 1166 aa, Oryza sativa (japonica cultivar-group)
MGRTRDMNGRKGLSKQCYVLNLGDSIVDAFSSHRANKQFKPWNKVERGGLDDLEKGKMTMSDDGDRTCPLCAEDMDITDQQLKPCKCGYEICVWCWHHIIDMAEKEDTEGRCPACRTRYDKDRIVKMAATCDRTVVEKNVDKKQKTQKVKSKAAVTVEAKKHLASVRVIQRNLVYIIGLPANLCNESILERREYFGQYGKVLKVSVSRPTGAPSQQAPTNNSISVLIELRTFAYADVRYITYAKEEEAIRCIQAVHNFVLEGKVLRACFGTTKYCHAWLRNMTCGNPDCLYLHDVGSQEDSFTKDEIISAYTRSRVPQMASSVSQRRAGTVLPPPAEDFSYSAVVAAKHPIKNGITNTANQSRLSPPNSSSGRSTLPPAASWGHRDLNTRTTATGVASSQSLTKSKTDPQSNSFSSSSTVSSTKLPSSWNDDTSTVPKMMEGRDSLSKTLKPYKPGIAKETQAVTSLESSLDIDFSTIPSAWNDDDVTSDGMSKGSDEKQVVNDNGKFECSVSSKPAESGHLTSKSTTSPKKDIAVNSTRQSPLNCVSSPSISKSEVKDGDGDYQVTNMASKTSTSVIRKDQSNQAAIDTATEDTRSESTDIDRLSVGVSSVTLSRKDGVQSIAENQQPDAILSTSVVVPFSQNLKLADSNDSTCQPSSDKHHDWCSDIQSSVSPQLNDIESYAVATDKSHGRVLDAADQASSSPYVHFPNTSPISLWNGKEINHTSTSDRTSTMMQPGLLSSVDSTSTMLNGHQEGLGTIYAPGKVSEHPRMKNHQPGAVGAVRIDNIGSFDKAVSVNKDESSIIADILSLEFDPWDESYSTANNFAKMLSASEKNDVLFDAPSWKTKTSNSESRFSFARQDNQGSFLDSSMRNYKSEQNFSLLSQNSHGNIYQSGIAFQSPEEGFAKSNSLTMLDMLATGTSKPKVSAPPGFSAPARVPPGFSSGFSSHEGLNPPPGFSSHNGPNPPPGFSSQGGSNQIYGSAYSETRPFDYLLGINTSHYQPQLARQTSDIEFVDPAILAVGKGRMPGISDSGLEMKTSHTFPSQLQTSNDPRFQLLMQQNVPSHQNVGFAEHVQDAFNPMNDNYLASRLIPQNHGSLSSYTQMSLQQPRSSHLTNGHWDGWGDLRQGNNVSMPDMSRMLYPTEANNFHMLGSNDLYNRAFGL

SEQ ID NO: 25433 - protein, 430 aa, Frankia sp. CcI3
MSIETTDPTANGRTTARQAVGRQAARQVVVTGLGATTPLGGDVASTWSGVLAGRSGIRRLDEPWAQSLPVRIAAPVAVEPQLGRVEARTLDRGQRLALVAAREAWADAGTPTPEPERFAVVVGSGVGGLTTLLDQYDVFRERGARQVSPHLVPMLMPNGPAAAVGLALGARAGVHAPVSACASGAEAIATAVDLIQAGRADVAVAGGTEAAVHPLPLVGFAQMQALSRREDPPESASRPFDKVRDGFVLGEGAGMFVLEAAEHARARGARVYTTVAGAGVSADAYHVAAPDPTGAGAARAVRRALHAAGLDPADVVHVNAHASGTPAGDLAESRALRGALGAALDGVAVTSTKSMTGHLLGAAGAVEALLCVLTLRERTVPATRNLEAIDDEITLDVVTMDNRPIRTGAALSTSFGFGGHDVCLAFTPWP

SEQ ID NO: 25434 - protein, 338 aa, Neurospora crassa
MVVKVGINGFGRIGRIVFRNAIEHDDIHIVAVNDPFIEPKYAAYMLRYDTTHGNFKGTIEVDGADLVVNGKKVKFYTERDPAAIPWSETGADYIVESTGVFTTTEKASAHLKGGAKKVIISAPSADAPMYVMGVNNETYDGSADVISNASCTTNCLAPLAKVIHDNFTIVEGLMTTVHSYTATQKTVDGPSAKDWRGGRTAAQNIIPSSTGSAKAVGKVIPDLNGKLTGMAMRVPTANVSVVDLTARIEKGATYDEIKEVIKKASEGPLAGILAYTEDEVVSSDMNGNPASSIFDAKAGISLNKNFVKLVSWYDNEWGYSRRVLDLISYISKVDAKKA

SEQ ID NO: 25435 - protein, 407 aa, Glycine max
  misc_feature (266)..(266): Xaa can be any naturally occurring amino acid
  misc_feature (280)..(280): Xaa can be any naturally occurring amino acid
MATTSVVPANRRRAAANPAEDMDFETTEGVKAIASFEEMGIKDDLLRGIYQYGFEKPSAIQQRAVTPIIQGRDVIAQAQSGTGKTSMIALTVCQVVDTSVREVQALILSPTRELASQTEKVILAIGDFINIQAHACVGGKSVGEDIRKLEYGVHVVSGTPGRVCDMIKRRTLRTRAIKMLVLDESDEMLSRGFKDQIYDVYRYLPPDLQVCLISATLPHEILEMTNKFMTDPVRILVKRDELTLEGIKQFFVAVEREEWKFDTLCXFMIPSLSLKLLYSXNTKRKVDWLTEKMRNNNFTVSSMHGDMPQKERDAIMGEFRAGTTRVLITTDVWARGLDVQQVSLVINYDLPNNRELYIHRIGRSGRFGRKGVAINFVKSDDIKILRDIEQYYSTQIDEMPMNVADLI

SEQ ID NO: 25436 - protein, 413 aa, Salmonella enterica subsp. enterica serovar Typhi str. CT18
MSKRRVVVTGLGMLSPVGNTVESTWKALLAGQSGISLIDHFDTSAYATKFAGLVKDFNCDDIISRKEQRKMDAFIQYGIVAGVQAMQDSGLEVTEENASRIGAAIGSGIGGLGLIEENHSSLVKGGPRKISPFFVPSTIVNMVAGHLTIMYGLRGPSISIATACTSGVHNIGHAARIIAYGDADAMVAGGAEKASTPLGVGGFGAARALSTRNDNPQAASRPWDKERDGFVLGDGAGMLVLEEYEHAKARSAKIYAEIVGFGMSSDAYHMTSPPENGAGAALAMVNALRDAAIEPAQIGYVNAHGTSTPAGDKAETQAVKSVFGDAASRVMVSSTKSMTGHLLGAAGAVESIFSILALRDQAIPPTINLDNPDEGCDLDFVPHEARQVSDLEYALCNSFGFGGTNGSLIFKKI

SEQ ID NO: 25437 - protein, 387 aa, Oryza sativa (japonica cultivar-group)
MARKKIREYDSKRLLKEHLKRLAGIDLQILSAQVTQSTDFTELVNQQPWLSTMKLVVKPDMLFGKRGKSGLVALNLDIAQVKEFVKERLGVEVEMGGCKAPITTFIVEPFVPHDQEYYLSIVSERLGSTISFSECGGIEIEENWDKVKTIFLSTEKPMTPDACAPLIATLPLEARGKIGDFIKGVFAVFQDLDFSFLEMNPFTIVNGEPYPLDMRGELDDTAAFKTSRSGEISNSHYHSVEFSVLQKALSMTWMRSASLKFTVLNPKGRIWTMVAGGGASVIYADTCATADPDGRKRALLIGGGIANFTDVGATFSGIIRALREKESKLKAARMHIYVRRGGPNYQTGLAKMRKLGAELGVPIEVYGPEATMTGICKQAIECVMAAA

SEQ ID NO: 25438 - protein, 206 aa, Dichelobacter nodosus
IQHIDDGAIYRALSAGKVVIVAGFQGVDEAGDITTLGRGGSDTTAVALAAVLKADECQIYTDVDGVYTTDPRIEPRARKLEQISFVEMLEMASLGSKVLQIRSVEFAGKYHVPVRVLSSFSDDETGTLISSVEGAIIEATHVTGIAFTRDEVMIQLMHLPDDMNTLYQILRPIGCADISLDMVRKRAMMMVQLILVLLCLIKKKIG

SEQ ID NO: 25439 - protein, 154 aa, Bradyrhizobium japonicum USDA 110
MQHNDYTVGKGDRGAGITDQFPIGVSILSLRFPPTATLTHRNRTKRRKGPDHPMTARIFKPAKNAMQSGRSKTREWQLDYEPEQPRAVEPLMGWTSSGDMKQQITLRFDSKEEAVAYCERKGIAYQVIEPQDSIRRPVAYADNFSFRRGEPWTH

SEQ ID NO: 25440 - protein, 674 aa, Debaryomyces hansenii CBS767
MIARNIKATSCQRAFRMASSQVRCMNKTSFLKATMSASSRPTPAPSFDQQDPSSGATELKKNVVRKSQYPIMDDSFIGLTGGEIFHEMMLRHKVDTVFGYAGGAILPVFDAIYNSDKFNFVLPRHEQGAGHMAEGYARACGKPGVVLVTSGPGATNVITPMTDALADGIPLVVFTGQVPTTAIGTDSFQEADVIGISRSCTKWNVMVKNIAELPRRINEAFEIATSGRPGPVLVDLPKDVTAGILRESIPINTTLPSNALTQITKKVATEFTMESIRRSAQLLNIAKKPILYVGNGILNHEQGPALLKELADKACIPVTTTIQGLGAFDQRDPKSLDMLGMHGSAAANTAMQNADLIIALGARFDDRVTGNVSKFAPAAKLAASENRGGIIHFEISPKNINKVVEATEAVEGDVTNNLSKFIPLVDAVKERPEWMGEVQTWKEKYPYAYQLETPGSLIKPQTLIREISKQSSTYGKDVYVTTGVGQHQMWAAQHFTWTKPRTMITSGGLGTMGYGLPAAIGAQVAKPDAMVIDIDGDASFNMTLTELSSAVQANAPIKVCVLNNEEQGMVTQWQSLFYEHRYSHTHQSNPNFMKLADAMGVKGIKISTQEELVSGIKEFLDYAGPVLLEVIVEKKVPVLPMVPGGNALDDFIIFDADVERKENELRNQRTGGKH

SEQ ID NO: 25441 - protein, 261 aa, Methanosarcina mazei Go1
MDDGRVLETRRKNVFGAITGKPTSLGGSAGRFDATAKGGLYAVREAAKKLGIELEDAKVAVQGFGNVGYHAAYLAKKLFGCRVVAVSDSKGAIYSGKGLDPEDVSGYKHSTGSVLGYPEAENLSNKELLELDVDILIPAALEDVVSIENAEKVRPKILAEMANGPTTREAEEVLISNGVHIIPDILYNGGGVIVSYFEMVQNESSIQWDEKEVEMRLEKKMKEAYHSVFDFAEKNNAGMRQAAYTLAVGRVVEAMQLRGWI

SEQ ID NO: 25442 - protein, 488 aa, Listeria innocua
MADVRKLKNYINGEWVESKADKYEDVINPATGEVLCQVPISTRAELDQAAVIAEQAFEKWSQVAVPRRARVLFSFQQLLIQHKEELARLITLENGKNLSEARGEVQRGIENVEFAAGAPTLMMGDSLASIATDVEAANYRYPVGVVGGIAPFNFPMMVPCWMFPMAIALGNSFILKPSERTPLLMEKLVELFSEAGLPKGVFNVVYGAHDVVNGILENETIKAVSFVGSKPVGEYVYKTGSANLKRVQALTGAKNHTIVLNDADLEDTVTNVISAAFGSAGERCMACAVVTVEEGIADDFLAALRTAAQNVKIGNGLDDGVFLGPVIREENQKRTIAYIEKGVEEGAKLTVDGRETGLSEGYFVGPTILEDVTTDMTIWKDEIFAPVLSVIRVKNLQEAVRVANQSEFANGACIFTNNAKAIRYFREKIDAGMLGVNLGVPAPMAFFPFSGWKSSFYGTLHANGKDSVDFYTHKKVVTARYSLKGYEE

SEQ ID NO: 25443 - protein, 585 aa, Magnetospirillum magnetotacticum MS-1
MCGIAGLMTPGGPPDETVLDKLADALAHRGPDGRGRHVQGNVGLVQNRLSIIDLEGGRQPILDGQGNAIVANGEVYNYLELKSDMAGQAFATGSDCEPPLHLYRHQGPAFARSLRGMYALAIHDGKAEKLILCRDPFGIKPLYLAEGSPGLAFASEPQALLAAGLVKPELDPVALAELLQLQFTTGTRTIFKGIRRLAPGETVVAEEGCVAESRRLPALPAGGPNEGGLDQLLDQLDDTLTESVELHQRSDVPYGMFLSGGIDSSVVLALMARLNPRGILAFTAGFPGTKVHDEREHARDLARAVGARHVEVEFTQSDFWALLPQVAAAMDDPAADYACLPTFKLAQEARKEVKVILSGEGGDELFGGYGRYRHAMRPWPLTKSMRRKGTFDGLDVLRDGILSHWRHGMKLAERVEAMPGRTRLQVAQAVDCADWLPNDLLAKADRCLMANGIEGRVPFLDPVVAAFAFRLPDHLKVRKGLGKWILRRWLETALPASRPFEKKRGFTVPVAEWIAARPEIGHLVAHQPGIEEICHPGKVKRLFKDCTKDTGFACWTLLFYALWHQRHVLGKIPDGDAFSALAERI

SEQ ID NO: 25444 - protein, 155 aa, Craterostigma plantagineum
MAQFGGEKYGGRHTDEYGNPIQQGAGAHRGGGIMGGGQQAGQHGTTGVLGHGTAGQHGTTGGGLGHGTAGTGGALGGQHRRSGSSSSSSSSESDGEGGRRKKGMKDKMKEKLPGGHGTTTDQQQYGTAATHGQAQQHEKKGIMDKIKEKLPGGQH

SEQ ID NO: 25445 - protein, 410 aa, Brachyspira hyodysenteriae
MAKGTYEGNKTHVNVGTIGHVDHGKTTLTSAITAVSSAMFPATVQKVAYDSVAKASESQGRRDPTKILTIATSHVEYESDNRHYAHVDCPGHADYIKNMITGAAQMDGAILVVSAEDGVMPQTKEHVLLSRQVGVNYIVVFLNKCDKLDDPEMAEIVEAEVIDVLDHYGFDGSKTPIIRGSAIKAIQAIEAGKDPRTDPDCKCILDLLNALDTYIPDPVREVDKDFLMSIEDVYSIPGRGTVVTGRIERGKIEKGNEVEIVGIRPTQKTTCTGVEMFKKEVVGIAGYNVGCLLRGIERKAVERGQVLAKPGTITPHKKFEAEVYILKKEEGGRHSGFVSGYRPQMYFRTTDVTGVINLQGDAQMIMPGDNANLTIELITPIAMEEKQRFAIREGGKTVGNGVVTKNIRII

SEQ ID NO: 25446 - protein, 235 aa, uncultured bacterium
GISHGIDALVVIGGDGSLTGAHLFYQEYGIPAIGLPGTIDNDLSGTDSTIGFDTACNTAIEAIDKIRDTATSHDRLFFVEVMGRDAGFIAINAGIGSAAAAILIPENKTPIETLVEKLKTRTKAKKTSNIFIVAEGGKSGSAQEIADKVKKHLPYYDIKVTILGHLQRGGAPTSFDRLLSFQMGVAAIEGLMAGKYDVMAGMINNKIVYTPIVKAIVDDKTVDEEDLRVANILST

SEQ ID NO: 25447 - protein, 317 aa, Vibrio cholerae
QHFYQRMFSHNPELKHIFNMTHQKTGRQSVALFEAIAAYAKHIDNLAALTSAVERIAHKHTSFNIQPEHYQIVGHHLLETLRELAPDAFTQPVEEAWTAAYFFLAQVFIDREGALYLERKQALGGWRDGRTFVVREKQVESAYVTSFVLVPADGGAVLDYQPGQYIGIEVTPEGSDYREIRQYSLSHASNGREYRISVKREGVDSDNPGLVSHYLHNNVKVGDSVKLYAPAGDFFYVERERPVVLISAGVGATPMQAILHTLAKQNKSGVTYLYACNSAKEHTFAQETAQLIAQQGWMQQVWYRDESADDVLQGEMQ

SEQ ID NO: 25448 - protein, 191 aa, Zea mays
  misc_feature (29)..(29): Xaa can be any naturally occurring amino acid
  misc_feature (172)..(172): Xaa can be any naturally occurring amino acid
  misc_feature (180)..(180): Xaa can be any naturally occurring amino acid
KRPTTRSLASSMFFSADAITSPAQATMVXPFTGLKSSAAFPDTPKRNNYITSIASNAGRVSCMKERPPVGKKKFETLSYLPDLTEVELDKEVDYLLRNKWIPCVEFELEHGFVYREHVCTPGYYDGRYWTMCKLPLVGCTDSAQVLKEFQECKTEYPYAFIRIIGFDNTRQXQCIRFIDXEPPSFTGAKLV

SEQ ID NO: 25449 - protein, 328 aa, Nocardia farcinica IFM 10152
MSTPVRDLIIVGSGPAGYTAAVYAARAELKPLLFEGTQFGGALMTTTEVENFPGFRNGIMGPDLMEEMREQAKRFGAEIRTEDVDALDLTGPVKKVTVGDETYEAYAVILAMGSAARYLNVPGEERLLGRGVSACATCDGFFFRGQDIVVVGGGDSAMEEATFLTKFASSVTIVHRREEFRASRIMLERAKANSKIKFVLNAEVTEVHGDTSVTGLTLRDTRTGETSHLAATGLFVAIGHDPRSELVRDQVELDAEGYVVVEHPTTATKIPGVFAAGDLVDHTYRQAITAAGTGCRAAIDAERWLAEQGDITDNTLDNAGEPVAVNAN

SEQ ID NO: 25450 - protein, 470 aa, Arabidopsis thaliana
MAATSPRPPPSTSLTSQQPPSPPSQLPLRTMPGSFQGPDKFFRTRAEKYKSTVFRTNIPPTFPFFGNVNPNIVAVLDVKSFSHLFDMDLVDKRDVLIGDFRPSLGFYGGVRVGVYLDTTEPKHAKIKGFAMETLKRSSKVWLQELRSNLNIFWGTIESEISKNGAASYIFPLQRCIFSFLCASLAGVDASVSPDIAENGWKTINTWLALQVIPTAKLGVVPQPLEEILLHTWPYPSLLIAGNYKKLYNFIDENAGDCLRLGQEEFGLTRDEAIQNLLFVLGFNAYGGFSVFLPSLIGRITGDNSGLQERIRTEVRRVCGSGSDLNFKTVNEMELVKSVVYETLRFSPPVPLQFARARKDFQISSHDAVFEVKKGELLCGYQPLVMRDANVFDEPEEFKPDRYVGETGSELLNYLYWSNGPQTGTPSASNKQCAAKDIVTLTASLLVADLFLRYDTITGDSGSIKAVVKAK

SEQ ID NO: 25451 - protein, 204 aa, Triticum aestivum
  misc_feature (201)..(201): Xaa can be any naturally occurring amino acid
YNKFVQKSRLVPVRNSRDIVDPRVRSSDCCKITREPGPVKGGSTVIAFAQDPDGYMFELIQRGPTPEPLCQVMLRVGDLDRAIMFYEKALGMKLLRKKDVPQYKYTIAMMGYAEEDKTTVLELTYNYGVTEYNKGNAYAQVAIGTDDVYKSAEAVELVTKELGGKILRQPGPLPGLNTKITSFLDPDGWKVVLVDHADFLXELH

SEQ ID NO: 25452 - protein, 144 aa, Triticum aestivum
MESSPPATKAARGGRRGGDRKKSVSKSVKAGLQFPVGRIARYLKKGRYAIRYGSGAPVYLAAVLEYLAAEVLELAGNAARDNKKNRINPRHLCLAIRNDEELGKLLHGVTIASGGVLPNINPVLLPKRTTGSSHGEKEKASSPA

SEQ ID NO: 25453 - protein, 368 aa, Corynebacterium efficiens YS-314
MSEDPDPDQPATAPPTPDQVRRWQRYLANERAEAEVYRDLARKRTGEEREILLKLAEAESRHEAHWRGLLGDAGGGPVKPDLRTRVLGMLTRRFGSVFSLALMQSAESRSPYSSDDDATEQMSADERIHAEVIRGLATRGRERMSGNFRAAVFGVNDGLVSNLALVIGVMASGVAPQIVLITGVSGLLSGALSMAAGEYISVRSQLELLDASTPDPETRTAIPELDVDANELELVYRARGMGEQEAAARAAAVFGALVSSRGELDDAHLIPTTDREETGSARSAALFSFLSFSVGAFIPIIPLLFGLAGVAAGVLALVLVGISLLFTGGLTGVLSGKPPLYRAIRQLLVGLGAASITYVLGLAFGTML

SEQ ID NO: 25454 - protein, 801 aa, Staphylococcus carnosus
MSKQRLVMIGNGMAGVRTIEEIIDRDPDKFDITIIGKEPYPNYNRIMLSNILQKKMTVEETIMNPYSWYEENGIALITGEKATRVNREKHIVETEKGREIPYDICIFATGSKAFVLPIPGHELPSVIGWRTIEDTERMIEIAQDKKEATVIGGGLLGLECARGLLDQGMNVTVVHLAEWLMEMQLDRQAGDMLREDLEKQGMKFELGANTKEIIGNQDVEAIRLADGRDLPADLVVMAVGIKPFTQEAIDSGIDVERGIVVDDFMRTSDPEIYAVGECAQHNCKVYGLVAPLYEQGKVLADHLTGRPTEGYQGSTTFTSLKVSGCDLYSAGQIQEDDEVEGVEIYNSHDHVYKKIFLKEERVVGAVLYGDTDDGTRFFNMMKKREPIEDYTLVSLLQKVGEEAVSTVADMDDSETICGCNGVSKGKIVSAIVEDGLTSVAEVTKATKAGNSCGKCKPQIGELLEHTLGGAFVASKPAGICDCTELTRDQIVTQIRAKGLKTSKEVRHVLDWKNKGGCPKCRPAINYYLNMVYPHEHEDEKASRFANERYHANIQNDGTFSVIPQMRGGVTNPDQLIRLGEVAKKYDVPLVKVTGSQRIGLYGISKEDLPKVWKDLGMRSASAYAKKTRSVKSCVGKEFCRFGTQYTTRLGIRLEETFEYIDTPHKFKMGVSGCPRSCVESGVKDFGVIGVENGFQIYIGGNGGTEVTKGQFLTTVETEEDVIQLCGAYMQYYRETGIYAERTAPWLERMGFENVKEYVLDPERQKALYDRIMDAKRAVAEEPWSEIVNDQADQKIFKVEKV

SEQ ID NO: 25455 - protein, 420 aa, Streptococcus pyogenes M49 591
MTKEKLVAFSQAHAEPAWLQERRLAALEAIPNLELPTIERVKFHRWNLGDGTLTENESLASVPDFIAIGDNPKLVQVGTQTVLEQLPMALIDKGVVFSDFYTALEEIPEVIEAHFGQALAFDEDKLAAYHTAYFNSAAVLYVPDHLEITTPIEAIFLQDSDSDVPFNKHVLVIAGKESKFTYLERFESIGNATQKTSANISVEVIAQAGSQIKFSAIDRLGPSVTTYISRRGRLEKDANIDWALAVMNEGNVIADFDSDLIGQGSQANLKVVAASSGRQVQGIDTRVTNYGQRTVGHILQHGVILERGTLTFNGIGHILKGAKGADAQQESRVLMLSDQARADANPILLIDENEVTAGHAASIGQVDPEDMYYLMSRGLDQETAERLVIRGFLGAVIAEIPIPSVRQEIIKVLDEKLLNR

SEQ ID NO: 25456 - protein, 495 aa, Salmonella enterica subsp. enterica serovar Typhi Ty2
MSRNTEATEEVGIWTGGRLNYKEGFFTQLPTDELAKGISEEVVRAISAKRNEPDWMLEFRLNAYRAWLDMDEPHWLKAHYDKLNYQDYSYYSAPSCGNCDDSCVSQPGAVQQTGANTFLSKEVEDAFEQLGVPVREGKEVAVDAIFDSVSVATTYREKLAEQGIIFCSFGEAIHDHPDLVRKYLGTVVPGNDNFFAALNAAVASDGTFIYVPKGVRCPMELSTYFRINAEKTGQFERTILVADEGSYVSYIEGCSAPVRDSYQLHAAVVEVIIHKDAEVKYSTVQNWFPGDNNTGGILNFVTKRALCEGENSKMSWTQSETGSAITWKYPSCILRGDNSIGEFYSVALTSGHQQADTGTKMIHIGKNTRSTIISKGISAGHSQNSYRGLVKIMPTATNARNFTQCDSMLIGADCGAHTFPYVECRNNSAQLELEATTSRIGEDQLFYCLQRGISEEDAISMIVNGFCKDVFSELPLEFAVEAQKLLAISLEHSVG

SEQ ID NO: 25457 - protein, 490 aa, Lotus japonicus
VALMILRKNLKKPDSIPNIPPGPWKLPIIGSIPHLVGSPPHRKLRDLAKKYGPLMHLQLGEVIFIIVSSAEYAKEVMKTHDVTFASRPRSLFTDIVFYGSTDIGFSPYGDYWRQVRKICNVELLSMKRVQSLWPIREEEVKNLIQRIASEEGSVVNLSQAIDSLIFTITSRSAFGKRYMEQEEFISCVREVMKLAGGFNIADLFPSAKWLENLTRMRSKFEYLHQKMDRILETIIDDHKANSRTKEGQVEGGEEDLIDVLLKYENSSTDQDFHLTIRNIKAILFDIFIAGSETSATTINWTMAEMMKDPILLKKAQDEVREIFQRRGKVDETCIYELKYLKAFINEVLRLHPPGPLVFRECRQACEINGYHIPAKSTVLVNTFAIGTDSKYWAEPERFCPERFIDSSIDYKGTNFEHLPFGAGRRICPGINYGMANVELVLALLLYHFDWTLPKGIKNEDLDLTEEFGVTVSKKEDLCLIPSISHPLPST

SEQ ID NO: 25458 - protein, 531 aa, Sorghum bicolor
MATTATPQLLGGSVPQQWQTCLLVLLPVLLVSYYLLTSRSRNRSRSGKLGGAPRLPPGPAQLPILGNLHLLGPLPHKNLRELARRYGPVMQLRLGTVPTVVVSSAEAAREVLKVHDVDCCSRPASPGPKRLSYDLKNVGFAPYGEYWREMRKLFALELLSMRRVKAACYAREQEMDRLVADLDRAAASKASIVLNDHVFALTDGIIGTVAFGNIYASKQFAHKERFQHVLDDAMDMMASFSAEDFFPNAAGRLADRLSGFLARRERIFNELDVFFEKVIDQHMDPARPVPDNGGDLVDVLINLCKEHDGTLRFTRDHVKAIVLDTFIGAIDTSSVTILWAMSELMRKPQVLRKAQAEVRAAVGDDKPRVNSEDAAKIPYLKMVVKETLRLHPPATLLVPRETMRDTTICGYDVPANTRVFVNAWAIGRDPASWPAPDEFNPDRFVGSDVDYYGSHFELIPFGAGRRICPGLTMGETNVTFTLANLLYCYDWALPGAMKPEDVSMEETGALTFHRKTPLVVVPTKYKNRRAA

SEQ ID NO: 25459 - protein, 445 aa, Corynebacterium efficiens YS-314
MITAQMDETVLWLGLATVVSLLLSGLLGAIESAVSTVSRARVEQMHKDEVSGSAALLHVIDNRATNINILVMLRTLLDTSAAVLAGVIAVHLVTSDAWAIFLAIVVVSLITFGVVGVFGRTVGRKNPYTVSLRSAVVLTGVEKVLGPLAKLIIWVGNVIAPGPGLRNGPYATEVELREMVDIAQEHGIVEVEERRMIQSVFDLASTTVRQVMVPRPEMIWIESGKSAGQATALCVRSGHSRIPVIGENVDDIIGVVYLKDLVKQTYYATDGGRSVTVDEVMRPAKFIPDSRPLDALLQEMQEEQNHIAILIDEYGGVAGLISIEDILEEIVGEIADEYDNDEVAPIEQIAERTYRVMSRLSLEDLRDHLQEELEVDIDFTDDIDDQVDTVGGLIAFELGRVPLPGATVETSGLRLTAEGKRNRRGRLRMHSAVVEVLPAVEQAEN

SEQ ID NO: 25460 - protein, 632 aa, Bacillus licheniformis ATCC 14580
MCGFVGVFNHRPSSETAAQEELIKQMNEMIVHRGPDDDGYYHDEHVGFGFRRLSIIDVENGGQPLSYEDDSYWIIFNGEIYNYIELKDELLSKGYEFKTDSDTEVLLATYRHYKQEAASKLRGMFAFLIWDKKEQLLYGARDPFGIKPLYFTKTDGHVYFASERKSLMAVDADLELNEKALQQYTSFQFVPEPETLDKKVQKVESGHQFTVRPGEDIQFKTYWKVQFKPVQTEEDKLVQEVRDAIFDSVKVHMRSDVPVGSFLSGGIDSSFIVSVAKQFHPNLKTFSVGFEHEGFSEVDVAKETADKVGVENFSAIISPEEYMNELPKIVWHLDDPLADPAAIPLYFVAKEAKKQVTVVLSGEGADELFGGYNIYREPLSLKPFERIPSPLKKMLLRVASAMPEGMKGKSFLMRGCTPLEDRYIGNAKIFEEGMKSKLLRQYDSNLSYCDVTKPYFEESRSYSEINKMQYVDIHTWLRGDILLKADKMTMANSLELRVPFLDKVVFEAASKIPEELKTKNGTTKYLLRKAAEGIVPEHVLNRKKLGFPVPIRHWLKNEMHDWAVNIIKESETDAYIHKDYVLQLLEDHCANKADNSRKIWTVLIFMIWHSIFVEKRFVPEELNHQPKEVIIV

SEQ ID NO: 25461 - protein, 427 aa, Synechococcus sp. CC9605
MELCHAVLNLPFSGPPLDHWTLPNGVRCVTADMPDAPLTCLDLWCRAGSASEQPGEAGMAHFLEHMVFKGSERLAAGAFDEAIEALGGSSNAATGFDDVHFHVLTPPDRAREALDLLLELVLQPSLEPDGFHTERGVVLEEIAQYADQPNEQVLQLLLSKSCDQHPYGRPILGTPRSLKGMTHEAMRAFHQRQYRGSNCCLAIAGPPSTELRSALGSSALAGLLDAIDPSLASSPLSVRPGRESVVVDRLESARLLMLWEAPQAKDQAGVMAADLATTLLGEGRRSRLVNRLREELQIVESVSMDLSVLEQGSLITLEVICPDEHLEAVEDEVNRQLRAMADELVSDQELKRGQQLVSNGLRYALESTGQVSGLSASQTLWDRQQDLLHPLTFLLQWTAERLRSDLFPRLQPEQAFVLTAQAKTKNG

SEQ ID NO: 25462 - protein, 154 aa, Medicago sativa
AVKMLLIPWKWGMKYFWDTLLDADLESDILGWQYISGSLPDGHELERLDDPEIQGTKYDSEGEYVRQWLPELARIPTEWIHHPWNAPPTVLRASGVELGQNYPKPIIDIDLAREQLTQAIFKMWEDEAASKSSTSENKHEVVDDSENLSIPKFS

SEQ ID NO: 25463 - protein, 487 aa, Eschscholzia californica
GTSTVALIAVIISSILYLLFGGSGHKNLPPGPKPWPIVGNLLQLGEKPHAQFAELAQTYGDIFTLKMGTETVVVASTSSAASEILKTHDRILSARYVFQSFRVKGHVENSIVWSDCTETWKNLRKVCRTELFTQKMIESQAHVREKKCEEMVEYLMKKQGEEVKIVEVIFGTLVNIFGNLIFSQNIFELGDPNSGSSEFKEYLWRMLELGNSTNPADYFPMLGKFDLFGQRKEVAECLKGIYAIWGAMLQERKLAKKVDGYKSKNDFVDVCLDSGLNDYQINALLMELFGAGTETSASTIEWAMTELTKNPKITAKIRSEIQTVVGERSVKESDFPNLPYLEATVKETLRLHPPTPLLLPRRALETCTILNYTIPKDCQIMVNAWGIGRDPKTWTDPLTFSPERFLNSSVDFRGNDFSLIPFGAGRRICPGLPIANQFIALLVATFVQNLDWCLPNGMSVDHLIVEEKFGLTLQKEPPLFIVPKSRV

SEQ ID NO: 25464 - protein, 367 aa, Cucumis melo
MPNLTPFSKLDKTFDRASELKAFDQTKAGVKGLVDSGVAEIPGIFYCPPKEASNSIPEETHLGVPVVDLGDIDKDPFKRRQVVEEIREASETGGFFQVINHGVPVSVQEEIINRVRRFFEQDSEVKKQYYTRDYTKSFIYNCNFDLFSSPVANWRDTIVTVMAPNPPNPHDLPQVCRDILFEYSKHIMKLGELIFGLLSEALGLKSTHLVDLDCNEGLRIIGHYYPSSPQPELSIGTTEHSDDTFITVLLQDNMGGLQVRQQNKWVDVPPVPGAFVINVGNLLQLITNDRFVSSEHKVLANREGPRISVASFFSTGRLPTSKLYGPIKELLSEQNPPKYKEITVREYNIYFAEKGLDGTSALPHFKI

SEQ ID NO: 25465 - protein, 418 aa, Streptomyces peucetius
MNRRIVITGIGVVAPAVGTKPFWELLLSGTTATRAISTFDATPFRSRIAAECDFDPVAAGLSAEQARRLDRAGQFALVAGQEALADSGLRIDEDSAHRVGVCVGTAVGCTQKLESEYVALSAGGAHWVVDPGRGSPELYDYFVPSSLAAEVAWLAGAEGPVNIVSAGCTSGIDSIGYACELIREGTVDAMVAGGVDAPIAPITVACFDAIRATSDHNDTPETASRPFSRSRNGFVLGEGGAIVVLEEAEAAVRRGARIYAEIGGYASRGNAYHMTGLRADGAEMAAAITAALDEARRDPSDVDYVNAHGTATKQNDRHETSAFKRSLGEHAYRVPISSIKSMIGHSLGAVGSLEVAATALAVEYGVIPPTANLHDPDPELDLDYVPLTAREKRVRHALTVGSGFGGFQSAMLLSRLER

SEQ ID NO: 25466 - protein, 546 aa, Zea mays
MVFPAILPKVAVRLLFTFYRAARKLRRHAFQLYNRRTAAKPPSFSVSQQQAGAATFKTDAAIPDAAGRTVVCDVHGALLRSSALFPYFMVVAYEGGSLLRAMLLLCAFPLVWALGERSGGAGAVRVMAFVTFAGLRPRDMDLVGRAVLPKHYMEQLNALVYGSLWLPARRKVAVTGAPRVMSEWFLKEYLAADAVVGLELQLVTVGRCRYFTGLLSGPATGPELRHKALMEALGAEDDTVADVGIISNSNPLDHVPYCKEVYVVNTENTENDKLPRVKYPKPLIFHDGRLAFLPTPAAMLAFFLFLPLGVILSVIRINIGIVLPYKVNFVAGAIFGVRFRASGLRAPPADGEQRRGVLYVCTHRTLVDPIMLTTALQKPVPALTYSLSRLSELIAPIKTVRLTRDRARDADTMSRLLKQGDLAVCPEGTTCREPYLLRFSPLFAELADDMEPVALDAQVTMLYGTTASGHKWLDPVAFFANPVPSYRVEFLGTVPREWTRAGGRTGVEVANWVQRRLGEALEFECTELTRRDKYMMLAGNDGVVAK

SEQ ID NO: 25467 - protein, 367 aa, Psychrobacter arcticus 273-4
MATILTLAGDGIGPEIMTQAIDVLNAVNNKFALGLTLESGLIGGVAVDATGEPLPEETLQRARAADAVLLGAVGGPKWDGIERSKRPERGLLKIRSELGLFANLRVAKLYPQLVNASSIKPEIISGLDLLIVRELTGGIYFGEPRGIRTLENGEQQGYNTMVYSTSEINRIGKVAFELAQTRAQAAGTPAKVCSIDKANVLEVTELWKQTMIELQQAEYSDVALSHMYADNACMQLIKDPKQFDVMVTGNLFGDILSDEAAMLTGSIGMLPSASLDEAGKGMYEPCHGSAPDIAGQDIANPLATILSVAMMLRYTFKQEVAAQAIEQAVSDVLDDGLRTVDILDRNEAGLIQVGCQQMGQAVLAKLL

SEQ ID NO: 25468 - protein, 500 aa, Pseudomonas syringae pv. syringae B728a
MNESPVIGHYINGHLSNGEGERYSEVFNPAIGTVQARVALASVKTVDEAVAAAKAAFPAWAEQSSLRRARVMFKFKELLDQHHDELAQIICREHGKVLSDARGEVVRGIEIVEFACGAPSLLKSDFSDNIGGGIDNWNLRQPLGVCAGVTPFNFPVMVPLWMIPMALVTGNCFILKPSERDPSASLLMARLLKEAGLPDGVFNVVQGDKVAVDALLQHPDIEAISFVGSTPIAEYIHQQGTAHGKRVQALGGAKNHMIVMPDADLDQAADALIGAAYGSAGERCMAISIAVVVGDVGQRLVDKLLPRIDQLKVGNGMQADSDMGPLVTAVHKAKVEGFIDQGVKEGARLLVDGRNFKVPGAEQGFFVGATLFDHVTPQMQIYKEEIFGPVLGIVHVADFASAVALINAHEFGNGVSCFTSDGGVARAFARSIKVGMVGINVPIPVPMAWHSFGGWKRSLFGDHHAYGEEGLRFYSRYKSVMQRWPDSIAKGPEFSMPTAK

SEQ ID NO: 25469 - protein, 351 aa, Methylococcus capsulatus str. Bath
MVERRTLSGPPPHGTPVPGFRPGKSRSVKMRGSSFPGFPSTVASHTLRIATRKSPLALWQAEYVASRLRAAHPDLRVELVGMTTRGDKLLDAPLAKVGGKGLFVKELEQGLLEGRADIAVHSMKDVPVEFPEGLHLAAILEREDPRDALVSHRYRSFAELPADARIGTSSLRRQCQIKCRLPGCSLYDLRGNVNTRLAKLDAGEFDAIVLASAGLKRLGFQERIAETLTPEQCLPAIGQGAIGVECRSTDTRTNALLVPLHHPPTAWCVLAERAMNRRLDGGCQVPIAGFAQLEGDTLSLRGLVGNPDGSGIIRAEAVGHPSTFEALGKRVAEHLLDQGADEILRRVYATP

SEQ ID NO: 25470 - protein, 207 aa, Xanthobacter autotrophicus Py2
MSDRILVLVRHGQSEWNLKNLFTGWRDPDLTEQGVSEAKRAGALLKAEGLKFDVAFTSDLTRAQKTLGLILGEMGQEGVPTTRNVALNERDYGDLAGLNKDDARAKWGDDQVHIWRRSYDIAPPGGESLRDTVARTLPYYVQEILPCVLRGQTTLVAAHGNSLRALIMTLEKLSPEGIMKRELNTGAPIVYKLAADSTVAEKRDLVA

SEQ ID NO: 25471 - protein, 124 aa, Arabidopsis thaliana
  misc_feature (64)..(64): Xaa can be any naturally occurring amino acid
  misc_feature (72)..(72): Xaa can be any naturally occurring amino acid
  misc_feature (104)..(104): Xaa can be any naturally occurring amino acid
MASSMLSSAAVVTSPAHATMVAPFTGLKSSAAFPVTLKSNTDITSIASNWGRVSCIKVLPPLGXNNFETRSXLPYLSDFELANEVDYLLCNKWIPCVELELEHXLVIREHCNTPGYYYGQYWTM

SEQ ID NO: 25472 - protein, 340 aa, Methylococcus capsulatus str. Bath
MHKITLIPGDGIGPSIVDAAVKVIEATGVQVQWDTQSAGMAAVEKFGTPLPDATLDSIRANRICFKGPLTTPVGGGYRSVNVTLRQAFNLYANVRPAISFEGTDTAFSDVNLVTVRENTEGLYAGIEHFIKVDEEKIAAESIAVVTRKGSERIIRYAFDYARRARRKKVTLVHKANILKCTSGLFLEIGREIAKEYPDIEFDDRIVDACSMQMVMQPQRFDVLVTTNLFGDILSDLAAGLIGGLGLTAGANIGTDAALFEAVHGSAPDIADKGIANPTAMIMAGAMMLEHIGEPDAARRIERAVREVIEDGRSVTPDLAKDSPCGTAQMAEAIVERVRQA

SEQ ID NO: 25473 - protein, 317 aa, Vibrio cholerae
QHFYQRMFSHNPELKHIFNMTHQKTGRQSVALFEAIAAYAKHIDNLAALTSAVERIAHKHTSFNIQPEHYQIVGHHLLETLRELAPDAFTQPVEEAWTAAYFFLAQVFIDREGALYLERKQALGGWRDGRTFVVREKQVESAYVTSFVLVPADGGAVLDYLPGQYIGIEVTPEGSDYREIRQYSLSHASNGREYRVSVKREGGDSDNPGLVSHYLHNNVKVGDSVKLYAPAGDFFYVERERPVVLISAGVGATPMQAILHTLAKQNKSGVTYLYACNSAKEHTFAQETAQLIAQQGWMQQVWYRDESADDVLQGEMQ

SEQ ID NO: 25474 - protein, 335 aa, Arabidopsis thaliana
MMSIPMELMSIRNPNSTLLYRAHSRPPVKLCAPPRSLLPSRRHFSAPRAVVSYPGIRFGFTSPEVLLNRSVVAFAASHEDSGESGVEVGKEKSDIDVEDDTSKEAWKQTLESFKEQVSKMQSVSSEAYSVNSQKAMTVLKETSEQLRIQAEKAKEELGTKAKVVSEEGREYILKAAEESPSDVKEIVEAFASTEDLKNVSRANDFHVGIPYGLLLLVGGFINFMVSGSIPAIRFGVILGGALFALSLASLKSHRKGESSTKFLKGQMAIVAIIFLRELRLLLSQKSTFLGFFTTLTSGGVLGFYLYKMVVKREKGPTLEDGGEDESSDGFVRSEG

SEQ ID NO: 25475 - protein, 175 aa, Triticum aestivum
  misc_feature (128)..(128): Xaa can be any naturally occurring amino acid
  misc_feature (151)..(151): Xaa can be any naturally occurring amino acid
MAPTVMASSATSVAPFQGLKSTAGLPVSRRSNGASLGSVSNGGRIRCMQVWPIEGIKKFETLSYLPPLSTEALLKQVDYLIRSKWVPCLEFNKVGFIFREHNASPGYYDGPATWDNVELPISGCTDAXTQVINEVEESKKEYLTRYVRIIXSTTSSRAWLNSSPTGSKIRKAKYH

SEQ ID NO: 25476 - protein, 181 aa, Oryza sativa
TSNLASPMPLSSNISTQKTHYEVLSVNEGATYDEVRAGYRAAILNAHPDKSQAKLDSLVSSVEHGEFFSVQKAWEVLRDPKSRTEYDKQLQTSRQNSANIAYEIEIEEMTVESTGDAMELMYPCRCGDHFSILSSDLAEMGILVDDDGEIYFQSSDCVSASVVLSCGSCSLKTRLVINRTS

SEQ ID NO: 25477 - protein, 366 aa, Rubrobacter xylanophilus DSM 9941
MPFSPVEEIIEEIRAGRMVIVCDDEDRENEGDLTVAAELVTPEHINFMAKYGRGLICLPMAQELIERLEIPEMVRHNSSRMGTAFTVSIEAREGISTGISAADRAHTCRVAVSDEAGPEDIVMPGHVFPLKARKGGVLQRPGQTEAAVDLARLAGLKPAGVICEVMKDDGTMARVPDLERFSAEHGIKMVTVAQIIEYRLASDPHVRCLGEEALPTRFGEFRLRSYAGVSTGLIHRALLAGEPGENGPPLVGVRAACPTGDALHSLRCDCGERLRDAMERVAAEGEGVILYLHPGPGAPLHPLPGGEDEDLAPYRAGVEILRDLGLGRVRLLMAGGEEPLDLESGPGPALAGRLLRAKAGVAAPSL

SEQ ID NO: 25478 - protein, 288 aa, Bdellovibrio bacteriovorus HD100
MVLILDGKEVAKEVRASLVPRVAKFKETYGRAPQLSVVIVGDDKASHVYVKNKKIACEKIGMTSTIHTLPAETTQSELNQILSKLNNDNGVDGILVQFPLPKHLSSDEVLKLVSAEKDADGLTYESLGYFFAGKPLVSPCTPAGVMEILKHYRIPVEGKKAVVVGRSNIVGKPMALLLTEANATVTLCHSKTSNMSELTKQADLVVVAAGKARLLGKEDFKKDAIVIDVGMHGSGQGGKLCGDVRFEELDGWAKAATPVPGGVGPMTIAMLLKNTCQLAEQRARDPQF

SEQ ID NO: 25479 - protein, 159 aa, Oceanospirillum sp. MED92
MTFFTADICDEHSEKVAVLGPGYSNFGGATHCQGEIVTIKLDKNNSDLIGLLRDEDGAGKVVVVDVDQEYFAVVGENLMKFAQQNSYSGIVINGYIRDTFQIKDIPVALFALGTCSRKSIPVTSGERGIALSFGGVEFKQGDYLYADTDGVIVTAEKIV

SEQ ID NO: 25480 - protein, 85 aa, Zea mays
MSSRRGRITDEEINELISKIQAVLPESSRRRSASRSSASKLLKETCGYIKSLHQEVDDLSDRLSELMSTLDETSPQAEIIRSLLR

SEQ ID NO: 25481 - protein, 486 aa, Chlorobium tepidum TLS
MKEQLIFDLSRSGRKGYSLSPLDIPERPADELLPSKFLRKEPAELPEMAESEVVRHFIRLSNLNYHVDKNMYPLGSCTMKYNPKINDYTCDLPGFASMHPLQPESTSQGALQLMYELAEMLKEIAGMKAVTLQPAAGAHGELTGILLIKKYHEKLGNKRHKLLVVDSAHGTNPASAALGGYECVSVKCDESGCTDMGDLRAKLDGEVAALMLTNPNTVGIFEKQIPEIEKLVHGNGSLLYMDGANMNALLGITRPGDMGFDVMHYNLHKTFSAPHGGGGPGSGPVGVSERLVEFLPVPVIEKFEKDGQTRYRLNSSKPNTIGRMMNFYGNFSVLVRAYTYIRMLGADGLRRVSENAIINANYLLQRLVEHYALPYPRPVMHEFCLSGDRQKKEHGVRTLDIAKRLLDYGYHAPTVYFPLIVSEALMIEPTETEAKETLNAFADAMIAIAEEAKSNPDLIKSAPTTTPVKRLDEAQASRQLNICCQH

SEQ ID NO: 25482 - protein, 277 aa, Rosa hybrid cultivar
ACENWGFFELVNHGISHELMDKVEKLTKEHYRKCVEQRFKEMVASKGLESVNSEIEDLDWESTFFLRHLPFSNISQIPDLDEDYREAMKEFAVELEKLAEKLLDLLCENLGLDKGYLKKAFYGSEGPNFGTKVSNYPPCPKPDLIKGLRAHTDAGGIILLFQDDKVSGLQLLKDDQWIDVPPMHHSIVINLGDQLEVITNGKYKSVMHRVIAQPDGNRMSIASFYNPGNDAFISPAPAMLEKQTEECPTYPKFVFDDYMKLYAGLKFQAKEPRFEAM

SEQ ID NO: 25483 - protein, 584 aa, Saccharomyces cerevisiae
MGIHIPYLTSKTSQSNVGDAVGNADSVEFNSEHDSPSKRGKIHIESHEIQRAPASDDEDRIQIKPVNDEDDTSVMITFNQSLSPFIITLTFVASISGFMFGYDTGYISSALISIGTDLDHKVLTYGEKEIVTAATSLGALITSIFAGTAADIFGRKRCLMGSNLMFVIGAILQVSAHTFWQMAVGRLIMGFGVGIGSLIAPLFISEIAPKMIRGRLTVINSLWLTGGQLVAYGCGAGLNYVNNGWRILVGLSLIPTAVQFTCLCFLPDTPRYYVMKGDLARATEVLKRSYTDTSEEIIERKVEELVTLNQSIPGKNVPEKVWNTIKELHTVPSNLRALIIGCGLQAIQQFTGWNSLMYFSGTIFETVGFKNSSAVSIIVSGTNFIFTLVAFFSIDKIGRRTILLIGLPGMTMALVVCSIAFHFLGIKFDGAVAVVVSSGFSSWGIVIIVFIIVFAAFYALGIGTVPWQQSELFPQNVRGIGTSYATATNWAGSLVIASTFLTMLQNITPAGTFAFFAGLSCLSTIFCYFCYPELSGLELEEVQTILKDGFNIKASKALAKKRKQQVARVHELKYEPTQEIIEDI

SEQ ID NO: 25484 - protein, 462 aa, Arabidopsis thaliana
MAAPEDSKMSPANSFGAVVLGGTFDRLHDGHRMFLKAAAELARDRIVVGVCDGPMLTKKQFSDMIQPIEERMRNVETYVKSIKPELVVQAEPITDPYGPSIVDENLEAIVVSKETLPGGLSVNRKRAERGLSQLKIEVVEIVSDGSSGNKISSRFYKMNDLMTKSFLSYVELKKQARTDMESDRDLEKGEDFNFDFSPADEENLSGFFQEIETIKTLIEEITHLLLDLQNLNEETKSTHSTKILRGLRDRMESNIVTISRKANTVKTLIETLEKRNVANRTSFKEGSCVDRTRTSITNGVRKKLRDTMSEFHRLRERIFADYREDLKRKYFLATGEEPSNEDMEKMISGSGSCSDLVKTFEVKPEMDLKTKERHEAVNDIKRSLNRLHQVFLDMAVLVETQGDRIDDIEANVANAGSFVSGGTNSLYYANQMKKKTKSWVLWVSILGVLILLVCVISMLASR

SEQ ID NO: 25485 - protein, 360 aa, Chlorobium tepidum TLS
MLDIHNPATDHHDMRDLTIIGGGPTGIFAAFQCGMNNISCRIIESMPQLGGQLAALYPEKHIYDVAGFPEVPAIDLVESLWAQAERYNPDVVLNETVTKYTKLDDGTFETRTNTGNVYRSRAVLIAAGLGAFEPRKLPQLGNIDHLTGSSVYYAVKSVEDFKGKRVVIVGGGDSALDWTVGLIKNAASVTLVHRGHEFQGHGKTAHEVERARANGTIDVYLETEVASIEESNGVLTRVHLRSSDGSKWTVEADRLLILIGFKSNLGPLARWDLELYENALVVDSHMKTSVDGLYAAGDIAYYPGKLKIIQTGLSEATMAVRHSLSYIKPGEKIRNVFSSVKMAKEKKAAEAGNATENKAE

SEQ ID NO: 25486 - protein, 360 aa, Pseudomonas fluorescens Pf-5
MSKQILILPGDGIGPEIMAEAVKVLELANDKYSLGFELSHDVIGGAAIDKHGVPLADETLDRARAADAVLLGAVGGPKWDKIERDIRPERGLLKIRAQLGLFGNLRPAILYPQLADASSLKPEIVSGLDILIVRELTGGIYFGAPRGTRELENGERQSYDTLPYSESEIRRIARVGFDMARVRGKKLCSVDKANVLASSQLWREVVEQVAKDYPDVELSHMYVDNAAMQLVRAPKQFDVIVTDNMFGDILSDEASMLTGSIGMLPSASLDANNKGMYEPCHGSAPDIAGQGIANPLATILSVSMMLRYSFNLTEAADAIEQAVSRVLDQGLRTGDIWSAGCTKVGTQEMGDAVVAALRNL

SEQ ID NO: 25487 - protein, 341 aa, Staphylococcus epidermidis ATCC 12228
MATNIAINGMGRIGRMVLRIALNNKNLNVKAINASYPPETIAHLLNYDTTHGVYDKKVEPIESGIKVNGHEIKLLSDRNPENLPWNEMDIDVVIEATGKFNHGDKAVAHINAGAKKVLLTGPSKGGDVQMIVKGVNDNQLDIDTYDIFSNASCTTNCIGPVAKVLNDKFGIINGLMTTVHAITNDQKNIDNPHKDLRRARSCNESIIPTSTGAAKALKEVLPEVEGKLHGMALRVPTKNVSLVDLVVDLEQNVTVTQVNDAFKNADLSGVLDVEEAPLVSVDFNTNPHSAIIDSQSTMVMGQNKVKVIAWYDNEWGYSNRVVEVAVKIGQLIDDKAMVKAI

SEQ ID NO: 25488 - protein, 356 aa, Neisseria meningitidis MC58
MTKHIAILRGDGIGPEIVAETVRVLDKLIAQGLDAGYEYAPLGGEAYDEYGHPYPEFTQNLCRKADAVLLGAVGSPQYDNLDRPLRPERGLLAIRKDLNLFANLRPAVLYPELANASTLKPEIVAGLDILIVRELTGDIYFGEPRGIRVLENGEREGYNTMKYSESEIRRIAHVAFQSAQKRSKKVCSVGKANVLETTELWREIFEEIGKEYPDVELSHMYVDNAAMQLVRAPKQFDVIATGNIFGDILSDEASMLTGSIGMLPSASLDENGKGLYEPSHGSAPDIAGQNKANPLATILSLAMLLRYSLNDEARAQQVENAVQKVLQQGLRTSDIYEEGTKLVSCSEMGDAVLAAL

SEQ ID NO: 25489 - protein, 163 aa, Kineococcus radiotolerans SRS30216
MTSPLDVPLTALTGGPLDPAQLTGRAVLVVNVASRCGSTPQYAGLQELQEEYGERGFTVLGVPCDQFGGQEPGTEEEIAEYCSATWGTTFPMTAKVEVNGPGRHPLYGALTATPDADGTAGDVAWNFEKFLVSPAGEVVARFRTRTTPQDPALRAAIEARLPA

SEQ ID NO: 25490 - protein, 501 aa, Medicago truncatula
MASDPEQPPLSSFSQEGKSSTEVRSEREPLLNGIHVPQDYSLSAAILPFLFPAFGGLLFGYDIGATSSATISIQSSSLSGITWYDLDAVEIGLLTSGSLYGALIGSVLAFNIADFLGRRRELLVAALMYLVGALITAFAPNFPLLVIGRLVFGIGIGLAMHAAPMYIAETAPTPIRGQLVSLKEFFIVIGIVAGYGLGSLLVDTVAGWRYMFGISSPVAVIMGFGMWWLPASPRWILLRAIQKKGDLQTLKDTAIRSLCQLQGRTFHDSAPQQVDEIMAEFSYLGEENDVTLGEMFRGKCRKALVISAGLVLFQQITGQPSVLYYAASILQSAGFSLAADATRVSILLGVFKLIMTGVAVVVVDRLGRRPLLLGGVSGIVISLFLLGSYYIFLDNAAVLAVVGLLLYVGCYQISFGPMGWLMIAEIFPLRLRGKGLSIAVLVNFAANALVTFAFSPLKDLLGAGILFYIFSAIAVASLVFIYFIVPETKGLTLEEIEAKCL

SEQ ID NO: 25491 - protein, 488 aa, Eschscholzia californica
  misc_feature (192)..(192): Xaa can be any naturally occurring amino acid
MEVVTVALIAVIISSILYLLFGSSGHKNLPPGPKPWPIVGNLLQLGEKPHAQFAELAQTYGDIFTLKMGTETVVVASTSSAASEILKTHDRILSARYVFQSFRVKGHVENSIVWSDCTETWKNLRKVCRTELFTQKMIESQAHVREKKCEEMVEYLMKKQGEEVKIVEVIFGTLVNIFGNLIFSQNIFELGXPNSGSSEFKEYLWRMLELGNSTNPADYFPMLGKFDLFGQRKEVAECLKGIYAIWGAMLQERKLAKKVDGYQSKNDFVDVCLDSGLNDYQINALLMELFGAGTETSASTIEWAMTELTKNPKITAKLRSELQTVVGERSVKESDFPNLPYLEATVKETLRLHPPTPLLLPRRALETCTILNYTIPKDCQIMVNAWGIGRDPKTWIDPLTFSPERFLNSSVDFRGNDFSLIPFGAGRRICPGLPIANQFIALLVATFVQNLDWCLPNGMSVDHLIVEEKFGLTLQKEPPLFIVPKSRV

SEQ ID NO: 25492 - protein, 476 aa, Novosphingobium aromaticivorans DSM 12444
MTAYPSLHMIIDGARVSGGGRRTHAVVNPATGETIGELPLAEVADLDRALEVAAKGFRIWRDSTPQQRAAVLQGAARLMLERQEDLARIATMEEGKTLPEARIEVLMNVGLFNFYAGEVFRLYGRTLVRPAGQRSTITHEPVGPVAAFAPWNFPLGNPGRKLGAPIAAGCSVILKAAEETPASALGVLQCLLDAGLPKEVAQAVFGVPDEVSRHLLGSSVIRKLSFTGSTVIGKHLMRLAADNMLRTTMELGGHGPVLVFGDADIDKALDTMAASKYRNAGQVCVSPTRFIVEESVFERFRDGFAERVGRIKVGNGLDQDAQMGPMANARRPEAMDRLIGDAVTRGARLHTGGERVGNAGYFYAPTVLSEVPLDAAIMNEEPFGPVALINPFGGEEAMIAEANRLPYGLAAYAWTDSAARAKRLAREIETGMLGLNSTMIGGADSPFGGVKWSGHGSEDGPEGVMACLVTKAVHEG

SEQ ID NO: 25493 - protein, 96 aa, Glycine max
MMMVHPRDQVGGETHKNLVEPNVAASKKARNCACMVSYSVLILALLTLSILLLPLVLPPLPPPPLLLLFVPVFILVVLFFLAFSPSTLPNMAVLTS

SEQ ID NO: 25494 - protein, 280 aa, Arabidopsis thaliana
MTCSQTLGNNNTNKYQICEEIGRGRFGTVSRVYAPATGDFFACKTIDKASLSDDLDRACLDNEPKLMALLSYHPNIVQIHDLIDTDSTLSIFMELVHPSVSIYDRLVSSGTFFEPQTASFAKQILQALSHCHRYGVVHRDIKPENILVDLRNDTVKICDFGSGIWLGEGETTEGVVGTPYYVAPEVLMGYSYGEKVDLWSAGVVLYTMLAGTPPFYGETAEEIFEAVLRGNLRFPTKIFRGVSSMAKDFLRKLICKDASRRFSAEQALSKILKPSDLFLC

SEQ ID NO: 25495 - protein, 122 aa, Vibrio angustum S14
MTLEITGKNIDITPAIRERFEFKFNKLEKLQVPLIKKHVVISKEPSKQFKVEAAVNIAGGQLVASAEHDDLFGAITELYQKLDRQLKKQAHKPNARRASHSEKPEVAEDEVELDEVELDDAY

SEQ ID NO: 25496 - protein, 428 aa, Parvularcula bermudensis HTCC2503
MLRRVVVTGMGLVTPLGCGTVDDPVKPVWKRLIEGQSGAGPITRFDASNLPVRIAAEVPLRKDHPDDPLAFAAEEWVEPKLIRRNEDFILYALAAADMAIRNAGLPLESDAEKNATGVMIGSGIGGLGGIADTTRLLDAKGPGRVSPFFIPSALINLSAGQVSIKYGLRGPNSSIVTACATGVHAIGDAARLVALGDADAMVAGGTEASICDIGVAGFVACKALSTGFNDRPTAASRPYDKDRDGFLMGEGAGIVVLEEYERAKARGATIYGEIAGYGLSGDAYHVTAPDPEGDGGYRAMKAALARAGLAPADIDYINAHGTSTPLGDEIELKAVERLWGDDARGLVMSSTKSATGHLLGAAGAVEAVFSLMALQEGICPPTINLDAPSVETKINLAANSAVEKPINAVLSNSFGFGGTNASLVITRV

SEQ ID NO: 25497 - protein, 288 aa, Bacillus cereus G9241
MTRVAINGFGRIGRMVFRQAIKESAFEIVAINASYPSETLAHLIKYDTVHGKFDGTVEAFEDHLLVDGKMIRLLNNRDPKELPWTDLGVEVVIEATGKFNSKEKAILHVEAGAKKVILTAPGKNEDVTIVVGVNEDQLDITKHTVISNASCTTNCLAPVVKVLDEQFGIENGLMTTVHAYTNDQKNIDNPHKDLRRARACGQSIIPTTTGAAKALAKVLPHLNGKLHGMALRVPTPNVSLVDLVVDVKRDVTVEAINEAFKTVANGTLKGIVEFSEEPLVSIDFNTNT

SEQ ID NO: 25498 - protein, 425 aa, Burkholderia pseudomallei K96243
MAIVEVKVPQLSESVSEATMLQWKKKPGEAVAQDEILIELETDKVVLEVPAPAAGVLAQVLQNDGDTVVADQVIATIDTEAKAGAAAAAAGAADVQPAAAPVAAPAPAAQPAAAAASSTAAASPAASKLMAEKGIGAGDVAGSGRDGRITKGDVLSAGSAPKAAPAAAPAKAAAKPALPEVKVPASATTWLNDRPEQRVPMSRLRARIAERLLESQQTNAILTTFNEVNMQPVMDLRAKYKDKFEKEHGVKLGFMSFFVKAAVHALKKFPLVNASIDGNDIVYHGYFDIGIAVGSPRGLVVPILRNADQLSLAEIEKKIAEFGQKAKDGKLSIEEMTGGTFSISNGGVFGSMLSTPIINPPQSAILGVHATKERPVVENGQIVIRPINYLALSYDHRIIDGREAVLSLVAMKDALEDPARLLLDL

SEQ ID NO: 25499 - protein, 260 aa, Robiginitalea biformata HTCC2501
MKFKNLKTEEKDGIALLTIDRPKKLNALNRKTIEELHEAFSSLDADPDIRAIVVRGSGPKAFVAGADIAEFASYGPEEGRDLAAKGQETLFDLVEQLGTPVIAAVNGFALGGGLELALACHIRVASHNARMGLPEVSLGLIPGYGGTQRLPELVGRGRALEMILSGGMIDAERALEYGLVNHVTALEELESYCLQLAGKIAKNSPVAIRYAIKAVNAGSRSSVSGFRTEIDAFGSCFGTADFKEGTTAFLEKRKPDFPGE

SEQ ID NO: 25500 - protein, 166 aa, uncultured bacterium
MSQRPNCRSHYFLCVPRSPLMSDSIHIVCPHCQSINRVPANKLAEKPNCGRCQHPLFTGEPIDLTTATFARHLERSDLPLLVDFWAPWCGPCKMMAPQFEQAASLLEPKVRLAKVNTEAEPHLAAQFGIRSIPTLILFRGGHEVARQAGAMGAQDIMRWVASQLPR

SEQ ID NO: 25501 - protein, 746 aa, Glycine max
MGKSSKKSAIKVDAAPAVVPPSKSAKKGGKRQAQDEIEKQVSAKKQKIEEVAQKQKKEAKVQKKKESSSDDSSESEEEKPAPKPVLSKKVPAKNGAALPKKDKPVSSSSEDDSSDEDEVNAKKPHKVVAEKQKNGATVQKNKKESSSDDSSSDSEDEKPVAKAAVPSKKTPAKSSNISTPAKKGKPASSSSSSDSSEDDSSDEDELATKKQMNEVKVQKGKEESSSDDSSSDSEDEKPAAKVAVPSKNQSAKNGTLSTLAKKGKPAASSSSSESSDDNSDEDEAPKTKVAPAAGKNGHASTKKTQPSESSDSDSSDSDSSSDEGKSKKKPTTAKLPTLPVAPAKKVESSDDESSESSDEDNDAKPAVTAVSKPSARAQKKVESSDSDDSSSDEDKMDIDDDDDSSDESEEPQKKKAVKNSKESSDSSEEDSEDESEEKPSKTPQKRGRDVEMVDAALSEKKAPKTPVTPREESGTSKTLFVGNLPFSVERADVEGFFKDAGEVVDVRFATDDTGKFKGFGHVEFATAEAAQNALGLNGQQLFNRELRLDLARERGAYTPNSSNWNNSSQKSERGQSQTIFVRGFDTSLGEDEIRGSLQEHFGSCGDITRVSIPKDYESGAVKGFAYVDFGDADSMGKALELHETELGGYTLTVDEAKPRDNQGSGGRGAGGRSGGGGRFGARGGGGGRFGARGGGGRFGGSGGGGRFGGSGGGRFGGRGGGGRGRGNRPNLAAEGTGKKTKFADDE

SEQ ID NO: 25502 - protein, 434 aa, Triticum aestivum
  misc_feature (233)..(233): Xaa can be any naturally occurring amino acid
  misc_feature (358)..(358): Xaa can be any naturally occurring amino acid
  misc_feature (368)..(368): Xaa can be any naturally occurring amino acid
  misc_feature (373)..(373): Xaa can be any naturally occurring amino acid
  misc_feature (405)..(405): Xaa can be any naturally occurring amino acid
  misc_feature (410)..(410): Xaa can be any naturally occurring amino acid
  misc_feature (417)..(417): Xaa can be any naturally occurring amino acid
  misc_feature (419)..(420): Xaa can be any naturally occurring amino acid
  misc_feature (424)..(424): Xaa can be any naturally occurring amino acid
TASSIKAYPGDIVEQVCTKKQAGTGPEFPGYRRPTRPISMATSPSDVLAVELLQRECHIKTPLRVVPLFEKLADLEAAPAALARLFSIDWYRERINGKQEVMIGYSDSGKDAGRLSAAWQMYKAQEDLVKVAKQFGVKLTMFHGRGGTVGRGGGPTHLAILSQPPDTINGSLRVTVQGEVIEQSFGEEHLCFRTLQRFTAATLEHGMRPPISPKPEWRALLDEMAVVATEEIXYRSIVFQEPRFVEYFPLATPETEYGRMNIGSRPSKRKPSGGIESLRAIPWIFAWTQTRFHLPVWLGFGGAFKHILKKDIRNFHMLQEMYNEWPFFRVTIDLVEMVFAKGNPGIAALYDRLLVSRXLQPLGEKLRXNYEEXQKLLLQVAGHKDLLKVILPEAAVRLRDAYITXMNVCXAYTLKRXVXXLHVXSPHLQGVWHR

SEQ ID NO: 25503 - protein, 234 aa, Oryza sativa
RDIPEERYTNAFLGYGPEDSHFVVELTYNYGVESYDIGTAFGHFGIAVEDVAKTVDLIKAKGGTVTREPGPVKGGKSVIAFIEDPDGYKFELIERGPTPEPLCQVMLRVGDLDHAINFYEKAFGMELLRKRDNPQYKYTIAMMGYGPEDKNAVLELTYNYGVKEYDKGNAYAQIAISTDDVYKTAEVIRQNGGQITREPGPLPGINTKITACTDPDGWKTVFVDNVDFLKELEE

SEQ ID NO: 25504 - protein, 388 aa, delta proteobacterium MLMS-1
MVDACGAVKGGYHGGYKSTVFKGKAMDGKGSRIGVVLLNMGGPEKLDEVEPFLRNLFNDREIIRLGPFPWLQKLIAGRIVKKRAPKSREAYRRIGGGSPLARISAEQGRALAARLNGKEDEVHEVSGHGAPHLAASETAMRTSVREPARSPLSAVPRDRLRYMVRCAMRYWHPFVDEALAEFRQAGVRQLLALPLYPHFSRATTGSSLNDLRRALATHDDFFTCREINAWPAQPDYLAALSETIEQGAAAFGTEEYTLLYSAHSLPVSFIEDGDPYLEHIKKTIAGLEARLGRSGELCFQSRSGPVRWLSPSTPEMLAQLAGRGVKNVLLVPISFVSDHVETLYEIDLQYHELARGLGIRLVRPPALNTHPRLIAALAALVVSVHQGR

SEQ ID NO: 25505 - protein, 265 aa, Rosa hybrid cultivar
LVQFGAFIVLCGATHLINLWTFSVYSRTVAIVMATAKVFTAAVSCATALMLVHIIPDLLSVKTRELFLKNKAAELDREMGLIRTQEETGRHVRMLTHEIRSTLDRHIILKTTLVELGRILTLEECALWMPTRTGLELQLSYTLHQQNPVGYTVPIHLPVINQVFNNNGTVKISPNSPVARLRPIAGKHIPGEVVAVRVPLLHLSNFQINDWPELSTKRYALMVLVLPSDSARQWHVHELELVEVVADQVAVALSHAAILEESMRA

SEQ ID NO: 25506 - protein, 317 aa, Vibrio cholerae
QHFYQRMFSHNPELKHIFNMTHQKTGRQSVALFEAIAAYAKHIDNLAALTSAVERIAHKHTSFNIQPEHYQIVGHHLLETLRELAPDAFTQPVEEAWTAAYFFLAQVFIDREGALYLERKQALGGWRDGRTFVVREKQVESAYVTSFVLVPADGGAVLDYQPGQYIGIEVTPEGSDYREIRQYSLSHASNGREYRISVKREGVGSDNPGLVSHYLHNNVKVGDSVKLYAPAGDFFYVERERPVVLISAGVGATPMQAILHTLAKQNKSGVTYLYACNSAKEHTFAQETAQLIAQQGWMQQVWYRDESADDVLQGEMQ

SEQ ID NO: 25507 - protein, 317 aa, Vibrio cholerae
QHFYQRMFSHNPELKHIFNMTHQKTGRQSVALFEAIAAYAKHIDNLAALTSAVERIAHKHTSFNIQPEHYQIVGHHLLETLRELAPDAFTQPVEEAWTAAYFFLAQVFIDREGALYLERKQALGGWRDGRTFVVREKQVESAYVTSFVLVPADGGAVLDYQPGQYIGIEVTPEGSDYREIRQYSLSHASNGREYRISVKREGVGSDNPGLVSHYLHNNVKVGDSVKLYAPAGDFFYVERERPVVLISAGVGATPMQAILHTLAKQNKSGVTYLYACNSAKEHTFAQEAAQLIAQQGWMQQVWYRDESADDVLQGEMQ

SEQ ID NO: 25508 - protein, 215 aa, Brassica napus
  misc_feature (80)..(80): Xaa can be any naturally occurring amino acid
MTSFSAFSEMMGSENESPALSGEYCPTLAASCPKKPAGRKKFRETRHPIYRGVRQRHSGKWVCEVREPNKKSRIWLGTFXLTAEIAARAHDVAAIALRGKSACLNFADSAWRLRIPETTCPKDIQKAAAEAAVAFQAEINDTTKDHGLDVEETIVEAIFTEENSDGFYMDEEESMFGMPTLLASMAEGMLLPPPSVQFEYNYDFDGDTDVSLWSY

SEQ ID NO: 25509 - protein, 265 aa, Caulobacter crescentus CB15
MSLILTEKRGHIAILTLNRPDAMNALGAPGDGDQVAAACEAINDDQDIRCVILTGAGKAFSAGGDVKAMKAREGAFGGNGVKVRDGYRKNIHRIVRAIYGLEVPSIAAVNGAAIGLGCDVACMTDIRIAADTARFGVTFLKLGLIPGDGGAWLMPRTIGMSRAAELLFTGDVIDAAKAAEWGLISKAVPAGDLMGEALALAERIAQQPPHALRMAKSLLKHGQTASYDTLMEMSAAAQAIAHHTEDHMEGVDAILEKRSPVFKGA

SEQ ID NO: 25510 - protein, 378 aa, Debaryomyces hansenii CBS767
MSGSDKLPGLASDAVLKQSIPVPDSFVEIKGIDYSKDSAYNMKAVDLIESMKNMGFQASSVSQACEIINGMRSWRGKHIDSLPEHERTGEFDDEGYQKSTIFMGYTSNLISSGLRDTLRFLVQHKMVSAIVSSAGGIEEDLIKVLAPTYMGEFSLPGKGLRDQGMNRIGNLLVPNDNYCKFEEWIVPILDKCLEEQEEGMKKMGSDGLNADSPACWTPSKLINRLGKEINDESSVLYWAHKNDIPVFCPALTDGSIGDMLFFHTFKASPQQIRLDIVADIRKLNSMSMAASNAGMILLGGGLIKHHICNACLMRNGADYAVYINTGQEFDGSDAGARPDEAISWGKIKAEAKQVKVYADASIVFPLIVAATFASEKPN

SEQ ID NO: 25511 - protein, 182 aa, Glycine max
MATVQLQSLTLVRSSALPSATFSPPIAVSGRRNSAALPRYSGLRLRPAAETSFPTHASSRTASRGGGVKCEAGDTAVEVAPVTDANWQSLVIESESPVLVEFWAPWCGPCRMIHPIIDELAKEYTGKLKCYKLNTDESPSTATKYGIRSIPTVIIFKNGEKKDTVIGAVPKTTLTSSIEKFL

SEQ ID NO: 25512 - protein, 427 aa, Exiguobacterium sibiricum 255-15
MDPLPAIQFIWFFVLLVISAFFSSSETALSSANRLRILHQSEEGSRRATQALRLLQRYEETLTAILIGNTLSNLGVAMIGGWLAMTVSTDLLVQISIVFLTFLFILLFGELIPKSYAREHAETYVFWISGPLHVCLSLFKPAIFLFLKLRQVALLLIGADPKGPLVTEQELRALVDISEEEGVMDEAGAEIVHRAVDFKNVTVEEALTPRTNIQAIDIDAGFDEILREVQKDGFSRLPVYKDSIDHIIGVLSERDFLREFVKHGRVEIRELIRPVSFVVPQTHIIDLLPELKVKQSHMAVVLDEFGGTAGLITLEDILEELVGEIWDEHDESLEYTKQVSPNRYECLAEYDIEDFCHQFDLAMPETEAQSLGGWIMEDVGHIPEVGTQMVYGPLTLTVLHVENRRVRTVSAVFSQHEPSEGTDDLNV

SEQ ID NO: 25513 - protein, 394 aa, Staphylococcus epidermidis ATCC 12228
MLEFEQGFNHLATLKVIGVGGGGNNAVNRMIDHGMNNVEFIAINTDGQALNLSKAESKIQIGEKLTRGLGAGANPEIGKKAAEESREQIEDAIQGADMVFVTAGMGGGTGTGAAPVVAKIAKEMGALTVGVVTRPFGFEGRKRQTQAAAGVESMKAAVDTLIVIPNDRLLDIVDKSTPMMEAFKEADNVLRQGVQGISDLIAVSGEVNLDFADVKTIMSNQGSALMGIGVSSGENRAVEAAKKAISSPLLETSIVGAQGVLMNITGGESLSLFEAQEAADIVQDAADEDVNMIFGTVINPELQDEIVVTVIATGFEDKPSSQGRKATSTGFGSSVNSSSNHQSGASAKEDSFSAHTSHSQSSESVNERSHTTKDDDIPSFIRNREERRSRRTRR

SEQ ID NO: 25514 - protein, 256 aa, Novosphingobium aromaticivorans DSM 12444
MADIDFRIEGHVAHVRLNRPQGLNAITQEMDDLLLDAWTEVNANSDIWAVVLSAEGEKAFCIGADVSGGAERKTRMALGGGLTGIGGPLVTCKKPMVAAVQGFCVGGGFELAMCADIIVAADTAQFGLPETKVGIIGECGVVHRAMRQLPYHIALQLILTGERIKADEARHYGLVNEVVPFAELEEAALRWASKLNAASPLAVQAAKAAALGRLGHPLEVALMTRFEPIEEYAATEDKKEGERAAGERRKPVWTGK

SEQ ID NO: 25515 - protein, 372 aa, Rhodopseudomonas palustris CGA009
MKPRHARHKGGTELNQSKDQYRIAVIAGDGIGKEVMPEGLRVLEAAAKKHRVKLVFDHFDFASYDYYEKHGQMMPDDWKEKIGGHDAIFFGAVGWPAKIPDHISLWGSLIKFRREFDQYVNLRPVRLMPGVPSPLAGRKPGDIDFWVVRENTEGEYSSVGGRMFPDTEREFVTQQSVMTRVGVDRILKFAFELAQSRPKRHLTSATKSNGISITMPYWDERVEAVAKSYPEVKWDKYHIDILTAHFVLHPDWFDVVVGSNLFGDILSDLGPACTGTIGIAPSGNINPEGDFPSVFEPVHGSAPDIAGQGIANPIGMIWSGAMMLEHLGEKQAADSIVKAIERTLEERTLRTRDLGGQADTSACGKGVAEMVE

SEQ ID NO: 25516 - protein, 319 aa, Xanthomonas oryzae pv. oryzae KACC10331
MGLRFPRRRPAQRRGCRAGPGSAVVMQLLREAHTDAAPLPPAEGSGAGCVAGPLRSAIYTGWVRHRRFMPRALQFRYRLFLMYVDLSELDQVFARRWLWSVGRANLAQFRRSDYLGDANMPLDQAVRDCVQAHTGERPEGAIRLLTHLRYFGHVFNPVSFYYCFDRHDALRWIVAEITNTPWQQRHTYVLPVAQARTHRDVHAWRFDKRFHVSPFMGMQHRYDWRFSVPDAQLRVHMDVLDAIGDDAGGAIDNRGTRRFDATLVLQRQPITGRTLARTLLAYPLMTVWVVIAIHWQALRLWLRGNPVHDHPHPPVREPR

SEQ ID NO: 25517 - protein, 159 aa, Bacillus cereus E33L
MWKTTDLCDEFENELQICRQSFRSFGKKEQFHGKIATVKVKDDNVLVKEGLQTLPEGTVLVVDGGASTNCALLGDNLAAIAEERKLAGIIVNGYVRDSSELKNINIGILALGTMPNRSVKEGKGDRNISLQFGGVEWKPNDYVYVDEDGVIISEKSLYR

SEQ ID NO: 25518 - protein, 484 aa, Synechococcus elongatus PCC 6301
MAAPILFWHRRDLRLSDNIGLAAARAQSAQLIGLFCLDPQILQSADMAPARVAYLQGCLQELQQRYQQAGSRLLLLQGDPQHLIPQLAQQLQAEAVYWNQDIEPYGRDRDGQVAAALKTAGIRAVQLWDQLLHSPDQILSGSGNPYSVYGPFWKNWQAQPKPTPVATPTELVDLSPEQLTAIAPLLLSELPTLKQLGFDWDGGFPVEPGETAAIARLQEFCDRAIADYDPQRNFPAEAGTSGLSPALKFGAIGIRQAWRAASAAHALSRSDEARNSIRVWQQELAWREFYQHALYHFPSLADGPYRSLWQQFPWENREALFTAWTQAQTGYPIVDAAMRQLTETGWMHNRCWMIVASFLTKDLIIDWRRGEQFFMQHLVDGDLAANNGGWQWSASSGMDPKPLRIFNPASQAKKFDATATYIKRWLPELRHVHPKDLISGEITPIGRRGYPAPIVNHNLRQKQFKALYNQLKAAIAEPEAEPDS

SEQ ID NO: 25519 - protein, 117 aa, Triticum aestivum
MARVALLVVFTVLATLAVAEMASGAVTCGDVMSAIPPCMSYATGQASSPSAGCCSGVRTLNGKASTSADRQAACRCLKNLAGSFNGISMGNAANIPGKCGVSVSFPINNNVNCNNLH

SEQ ID NO: 25520 - protein, 135 aa, Shigella flexneri 2a str. 301; identical to SEQ ID NO: 549

SEQ ID NO: 25521 - protein, 316 aa, Triticum aestivum
MRDLHLPLNQTQRVRLEAALHELQTLAPAAASAAAVTVADNIPVNHEDNILKGHGTTDQDGEVVATLCGVVERVNKLVYVRTLRARYKPEVGDIIVGRVIEIAPKRWRLEINFSQDAVLMLSSMNLPDGIQRRRTAVDELNMRSIFEENDVVCAEVRGFQHDGSLHLQARSQKYGKLQRGQLLTVPAYLVKRRKLHFHHLEQYDVDLILGCNGFIWVGEHVVVREIADLKEDEQKLSAEAETFTPIETRRHICRLANAARLLSALGFTLTVELIIQTAEASVSSNVEINDMLGAEFYVQTAEGEAKRRGDLLGKKR

SEQ ID NO: 25522 - protein, 709 aa, delta proteobacterium MLMS-1
IIPNYRFFMAAVHPEDREMVEAALDHFRCHPKARNALEFRIGRSDSNERFIHLNGRLILNEEGLPKQVVGVILDVTKRKKVERDLIEAKEQAEQADRAKSRFLANMSHEIRTPMNAVINLSRLVLQDELTSRQRDYVGKVLRSGENLLAIINDILDFSKIEAGKLELESVPFGLRELIDDVVVPLSPTAHDKAIGFRVELAEELPERLVGDATRLRQILLNLVSNAIKFTEQGEVLLKVQLLKRQGDQVTIAFKVSDSGIGISPAQQQRLGESFRQADDSINRRFGGTGLGLAITKQLLGLMGSELEVESAPGAGSNFAFTIQLALADDASPPAASVFGEAGQMTAALEQIATAHVLLVEDNVINQEIGKALLRQVGLEVAVAADGVEAMELLARQPFDLVLMDLQMPGMDGYEATRMIRRQPSLAGLPIVAMTAYATSGVREQCLAAGMDDYLGKPIEVDQLHRVLTRWIAPRSPWPQVAPAVADGEGWGPKINNPLPGIDTVQGVQRCGGSWAMYRRLLRRFAVGNSGTMAALEQALAAGEREEARHLVHALKGVAGNLAATELFAAAAELEQILACAGESWEDALSRFSHALARVLEGLQPLLASAQASAAEFPSGVGEVDMAAVALLLAKIPPLLESDLGEARTTFESLRELLVATPLAGHGERLGHALAEYDTDQALELIGKLTLEITEVVASGEQKGRSEKKS

SEQ ID NO: 25523 - protein, 374 aa, Arabidopsis thaliana
MTMTAFLARRLIGNGSSQILGTSSSSSGPFISVSRAFFSSSTPIKATLFPGDGIGPEIAESVKQVFTAADVVIDWDEQFVGTEVDPRTNSFLTWDNLQSVLKNKVGLKGPMATPIGKGHRSLNLTLRKELNLYANVRPCYSLPGYKTRYDDVDLITIRENTEGEYSGLEHQVVKGVVESLKIITRKASMRVAEYAFLYAKTHGRKKVSAIHKANIMQKTDGLFLQCCDEVAAKYPEIYYEKVVIDNCCMMLVKNPALFDVLVMPNLYGDIISDLCAGLVGGLGLTPSMNIGEDGIALAEAVHGSAPDIAGMNLANPTALLLSGVMMLRHLKLNKQAEQIHSAIINTIAEGKYRTADLGGSSTTTDFTKAICDHL

SEQ ID NO: 25524 - protein, 481 aa, Robiginitalea biformata HTCC2501
MAYTEEELKKELETKEYEYGFYTDIESDTLPKGLSEEIVIAISKKKEEPDWMTEWRLEAFRHWKEMVEPEWANIHYKKPDFQNISYYSAPNKKPKYESLDEVDPELLDTFKKLGIPIEEQKKLAGVAVDFVMDSVSVATTFKKTLAEKGIIFCSISEAIKEHPELVRKYLGTVVPRKDNFYAALNSAVFSDGSFCYIPKGVRCPMELSTYFRINQAGTGQFERTLVVADKGSYVSYLEGCTAPSRDENQLHAAVVELIALDDAEIKYSTVQNWFPGDKEGKGGVYNFVTKRGLCEKNAKISWTQVETGSAITWKYPSCVLKGDNSIGEFYSIAVTNNHQQADTGTKMIHLGNNTRSTIISKGISAGRSQNSYRGLVQIGRRAKNARNFSQCDSLLMGNECGAHTFPYIEANNSTAQIEHEATTSKIGEDQIFYCNQRGIDTEKAIALIVNGFSKEVLNKLPMEFAVEAQKLLEISLEGSVG

SEQ ID NO: 25525 - protein, 394 aa, Pisum sativum
MEGGGGAPAADAVMEDAAPQQQEPQQQAAMGIENIPATLSHGGRFIQYNIFGNIFEVTAKYRPPIMPIGKGAYGIVCSAHNSETNEHVAVKKIANAFDNKIDAKRTLREIKLVRHMDHENVVAIRDIVPPPQREVFNDVYIAYELMDTDLHQIIRSNQALSEEHCQYFLYQILRGLKYIHSANVLHRDLKPSNLLLNANCDLKICDFGLARVTSETDFMTEYVVTRWYRAPELLLNSSDYTAAIDVWSVGCIFMELMDRKPLFPGRDHVHQLRLLMELIGTPSEADLGFLNENAKRYIRQLPLYRRQSFQEKFPHVHPEAIDLVEKMLTFDPRQRITVENALAHPYLTSLHDISDEPVCTTPFSFDFEQHALTEEQMKELIYREALAFNPEYQQ

SEQ ID NO: 25526 - protein, 177 aa, Zea mays
MSSAPSTTASTIAASIHTPFSSGPRGARLPAALRLSLAQLRSAGCRAAPGRLARPRARVRCGAAARFIGQGEFPAEVLESELPVLVDFVADWCGPCRLIAPVVDWASEEYAGRLKIVKIDHDANPQLIEEYKVYGLPTLILFKDGQEVPGSRREGAMIKDKFKEYLEPLLTTITTAA

SEQ ID NO: 25527 - protein, 141 aa, Euryale ferox
FSEEQEALVVKSWGVMKKDAGQLGVKFFAKIFEIAPSAKRMFSFLRDSDLPLEQNPKLKPHALSVFAMTCESAVQLRKAGKVTVRESSLKDLGATHFKYGVVDEHFDVRFAFSRSVFSSIRDLFQPEMKIAWGEAYDKLAA

SEQ ID NO: 25528 - protein, 108 aa, Candidatus Kuenenia stuttgartiensis
MAEGLVEITDANFDAEVTNAKIPVLVDFWASWCGPCRQLAPVIEELAKEYSGKAKIGKLNTEENNSTPAKFGITSIPTIILFKNGKAVNRIVGVKSKNDLKTALDAQL

SEQ ID NO: 25529 - protein, 147 aa, Euryale ferox
MGSIGFSEEQEALVKEAWELMKPNVQELGLKMFFLSWADVAGGAGMFYFLKDQNEIPRNNPQLRSHVVKVFTMTCESAAQLHKNGKVEAVGSTLKKMGAIHLKKGVQESHFEVIKVAFLKVVKEAVEEKWSEEMGAAWAEAYDKLAA

SEQ ID NO: 25530 - protein, 247 aa, Glycine max
MYVASMRKSFKDSLKVLEADIQHANTLASDFPREYDGACLQMRMSYSPAAHLFLFLVQWTDCHLAGALGLLRILIYKVYVDGTTTMSTHERKASIREFYAVIYPSLLQLEKGVTDTEDKKQKAVCMERYRRRDDEEYRQSSDIDIEREDECGICMDMNSKIVLPNCNHAMCLKCYREWRTISQSCPFCRDSLKRVNSGDLWVFTDRRDVVDMATVTRENLRRLFMYIDKLPLIVPDSLFDTYDSHIR

SEQ ID NO: 25531 - protein, 112 aa, Silicibacter sp. TM1040
MKKIEAIIKPFKLDEVKEALQDVGVQGLSVIEVKGFGRQKGHTELYRGAEYVVDFLPKVKIEVVLDDDQVDAAIEAIVAAAKTDKIGDGKIFVSPVEQAIRIRTGEAGSDAL

SEQ ID NO: 25532 - protein, 330 aa, Escherichia coli
TIKVGINGFGRIGRIVFRAAQKRSDIEIVAINDLLDADYMAYMLKYDSTHGRFDGTVEVKDGHLIVNGKKIRVTAERDPANLKWDEVGVDVVAEATGLFLTDETARKHITAGAKKVVMTGPSKDNTPMFVKGANFDKYAGQDIVSNASCTTNCLAPLAKVINDNFGIIEGLMTTVHATTATQKTVDGPSHKDWRGGRGASQNIIPSSTGAAKAVGKVLPELNGKLTGMAFRVPTPNVSVVDLTVRLEKAATYEQIKAAVKAAAEGEMKGVLGYTEDDVVSTDFNGEVCTSVFDAKAGIALNDNFVKLVSWYDTETGYSNKVLDLIAHISK

SEQ ID NO: 25533 - protein, 323 aa, Arabidopsis thaliana
MGVDYYKVLQVDRNAKDDDLKKAYRKLAMKWHPDKNPNNKKDAEAKFKQISEAYDVLSDPQKRAIYDQYGEEGLTSQAPPPGAGGGFSDGGASFRFNGRSADDIFSEFFGFTRPFGDSRGAGPSNGFRFEEDVFSSNVVPPRKAAPIERQLPCSLEDLYKGVSKKMKISRDVLDSSGRPTTVEEILTIEIKPGWKKGTKITFPEKGNEQRGIIPSDLVFIVDEKPHAVFKRDGNDLVMTQKIPLVEALTGYTAQVSTLDGRSVTVPINNVISPSYEEVVKGEGMPIPKDPSKKGNLRIKFTVKFPSRLTTEQKSGIKRMFSSS

SEQ ID NO: 25534 - protein, 678 aa, Anabaena variabilis ATCC 29413
MPAPTINPTITAFPLTAVVGQEAIKLALLLAAVDPGLGGVAIAGRRGTAKSVMARAIHALLPPIEVVKGSLSNCDPNHPEEWDDYLLAEYADKNLQDVPTEIIPSPFVQIPLGVTEDRLLGSVDVEQSVKQGDTIFQPGLLATANRGVLYVDEINLLDDQISNQLLTVLSEGRNQIEREGISFQHPCKSLFIATYNPEEGALREHLLDRIAIALSADGVLGLDQRVTAVEQAIAYSKSPQDFLQQYNEDLDSLKTQIILAREWLKEVTITQEQIAYLVDEAIRGVVQGHRAELFAVRVAKAAAALEGRTTVNAEDLRRAVELVIVPRATVIQTPPPDQPPPPPPPPPPQSQDESEEEQEEEQENNEDKPEEQEQPEPPDIPEEFIFDPEGVILDNSVLYFAQMAQRQGKSGSRSIIFSDDRGRYIKPMLPKGKVRRIAVDATLRAAAPYQKARRERQPDKKVIVEQGDIRSKRLVRKAGALVVFVVDASGSMALNRMQSAKGAVMQLLTEAYQNRDQVALIPFRGEQAEVLLPPTRSIALARNRLERLPCGGGSPLAHGLTQAVRVGVNAQMGGDVGQVVIVAITDGRGNIPLSRSLGEPQESGEKPDIKAELLDIAARIRALGMQLLVIDTESKFVSTGFAKELAKTSGGKYYHLPKATDKAIAAMTKGAIADLKSR

SEQ ID NO: 25535 - protein, 329 aa, Deinococcus radiodurans
MAYPNPAGIKRVAVLTSGGDAPGMNAAIRAVVRTGAQQGIEVVGVRRGFSGLHRGEVQLLGPRDVANTIQRGGTILLTARSHTWRSPEGRAKGAAVLREWGVDGLVVIGGDGSFHGGYFLQEEHGIPVIGVPGTIDNDLYGTDHTIGYFTAVETALEAVDKLRDTGASHERIFVIEVMGRHAGHIALDVAVAGGAEEVFIPEDKKPIGDVVNIVKDSIAKGKRGSIIIVAEGYDGGAEAVAQAIHAGTGLETRVSILGHIQRGGTPVSSDRILASRLGEAAVYALMDGKKGVMVGRIGGGIAYTPLHETWEKRKDVSRDLYRCAKMLSI

SEQ ID NO: 25536 - protein, 139 aa, Triticum aestivum
NKFVQKSRLVPVRNSRDIVDPRVRLRAEIKDDNKFREIYNFAFAWAREKGQKSLPLETAIGMWRLLFAERHWPLIDHWCQFLQVRHNKAISRDTWSQLLEFVKTIDPQLSNYDEEGAWPYLIDEFVEYLTENGCVQRNK

SEQ ID NO: 25537 - protein, 127 aa, Oryza sativa
  misc_feature (42)..(42): Xaa can be any naturally occurring amino acid
  misc_feature (53)..(53): Xaa can be any naturally occurring amino acid
  misc_feature (57)..(57): Xaa can be any naturally occurring amino acid
MATSMITLAVVAPPRTKGLPGICRRGSSLLIDCSGGKKIKTXDTPYGIGGGMXSDIXDASGQKSTGKDAYQMPDKYGAHDHGYSPIYCPEEWCPTGDTYVGGTTGLLIWAVTLGVLLDGRALVGYNT

SEQ ID NO: 25538 - protein, 376 aa, Chlorobium tepidum TLS
MIRKPWIIDTTLRDGEQAPGVVFSPHEKKRIAAMLAETGVDEIEVGYPAISAAERKVIREIVAMKLPVRLTSWSRANMADIELAAECGTDAVHISFPASRLYLELIHKKDDWIQEQLHALVSKARERFDFVSVGGQDATRSSTDFLQRFMLDAEAAGAKRFRIADTVGIATPVSVMALGAALRQSSSLPLEFHAHNDLGMATANAFTALNEGFEAVSVSVTGLGERAGNAALEELAMALALNGDFDTHLDTSMLSRLCDAVATASGRAIQEQKPVVGRSAFQHESGIHCAALLQDPLSYQPFLPSRVGRSDFEIVIGKHSGTAAIIAHFNRRGITISKKEARELLDLIRSQSDRLKRALRTDEIDALREQNSVKHA

SEQ ID NO: 25539 - protein, 610 aa, Bradyrhizobium sp. BTAi1
MRTMFEAHFQTFEDPEAGVALTARLAALREELARRKLTGFIVPRADQQQNEYVPPSEERLAWLTGFTGSAGLAIVLPQAAGLFVDGRYTLQAGKQVDGKAWTVESLIEPPPESWLTRHLQSGDRVGFDPWLHTTAAAERFAAACAKVGAELVAVEGNPIDSVWTERPLPPLGPVSIHVTELAGESEADKLGRIREEIGRLGVEALVLSDSHNVAWTFNIRGSDVSHTPLPLSYAVVPKSGRPTIFIDHRKLSNVTRDHLERNADVAEPDALTASLGRLAQSGAAIALDSATAADALTRLILDAGGKPVRGADPVSLLKAAKNQVEIEGTRRAHRRDAVALARFLAFIDREAPKGTLTEIDAVEALESFRRDTAALKDVSFPTISGTGPNGAIVHYRVTRKSNRRIVPGDLLLIDSGAQYQDGTTDVTRTIAVGTPTGEMRDRFTRVLRGHLAIARAIFPDGTTGAQLDTLARQFLWQAGIDFEHGTGHGVGSYLSVHEGPARISKLGTTPLKRGMILSNEPGYYKTDAFGIRIENLELVVEKEIAGAEKTMNGFEALTLAPIDRRLIDVAMLSAEERAWLDAYHARVRETVRPALDEADQHWLDQATAPL

SEQ ID NO: 25540 - protein, 771 aa, Legionella pneumophila str. Lens
MKENVSHLPRELSRMVFWSLTCLKKAIAEVYGKETYERIEQIRLSMQDTIGSESFSLGKALHNLQIELSKLEKKQLYQIAHGFSLMMELINTCENAYRIFRINQRKEQVYSDMPQGIHYVLTAHPTEARTNEFLKLFKEIRDYLIEVLKSPYLMNEPHLDQMLKISLQINISYHEKPSVEDEAQYIYQYALHPLNIKLYHSFLAKGVPIQLRTWVGGDKDGHSGVNEKIMLKSLELSRSFFIAYIQECLEEVLEIIKLSTALGKNKSLADQINQLVKKAYGLKKIQSKDHEKISAFKNELTATQINALKFLNFEPEQFSIISSIFHLYPALVMPIELREDSTIVKESLTSIKKTTITKMLEQVHSITHGTDPKNYIRGFILSMVESAEDIKNGINLVKKVFKGYALPVVPLFENQLALTNADTILNNSITEDIRQKHLKQWEGNYEVMLGYSDSSKENGVLPSRLMIAKSLKNIQSTLENKNLRPIFFHGSGGSIERGGGDVKEQTASWSKEMMSNYKVTVQGEMVARLFGSSSILKSQVDKFLDIYSQKGKNTDNGYPEELSSFSARVSQKYKTLIQSDWFWQIIEQASPYHFLKELKIGSRPTKRKSGPDQRKLRAIPWILCWTQTRLLFPTWWGIGSAWSELNGIEKNRLKALYKENALFAAFVKQLGVTLSKVYLPVWEHYLLQLTGSIEYLKPFQSELESTIQFFYQITDEKDFCFHQPWLGESIQLRSTLIHPLNLIQIEAMKRKDLPLLRKTVTGISCGMLTTG

SEQ ID NO: 25541 - protein, 399 aa, Borrelia garinii PBi
MKDYNMIDSHTRRFDSTTNPTILKVIGAGGGGSNAVNRMIEYGVRDVEFIVANTDLQALQTSIAPIKIALGAKVTAGLGAGGKPEIGQAAAEEDIDVIRNHLSGADMVFITAGMGGGTGTGAAPVIAQVAKELGILTVGVVTKPFKFEGPKKLRLAEQGINNLRKSVDTLIIIPNQKLLTVVDKRTTIKDAFKRADDVLRMGVQGIAGLIIEHGEVNIDFADVKSIMQGQGDALMGIGYGKGENRAVDAATSAISNPLLEEVRIEGSKGLLVNVTGGDDFSLLELEEIMGIITVSVDDEATVIYGHAINSNLEDEIYVTVVATGFASKNQKEILSSPENNTLSSKEFDTLMSGNQNVPSGSYEHQDSSFAAKSKNVNYFDEDIDVPTFLRNLNKKSSDD

SEQ ID NO: 25542 - protein, 336 aa, Galiella rufa
MVVKVGINGFGRIGRIVFRNAIEHEDIEIVAVNDPFIAADYAVYMLKYDSTHGRFKGEVSHKDGDLIVNGKTIKMYQERDPASIPWSETGAYYVVESTGVFTTIEKASAHLKGGAKKVVISAPSADAPMFVCGVNLEKYSKDINILSNASCTTNCLAPLAKVINDNFGIVEGLMTTVHSYTATQKTVDGPSAKDWRGGRTAAANIIPSSTGAAKAVGKVIPALNGKLTGMSMRVPTQNVSVVDLTVRLEKGASYEEIKKVVKAAAEGDYKGVLEYTEDELVSSDLNGNNASSIFDARAGISLNEKFVKLVAWYDNEWGYSRRVLDLISYIAKVDAK

SEQ ID NO: 25543 - protein, 380 aa, Novosphingobium aromaticivorans DSM 12444
MTEVSPIETIIEDARNGRPYILVDAPDRENEGDVIIPAQFATPNAINFMAMHARGLICLAISSERASHLDLPMMEARNQSSLSTAFTVSIEARDGVTTGISAHDRAHTIAVAVDPSKGPEDLVSPGHVFPLVARDGGVLVRAGHTEAAVDISRLAGLAPAGVICEIMNPDGSMARLPELIEFARKHEMNIGTIADLIEYRRRSESLVERVVEAPFDSWHGDFRIIVYRNVIDSGEHVALVRGDPHQDMPTLVRVHQLDLTADVLGWRAAHRDYVPAALEVLAAHDGPAVAVFVRDNSPTSISERVKGNRKAYADTHGYRDYGIGAQILRDVGVREMVLLSSSAGKLAALEGFGLSVVNRVPLVEDERGKPSRSDQPFASA

SEQ ID NO: 25544 - protein, 271 aa, Sporobolus stapfianus
NEVEEEGEEFAAYCRRGKGRRRVEMEDRHVAKVALGGDPKAALFGVFDGHGGKNAAEFAAENMPKFVAEEMTKADGGESEIEGAVKRGYLKTDEEFLRRGESGGACCVTAVLQKGGLVVSNVGDCRAVLSRSGKAEALTSDHRASREDEKERIENLGGFVVNYRGTWRVQGSLAVSRGIGDAHLKQWIVADPDTRTLLVDQHCEFLILASDGLWDKIDNQEAVDLARPLCTSNDKASRMAACRMLVETSISRGSTDDISVVIIQLQNFSSS

SEQ ID NO: 25545 - protein, 450 aa, Arthrobacter nicotinovorans
MLATLASATSEDAVAALEAACAAQTSWARTAPRVRAEILRRAFDLVTARSEDFALLMTLEMGKPLAEARGEVAYGAEFLRWFSEETVRDYGRYLTTPEGKNKILVQHKPVGPCLLITPWNFPLAMATRKVAPAVAAGCTMVLKPAKLTPLTSQLFAQTMMEAGLPAGVLNVVSSSSASGISGPLLKDSRLRKVSFTGSTPVGKRLMSDASRHVLRTSMELGGNAPFVVFEDADLDKAVEGAMAAKMRNMGEACTAANRFLVQESVAQEFTRKFAAAMGALSTGRGTDPASQVGPLINNGARDDIHALVTAAVDAGAVAVTGGAPVDGPGYFYQPTVLADVPNNAAILGQEIFGPVAPVTTFTTEQDAIKLANASEYGLAAYLYSRDFNRLLRVAEQIEFGMVGFNAGIISNAAAPFGGVKQSGLGREGGSEGIAEYTTTQYIGIADPYEN

SEQ ID NO: 25546 - protein, 455 aa, Synechococcus sp. CC9605
MLQVAVIGGGPSGSCAAEILAKAGIETWLFERKLDNAKPCGGAIPLCMVEEFDLPDEIIDRKVRNMKMISPSNREVDIKLDPLGYDENAYIGMCRREVFDAFLRNRAADLGTTLINGLVQKIDTGADRQGPYTIHYADYSGGGPTGEQKTLAVDLIIGADGANSRVAKAMDAGDYNVAIAFQERIKLPAEEMTYYENLAEMYVGTDVSPDFYAWVFPKYDHVAVGTGTMQQNQSLIKGLQRGIRERANKRLFQGEVIKVEAHPIPEHPRPRRVVGRMALVGDAAGYVTKSSGEGIYFAAKSGRMCAEAIVEISNNGASIPTEKQIKSTYLKRWDRKYGATYVVLDILQRIFYRNDAAREAFVEMCDDKDVQKLTFDSYLYKRVVMMNPWQQIKLTLRTLGSLIRGEALAPSDYNPVPSAVGRSDGDFLAEEAAQQIKAQAGESKGSEWKEKAGVS

SEQ ID NO: 25547 - protein, 175 aa, Zea mays
  misc_feature (160)..(160): Xaa can be any naturally occurring amino acid
MVLTSNISVQKTLYEVLSVSEDATYDEIRAAYRSAALNTHPDKAQTTLESSSVPSTEQQEFSSVQKAWEVLRHPTSRADYDKQLQSSRQSIEITASEIQVGDMIVESAAGALELLYPCRCGDYFSITSGELSGDGGLSSLGNGEEVEELQASDSASASVXVRGCGSCSLKIRLVL

SEQ ID NO: 25548 - protein, 308 aa, Arthrobacter nicotinovorans
MAKNVMHEPNPLENVGNILDGRATARAVKTELAGRIAALKDHGKTVGLGTILVGDDPASHSYVAGKHRDCAEVGIESIRRDLPSTISQRELESVLDELNKDARTTGYIVQLPLPPHIDQNAVLEKISPQKDADGLHPINLGKLALNVSGDLTSPLPCTPNAIVELLSRHGIALNGLEVLVIGRGVTVGRPLGLLLTRRAINATVTSAHTGSADLPKLLKRADVVVAAAGVPGIVQGKHLKPGSIVLDVGVSRILDASTGKAALQGDVDADTMQVAAWISPNPGGVGPMTRAMLLVNVVEAAERDLSYA

SEQ ID NO: 25549 - protein, 156 aa, Pisum sativum
GPFGGLKFMTGFPVKKVNTDITSITSNGGRVKCMQVWPPIGKKKFETLSYLPPLTRDQLLKEVEYLLRKGWVPCLEFELEKGFVYREHNKSPRYYDGRYWTMWKLPMFGTTDASQVLKELDEVVAAYPQAFVRIIGFDNVRQVQCISFIAHTPESY

SEQ ID NO: 25550 - protein, 155 aa, Brassica napus
  misc_feature (106)..(106): Xaa can be any naturally occurring amino acid
MYRTAALRAKALTGCLSRSFRASRYASSTAAAATASPVFSGSSLPSLNIPLDGISLPPSLPDNVGPSKVQTTTLPNGLKIASEMSPNPAASVGLYVDCGSIYETPXSRGATHLLERMAFKSTLNRSHVRLVREIESMGASTSASASREQMGYTID

SEQ ID NO: 25551 - protein, 537 aa, Bradyrhizobium japonicum USDA 110
MSSAQAKKERLYLFDTTLRDGAQTNGVDFTLTDKQIIAAMLDELGIDYVEGGYPGANPTDTEFFGSKPKLNHARFTAFGMTRRAGRSVSNDPGVAGLLEAKADAICFVAKSSAYQVRVALETTKEENLASIRDSVAAAKAAGREVMLDCEHFFDGYKEDSSFALACAKAAYEAGARWVVLCDTNGGTMPNEVEAIVTEVTRHIPGAHVGIHAHNDTEQAVANSLAAVRAGARQIQGTLNGLGERCGNANLCSLIPTLKLKQEFADAFEIGVTPEKLATLVKVSRTLDDMLNRVPNRHAAYVGESAFVTKTGIHASAVLKDPQTYEHVLPELVGNHRKVLVSDQAGRSNVIAELDRAGIAYEKSDPKLTRLVEELKEREAAGYAYESANASFDLLARRTLGKVPHYFEVEQFDVNVEQRYNALGERVTVALAVVKVDVAGEHLISAAEGNGPVNALDVALRKDLGKYQKYIEGLKLIDYRVRILNGGTGAVTRVLIESEDENGDSWTTVGVSPNIIDASFQALMDSVIYKLVKSGAPA

SEQ ID NO: 25552 - protein, 556 aa, Pseudomonas aeruginosa UCBPP-PA14
MSMLKDPSQKYRPFPAINLPDRTWPSKTITEVPIWCSSDLRDGNQSLIEPMDAAKKMRFFKTLVQVGLKQIEVAFPSASDTDFNFVRELIEGNHIPDDVTIQVLTQAREDLITRTFESLRGAKKAIVHVYNATAPSFRRIVFNQDKQGVVDIATNAAKLIKKLAAEQPDTQWSFQYSPEIFSSTELEFSVEVCNAVIDVWQPTPDNKIILNLPATVECATPNVYADQIEWFGRHVDKRDSVIISLHTHNDRGTGVAATELGLMAGADRVEGCLFGNGERTGNVDLVTLALNMYTQGLHPQLDFSDIDAVRKVVEECNQLPVHPRHPYVGDLVHTAFSGSHQDAIRKGFAQQKEDAIWEVPYLPIDPADIGRDYEAVIRVNSQSGKGGITFLLEQEYGISLPRRMQIEFSQVVQGETDRLGLEMTAQQIYSLLENEYLKATSPYVLASHRLQEENGTSAVDLEVSFDGEKQHWRGIGKGPLEALVAALPVKAEIMDYHEHAIGAGANAKAAAYIEIRLEGQRPLHGIGIDENITTASFRALFSALNRAVTQAEAKAA

SEQ ID NO: 25553 - protein, 378 aa, Thermoplasma volcanium GSS1
MGDITDLLSKVSIDDISDDFWDDNPTPSIPEDEEIANIYKTLNVKIKVVGCGGGGSNTVSRLYEEGLKGADLIALNTDASHLKTIKVAKKLLIGYRTTRGLGTGADPKVGEEAAAEEIVSIKKMVQNTDIVFVTAGLGGGTGTGSAPVVAKAAKEAGAIVISVVTLPFDSEGPMRMDNAVIGLENLAQFSDTLIAIPNQRLLSEVPNAEMKTAFAYADRVLADTIRAIVEIITKTGVINIDYSDIKTVMKSGGVAMIGMGQSKKGGDRIMTALEEALKPRLIDVDISTAKDCIFKIIAPPDITVSEVGKAMSEIKKRITAKSRIIWGLTVDKNLDQDVKVLIFMTGVNSAYLVRDLESARRLANAFTGSTSTGIDIVS

SEQ ID NO: 25554 - protein, 91 aa, Thiocapsa roseopersicina
MSDSIVHVTDDSFEDEVLKSLEPVLVDYWADWCGPCKMIAPVLDEIAGEYAGRIKVAKLNIDENPNTPRRYGIRGIPTLMLSRQSEVEATK

SEQ ID NO: 25555 - protein, 319 aa, Ehrlichia ruminantium str. Gardel
MTQIYKTQVLILGSGAAGCTAAIYAARANLQPILITGMCPGGQLTITTDVENFPGFAHAVQGPNLMEQMQQQAYNSGAKIISDEIKEIRTDMYPFECIGIFDDHYIANSIIIATGAQAKWLNIESEEAFKGKGVSACATCDGVFFSGSDVAVVGGGNTAVEEALYLTRHATKVFLIHRRDKLRAEPILQKRLFSNDKIQVIWNSSVKEILGNKENGTVEKVILESTNTGNTTTLPVKGVFIAIGHAPNTKILKKPDNTNIVSLDDEGYIITNPNSTVTSCPGIFAAGDVQDKIYRQAVVAAGSGCMAAIEAAKFLSQLK

SEQ ID NO: 25556 - protein, 336 aa, Hypocrea ceramica
MVPKVGINGFGRIGRVVLRNALETGAVEVVALNDPFIEPHYAEYMFKYDSTHGRFKGDIKVDGKDLVIDGKRIKFYQERDPANIPWKDSGAEYIVESTGVFTTTEKASAHFKGGAKKVIISAPSADAPMYVMGVNEDTYAGANVISNASCTTNCLAPLAKTLNDKFTIVEGLMTAIHAYTASQKTVDGPSSKDWRGGRAAAQNLIPSSTGAAKAVGKVIPELAGKVTGMSVRVPTVNVSLVDFTVRFAKDVTYDEVKAAIKEASEGPLKGILAYTEDDIVSTDILTDPHSSTFDAKAGIALNKNFVKVMSWYDNEYGYSRRVVDLIVYVSKKDAGQ

SEQ ID NO: 25557 - protein, 338 aa, Hypocrea ceramica
MAPIKVGINGFGRIGRIVFRNAVEHPDIEVVAVNDPFIETTYAAYMLKYDSSHGLFKGEVEVDGKDLVVNGKKVRFYTERNPADIKWSETGAEYVVESTGVFTTTEKAKAHLVGGAKKVIISAPSADAPMYVMGVNESDYDGSADVISNASCTTNCLAPLAKVINDNYGIVEGLMTTVHSYTATQKTVDGPSAKDWRGGRGAAQNIIPSSTGAAKAVGKVIPALNGKLTGMSIRVPTANVSVVDLTVRIEKGASYEEITETIKKAADGPLKGVLAYTGDDVVSSDMLGNTNSSIFDIKAGISLNKNFVKLVSWYDNEWGYSRRVLDLLAHVAKVDASK

SEQ ID NO: 25558 - protein, 837 aa, Magnetococcus sp. MC-1
MKLSRREYIKAHAIAAAAAAAGMPVAAPTEAHATTLGGDIRWDKAPCRFCGTGCSILVGTKDNRIVATQGDPDAPVNRGLNCIKGYFLSKIPYGKDRLTKPLLRKTAGKYDKNGDFQEVSWDEAFDVMADHFKKAIKKGLDAGKMPPVGMFGSGQWTVWEGYAASKLMKAGFRSNHLDPNARHCMASAVAGFIRTFGIDEPMGCYDDLEHADTFVLWGSNMAEMHPILWSRLTNTRLTKPNAKVVVLSTYQHRCFDLADLGIVFNPQSDLAIANFIANYVIEKGRYNKAFIEKHVNFRLGNTDIGYGLRPTDEREKSAKNNKNRKDTIGSQPISFEEYAAFVKTYDVAKASQISGVPERQLIELAELYADPDRKIMSLWTMGMNQHTRGTWQNNLVYNLHLLTGKISEPGNSPFSLTGQPSACGTAREVGTFSHRLPADMVVANKAHRDICEKHWLLPEGTIPEKVGFHAVLQNRKLKDGELNAYWVMCNNNMQAAANINEEALPGYRNPDNFIVVSDPYPTVTAQAADLILPTAMWVEKEGAYGNAERRTQFWRQQIPPPGEAKSDVWQLMEFSKRFKVEEVWPAELIAKQPELKGKTLFEVLYANGQVNKYPLSETAEGFDNNESTDFGFYVQKGLFEEYAHFGRGHAHDLADFDSYHQARGLRWPVVDGKETLWRFREGYDPYVPKGEGVRFYGKPDGKAWIFALPYEPPAEEPDAEYDMWLCTGRVLEHWHSGSMTRRVPELYRAMPDAMVYMHPNDAAKRGLKRGMSARLITRRGEVIARVETRGRNRVPEGLIFIPWFDASRLVNKLTLDATCPISKETDYKKCAVKVLKA

SEQ ID NO: 25559 - protein, 466 aa, Clostridium acetobutylicum ATCC 824
MEIFRKKTAEDFQDEASSSNLKRGLTSFDLAAIGIGAVVGTGIFVSTGQGAKLAGPSVVISFLVAAVTCGLCSLTYCELSSMFSVSGSTYSYSYIAFGEIIAWIIGWDLMLEYLVAASAISSGWSSTLIGIVKNYGVNVPDALTKSPLSGGIVDLPAIFITLVITFLLYRGVTESAKINNVIVGVKICIIALFVFLGITHVKVTNYHPFVPYGVNGIMSAAAIIFFSFIGFDAIATTAEETKDPKKDVPKGLLICFGVVVVLYMSVAIILTGIVPYTKIDINNALPGALSSIGITWGSALVGVGAVLGMISTLLVIMYGQIRIFMVMSRDGLLPKVFSSVNKKHSTPGLCTVITGVLVSIIAGFLPLKMIMELCNIGTLFAFILVSFGVIVLRYTMPNVERKFKCPGVPFTPLVTAFFCFYMMIHLPLFTWLRFGAWLLIGFVIYFVYGSKHSKMTARDRGKEEVS

SEQ ID NO: 25560 - protein, 466 aa, Clostridium acetobutylicum ATCC 824
MEAKKDLFKNLERGVYDIKNEDRYSYKVNKGLTPEIIEKISKEKHDPKWMLDFRLKCLDVYNKTELPSWGPSLDELDMDNIVTYVRPDTEMKGSWNEVPDDIKDTFEKLGIPKAERESLAGVGAQYDSEVVYHSIKEDLVKQGVIYTDMETAINKYEDIVKEYFMKLVPPSDHKFVALHGAVWSGGSFVYVPEGVNVDIPLQSYFRLNSPGAGQFEHTLIIVEKGATLHFIEGCSAPKYNVTNLHAGCVELYVKEDATLRYSTIENWSKNMLNLNTKRAVVEKNGTIEWVSGSFGSKISMLYPMSILKGEGAKSEYTGVTFAGEGQHLDTGTKVVHAAPYTSSTISAKSISKGGGTCIYRGSVKVTENAHHCKSSVSCDSLMLDDISQSDTIPALDLANDEVDIGHEAKIGRISDDAIFYLMSRGVSEDEARAMIVRGFVNPISKALPLEYAVEMNNLIKLELKGN

SEQ ID NO: 25561 - protein, 259 aa, Rhodopseudomonas palustris CGA009
MALQFSTVTRKGPITIVTLSRPEVYNALHTDAHYELEGVFNEFAADPEQWVAIVTGAGDKAFCAGNDLKWQASGGKRGWGESGFGGLTSRFDCDKPIIAAVNGVAMGGGFEIALACDLIIAAENATFALPEPRVGLAALAGGLHRLPRQIGLKRAMGMILTARHVKAQEGYELGFVNEVVPQGEALAAAERWAETICTVSPMSIRASKQTLSRGLEVSLPQAIAEQRDYPAVKAMVASQDYIEGPKAFSEKRAPNWQGK

SEQ ID NO: 25562 - protein, 287 aa, Raphanus sativus
EFMNEVRLIARLQHINLVRILGCCIDADERMLIYEYLENSSLDYFLFGKKRSSNLNWKDRFAITNGVARGLLYLHQDSRFRIIHRDMKAGNILLDKNMIPKISDFGLARIIARDQTEASTDTPIGTYGYMSPEYAMYGILSEKTDVFSFGVIVLEIVTGKRNRGFYQSNPEDNLVCYAWTHWAQGRALEIVDPVIVDSLSSTFQPKEVLKCIQIGLLCIQERAEHRPTMSSVVWVLGSEATAIPQPKPPVYCLIPSFYANNPSSSRPSDDDESWTMNEYTCSVIDAR

SEQ ID NO: 25563 - protein, 339 aa, Lactococcus lactis subsp. lactis Il1403
MSNQEPIANYKFNYKTTANKVMKNINLSGKTIIITGGYSGIGLEMTKQLSRAGAKIIIPARRMEVAKKNLSKIKNIDILPLDLTNPESIHQFAESFLQNNSKLDILINSAGLMYLPLKRDSRGIEYHFATNHLGHYQLTLELLPALKNAKISRVINLSSRAQQMTPLLEDWNFEKIENYNPQIGYQQSKTANVLFSIKLDELGKKYGIRSFAVHPGMIPMTNIGRQNSPITPWLRYLADYFKLIHIPVFFNALKSGFDRSKYRYLKTIAQGAATPLWASTSPDLEGKGGLYCEDLNIARLMTSEEANNFSGGLRPHAIDHNDADRLWQISKNITGLDFE

SEQ ID NO: 25564 - protein, 363 aa, Arabidopsis thaliana
MSRQSFSLLKNLRSIASGSKIQTRSVTYMPRPGDGKPRPVTLIPGDGVGPLVTNAVQQVMEAMHAPVYFEPFEVHGDMKSLPEGLLESIKKNKVCLKGGLKTPVGGGVSSLNVNLRKELDLFASLVNCFNLPGLASRHENVDIVVIRENTEGEYAGLEHEVVPGVVESLKFCSERIAKYAFEYAYLNNRKKVTAVHKANIMKLADGLFLESCQEVAKKYPSIAYNEIIVDNCCMQLVARPEQFDVMVTPNLYGNLVANTAAGIAGGTGVMPGGNVGAEYAVFEQGASAGNVGKDTTEEQKNANPVALLLSSAMMLRHLQFPSFADRLETAVKRVIAEGNCRTEDLGGNSTTQEVVDAVIANLD

SEQ ID NO: 25565 - protein, 290 aa, Raphanus sativus
EFMNEVTLIARLQHINLVQILGCCIDADEKMLIYEYLENLSLDSYLFGKTRSSKLNWKERFDITNGIARGLLYLHQDSRFRIIHRDLKVSNILLDKNMIPKISDFGMARIFARDETEANTKRVVGTYGYMSPEYAMKGIFSEKSDVFSFGVIVLEIVTGKRNIAFNNLNYENNLLGYAWSNWKEGKALEIVDPDIVDSLSPLSSTFQPEEVLKCIQIGLVCVQELAEHRPTMSSVVWMLGSEAAEIPQPKPPGYWVRRSSYEIDPSSSRQCDDDDSWTVNQYTCSVIDAR

SEQ ID NO: 25566 - protein, 433 aa, Staphylococcus epidermidis ATCC 12228
MAFEFRLPDIGEGIHEGEIVKWFIKAGDTIEEDDVLAEVQNDKSVVEIPSPVSGTVEEVLVDEGTVAVVGDVIVKIDAPDAEEMQFKGHGDDEDSKKEEKEQESPVQEEASSTQSQEKTEVDESKTVKAMPSVRKYARENGVNIKAVNGSGKNGRITKEDIDAYLNGGSSEEGSNTSVASESTSSDVVNASATQALPEGDFPETTEKIPAMRKAIAKAMVNSKHTAPHVTLMDEIDVQELWDHRKKFKEIAAEQGTKLTFLPYVVKALVSALKKYPALNTSFNEEAGEVVHKHYWNIGIAADTDKGLLVPVVKHADRKSIFEISDEINELAVKARDGKLTSEEMKGATCTISNIGSAGGQWFTPVINHPEVAILGIGRIAQKPIVKDGEIVAAPVLALSLSFDHRQIDGATGQNAMNHIKRLLNNPELLLMEG

SEQ ID NO: 25567 - protein, 406 aa, Candida albicans SC5314
MKVIVSADDTGSAKEVICNEGTDTSKQNATQPISIDNCLLEPSSSVKSRIIHFLSFNYQYLIGARLGGQVSVYELSDEESEEKFKLLHNFELPVDAQDKPVALLRVEILDSILVAFESSKVFLIHINDSFDFKPLELVLPEYKPISAFAINPQAENIVALGGKEHDLQILQLFNKNINSTVFKKNNYENEFKPQIIFKAKNVRNDHLELRVPIWITNILFAKAAKGYKLVTSTRYGQIRLYDTAEGRKPRKDYKVTEKPIVTLTFANDEQTEIIVTDTHSLIAKYSLTQVDEKAFKTISASAGEIVKPVPKLLGKFTGGNTGATFGVHAYERIVAFAGLDRYLRVFDLESREILAKVYLGVEVSALLILDDEDTEDEETKKRKRKEEEDDEELWNQLDTKKKTHTI

SEQ ID NO: 25568 - protein, 428 aa, Lycopersicon esculentum
MNGDMNQQQQQQQLQQQQQQQWMAMQQYQQQWMAMQQYPPAAAMVMQQQMMYGQQYMPYYHQQHQQMIQIQQNASEDNRTIWIGDLQQWMDEGYLHTCFAQAGEVISVKVIRNKQTGQSERYGFIEFNTHEAAEKVLQSYNGTMMPNAEQPFRLNWSAFSSGEKRADVGAGAGSGSDLSIFVGDLASDVTDTMLRDTFSSRYPSVKGAKVVIDSNTGRSKGYGFVRFDDESERSRAMTEMNGIYCSSRAMRIGVATPKKPSPMQQYFPQAVILAGGHASNGAATQTSQTDSDLSNTTVFVGGLDSEVTDEELRQSFSQFGNVVSVKIPAGKGCGFVQFSERSAAEDAIEKLNGTVIGAQTVRLSWGRNPANKQFRTDSGSQWNGGYYGRQNYGGYGYGASQSQDSMYGAGAAHGASSNGYGNHEQSVS

SEQ ID NO: 25569 - protein, 219 aa, Kluyveromyces lactis
IDDEHRVRVFYDKRIGQEVDGESVGDEFKGYVFKIAGGNDKQGFPMKQGVLLPTRVKLLLAKGHSCYRPRRNGERKRKSVRGAIVGPDLAVLALIITKKGEQEIEGITNDTVPKRLGPKRANNIRKFFGLTKEDDVRDYVIRREVTKGDKSYTKAPKIQRLVTPQRLQRKRQQKSLKIKNAQAQREAAAEYAQLLAKRLSERKAEKAEVRKRRASSLKA

SEQ ID NO: 25570 - protein, 252 aa, Synechococcus elongatus PCC 6301
MIMVGDNPASAVYVRNKERACEQTGIVSFGKHLPGDSSEAEIRALIEELNQDDRVDGILVQLPLPSHLDAVPLLLAIDPEKDADGLHPLNLGRLLRGEEGLRSCTPAGVMELLAANQIDPAGKKAVVIGRSILVGKPLAMMLLEANATVTIAHSRTPNLPEVCRQADIVVAAVGRPELVGADWIKPGAVVVDVGINRLEDGRLVGDVDYEAASAITSWITPVPGGVGPMTVAMLLHNTVLSYCRRSGQPFLS

SEQ ID NO: 25571 - protein, 285 aa, Bradyrhizobium japonicum USDA 110
MWPRAAVGGPAMQMNDKTVLITGSTDGVGRYVARRLAAECAKVLIHGRDAARAKTLIDEIVKAGHAAPIFYQADLSSMSGTRALAEAVKRDHQRLDVFVSNAGIGSQSDGPQRQVSADGHELRFAVNYLSGFLLAHLLLPLLKAAAPSRIVNVASLGQHPIDFDDVMITKGYSGSRAYAQSKLAQIMFTIDFAEEVKGAGVTVNSLHPATYMNTTMVRAGGITPISTVEQGGAAILRLVEGDDVAGKSGLFFNGINEARANPQAYDADARKRLRALSLELVGISS

SEQ ID NO: 25572 - protein, 381 aa, Arabidopsis thaliana
MTSLTRLSFFPLYTKKYKIKNTMAENYDRASELKAFDEMKIGVKGLVDAGVTKVPRIFHNPHVNVANPKPTSTVVMIPTIDLGGVFESTVVRESVVAKVKDAMEKFGFFQAINHGVPLDVMEKMINGIRRFHDQDPEVRKMFYTRDKTKKLKYHSNADLYESPAASWRDTLSCVMAPDVPKAQDLPEVCGEIMLEYSKEVMKLAELMFEILSEALGLSPNHLKEMDCAKGLWMLCHCFPPCPEPNRTFGGAQHTDRSFLTILLNDNNGGLQVLYDGYWIDVPPNPEALIFNVGDFLQLISNDKFVSMEHRILANGGEEPRISVACFFVHTFTSPSSRVYGPIKELLSELNPPKYRDTTSESSNHYVARKPNGNSSLDHLRI

SEQ ID NO: 25573 - protein, 315 aa, Robiginitalea biformata HTCC2501
MSRALRIGTRDSELALWQAQTVRDRLEAAGHRAELVPVKSTGDLVLDKPLYELGITGIFTKTLDVALLREDIDLAVHSMKDVPTALPEGICQAAVLERASARDVLVHKGLGFLDGPGTIATGSLRRKAQWLNRYPAHQVTGLRGNVNTRLKLLRENSWDGAIFAQAGLERIGLLPDNAEPLDWMLPAPAQGAMLVVARTSDTAAREAARPLHHEQSALEVAVEREFLRTLEGGCSAPIGARVHAADGQLHLEGGLFSLDGKKAFRVTRHTGSLEAGGTGDARFQDAGEFGAACAREILDSGGAVLMESIRKILAQ

SEQ ID NO: 25574 - protein, 332 aa, Saccharomyces cerevisiae
MVRVAINGFGRIGRLVMRIALSRPNVEVVALNDPFITNDYAAYMFKYDSTHGRYAGEVSHDDKHIIVDGKKIATYQERDPANLPWGSSNVDIAIDSTGVFKELDTAQKHIDAGAKKVVITAPSSTAPMFVMGVNEEKYTSDLKIVSNASCTTNCLAPLAKVINDAFGIEEGLMTTVHSLTATQKTVDGPSHKDWRGGRTASGNIIPSSTGAAKAVGKVLPELQGKLTGMAFRVPTVDVSVVDLTVKLNKETTYDEIKKVVKAAAEGKLKGVLGYTEDAVVSSDFLGDSHSSIFDASAGIQLSPKFVKLVSWYDNEYGYSTRVVDLVEHVAKA

SEQ ID NO: 25575 - protein, 138 aa, Solanum tuberosum
MASTVMSSLSLKPTFTLEKTSVKGLPSLARSSSSFKVVASGVKKLKTDKPYGINGSMALRDGVDASGRKPKGKGVYQYVDKYGANVDGYSPIYNTDEWSPSGDVYVGGTTGLAIWAVTLVGILAGGALLVYNTSALAQ

SEQ ID NO: 25576 - protein, 344 aa, Robiginitalea biformata HTCC2501
MKGVLLVNLGSPDSPTPKDVKPYLDEFLMDERVIDAPKWLRTLIVRGIILRTRPKKSAEAYSKIWWEEGSPLIVISERFKQAVEAQADIPVALGMRYGSGSIAEGMEQLQKQGVDEVLLVPLYPHYAMSSFETVVVKALEVREAQFPDMQVTTMPAFGKNPDYLNVLATSIREKLDAFGYDHVLFSYHGIPERHIRKSDPTSYHCKINDTCCGMNSVAHHTCYRHQCYEMTRNIAALLNLPKDQVSTSFQSRLAGDPWLKPYTDYEFERLAGEGRSRLAVITPAFVSDCLETLEEIAMEGKNDFLEAGGTDFMHIPCLNDREDWVTLMAKWVNDWARDGRLPAV

SEQ ID NO: 25577 - protein, 373 aa, Zea mays
MARRSTPLLRRLLAPSPSLSTPLADAVSRRTVTYMPRPGDGAPRGVTLIPGDGIGPLVTGAVRQVMEAMHAPVYFETYEVHGDMPTVPAEVIESIRRNKVCLKGGLATPVGGGVSSLNVQLRKELDLYAALVNCFNLPGLPTRHDNVDIVVIRENSEGEYSGLEHEVVPGVVESLKVITKFCSERIAKYAFEYAYLNNRKKVTAVHKANIMKLADGLFLESCREVAKKYPGIKYNEIIVDNCCMQLVAKPEQFDVMVTPNLYGNLVANVAAGIAGGTGVMPGGNVGQDHAIFEQGASAGNVGNEKIVEKKRANPVALLLSSAMMLRHLQFPSFADRLETAVKRVIAEGKYRTKDLGGTSTTQEVIDAVIAKLG

SEQ ID NO: 25578 - protein, 193 aa, Brassica napus
MAARIHGGAGAGAATALSTFNPKKLVAPSRTNLPAARSSKRCIVAAAGSDASKNSLSVRHSQKLIANAAVATKAETSATTGTGHELLLFEALQEGLEEEMDRDPHVCVMGEDVGHYGGSYKVTKGLADKFGDLRVLDTPICENAFTGMGIGAAMTGLRPVIEGMNMGFLLLAFNQISNNCGMLHYTSGGQFTI

SEQ ID NO: 25579 - protein, 186 aa, Magnaporthe grisea 70-15
MVRYGATEIETAKSARARGSYLRVSFKNTRETAQAINGWKLHRAVKFLENVQEKKEAVPMRRYAGSTGRCAQGKQFGVSKARWPTKSAEFLLGLLKNAEANADAKGLDTGNLVVKHIQVNQAPKQRRRTYRAHGRINPYMSCPCHIELILTEQEEAVEKSDAVTDRNEHLTSRQRGARVRKALTAA

SEQ ID NO: 25580 - protein, 377 aa, Lilium hybrid cv. 'Acapulco'
MENAKGPVVVTGASGYVGSWLVMKLLQYGYTIRATVRDPRDLRKTKPLLDIPGADERLTIWKADLSEDASFDEAINGCTGVYHVATPMDFDSKDPENEVFQPTINGVLGIMKSCKKAGTVKRVIFTSSAGTVNVQENQMPEYDESSWSDVDFCRRVKMTGWMYFVSKTLAEKAAWEFAKENDIQLISIIPTLVVGPFITSTMPPSMLTALSLITGNEAHYSILKQIQLVHLDDVCKAHIFLFENPEASGRYICSSYDATIYDLARKIKDRYPKYAIPQKFEGIDDQIKPVHFSSKKLMDLGFKYQYTFEEMFDEGIRSCIEKKLIPHQTQERYYVHDELDLGCSKMTNDKLDLGGSKLNSMDEMVRGHNERVSVALQ

SEQ ID NO: 25581 - protein, 338 aa, Glomerella cingulata
MAPIKVGINGFGRIGRIVFRNAIEHPEVEIVAVNDPFIETKYAAYMLKYDSTHGIFNGEIKQEGNDLVINGKTVKFYTERDPAAIPWKETGADYVVESTGVFTTTDKAKAHLQGGAKKVIISAPSADAPMYVMVVNEKSYDGSADVISNASCTTNCLAPLAKVINDKFGIVEGLMTTVHSYTATQKTVHGPSAKDWRGGRTAAQNIIPSSTGAAKAVGKVIPELNGKLTDMSMRVPTTNVSVVDLTARIEKGASYDEIKQAIKEAAEGPLKGVLAYTEDDVVSTDMIGNPNSSIFDAKAGISLNNNFVKLVSWYDNEWGYSRRVLDLLAHVAKVDASK

SEQ ID NO: 25582 - protein, 396 aa, Methanocaldococcus jannaschii
MRNMQEKGVSEKEILEELKKYRSLDLKYEDGNIFGSMCSNVLPITRKIVDIFLETNLGDPGLFKGTKLLEEKAVALLGSLLNNKDAYGHIVSGGTEANLMALRCIKNIWREKRRKGLSKNEHPKIIVPITAHFSFEKGREMMDLEYIYAPIKEDYTIDEKFVKDAVEDYDVDGIIGIAGTTELGTIDNIEELSKIAKENNIYIHVDAAFGGLVIPFLDDKYKKKGVNYKFDFSLGVDSITIDPHKMGHCPIPSGGILFKDIGYKRYLDVDAPYLTETRQATILGTRVGFGGACTYAVLRYLGREGQRKIVNECMENTLYLYKKLKENNFKPVIEPILNIVAIEDEDYKEVCKKLRDRGIYVSVCNCVKALRIVVMPHIKREHIDNFIEILNSIKRD

SEQ ID NO: 25583 - protein, 397 aa, Mycoplasma hominis
MAKLDFDRSKPHVNIGTIGHVDHGKTTLTAAIATVLAKKGLAEARDYASIDNAPEEKARGITINTSHIEYQTEKRHYAHVDCPGHADYVKNMITGAAQMDGAILVVAATDGPMPQTREHILLARQVGVPKIVVFLNKIDMFKDDEREEMVGLVEMDVRSLLSEYGFDGDNAPIIAGSALKALQGDPEYEKGILELMDAVDTYIEEPKRETDKPFLMAVEDVFTITGRGTVATGRVERGVLQLNEEVEIVGLKPTKKTVVTGIEMFRKNLKEAQAGDNAGLLLRGIDRSEVERGQVLAKPKTIVPHTQFEATVYVLKKEEGGRHTPFFHNYKPQFYFRTTDVTGGIEFKPGREMVVPGDNVELTVTLIAPIAIEEGTKFSIREGGRTVGAGSVTKILK

SEQ ID NO: 25584 - protein, 287 aa, Raphanus sativus
EFMNEVRLIARLQHINLVRILGCCIDPDEKILIYEYLENSSLDYFLFGKKRSSNLNWKDRFAITNGVARGLVYLHQDSRFRIIHRDMKAGNILLDKNMIPKISDFGLARIIARDQTEASTDTPIGTYGYMSPEYAMYGILSEKTDVFSFGVIVLEIVTGKRNRGFYQSNPEDNLVCYAWTHWAQGRALEIVDPVIVDSLSSTFQPKEVLKCIQIGLLCIQERAEHRPTMSSVVWMLGSEATAIPQPKPPVYCLIPSFYANNPSSSRPSDDDKSWTMNEYTCSVIDAR

SEQ ID NO: 25585 - protein, 396 aa, Mycobacterium tuberculosis CDC1551
MAKAKFQRTKPHVNIGTIGHVDHGKTTLTAAITKVLHDKFPDLNETKAFDQIDNAPEERQRGITINIAHVEYQTDKRHYAHVDAPGHADYIKNMITGAAQMDGAILVVAATDGPMPQTREHVLLARQVGVPYILVALNKADAVDDEELLELVEMEVRELLAAQEFDEDAPVVRVSALKALEGDAKWVASVEELMNAVDESIPDPVRETDKPFLMPVEDVFTITGRGTVVTGRVERGVINVNEEVEIVGIRPSTTKTTVTGVEMFRKLLDQGQAGDNVGLLLRGVKREDVERGQVVTKPGTTTPHTEFEGQVYILSKDEGGRHTPFFNNYRPQFYFRTTDVTGVVTLPEGTEMVMPGDNTNISVKLIQPVAMDEGLRFAIREGGRTVGAGRVTKIIK

SEQ ID NO: 25586 - protein, 290 aa, Raphanus sativus
EFMNEVTLIARLQHINLVQVLGCCIDGDEKMLIYEYLENLSLDSFLFGKTRSSKLSWKERFDITNGVARGLLYLHQDSRFRIIHRDLKVSNILLDKNMIPKISDFGMARIFERDETEASTMKVVGTYGYMSPEYAMNGIFSEKSDVFSFGVIVLEIVTGQRNRGFYNLNYKNNFLSYAWSNWKEGRALEIVDPVIIDSLSPLSSTSQPKEVLKSIKIGLLCVQEHAEDRPTMSTVVWMLGSEETEIPQPNPPGYCVRRSPHELDPSASRQLDDDESWTVNQYTCSVIDAR

SEQ ID NO: 25587 - protein, 411 aa, Arabidopsis thaliana
MNALAATNRNFKLAARLLGLDSKLEKSLLIPFREIKVECTIPKDDGTLASFVGFRVQHDNARGPMKGGIRYHPEVDPDEVNALAQLMTWKTAVAKIPYGGAKGGIGCDPSKLSISELERLTRVFTQKIHDLIGIHTDVPAPDMGTGPQTMAWILDEYSKFHGYSPAVVTGKPIDLGGSLGRDAATGRGVMFGTEALLNEHGKTISGQRFVIQGFGNVGSWAAKLISEKGGKIVAVSDITGAIKNKDGIDIPALLKHTKEHRGVKGFDGADPIDPNSILVEDCDILVPAALGGVINRENANEIKAKFIIEAANHPTDPDADEILSKKGVVILPDIYANSGGVTVSYFEWVQNIQGFMWEEEKVNDELKTYMTRSFKDLKEMCKTHSCDLRMGAFTLGVNRVAQATILRGWGA

SEQ ID NO: 25588 - protein, 215 aa, Glycine max
MDSDSWISTRLSSSSRRHHYRSDLYAEESEGNDDFRAEFLCPFCAEDYDVVSLCCHIDDHHPIQAKNGVCPICGKKVGVDLVGHFTTQHGNFLRVQRKRRVRKGGSASTISILRKELQEGALQSLLGGSSYLASSNSEPDPLLSSFMFNPVVADESVSATPPSTEDALVKESSKDDFLKRKPQQLQLSEEDQVEKARRFEFVQGLLMSTILDDKL

SEQ ID NO: 25589 - protein, 450 aa, Silicibacter pomeroyi DSS-3
MIPPKPPARPDKVSLWRYLRLFRQDLLSAQPARLYRAWMAEFRTPFFRSYLVNQPDLVDTVLKGRPDDFPKSNRISEGLRPLLGNSVFLTNGETWKRQRRIIDPAFEGGRLRDTFPAMWAASEAAVNRLAAQAGQETEIEEVTSHAAADVIFRTLFSIPIEHEVAAQVFTRFRAYQRAQPLLNLAAFVPVPQWVPRFHSRETRRNAAVIRGLIRQLTDTRMGEIRAGTAPDDLATKIMTTTDPQTGDRFDTDEMVDQVAIFFLAGHETSASALAWTLYLMALYPDWQEKLAEEARTLDSGTDFSVMSKLRLSRDVFREALRLYPPVPMMVRETTCPERFRDRDVPKGAQIVLSPWHLHRHERLWERPDDFDPARWQTENGKTCQRNAYMPFSAGSRVCTGAGFAMVEGPLILSMLLLRFRFERIAGREPVPVAHLTVRAADGIWLRVVER

SEQ ID NO: 25590 - protein, 287 aa, Raphanus sativus
EFMNEVRLIARLQHINLVRILGCCIDADEKMLIYEYLENSSLDYLLFGKKRSSNLNWKDRFAITNGVARGLLYLHQDSRFRIIHRDMKAGNILLDKNMIPKISDFGLARIIARDQTEASTDNPIGTYGYMSPEYAMYGVLSEKTDVFSFGVIVLEIVTGKRNRGFYQSNPENNLICYAWTHWAQGRALEIVDPVIVDSLSSTFQPKEVLKCIQIGLLCIQERAVHRPTMSSVVWMLGSEATAIPQPKPPVYCLIPSFYANHPSSSRQSNDDESWTMNEYTCSVIDAR

SEQ ID NO: 25591 - protein, 390 aa, Corynebacterium efficiens YS-314
MGSDCLHRRTPPMTDMFDLIDDWGPEKIVVVHDHRTRMRGVLVIDNTARGMGKGGTRMQPTVSVGEIARLARVMTWKWAGVDLFYGGAKAGIQADPASPDKEAVLRSFVRKLSNEVPEEYIFGLDMGLTEHDAAIITDELGRGTCMGTPYELGGVPYDQLGVTGYGIAEVADEVAQSQNLAGASVAIQGFGAVGHAVAERLHTLGYRVVAVSTARGAIADPNGLDIPELVRLREEVGDDLVSHYPVLRIDPGEELFMDAEILIPAALQDVINARGAERVTARIVVEGANLPTSPQAQQILHQRGITVVPDFIANAGGVVAAAFAMDNRFSPFRTDPEQIYTSVSSKLRLNATTVLGRAAERSQTSHDAARQLSQERVRAAMEVRGMLPSG

SEQ ID NO: 25592 - protein, 544 aa, Methanocaldococcus jannaschii DSM 2661
MRDMCSISGIIVKDNQISAKYSIDMMKILKHRGRDNSGLLLDDEVIYFNDFEDVEDLEEEMIGNLSLAHNRLAIVGRYGVQPIPNEDETIWLVCNGEIYNYIELREYLKQNHEFRTDSDNEVIIHLYEEEKLEELDGDYAFAIYDKSKNVVRLARDMFGVKPLFYVDRDKYFAFASERKALWHLLINIDGCERDLDELNSKIKTLKPNSQLIYYLDDNRFEIIEGFKKLELNYMKERSYEEAKEYLDRALKNSVLKRVRGLDKVGIICSGGVDSSLIAKLASLYCEVILYAVGTENSEDLIYAERLAKDLNLKLRKKIISEEEYEEYVFKVAKAIDEVDLMKIGVGIPIYVASEMANEDGLKVVLSGQGADELFGGYARHERIYRERGEEELKKELLKDVYNLYKVNLERDDHCTMANGVELRVPFLDEEVVEIALSIPIEYKMSELSNRPYAESNISLKSEPINGLKNTNLNIKCVRSVRKKILRDVASQYLPDYIAYRPKKAAQYGSGGEKMIYKVAKKYGFSKKRINEFLDMLKRKIVSEF

SEQ ID NO: 25593 - protein, 290 aa, Raphanus sativus
EFMNEVRLIARLQHINLVRILGCCIDADEKILIYEYLENSSLDSHLFGEKRSSKLNWKDRFDITNGVARGLLYLHQDSRLRIIHRDVKVSNILLDKSMIPKISDFGMAIIFAREETEANTRNVVGTYGYMSPEYALDGVFSEKSDVFSFGVIVLEIVSGKRSRGFYSLNHENNLLSYAWSHWTEGKALEIVDPVITDSLSSLPSTFQPKEVLKCIQIGLLCVQERAEHRPTMSSVVWMLGSEATEIPQPNPPGYYVGRCPYENNPSSRRLCDDYESWTVNQYTCSVIDAR

SEQ ID NO: 25594 - protein, 936 aa, Rhodopseudomonas palustris CGA009
MSSLNLSAGPEPVSERPDDAAAIEAETRLRNDIRLLGRILGDTVREQEGQSVFDLVENIRQTSIRFHRDDDKTARAELAAILDGMSIQDTMRIVRAFSYFSHLANIAEDQNNIRQMRAGSTAGSAPRAGLLAKTLAHARQEGISAAELRKFFATALVSPVLTAHPTEVRRKSTMDREMQIAGLLDQRDRVQLTADEWTDNEERLRRAVETLWKTNLLRRTKLTVLDEVTNGLSFYDYTFLREVPRLHSALEDRLADAAKAEGANAEGELASFLRMGSWIGGDRDGNPFVTAEVLHGTLKLQSTRVLRYYLEELHELGSELSLASHLAGTTDTVKALAETSPDTSPHRKYEPYRLAVSGIYARLAATALKLEVENLRAPVGEAEPYASAQDFKADLDAIHLSLTTHHSGVIARGRLRQLRRAIDCFGFHLASLDMRQNSAVHERTIGELMDAARPGTSYAVLDEDARIALLISELRSTRPLTSMFVKYSDETVGELAVFREAAKAHATYGAAAIPQCIISMTKGVSDLLELAVLLKEVGLIDPSGRSAINVVPLFETIEDLQACAKIMDRLLSIPEYRRLVDSRGSVQEVMLGYSDSNKDGGFVTSGWELYKAEIGLIEIFEHHGVRLRLFHGRGGSVGRGGGPSYDAIVAQPGGAVNGQIRITEQGEIITSKYSNVEVGRNNLEILAAATLEASLLQPKRVAPHRDYLEAMEQLSALAFKAYRGLVYETDGFVDYFWASTVINEISTLNIGSRPASRKKTRAIEDLRAIPWVFSWAQCRLMLPGWYGFGSAVSAWVTEHPEKGIAFLQAMYQEWPFFRTLLSNMDMVLSKSSIGIASRYAELVEDTAIRDRIFSRIRAEWHSSIDYLLAIMQQDHLLQSNPLLERSIRHRFPYLDPLNHVQVQLLREHRTHDPDEQVLRGVQLTINGISAGLRNSG

SEQ ID NO: 25595 - protein, 290 aa, Raphanus sativus
EFMNEVTLIARLQHINLVQVLGCCIEADEKMLIYEYLENLSLDSYLFGETRSSKLNWKERFDIINGVARGLLYLHQDSRFRIIHRDLKASNILLDKNMIPKISDFGMARIFERDETEAKTRKVVGTYGYMSPEYVMDGIFSEKSDVFSFGVIVLEIVSGKKNRGFYNMSNENNLLSYVWSHWKEGRALEIVDPVILDSLLSLPSTYQPQEVLHCIQIGLLCVQEHAENRPMMSSVVWMLGSEATEIPQPKPPGYCVIRSPYELDPSSSKKCDDNESWTVNQYTCSVIDAR

SEQ ID NO: 25596 - protein, 365 aa, Ralstonia eutropha JMP134
MNAAMLPPMLDVLAALAAGQRVVVLEDETDEALGCVLVAAERATEGDVNFMAAEARGLVCMAITEARRQRLQLPPMAANHRQRERYTVSIEAASGVSTGISAADRALTLRVAAARLAQPADLVQPGHIFPVVAQPDGVLRRAGFAEACSDLPSLAGCVASGAYAMLLDDAGDLLRGPALLAFAQRHGLPAVSISGLIHHRLLTEGALRRTRTSELNTPYGRFAVHAYHDVPVDALHLALVLGQPDPAKAVLTRVQTVEMQRDVLGFGTPALPAWNLERSLARIGAEGCGVLVLLDERESPQQRLERLAAPAAATPAPAFAQRALGVGAQILRDVGARKLRLLSHPVPYRTVAGFELEVTEFVPPA

SEQ ID NO: 25597 - protein, 117 aa, Vibrio fischeri ES114
MKVEITGNNIDITPGIRERIEGKFKKLEAKRNLDIIGRHASVTKRANGKHKVEAYATIAGGKVVASAEQEDLFGAIREMYQKLERQLDKLQHKGEARRATHAQAPGVEEPEVELEEE

SEQ ID NO: 25598 - protein, 334 aa, Zea mays
RESGRRVTNTTSPGAMAAAMTSFVAKNPLLAAAARRRAPPLAGRALPFSPLASTRAPRRTVTCFVPQDTAAPAAPVPALDEEARAAAARRVAEKEARKRSERRTYLVAAVMSSLGVTSMAVAAVYYRFSWQMEGGEVPVIETLGTFALSVGAAVGMEFWARWAHRALWHASLWHMHESHHRPREGPFELNDVFAIAIPFHPISLLAYGFFHRGIVPGLCFGAGLGITLFGMAYMFVHDGLVHRRFPVGPIADVPYFRRVAASHKIHHMDKFGGVPYGLFLGPKELEEVGGLDELVSSPVSEATDTEDAGEEKTRPVVCVVRTSVFMGQSVPNEF

SEQ ID NO: 25599 - protein, 745 aa, Burkholderia pseudomallei K96243
MTADSASTAAAPSLDDVLAFVREHAGDARLSSGERLADHAAGTSTIMQRLNVDPPATQAAALFALAPYLSDPDKQIAEHFGDEVAHLVADVRKLLRLGTVSLRAAQSAPVDAGRDAQAERRAQIEALRKMLLAFAQDIRVVLIRLASRLQSLRYYAAAKIEPPPDVARETLEIYAPLANRLGIWQLKWELEDLAFRFEDPVTYKRIAKLLDEKRVEREAYVAGAIERLQHELAAAHIQAEVSGRPKHIYSIWRKMRGKELDFSELYDVRAFRVIVPDIKDCYTVLGIVHHLWQPVPKEFDDYISRPKPNGYKSLHTVVIGDDGRAFEVQIRTQEMHRFAEYGVAAHWRYKEAGARGYGGQFSASEKYDEKIAWLRQLLAWKDEIADGGGAEVSGQQAWAQLREATLDDDHIYVLTPQARVIALPQGATPVDFAYHLHSELGHRCRGARVDGAMVPLNTQLANGQTVEIVAVKEGGPSRDWLNPQLGYLHSSRARQKVRAWFNAVDQQENVAHGRALVEKTLQREGKTSVNLEHLAAKLGFKSPDELFSVVGKEEFSLRNVEQALSDAPAPEPEPEAPANFEKRASGANVAHGASAGVLVVGVDALLTQLARCCRPAPPDPISGFVTRGKGMSIHRSDCATFRRMAERAPERVLQTTWSADVLGGRGASVYPVDLMIEATDRQGLLRDISEVFAREKMNVIGVKTQSRRNAAFMQFTVEVSSASQVQRACTLLGEIQGVVRAARKA

SEQ ID NO: 25600 - protein, 166 aa, Arabidopsis thaliana
MAFVTTAEVCDANQELIRSGQLRALQPIFQIYGRRQIFSGPVVTVKVFEDNGLIRQFIEEKGNGRVLVVDGGGSQRCAILGGNPVVQAQNNGWAGIVVNGCIRDVDEINGCDIGVRALASHPIKARKKGLGEQRVPVNIAGTRICDGEWLYADTDGILVSQIELSV

SEQ ID NO: 25601 - protein, 138 aa, Solanum tuberosum
MASTVMSSLSLKPTFTLEKTSVKGLPSLARSSSPFKVVASGVKKLKTDKPYGINGSMALRDGLDASGRKPKGKGVYQYVDKYGANVDGYSPIYNTDEWSPSGDVYVGGTTGLAIWAVTLVGILAGGALLVYNTSALAQ

SEQ ID NO: 25602 - protein, 811 aa, Burkholderia pseudomallei
MKSSGSARATRRNAVSSSSAPAHAEPPARRAAKPARKLDGAAARPLAPTNAASAKPQGRTREDKDRPLFEDIRYLGRLLGDVVREQEGDAVFDVVETIRQTAVKFRREDDKAAAQTLEKMLRKLTPEQTVSVVRAFSYFSHLANIAEDRHHNRRRRIHALAGSAAQAGTVAYALDKLKQAGDASSKTIKQFFEGALIVPVLTAHPTEVQRKSILDAQHDIARLLAERDQPLTARELAHHEALLRARVTTLWQTRMLRDARLTVADEIENALSYYRATFLDELPALYADIEEALAEHGLRARVPAFFQMGSWIGGDRDGNPNVTAATLDEAISRQAAVIFEHYLEQVHKLGAELSVSNLLVGASDALKALAAASPDQSPHRVDEPYRRALIGVYTRLAASARVRLGEGTVPVRSAGRGAAPVRATPYADAEEFAADLRVLTDSLALHHGESLATPRLAPLMRAAEVFGFHLASIDLRQSSDIHEAVVAELLARGGVEADYAALPEADKLRVLLAALADPRPLRSPYLDYSDLAKSELGVLERAHAIRAQFGARAVRNYIISHTETVSDLVEVLLLQKETGLFEGTLGTPHANARNGLMVIPLFETIADLRNASDIMRAFFALPGVGELLAHQGHEQEVMLGYSDSNKDGGFLTSNWELYRAELALVDLFDERGIKLRLFHGRGGTVGRGGGPTYQAILSQPPGTVNGQIRLTEQGEVIASKFANPEIGRRNLETVVAATLEATLAPHSNAPKQLPAFEAAMQTLSDAAMASYRALVYETPGFTDYFFSSTPITEIAGLNIGSRPASRKLQDP

SEQ ID NO: 25603 - protein, 504 aa, Solanum tuberosum
MYRCASSRLSSLKARQGNRVLTRFSSSAAVATKPSGGLFSWITGDTSSSVTPLDFPLNDVKLSPPLPDYVEPAKTQITTLANGLKVASEASVNPAASIGLYVDCGSIYETPASYGATHLLERMAFKSTLNRSHLRIVREIEAIGGNVTASASREHMIYTYDALKTYVPQMVEMLADCVRNPAFLDWEVKEQLEKVKAEISEYSKNPQHLLLEAVHSAGYAGPYGNSLMATEATINRLNSTVLEEFVAENYTAPRMVLAASGVEHEEFLKVAEPLLSDLPKVATIEEPKPVYVGGDYRCQADAEMTHFALAFEVPGGWMSEKESMTLTVLQMLMGGGGSFSAGGPGKGMYSRLYLRVLNQYPQIHAFSAFSSIYNNTGLFGIQGTTSSDFGPQAVDVAVKELIAVANPSEVDQVQLNRAKQATKSAILMNLESRMVASEDIGRQLLTYGERNPVEHFLKAIDAVSAKDIASVVQKLISSPLTMASYGDVLSLPSYDAVSSRFRSK

SEQ ID NO: 25604 - protein, 464 aa, Parvularcula bermudensis HTCC2503
MSLGRLVSRYSVALVLPALTLSSVAVAQDATPDTSAALDTQFILNSFLFLFGGVLVMFMAAGFCMLEVGLVRTKNAAEICLKNMVLYALAGIAYYVIGYNLMYNGVESFVGSLGIWSPSELASDETISIDTGYAATSDWFFQMVFVATAASVVSGAVAERVKVFPFLIFVLVLTAIIYPIQGAWSWGGGFLSQSGFSDFAGSTIVHSVGGWAALTGVIILGPRAGKFVNGRINAIPGSSLPLATLGTFILWLGWFGFNGASQLAMGTVTDVVAISQIFANTNMAAAGGVTAALITTKLVYKKVDLTFVLNGALAGLVSITAEPLTPNIGEAILIGATGAVIVTFAVPMLDKFRLDDVVGAIPVHLVAGIFGTLVVPLTNSDAQFHTQLLGVAAVAAWVIPTSAIVWGVLKVTLGIRLSPEHESLGGDLSELGLEAYPEFGRGSIGPLESAEGAAVRMAKSSSKA

SEQ ID NO: 25605 - protein, 118 aa, Oryza sativa (japonica cultivar-group)
MAAVNCKVVVAVIVVAMVVAAPGASAAITCGQVGSAIAPCISYVTGRSGLTQGCCNGVKGLNNAARTTADRQAACRCLKSLAGSIKSLNLGTVAGVPGKCGVNVGFPISLSTDCNKVS

SEQ ID NO: 25606 - protein, 946 aa, Saccharomyces cerevisiae
MAGQVLDGKACAQQFRSNIANEIKSIQGHVPGFAPNLAIIQVGNRPDSATYVRMKRKAAEEAGIVANFIHLDESATEFEVLRYVDQLNEDPHTHGIIVQLPLPAHLDEDRITSRVLAEKDVDGFGPTNIGELNKKNGHPFFLPCTPKGIIELLHKANVTIEGSRSVVIGRSDIVGSPVAELLKSLNSTVTITHSKTRDIASYLHDADIVVVAIGQPEFVKGEWFKPRDGTSSDKKTVVIDVGTNYVADPSKKSGFKCVGDVEFNEAIKYVHLITPVPGGVGPMTVAMLMQNTLIAAKRQMEESSKPLQIPPLPLKLLTPVPSDIDISRAQQPKLINQLAQELGIYSHELELYGHYKAKISPKVIERLQTRQNGKYILVSGITPTPLGEGKSTTTMGLVQALTAHLGKPAIANVRQPSLGPTLGVKGGAAGGGYSQVIPMDEFNLHLTGDIHAIGAANNLLAAAIDTRMFHETTQKNDATFYNRLVPRKNGKRKFTPSMQRRLNRLGIQKTNPDDLTPEEINKFARLNIDPDTITIKRVVDINDRMLRQITIGQAPTEKNHTRVTGFDITVASELMAILALSKDLRDMKERIGRVVVAADVNRSPVTVEDVGCTGALTALLRDAIKPNLMQTLEGTPVLVHAGPFANISIGASSVIADRVALKLVGTEPEAKTEAGYVVTEAGFDFTMGGERFFNIKCRSSGLTPNAVVLVATVRALKSHGGAPDVKPGQPLPSAYTEENIEFVEKGAANMCKQIANIKQFGVPVVVAINKFETDTEGEIAAIRKAALEAGAFEAVTSNHWAEGGKGAIDLAKAVIEASNQPVDFHFLYDVNSSVEDKLTTIVQKMYGGAAIDILPEAQRKIDMYKEQGFGNLPICIAKTQYSLSHDATLKGVPTGFTFPIRDVRLSNGAGYLYALAAEIQTIPGLATYAGYMAVEVDDDGEIDGLF

SEQ ID NO: 25607 - protein, 495 aa, Shigella flexneri 2a str. 301
MSRNTEATDDVKTWTGGPLNYKEGFFTQLATDELAKGINEEVVRAISAKRNEPEWMLEFRLNAYRAWLEMEEPHWLKAHYDKLNYQDYSYYSAPSCGNCDDTCASEPGAVQQTGANAFLSKEVEAAFEQLGVPVREGKEVAVDAIFDSVSVATTYREKLAEQGIIFCSFGEAIHDHTELVRKYLGTVVPGNDNFFAALNAAVASDGTFIYVPKGVRCPMELSTYFRINAEKTGQFERTILVADEDSYVSYIEGCSAPVRDSYQLHAAVVEVIIHKNAEVKYSTVQNWFPGDNNTGGILNFVTKRALCEGENSKMSWTQSETGSAITWKYPSCILRGDNSIGEFYSVALTSGHQQADTGTKMIHIGKNTKSTIISKGISAGHSQNSYRGLVKIMPTATNARNFTQCDSMLIGANCGAHTFPYVECRNNSAQLEHEATTSRIGEDQLFYCLQRGISEEDAISMIVNGFCKDVFSELPLEFAVEAQKLLAISLEHSVG

SEQ ID NO: 25608 - protein, 430 aa, Lactobacillus acidophilus
MKANTYLYKKIRKIDHDVLRPTFHFNAPVGWINDPNGLIYYKNYYQLYYQYNPYAPHWDSMHWGHARSKDGIHWQDMPVAMKPDHEYDKSGVFSGSAIEKGGKLYVIYTGHVDENGKAVETQCVAVSDDGVDFKKYKNNPVMTIADLPGEVDESNFRDPKVFEHDGKYYCVIAAAINGHGSLILFESEDLLHWSFKSILLQGEKYGLMTECPDYFNIDGKDYLAFSVILGDDKHSIVYIAEGHMDWQTFKFELEKCDRLDDGDDFYASQSFMNEKGERIVIPWLRSADHVNYLEESGHLWNGMMGIPRKLTIDNNELIQSPLGKFKQISLSDSEITLGINQLAEDIPVSYSLILKGDNGEIYITRTNESQYTIDIHSPAFTEELVWHSNKHKLTLVIDNSSLEIFSQTKTLSVVTFIAGINRMELKKVDL

SEQ ID NO: 25609 - protein, 283 aa, Staphylococcus aureus
EIISNKYNFNYQIEHHEFGGASIDTFGEPLTEKTLNACKRADAILLGAIGGPKWTDPNNRPEQGLLKLRKSLNLFANIRPTTVVKGSSSLSPLKEERVEGTDLVIVRELTSGIYFGEPRHFNNHEALDSLTYTREEIERIVHVAFKLAASRRGKLTSVDKENVLASSKLWRKVVNEVSQLYPEVTVNHLLVDACSMHLITNPKQFDVIVCENLFGDILSDEASVIPGSLGLSPSASFSNDGPRLYEPIHGSAPDIAGKNVANPFGMILSLAMCLRESLNQPDA

SEQ ID NO: 25610 - protein, 422 aa, Silicibacter sp. TM1040
MRRVVVTGLGLVTPLASGVEETWARLLDGQSGAGPITLFDAEASGVATTYACEVPRGDGSNGTFNPDDWVVKKDQKKIDDFILYGIAAAEMAVKDAGWTPEAEEDRLRTGVMIGSGIGGLSSIADTAVMIKEKGPRRVSPFFIPGALINLISGQVSIRHGFKGPNHSVVTACSTGAHAIGDASRLIKSGDADVMIAGGAEAAICEIGIAGFNACKALSTKYAEDPTKASRPYDADRDGFVMGEGAGIVVLEEYEHAKARGAKIYGEVLGYGLSGDAYHITAPSEDGEGGERSMRAALANAGLSAADVDYINAHGTSTMADTIELGAVERLLGDHAKNATMSSTKSATGHLLGAAGAIEAIFSILAIRDQVAPPTINLDTPAVETPVDLAPNAKRERKIDVALSNSFGFGGTNASVVFGKVSD

SEQ ID NO: 25611 - protein, 283 aa, Staphylococcus aureus
EIISNKYNFNYQIEHHEFGGASIDTFGEPLTEKTLNACKRADAILLGAIGGPKWTDPNNRPEQGLLKLRKSLNLFANIRPTTVVKGASSLSPLKAERVEGTDLVIVRELTSGIYFGEPRYFNNHEALDSLTYTREEIERIVHVAFKLAASRRRKLTSVDKENVLASSKLWRKVVNEVSQLYPEVTVNHLLVDACSMHLITNPKQFDVIVCENLFGDILSDEASVIPGSLGLSPSASFSNDGPRLYEPIHGSAPDIAGKNVANPFGMILSLAMCLRESLNQPDA

SEQ ID NO: 25612 - protein, 587 aa, Glycine max
MIVEDENCGVGSGGGGRWLRGFGSLIRRKQVDSVHVRRHGQLARKLSAVDLVGIGVGATIGAGVYILIGTVAREQAGPALVISLLIAGIAAGLSAFCYAELACRCPSAGSAYHYTYICIGERIAWLVGWSLILEYTIGASAVARGITPNLALFFGGEDNLPSFLARHTLPGLEIVVDPCAAALILLVTLLLCLGIRPTRPAQSIVTTVNVCVMLFIILVGGYLGFKSGWVGYELSSGYFPYGVNGMFAGSAIVFFSYIGFDSVSSTAVEVKNPQRDLPIGISTALTICCVLYMLVAAVIVGLVPYYELNPDTPISSAFSSYGMQWAVYIITTGAVTALFASLLGSVLPQPRVFMAMARDGLLPHFFSDIHKGTQIPLKSTIVTGVFAATLAFFMDVSQLAGMVSVGTLLAFTTVAVSVLIIRYVPPDELFEQEVCKDEQNEKARRKLASWTIALLCIGILIVTSAASADWCPRILRLTLCGMGGILLLCSTIVLACVKQDDTRHSFGHSGGFACPFVPFLPAACILINTYLLIDLGVATWLRVSVWMLIGVLVYLFYGRTHSSLLHAIYVPSAYADEIHRSQASHLA

SEQ ID NO: 25613 - protein, 406 aa, Mycobacterium tuberculosis CDC1551
MNAHVTSREGVNEFDDGIVIVGGGLAAARTAEQLRRAGYSGRLTIVSDEVHLPYDRPPLSKEVLRSEVDDVALKPREFYDEKDIALRLGSAAVSLDTGEQTVTLADVTVLGYDELVIATGLVPRRIPSLPDLDGIRVLRSFDESMALRKHASAARHAVVVGAGFIGCEVAASLRGLGVDVVLVEPQPAPLASVLGEQIGQLVTRLHRDEGVDVRTGVTVAEVRGKGHVDAVVLTDGTELPADLVVVGIGSTPATEWLEGSGVEVDNGVICDKAGRTSAPNVWALGDVASWRDPMGHQARVEHWSNVADQARVVVPAMLGTDVPTGVVVPYFWSDQYDVKIQCLGEPHATDVVHLVEDDGRKFLAYYERDGVLVGVVGGGMAGKVMKVRGKIAAGAPIAEVLDQTQA

SEQ ID NO: 25614 - protein, 529 aa, Marchantia polymorpha
MDSRAQNRDGGEDVKQELLSAGDDGKVPCPTVAIGIRQRLPDFLQSVNMKYVKLGYHYLITHAMFLLTLPAFFLVAAEIGRLGHERIYRELWTHLHLNLVSIMACSSALVAGATLYFMSRPRPVYLVEFACYRPDERLKVSKDFFLDMSRRTGLFSSSSMDFQTKITQRSGLGDETYLPPAILASPPNPCMREAREEAAMVMFGALDELFEQTGVKPKEIGVLVVNCSLFNPTPSMSAMIVNHYHMRGNIKSLNLGGMGCSAGLISIDLARDLLQVHGNTYAVVVSTENITLNWYFGDDRSKLMSNCIFRMGGAAVLLSNKRRERRRAKYELLHTVRTHKGADDKCFRCVYQEEDSTGSLGVSLSRELMAVAGNALKANITTLGPLVLPLSEQILFFASLVARKFLNMKMKPYIPDFKLAFEHFCIHAGGRAVLDELEKNLDLTEWHMEPSRMTLYRFGNTSSSSLWYELAYTEAQGRVKRGDRLWQIAFGSGFKCNSAVWRALRTVKPPVNNAWSDVIDRFPVKLPQF

SEQ ID NO: 25615 - protein, 317 aa, Chlamydia muridarum Nigg
MTVYLLANFGGPRISQEIPSFLHALLTDQDVTGGRIPPWLHRPLFSYIAKRRAHRVAEQYAYLGGRSPIFQDTEKLAQNLSQELQAPVISFHRYLTETHQDTLAALRESAGDIIGIPLFPHYTFAVTGSIIRFFLERIPEKPMAWITHFGVHPQFISCMREHIQDCLIAQGIVAEDCFFLFSVHGLPMRHIRLGDPYAKQCQDSFNALIGESEGVLSFQSKFGIGEWLVPSTKEICQSLCTKKRYIVVVPFGFVSDHIETLYEIDHLYVPMLLQRGYRVVRVPAINTSDRWVSALASIVKSSPHETILEPLLMPKRR

SEQ ID NO: 25616 - protein, 412 aa, Legionella pneumophila subsp. pneumophila str. Philadelphia 1
MNSRRVVITGMGMLTPVGLNVEETWRSILAGVSGVGLVEDFDTTEYPTKIWAKVKNFNVENHMPIKDARKMDVFTQYGMAAADEAMLDSGLKIDEVLSRRIGVAVGAGIGGIQTITNNQDKLVAGGPRKVSPFFIPAGIINMVAGQISIKHNLKGPNISVVTACTTGTHNIGLAGRIIAYGDADVMICGGAEMTTTPLCLAGFSAVRSLSKRNDEPEKASRPWDKDRDGFVMGEGAGVLVLEEYEHAKARGAKIYAELVGFGMSGDAYHITAPDEDADGASRAMEAAIQDAGIDPRQVDYINAHGTSTYLNDLNETKAIKRVFQNHAYDLAVSSTKSMTGHLLGAAGAVEAIISILAIRDQVAPPTINLDNPDEGCDLNYVAHVPQSRTINYVLSNSLGFGGTNGSLLFKRI

SEQ ID NO: 25617 - protein, 824 aa, Agrobacterium tumefaciens str. C58
MKAHAAGIAAATAGIALPAAAQPVPGGVSALQIKWSKAPCRFCGTGCGVMVGVKEGKVVATHGDMQAEVNRGLNCIKGYFLSKIMYGKDRLETPLLRKKNGVYAKDGEFEPVSWDEAFDVMAQQCKRVLKEKGPTAVGMFGSGQWTIFEGYAATKLMRAGFRSNNLDPNARHCMASAAYAFMRTFGMDEPMGCYDDFEHADAFVLWGSNMAEMHPILWTRIADRRLGFDHVRVAVLSTFTHRSMDLADIPMVFKPGTDLVILNYIANHIIKTGRVNEDFVRNHTKFVRGVTDIGYGLRPDDPVEVNAANSADPTKTEAIDFETFKEFVSEYTLEKTAAMTGVEAGFLEELAELYADPKRKVMSLWTMGFNQHVRGVWANQMVYNIHLLTGKISEPGNSPFSLTGQPSACGTAREVGTFAHRLPADMTVTNPEHRKHAEEIWRIPHGIIPEKPGYHAVQQDRMLHDGKLNFYWVQVNNNVQAGPNTKNETYLGYRNPENFIVVSDAYPTITAMSADLILPAAMWVEKEGAYGNAERRTHVWHQLVEASGEARSDLWQLVEFSKRFTTDEVWPAEILDANPAYRGKTLYEVLYKDSDVGKFPLSEINADYKNQESSDFGFYLQKGLFEEYAAFGRGHGHDLAPYDAYHEVRGMRWPVVDGKETLWRYREGYDPYVKPGEGVKFYGNKDGRAVIIAVPYEPPAESPDQEFDTWLVTGRVLEHWHSGSMTMRVPELYKAFPGARCFMNADDARKRGLNQGAEIRIVSRRGEIRSRVETRGRNRMPPGVIFVPWFDASQLINKVTLDATDPISKQTDFKKCAVKIEPVA

SEQ ID NO: 25618 - protein, 347 aa, Coccidioides immitis
AEKIAKFPGTKGPDGKYTVTLIEGDGIGPEISQSVKDIFSAAKVPIKWEPVDVTPILKDGKTAIPDEAINSVKKNYVALKGPLATPVGKGHVSLNLTLRRTFNLFANVRPCRSIAGYKTPYDNVNAVLIRENTEGEYSGIEHVVVDGVVQSIKLITREASERVLRFAFQYAQEVGKPKVRAVHKATIMKMSDGLFLRTAKEISKEFPDIEFDAELLDNTCLRMVTDPAPYNDKVLVMPNLYGDILSDMCAGLIGGLGLTPSGNIGNECSIFEAVHGSAPDIAGRALANPTALLLSSIMMLRHMGLNDHAKKIETAIFETLAEGKTLTGDLGGKAKTHEYAGAIIKRL

SEQ ID NO: 25619 - protein, 112 aa, Rubrivivax gelatinosus PM1
MKMVTAIVKPFKLDEVREALSAIGVQGITVTEVKGFGRQKGHTELYRGAEYVVDFLPKVKIEAAVDDAIVDRVIEAIEASARTGKIGDGKVFVTNLEQVIRIRTGETGKDAL

SEQ ID NO: 25620 - protein, 289 aa, Raphanus sativus
EFMNEVRLIARLQHVNLVRVLGCCIDADEKMLIYEYLENLSLDSYLFGKKRSFKLNWKDRFAITSGVARGLLYLHQDSRFRVIHRDMKVSNILLDKNMIPKISDFGMARIFAREETEANTSKVVGTYGYMSPEYALNGVFSEKSDVFSFGVIVLEIVSGRRSRGFYHLDHENNLLSYAWSHWTGGSALEIVDPVIVDSLSSLPSTFQPEEVLKCIQIGLLCVQERAEHRPTMSSVVWMLGSEATEIPRPNPPGYYVGRSPYENNPSSSGPGDDESWTVNQYTCSVIDAR

SEQ ID NO: 25621 - protein, 201 aa, Triticum aestivum
  misc_feature (172)..(172): Xaa can be any naturally occurring amino acid
MVDPRFRTQPMGASSVAFHLLSSHTMAPTVMVSSATSVAPFQGLKSTAGLPISRRSSSAGLSSVSNGGRIRCMQVWPIEGIKKFETLSYLPPLSTEALLKQVDYLIRSKWVPCLEFSKVGFVFREHNSSPGYYDGRYWTMWKLPMFGCTDATQVLNEVEEVKKEYPDAYVRXVIGFDNLRQVQCVSFIAFRPPGPPAPGKA

SEQ ID NO: 25622 - protein, 287 aa, Raphanus sativus
EFMNEVRLIARLQHINLVRILGCCIDADEKMLIYEYLENSSLDYFLFGKKRSSNLNWKDRFAITNGVARGLLYLHQDSRFRIIHRDMKAGNILLDKNMIPKISDFGLARIIARDQTEASTDTPIGTYGYMSPEYAMYGILSEKTDVFSFGVIVLEIVTGKRNRGFYQSNPEDNLVCYAWTHWAQGRALEIVDPVIVDSLSSTFQPKEVLKCIQIGLLCIQESAEHRPTMSSVVWMLGSEATAIPQPKPPVYCLIPSFYANNPSSSRPSDDDESWTMNEYTCSVIDAR

SEQ ID NO: 25623 - protein, 540 aa, Corynebacterium efficiens YS-314
MGVFPGGFCMPAGIPPISRWHPRTINPGAPVPVAWWGQSHLSRKDTPMTDPLDVSALLTKVPTGLLIGDTWRDSSDGSTYTVDNPATGQTIATLASATSDDALAALDAACEVQSSWARTPARERSEILRRAFDLINERAEEFATLMTLEMGKPIAEARGEVTYGNEFMRWFSEEAVRTYGRHGQTPEGTHRMLTVRKPVGPCLLITPWNFPLAMATRKVAPAIAAGCTMVLKPARLTPLTAQYFAQTMLDAGLPAGVLNVVSGASASAISNPIMEDDRLRKVSFTGSTPVGKQLLKKAADKVLRTSMELGGNAPFIIFEDADLDLAVEGAMGAKMRNIGEACTAANRFLVHDSIAQDFSRRLAERFNQLTLGNGLDDGVTVGPLVEAKARENVAKLVDDAVTEGATVLTGGTAGEGEGYFYQPTVLVDVAPGARILTEEIFGPVAPIITFTTEEEAIQLANDTEYGLASYLFTRDYARMFRISDQLEFGLLGFNSGVISNAAAPFGGVKQSGIGREGGTEGIDEYTQLQYIGIRDPYTDR

SEQ ID NO: 25624 - protein, 194 aa, Saccharomyces cerevisiae
IDLASIREDITLLKENFRHDKGENRNGKLLVRNEQASSVYSTQLLADIISEASKGKFGVRTAIPGHVQQGGVPSSKDRVTASRFAVKCIKFIEQWNKKNEASPNTDAKVLRFKFDTHGEKVPTVEHEDDSAAVICVNGSHVSFKPIANLWENETNVELRKGFEVHWAEYNKIGDILSGRLKLRAEVAALAAENK

SEQ ID NO: 25625 - protein, 225 aa, Aspergillus nidulans FGSC A4
MPSPTDPALQFDSIEDTIKAFSNGEFIVVLDSQDRENEGDLIIAAESITDAQMAFLVRYTSGLICAPITPEIAERLQLPQMVLENTDPKGTAYTVSIDSADPSITTGISAHDRALACRTLASPSARPQDFRRPGHIIPLQAKAGGVRQRKGHTEAAVEFCRLAGKAPAGVIAELVEDGEVVEGVAEIRGNNGMMRRDGCLKFGKKWGLKLYDRNIAYYILINWFI

SEQ ID NO: 25626 - protein, 290 aa, Raphanus sativus
EFMNEVTLISRLQHINLVQVLGCCIEGDEKMLIYEYLENLSLDSYLFGKTGKSKLSWKERFDITNGIARGLLYLHQDSRFRIIHRDLKVSNILLDKNMIPKISDFGMARIFARDETEANTMKVVGTYGYMSPEYVMHGTFSEKSDVFSFGVIVLEIVTGKRNRGFNNLDNENNLLSYAWVNWKEARALEIVDPVIVDSLSPLSSTSQPQEVIKCIQVGLLCVQELAEHRPTMSSVVWMLGSEATDIPQPKPPGYCVRRTPYELDPSSSRQYNDDESVTVNQYTCSVIDAR

SEQ ID NO: 25627 - protein, 343 aa, Flavobacteria bacterium BBFL7
MKKGVLMVNLGSPDSPSPKDVKKYLDEFLMDERVIDLPYILRAILVKGIILNTRPKKSAEAYGKIWWDEGSPLIVLSERLQEKIDEFTSVPIALGMRYGSMSIEKGLKELNDKGVDEVLIIPLYPQFAMATTETILVLAEELRKEHFPHMSFTTMPPFYNHPDYIRVLSESIKESLEGKDYEHLLFSYHGVPKRHIRKSDITKSHCKMDGKCCSTPSPAHQYCYSHQCKEVTRLVGEYLGMEDGTYSTSFQSRLGFDPWLTPYTDRTIEKMGLGGTKKMAIVTPAFVSDCLETLEEIAMEGEEIFHEVNGEQFHVIPCLNTREDWVKVLSRWIDEWAMSEAIV

SEQ ID NO: 25628 - protein, 469 aa, Escherichia coli
MSMPSQMPAILQAVMKGQSKALADAHYPCWHLAPVTGLMNDPNGFCWSGGRYHLFYQWNPLACDHKYKCWGHWSSTDLLHWQHEPLALMPDKEYDRNGCYSGSAVNNQGVLTLCYTGNVKFDDGSRTAWQCLATENNQGGFDKLGPVIPLPDGYTGHVRDPKVWKHNSQWYMVLGAQDKEKRGKVLLYSSVDLYTWSFHGEIAGNGLNEIDNAGYMWECPDFFALDGEYILLCCPQGMVREHERYLNTYPCAWLHGQFDYETGKFTHGAFSELDAGFEFYAPQTMEAPDGRRLLVGWMGVPDGEEMLQPTRKHHWQHQMTCFRELSFQQGKLFQMPIRELAQLREAEHFWQGKADHAPHVEIERLEMDIIPSGELYLNFGNALALHLNDDGIQLQRRSLAGQEKLTRYWRGSVTSLKILCDSSSVEIFINNGEGVMSNRYFPHHPASLIIQGESDVTLRYWSLRACMVE

SEQ ID NO: 25629 - protein, 413 aa, Parvularcula bermudensis HTCC2503
MTGQQHIVVIGAGQAAAQFISAYRQRGGESKITLVGDELDLPYQRPPLSKAYLKGEFDADRLSFKPQSFYDDSMAVCLLGEPAASINREQKVVTMTSGKTLPYDVLVLATGSRPRPLPSLPTSYDNVFSLRTRAESNELGAALSTAKHLTVIGGGFIGLEVAAISRSRDIPVTLLERADRLLARVTSPLVSDFFTRLHRRHGVNVHLSAEISEVRTDGNRVTHLALGDGQVIDTDIILVGIGGIANDELAKGAGVNCQDGIVVDDLGATNDPAIFAAGDCTRRPVPSGDLLRIESVYNAKEQADQIACHLTGSPSPVVDTPWFWSDQYDVKLQTAGLFNGYDEALPRGETDDAPFSVLYFKDERLIAADCLNDGPMFMTAKQILKTGAVIPKADLIDPAVPLKEIMAKAKAAG

SEQ ID NO: 25630 - protein, 481 aa, Silicibacter pomeroyi DSS-3
MSETRAIIYWLRRDLRLADHPGLAAAAASGRPVVPVFIHDESVAALGAAPAFRLGLGLERFGATLGDMGSRLILRRGSAPAVLQALIAETGAGAVWWTREYTPQAITRDSALKTALQQAGIEARSFGGALLFEPWTVETGAGGFYKVYTPFWRAVSQREVSAPDPAPARVRPPEAWPGSEALSDWGLGAPMRRGAAVVATHQAPGEAAALERLDRFIATGIGQYDACRDLPAGDGTSTLSDALSLGEIGPRTLWHRAGEAAHKGAQGAETFLKQLVWRDFAYHLMYHTPHLLSENWRPGWEVFPWATDPADPGFVAWTRGRTGVPLVDAAMREMYVTGRMHNRARMIAASYLTKHLMVHWKLGMDWFADCLTDWDPAANAMGWQWVAGCGPDAAPYFRIFNPETQAKKFDPKGRYRNHWIAEGQAEPPRAALSYFDAVPRSWNLRPDASYPPPIMALDQGRRRALSAYASAFSQGSDGKLA

SEQ ID NO: 25631 - protein, 506 aa, Oryza sativa (japonica cultivar-group)
MAAMMASITSELLFFLPFILLALLTFYTTTVAKCHGGHWWRGGTTPAKRKRMNLPPGAAGWPLVGETFGYLRAHPATSVGRFMEQHIARYGKIYRSSLFGERTVVSADAGLNRYILQNEGRLFECSYPRSIGGILGKWSMLVLVGDPHREMRAISLNFLSSVRLRAVLLPEVERHTLLVLRAWPPSSTFSAQHQAKKFTFNLMAKNIMSMDPGEEETERLRREYITFMKGVVSAPLNLPGTPYWKALKSRAAILGVIERKMEERVEKLSKEDASVEQDDLLGWALKQSNLSKEQILDLLLSLLFAGHETSSMALALAIFFLEGCPKAVQELREEHLGIARRQRLRGECKLSWEDYKEMVFTQCVINETLRLGNVVRFLHRKVIKDVHYKGYDIPSGWKILPVLAAVHLDSSLYEDPQRFNPWRWKSSGSSGGLAQSSSFMPYGGGTRLCAGSELAKLEMAVFLHHLVLNFRWELAEPDQAFVFPFVDFPKGLPIRVHRIAQDDEQE

SEQ ID NO: 25632 - protein, 489 aa, Oryza sativa (japonica cultivar-group)
MSSGKGGGGGGKGGGGKKKEVKKETKLGMAYKKDDNFGEWYSEVVVNSEMIEYYDISGCYILRPWAMEIWELLKEFFDAEIKKLKLKPYYFPLFVTENVLQKEKDHIEGFAPEVAWVTKSGKSDLEAPIAIRPTSETVMYPYFSKWIRSHRDLPLRCNQWCNVVRWEFSNPTPFIRSREFLWQEGHTAFATKEEADEEVLQILELYRRIYEEFLAVPVSKGRKSEMEKFAGGLYTTSVEAFIPNTGRGVQGATSHCLGQNFAKMFDITFENDKGSRSMVWQNSWAYTTRSIGVMVMTHGDDKDVDTTAIVNECKKTVETLEKAGIRADLDTRENYSPGWKYSHWEMKGVPLRIEIGPKDMANNQARVVRRDNGAKADIPTADLVEKVNGLLDEVQKNLFETAKQKRDACLKVVNTWDEFIVALNDKKLILAPWCDEEEVEKDVKARTKGDLGAAKTLCTPFEQPDLPEGTTCFASGKPAKKWSFWGRSY

SEQ ID NO: 25633 - protein, 218 aa, Triticum aestivum
  misc_feature (194)..(194): Xaa can be any naturally occurring amino acid
MAVSELEVDGVVFPPLARPPGSEHAHFLAGAGVRGMEIGGNFIKFTAIGVYLQADAAVPALAAKWAGKPAADLASDAAFFRDVVTGEFEKFTRVTMILPLTGAQYSDKVTENCVAYWKANGVYTDAEAAAVDKFKEAFGPHSFAPGALILFTHSPAGVLTVAFSKDSSVPESGGVAIENARLCEGVLESISATXGVSPAGQLSLATRVAELVRGAPGR

SEQ ID NO: 25634 - protein, 173 aa, Oryza sativa
MATDAILETIKPRRSAERENLPVTNATGKGRGGDHLIGLRRRMSSFSVRIQPLMSSAGAGGAFRRATSMPSVKALAAQAGAVRRWWGWGLGWVMNRRPAFARDLEMNDDEAAALGCHCRGTWRHVFYRLRAGARRLLGRDGLPLSAHDFRYDSVSYAHNFDNGDAAAAARPEP

SEQ ID NO: 25635 - protein, 490 aa, Triticum aestivum
  misc_feature (111)..(111): Xaa can be any naturally occurring amino acid
  misc_feature (135)..(135): Xaa can be any naturally occurring amino acid
  misc_feature (143)..(143): Xaa can be any naturally occurring amino acid
MAAAPAGPQNRCVFVGNIPYDATEELLVQICEEVGPVVSFRLVVDKETGKPKGYGFCEYKDEETALSARRNLQGHDVNGRQLRVDFAENGRNTDRNREKGRGGSAQFITVXAQKQLTTTPAVGDTSLHQLIGLHXAIHAASVXAGVLGGAQTANVQNGLPVQFGLGNDPLTHYLARMSRHQLYQIMSELKTLTTQNNDLAKKLLQGIPQLPKALFQAQIMLGLVTPQMMQMAKSQQPSSSLAQSSHLNESFPQPDAVLPIVHRPPPNPNAMQEQTAPLHNFPQYQHSSQPPVKMFPHGHQPGVLAHPPMLSQPFGTSSSVPTQPLVNSGGLTSQVQPSFLTQHPRPPVMPTNVQQLPLTNPHLSQVAAEPEILPNEIRLPDRASHQAELDHPSKLRKLEDGTSTPGIVNNSPAVYSAPSQVVVPSGPSGSYSSGAVHFQQPENEAPQLTQDDESALLQQVLQLTPEQLSSLPVEQQQQVIQLQKMLSAGK

SEQ ID NO: 25636 - protein, 176 aa, Brassica napus
MGEQPDPFSTSTLPDFISSQKIGRPVTLEGQSNRGHPYSGLKKRGQSSRSWVKIDENGNSTVLELDKATIMKRCSLPSRDLRLLDPLFIYPSSILGRERAMVVSLEKIRCIITAEEVILMNARDASVVQYQSELCKRLQSNQNLAVKDDSPFEFKALELGLELSCLSLDAQDLTPL

SEQ ID NO: 25637 - protein, 497 aa, Gibberella zeae PH-1
MGSRMTPEAIKPVMLIDGQANACLIQLVGASDGNSFPLFNPATGEKVADVPEATEDDTNRAVAAAQRAFPEWSAMDPAKRGSYLKKLASLIKEHNEELALLEAKSMGRPLAEFFEGHIAASSYEHYAEAWPHIQGQASLNTPGYVTMTLRQPFGVVAAIIPWNASLLFFASKSAPALIAGNTVVVKSSEKAPLGAAKFAELIHKAGFPPGVFNVLSGHGNPSGATLASHMDVRAISFTGSSPTGRAIQEAAAKSNLKKVILELGGKSPVIIFDDADLEQAAKDTMYSIQWNSGQVCMANSRVYVQDSIADNFIQACKKALSAAKSGNPTEKGINHGPQADKVQYEKVMSYINEGKKSGTLELGGNGNLDKTGGFFVEPTIFLNTPEDAKVMKEEIFGPVVNINVIKTEEEAIEKANDTEYGLYAAVYTKNVDRAMRVTQKLNSGYVGINCTSPTTARDLPFGGYKSSGQGREGWLYSLDNFLEVKSVMMKVDSGSKL

SEQ ID NO: 25638 - protein, 579 aa, Aspergillus oryzae
MADALKAEGNKAFSAKDYPTAIDKFTQAIAIEPENHILYSNRSAVYSAQSEYEKALEDANKATEIKPDWSKGWQRKGAAYRGLGDLLAAHDAYEEALKIEPGNEQAKSGMNAVKRAIDAEAQADGVTGDPLGGLGGIFNDPQLFQKLASNPKTSGLLADSEFMAKLQRIKQNPNSVGEEIKDPRFLQVMSVLLGIDMSFGAPPEGAASSSAAEPQEDVPMPDVRPTASAAKKEPEPQPEPEPEDEEAIAKKKAQEAGDAEKKIGNEFYKKKQFDEAVQHYEKAWELNKDITYLNNIGAAKFEKGDLQGAIEICQKAIEEGREVRADFKTMAKSYTRIGTAYEKLGDLTQAIEYYNKSLTEHRTPDALTKLRNAEKTKAKTEKEAYIDPAEAEKARELGQKKFQEADWPGAVDAFTEMTKRAPQDPRGFSNRAAALIKLMAFPQAVQDCDEAISRDPKFIRAYMRKAQALMAMKEYNKALDACTEAQENDDGTHAREIDQQQQKCLEAQFSSRAGETEQQTMERIQNDPDIMAILQDPVMQSILQQAKSDPAALQEHMKNAQVRLKIQKLMAAGVIRLGR

SEQ ID NO: 25639 - protein, 270 aa, Clostridium cellulovorans
MMKVKIVDTTLRDGEQKAGIALGVNEKVQIAKYISDLDVYQLEVGVPAMGGEEKRSIEKIAQLGLSCKIAAWNRMSIEDIRHSIDCNVDIIHISVPTSDIQINSKLNKDRKWVLSQMSRAIYFAKEKGYEVNLGFEDASRASIDFLIELSRYASCLDVKTVRYADTVGILYPRKTFEIISSLKKNTDMAIEIHSHNDFGMAISNSIAAIKAGAEFVDCTFGGIGERAGNCDLIKFLNSYSVLIEREMKDKYKSLKETERMIMNWCFGISS

SEQ ID NO: 25640 - protein, 283 aa, Staphylococcus aureus
EIISNKYNFNYQIEHHEFGGASIDTFGEPLTEKTLNACKRADAILLGAIGGPNWTDPNNRPEQGLLKLRKSLNLFANIRPTTVVKGASSLSPLKQERVEGTDLVIVRELTSGIYFGEPRHFNNHEALDSLTYTREEIERIVHVAFKLAASRRGKLTSVDKENVLASSKLWRKVVNEVSQLYPEVTVNHLLVDACSMHLITNPKQFDVIVCENLFGDILSDEASVIPGSLGLSPSASFSNDGPRLYEPIHGSAPDIAGKNVANPFGMILSLAMCLRESLNQPDA

SEQ ID NO: 25641 - protein, 351 aa, Nocardia farcinica IFM 10152
MTTVEVPHGSRSAVLRVAAVIAETADSCSLVFDVPEDLTEKFAYRPGQFLTLRIPSDLTGSVARCYSLASSPYTDDKPKVTVKRTEGGYGSNWVCDNVKPGDQLEVLPPSGVFTPRDLDENLLLFGAGSGITPVMSILKSALARGTGKIVLVYANRDAETVIFADELRELAAKHPQRLTVIHWLEPLQGLPTADALASLTAPYASYEAFMCGPKPFMDLVHDALARLGVPRNRTHAEVFNSLAGDPFADQAPVEVSDEEAADAATVEVELDGEVHELSWPRKQTLVDIMLAKGIDVPYSCQEGECGSCACTVLEGEVAMENAEILDPEDIANGYILGCQARPVTDRLRIQF

SEQ ID NO: 25642 - protein, 245 aa, Glycine max
  misc_feature (233)..(233): Xaa can be any naturally occurring amino acid
MQTSKENAMFCSSLVLLPFPIFNFRVPLISLFLFTPKLRSLQQHSDLEMDGPAGRGGAGLDMFLPNYKLGKTLGIGSFGKVKIAEHVLTGHKVAIKILNRRKIKNMEMEEKVRREIKILRLFMHPHIIRLYEVIETPTDIYVVMEYVKSGELFDYIVEKGRLQEDEARNFFQQIISGVEYCHRNMVVHRDLKPENLLLDSKCNVKIADFGLSNIMRDGHFLKTSCGSPNYAAXPEVISGKMYAGP

SEQ ID NO: 25643 - protein, 1478 aa, Saccharomyces cerevisiae
MPFLRKIAGTAHTHSRSDSNSSVKFGHQPTSSVASTKSSSKSPRATSRKSIYDDIRSQFPNLTPNSTSSQFYESTPVIVQSFNWTTDDHISAGTLENPTSFTNSSYKNDNGPSSLSDSRKSSGGNSVNSLSFDKLILSWDPTDPDEWTMHRVTSWFKFHDFPESWILFFKKHQLFGHRFIKLLAYDNFAVYEKYLPQTKTASYTRFQQLLKKTMTKNVTNSHIRQKSASKLKSSRSSSESIKSKLKNSKSQEDISNSRSTSESALSPTKSGPSKTDEKNFLHSTSTHQKTKSASSLYRRSFISLRGSSSSNASSAKSPSNIKLSIPARPHSIIESNSTLTKSASPPASPSYPSIFRRHHKSSSSESSLLNSLFGSGIGEEAPTKPNPQGHSLSSENLAKGKSKHYETNVSSPLKQSSLPTSDDKGNLWNKFKRKSQIGVPSPNTVAYVTSQETPSLKSNSSTATLTVQTADVNIPSPSSSPPPIPKTANRSLEVISTEDTPKISSTTASFKETYPDCINPDKTVPVPVNNQKYSVKNFLLDQKFYPLKKTGLNDSENKYILVTKDNVSFVPLNLKSVAKLSSFKESALTKLGINHKNVTFHMTDFDCDIGAAIPDDTLEFLKKSLFLNTSGKIYIKDQMKLQQKPKPAPLTSENNVPLKSVKSKSSMRSGTSSLIASTDDVSIVTSSSDITSFDEHASGSGRRYPQTPSYYYDRVSNTNPTEELNYWNIKEVLSHEENAPKMVFKTSPKLELNLPDKGSKLNIPTPITENESKSSFQVLRKDEGTEIDFNHRRESPYTKPELAPKREAPKPPANTSPQRTLSTSKQNKPIRLVRASTKISRSKRSKPLPPQLLSSPIEASSSSPDSLTSSYTPASTHVLIPQPYKGANDVMRRLKTDQDSTSTSPSLKMKQKVNRSNSTVSTSNSIFYSPSPLLKRGNSKRVVSSTSAADIFEENDITFADAPPMFDSDDSDDDSSSSDDIIWSKKKTAPETNNENKKDEKSDNSSTHSDEIFYDSQTQDKMERKMTFRPSPEVVYQNLEKFFPRANLDKPITEGIASPTSPKSLDSLLSPKNVASSRTEPSTPSRPVPPDSSYEFIQDGLNGKNKPLNQAKTPKRTKTIRTIAHEASLARKNSVKLKRQNTKMWGTRMVEVTENHMVSINKAKNSKGEYKEFAWMKGEMIGKGSFGAVYLCLNVTTGEMMAVKQVEVPKYSSQNEAILSTVEALRSEVSTLKDLDHLNIVQYLGFENKNNIYSLFLEYVAGGSVGSLIRMYGRFDEPLIKHLTTQVLKGLAYLHSKGILHRDMKADNLLLDQDGICKISDFGISRKSKDIYSNSDMTMRGTVFWMAPEMVDTKQGYSAKVDIWSLGCIVLEMFAGKRPWSNLEVVAAMFKIGKSKSAPPIPEDTLPLISQIGRNFLDACFEINPEKRPTANELLSHPFSEVNETFNFKSTRLAKFIKSNDKLNSSKLRITSQENKTE

SEQ ID NO: 25644 - protein, 175 aa, Xylella fastidiosa 9a5c
MHPQNFQHQLKTMPQPPDETRDFVFNHTMLRVKDINASLDFYARILGFRLIDQRDFPEAQFSLYFLALLPQTVHISDNDAERRLWMSGIPGVLELTHNYGTETQEGQIYHDGNNEPRGFGHICISVPDLYSACARFDTLQVPYQKRLTDGRMKNIAFIKDPDGYWVEIISNTPLP

SEQ ID NO: 25645 - protein, 283 aa, Staphylococcus aureus
EIISNKYNFNYQIEHHEFGGASIDTFGEPLTEKTLNACKRADAILLGAIGGPKWTDPNNRPEQGLLKLRKSLNLFANIRPTTVVKGASSLSPLKEERVEGTDLVIVRELTSGIYFGEPRHFNNHEALDSLTYTREEIERIVHVAFKLAASRRGKLTSVDKENVLASSKLWRKVVNEVSQLYPEVTVNHLLVDACSMHLITNPKQFDVIVCENLFGDILSDEASVIPGSLGLSPSASFSNDGPRLYESIHGSAPDIAGKNVANPFGMILSLAMCLRESLNQPDA

SEQ ID NO: 25646 - protein, 518 aa, Pichia angusta
MLRTSLRSLAKPASRVSLRYYSSYPLSTTVTLPNGKSYEQPTGLFINNEFVPSKQHKTFEVINPATEEEICHVYEARKEDVDVAVDAAEKAFKGSWSTADPAIRGKALWNLAELLEAHKDTLAAIESLDNGKALQLAQGDVALVINYIRSCAGWADKLTGQYIDTGDTHHTYTKREPIGVCGQIIPWNFPLLMWSWKVGPALAAGNTVVLKTAESTPLSALYASQLVKEAGIPAGVVNIVSGFGKITGDAIASHPKIKKLAFTGSTATGRHIMKVAADSNLKKVTLELGGKSANIVFDDADVKTAISALVAGIFYNSGEVCSAGSRVFVQEGIYEEILREFKAAAETLKVGDPFDLSTFQGAQTSQMQLNKILGYVDIAHQEGGRLITGGERLGNKGFFVKPTIFADVTPDMRAYKEEIFGPFAVITPFKTADEVIELANDSEYGLAAGVHTKSLDTATYVSNKLEAGSVWINTYNDFHQMVPFGGYKQSGIGREMGAQALDNYTQWKAVRIGLQKPT

SEQ ID NO: 25647 - protein, 116 aa, Glycine max
MASLKVACVVLMCMAVMSAPMMVQAVSCNDVSVNLAPCLSYLMQGGDVPESCCSGVRNILGSASTTFDKQTVCKCLQQAANNYGINDEYAQALPARCNVSVPYKISRSTNCDSIKF

SEQ ID NO: 25648 - protein, 484 aa, Legionella pneumophila str. Lens
MLIFELSKTGRQAKAQIPRAVSKNYSIPEEFQRKSRPRLPACSELQVVRHFTCLSQKNFSIDTNFYPLGSCTMKYNPRGVHKAASLPGFINRHPLAMDNESQGFLETLYKLQNYISEITGMPGVSLTPMAGSQGEFAGVAMIKAYHQSRGDTARDEILIPDAAHGTNPASAVMCGFKVVEIATAPDGDIDLDELKRKVGPRTAGIMLTNPSTLGLFMRQIKEIASLVHQAGGLLYYDGANLNAILGKVRPGDMGFDVMHLNLHKTFATPHGGGGPGAGPVAVGKRLIPYMPLPVVKKTDSGYHWATRQDYPQSIGRLSCFMGNAGILLRAYFYMLVLGKEGLLRVSEFATLNANYLLKELTKVGYTAAYPDRRASHEFILTLNSEKKNYDVTAMDFAKRLLDYGVHAPTTYFPLLVPECLLIEPPETESKEELDAFVAVMKTIREEASKQPDILKAAPHTLPVKRLDDVKAARELDLNYFATHE

SEQ ID NO: 25649 - protein, 955 aa, Picea abies
MASIDAQMRLLVPGKVSEDDKLIEYDALLLDRFLDILQDLHGEDIREMVQECYERSGEYEGKNDPHKLEELGNVLTSLDPGDSIVVASSFSHMLNLANLAEEVQIAYRRRNKIKRGGFADESNATTESDIEETFKRLVNQLGKSPAEVFDALKNQTVDLVLTAHPTQSVRRSLLQKHARIRNCLSQLYGKDITPDEKQELDEALLREIQAAFRTDEIRRTPPTPQDEMRAGMSYFHETIWKGVPKFLRRIDTALKSIGINERVPYNAPLIQFSSWMGGDRDGNPRVTPEVTRDVCLLARMMAANLYYSQIEDLMFELSMWRCSDELRARALQLHSASKKDAKHYIEFWKQIPPNEPFRVILGDVRDKLYNTRERTRQLLSNGISDIPEEVTFTNIDEFLEPLELCYRSLCSTGDQPIADGSLLDFMRQVSTFGLSFVKLDIRQESDRHSDVADAITRHLGIGSYKEWSEEQRQAWLLSELQGKRPLFGPDLPKTDEVRDVLDTFHVISELPADNFGAYIISMATAASDVLVVELLQRECHVKKPLRVVPLFEKLADLEAAPAALARLFSINWYRNRIDGKQEVMIGYSDSGKDAGRLSAGWALYKAQEDLIKVAKEFGIKLTMFHGRGGTVGRGGGPTHLAILSQPPDTIHGSFRVTVQGEVIEQSFGEEHLCFRTLQRFTAATLEHGMRPPVAPKPEWRELMDEMAVVATKEYRSIVFQDPRFVEYFRSATPELEYGRMNIGSRPSKRKPSGGIESLRAIPWIFAWTQTRFHLPVWLGFGAAFKHVMEKDIRNLHMLQQMYNEWPFFRVTIDLIEMVFAKGDPGIAALYDKLLVSDDLWAIGEKLRANYGETKDLLLQVAGHKDLLEGDPYLKQRLRLRDSYITTLNVCQAYTLKRIRDPNYHVNLRPHLSKESSTKPAAELVKLNPTSEYAPGLEDTLILTMKGIAAGMQNTG

SEQ ID NO: 25650 - protein, 838 aa, Agrobacterium tumefaciens str. C58
MPRGCAEVPLRTSPLRRSRGVITMTQKLVIIGNGMAPGRMLENLFETAPGLYDVTIFNAEPRVNYDRIMLSPVLSGEKSYEDIVIHNDEWYAANNVTLHKGAKVTRIDRANKIVTSENGITASYDRLVIATGSLPFIIPVPGHQLPGVLAYRDLDDVTKMLEIAKGKGRAIVIGAGLLGLEAAYGLKRQGMDVTVIHLMPTIMERQLDPAAAYLLEKALNERGIDIITKANTKCILGEEKVEGIELEDGRIIKGDMVVMAVGIRPASGLAKEAGIAVNRGIVVDDGMMTSDASIYALGECAEHRGMCYGLVAPLYESARVLADRLCGGSAEYHGSVTNTKLKVTGINLFSAGDFAEGDDREEIVLRDATAGVYKRLILKENRIIGAVLYGETADGSWFFDLMKKSTDISAMRETLIFGQAYQGGSPLDPMAAVAALPDDAEICGCNGVCKGKITSAITSKGLTSLDDVRAHTKASASCGNCTGLVEQLMTLTLGDTYNPAAVQPMCKCTDLGHDDVRRLIKAKGLKTIPAVMQELEWKTSCGCAKCRPALNYYLVCDFPDEYADDYQSRYINERVHANIQKDGTYSVVPRMWGGVTNADELRAIADVVDKFEIPLVKVTGGQRIDLLGIEKEDLPAVWADLGKAGFISGQAYAKGLRTVKTCVGEQWCRFGTQDSTGLGIRIEKFMWGSWTPAKLKLAVSGCPRNCAEATCKDIGVICVDSGFEIHFAGAAGLDIKGTEVLGLVHTEDEALEHIVALTQMYREQARYLERIYKWAKRIGYDEVRRQIMDDADKRKAYFDRFVFSQKFAQVDPWSERVSGHDKHEFRPMAAIGFSEAAE

SEQ ID NO: 25651 - protein, 456 aa, Legionella pneumophila str. Lens
MPYIPHTPNDTKEMLAAIGAQDIQDLFDEIPASLQYAGFQNIPAGINEMEMLKEAQNQAQKNRNGICFIGAGCYEHHIPAAVWDIASRGEFLTAYTPYQAEASQGTLQLLYEYQTMICELTGMEVSNASMYDGATALAEAVLMAVRLNKHSKTNRVLIAGTVHPFYRETIETIVRNQHIEVITLPFDEQQGITDLGSLNQYTGEDITALVIAQPNFFGCLEQVDKMTSWAHHNKTISVACINPTSLALLKPPGSWGEHGVDIVCGEGQPLGSPMASGGPYFGFLSTRMAHVRQMPGRIIGRTVDKDGKTGFSLTLQAREQHIRRAKATSNICTNQGLLVTAATIYMSLLGPEGLSQVATQCHQNTHELITALTQIEGVEQAFKASFFHEALIKLNQPVQSVLQQLADAGIAGGYAPEQHYPQLANTLLVCATEVRTAEDIAKYAKTLKAIMSKRGA

SEQ ID NO: 25652 - protein, 133 aa, Saccharum hybrid cultivar R570
PGIAAVYDKLLVAEDLQSFGEQLRKNYEETKELLLQVAGHKDVLEGDPYLKQRLRLRESYITTLNVCQAYTLKRIRDPSFQVSPQPPLSKEFTDESQPAELVQLNQQSEYAPGLEDTLILTMKGIAAGMQDTG

SEQ ID NO: 25653 - protein, 165 aa, Zea mays
  misc_feature (104)..(104): Xaa can be any naturally occurring amino acid
MASTTETNNYKFNHSMIRVKDPKASTKFYEFLGMSLVKKLEFPDNKFDLYFFGYDSPNALSHNKSTFDRQGLIELTHNYGTENDPEYKVNNGNQDPHRGFGHTXIAVDNIQAACQRIEDAGYKFQKKLTDGRMRNIAFRLDPDGNWGPKVVARNDYQETENVKED

SEQ ID NO: 25654 - protein, 903 aa, Agrobacterium tumefaciens str. C58
MWGRCPAGQRGVSVIRREGNSMPAETKTTCPYCGVGCGVIATVNDSGVVSVKGDPDHPANFGRLCSKGSALAETIDLDGRLLHPEIAGRRAAWDEALDLVASRFSDAIAEHGPDSVAFYVSGQLLTEDYYLANKLMKGFIGSANIDTNSRLCMSSSVAGHRRAFGADTVPGTYEDMELADLVILTGSNLAWCHPVLYQRLAAAKAARPGMKVVVIDPRRTMSADIADMHLAIRPDGDVALFTGLLAHLFASSAIDRGYVENHTAGFEAATQAASEHSLPEIAEATGLTIAELIPFYELFERTEKTVTCYSQGVNQSESGTDKVNAIINCHLATGRIGRPGMGPFSLTGQPNAMGGREVGGLANMLAAHMSIENADDRDRVQRFWASPAIAQKPGLKAVDMFRAVADGRIKALWIMATNPVVSMPDAGAVEVTIKACPFVVVSDVMANTDTARHAHVLLPSLGWGEKDGTVTNSERRISRQRSFLDAPGEAKADWWQMAEVARRMGFDAAFAYQQPSEIFAEHAALSGFENAGRRDFDIGGIERDSYETMAPVQWPKAGAGEAEVTRFFANGRFYHADGKARFIATALPETDRTSADYPLTLNTGRIRDQWHTMTRTGKSARLTAHIAEPFAEIHPRDAQALGIKSADLVELESPHGKVLLRALVSERQARGSVFAPMHWNDQFASRARIDVVVAPVTDPHSGQPASKNVGVRVTRFEASAYGFAICRSRPDAPDCAYWAVAKAEGGYRMELAFAEAPEDWTLWARRVFGIDVRIEPLGYSDRQTGDLRLAFFDGDTLLAALFIAREPVAVARNWAISQLSERHEDLRMRFALVAGRPGAGRADPGATVCSCFNVGVNQITAAIREGCHSVEAIGNALNAGTNCGSCRAEIRGIIDGCLKTAAE

SEQ ID NO: 25655 - protein, 313 aa, Desulfitobacterium hafniense DCB-2
MCALSADVNSWLKDIEVFKMKFTLEMKLKDIMAANPKTVEAMQELGLHCLGCPFSVNETLLNAAQMHKLDPEKLLEAVNSVEQGEMSEAAKAKAQPKGAILQMDKKTFAIAPHIPAGVATPEILRKIADVAEKYNAAAIKVTSAQRIAIVGLKPEVIPAAWDDLGMDPGHAIGLCVRSVKVCPGMTFCKRGLQETLGIGMEVDKRYHGMSLPAKFKIGIAGCPNKCTDSMNVDLGIMGTSKGYHVYVGGNGGVKPRRGDLLLENLQSDQLIPVIDAVMEYFKENAKPQERLGRLIDRVGLEGLQEAAQDVVNA

SEQ ID NO: 25656 - protein, 133 aa, Saccharum hybrid cultivar R570
PGIAAVYDKLLVAEDLQSFGEQLRKNYEETKELLLQVAGHKDVLEGDPYLKQRLRLRESYITTLNVCQAYTLKRIRDPSFQVSPQPPLSKEFTDESQPAELVQLNQQSEYAPGLEDTLILTMKGIAAGMQNTG

SEQ ID NO: 25657 - protein, 498 aa, Novosphingobium aromaticivorans DSM 12444
MRLIDHFIVGGPGGAPARKSPIFDPNNGGVQAEVALGTAETLERAVQAALKAQPAWAATNPQRRARVMFRFKELVEANMDSLAHMLSSEHGKVIADSRGDIQRGLEVVEFACGIPHVLKGEYTHGAGPGIDVYSTRQPIGIGAGITPFNFPGMIPLWMSAIAIATGNAFIIKPSERDPSVPVRLAELFIEAGLPEGICQVVHGDKEMVDAILDHPAIGAISFVGSSDIAHYVYNRGVAAGKRVQAMGGAKNHGVVMPDADLDQVVNDLCGAAFGSAGERCMALPVVVPVGHDTAERLRAKLIPAIHALKVGISTDPEAHYGPVVTQAHKEKVEGWIDKCIEEGGELVVDGRGFTLQGHENGFFVGPTLIDHVTPDMDSYHNEIFGPVLQIVRAENFEQALELPSKHQYGNGVAIFTRNGHAAREFAARVNVGMVGINVPIPVPVAYHTFGGWKRSAFGDTNQHGMEGVKFWTKVKTVTQRWPDGSPDGGNAFVIPTMG

SEQ ID NO: 25658 - protein, 129 aa, Saccharum hybrid cultivar R570
LYDKLLVSEELQPLGEKLRANYEETQNLLLQVAGHRDLLEGDPYLKQRLRLRDAYITTLNVCQAYTLKRIRDPDYHVALRPHLSKEIMDSTKAAAELVKLNPGSEYAPGLEDTLILTMKGIAAGLQNTG

SEQ ID NO: 25659 - protein, 447 aa, Flavobacteria bacterium BBFL7
MEKNIESFIDLIKSKNPNEPEFIQAVSEVAEAVIPFIENNPQYASDKLLERMAEPERVTMFRVPWTDDNGEVQVNRGYRIQMNSAIGPYKGGLRFHPSVNLSILKFLAFEQVFKNSLTTLPMGGGKGGADFNPKGKSDREVMRFCQSFMVELQRVIGADTDVPAGDIGVGGREIGYLFGYYKKLRNEFTGILTGKGRSYGGSLIRPEATGYGNVYFAENMLKTRGESITGKTTVISGSGNVAQYAAEKILQLGGKVVTMSDSGGYIHDADGIDADKLAFVMDLKNNRRGRISEYVSQYPSATYHEGERPWSVKCDIALPCATQNELNGDEAKTLVSNGCMCVSEGANMPSTPDAIEHFIDNKILFAPGKASNAGGVATSGLEMSQNSMRYSWTAEEVDNKLHGIMNDIHEACVEYGKDSDGFVDYVKGANIAGFVKVADAMLAQGIV

SEQ ID NO: 25660 - protein, 146 aa, Triticum aestivum
MPVPLAPYPTPPVPFTPPAPNAGAQSQLVCSGCRNLLMYPAGATSVCCAVCSTVTAVPAPGTEMAQLVCGGCHTLLMYIRGATSVQCSCCHTVNLAMEANQVAHVNCGSCRMLLMYQYGARSVKCAVCSFVTSVGASSGAEQKPSN

SEQ ID NO: 25661 - protein, 250 aa, Bordetella bronchiseptica RB50
MYKLVLMRHGESQWNLENRFTGWTDVDLTETGREQARKAGELLKREGYAFDLAYTSVLKRAIRTLWIALDAMDAMYTPVGINWRLNERHYGQLQGLNKAETAAKYGDEQVLIWRRAYAIAPEPLDLEDPRHPRFDGRYAKIPADQLPATECLKDTVARVLPFWNESIAPAIRAGRRVLVAAHGNSLRALIKHLDNVSDDDIVGVNIPTGQPLVYELDEDLKPIRHYYLGDAAEIEAAMAAVAAQGKAKKD

SEQ ID NO: 25662 - protein, 335 aa, Pseudoalteromonas tunicata D2
MAKQIITVIKGDGIGPSIIDSALEILNAAGCDFEYEFVDAGLTALENTGELLPQATIDAIAKNKITLKGPLTTPVGEGFTSINVTLRKKFNLYANVRPVVSFEGTKARYEDIDIITVRENTQGMYSGLGQVVSEDGSEAEAMSKITREGAQKIAVFAYELARRENRKKVTIVHKANILKSTSGLFLKVAREVAALYPDIETAEMIVDAACMKLVMTPEEFDVIVTTNLFGDILSDLCAGLVGGLGMAPGANIGEDAAIFEAVHGSAPDIAGKNLANPTSVILASIQMLEHLGMGDTAERIRNAVADVIKTGDRTTRDLGGNHGTTDFTQAVIERL

SEQ ID NO: 25663 - protein, 404 aa, Bacteroides thetaiotaomicron VPI-5482
MEEIKMDRIEDAIADFKEGKFVIVVDDEDRENEGDLIIAAEKITPEKVNFMLKHARGVLCAPITVSRCKELDLPHQVSDNTSVLGTPFTVTIDKLEGCSTGVSASDRAATIQALADPASTPATFGRPGHINPLYAQEKGVLRRAGHTEATIDMARLAGLYPAGALMEIMSDDGTMARLPELRAMADEHGLKLISIHDLIAYRLKQESIVEKGVEVNMPTEHGMFRLIPFRQKSNGLEHMAIFKGTWNEDEPILVRVHSSCATGDILGSHRCDCGEQLHKAMEMIEKEGKGVVVYLNQEGRGIGLMEKMKAYKLQEDGMDTVDANLCLGHLADERDYGVGAQILRELGVHKMKLLTNNPVKRVGLEAYGLEIVENVPVETVPNPYNERYLRTKKERMGHTLHFNK

SEQ ID NO: 25664 - protein, 129 aa, Saccharum hybrid cultivar R570
LYDKLLVSEELQPLGEKLRANYEETQKLLLQVAGHRDLLEGDPYLKQRLRLRDAYITTLNVCQAYTLKRIRDPDYHVALRPHLSKEVMDSTKAAAELVKLNPGSEYAPGLEDTLILTMKGIAAGLQNTG

SEQ ID NO: 25665 - protein, 286 aa, Bacillus cereus ATCC 10987
MVAVIIKGNEVAEKKRAQLTEEVVKLKEQGIVPGLAVILVGEDPASRSYVKGKEKGCEQVGIYSELIEFPETITEERLLAEIDRLNGDDRINGILVQLPLPKHIEEKAIIERISPEKDVDGFHPISVGRMMTGQDTFLPCTPHGIVELVKETNLDISGKHVVVIGRSNIVGKPVGQLFLNENATVTYCHSKTQNMKELTKLADILIVAVGRPKMVTADYLKEGAVVIDVGVNRLETGKLCGDVDFDNVLDVAGYITPVPKGVGPMTITMLLHNTVESAKRAGVVCK

SEQ ID NO: 25666 - protein, 149 aa, Synechococcus sp. CC9605
MDIRFREVDPFNCWLWIRFSEPPSKGERNYVDGVFDSWYVIGRLGGFNAENLQVHDAGSDLSWMTYDNDGAESAMPALMHNMGQLEYQNDWGRCWVDLGTSDGVAIDVLINALRQLDSDVVQIEELVVGGVNENWPIEDHPDSVFPAGG

SEQ ID NO: 25667 - protein, 180 aa, Pisum sativum
MASMISSSAVTTVSRASTVQSAAVAPFGGLKSMTGFPVKKVNTDITSITSNGGRVKCMQVWPPIGKKKFETLSYLPPLTRDQLLKEVEYLLRKGWVPCLEFELEKGFVYREHNKSPGYYDGRYWTMWKLPMFGTTDASQVLKELDEVVAAYPQAFVRIIGFDNVRQVQCISFIAHTPESY

SEQ ID NO: 25668 - protein, 100 aa, Arabidopsis thaliana
  misc_feature (81)..(81): Xaa can be any naturally occurring amino acid
  misc_feature (89)..(89): Xaa can be any naturally occurring amino acid
MAWAMLSSGTMVASPAQATMDAPFNGLKSYAAFPATRNANNDITYITSNCGRVNCMQVWPPIGKKNVETLSYLSDLTDFQXAKEVDYLXIRNKWISLVKY

SEQ ID NO: 25669 - protein, 180 aa, Pisum sativum
MASMISSSAVTTVSRASRGQSAAVAPFGGLKSMTGFPVKKVNTDITSITSNGGRVKCMQVWPPIGKKKFETLSYLPPLTRDQLLKEVEYLLRKGWVPCLEFELEKGFVYREHNKSPGYYDGRYWTMWKLPMFGTTDASQVLKELDEVVAAYPQAFVRIIGFDNVRQVQCISFIAHTPESY

SEQ ID NO: 25670 - protein, 190 aa, Triticum aestivum
MIAAPVSGDSPTGAPPPPAPAAEDSPPYGSVVLGGTFDRLHDGHRRLLKASADLARDRIVVGVCTGPMLAKKEYAELIEPVEKRIKAVEDYIKSIKPELIVQVEPIEDPYGPSIIDDKLDAIIVSKETLSGGLAVNQKREGKELPLLKVEVVDLLSGDTEGEKLSSSALRKLEAAQAQQQKATIANQKGV

SEQ ID NO: 25671 - protein, 130 aa, Triticum aestivum
MGMAEKGSAGRKAGLITKTLDRCRSTTARNNKPAEGCFSVYVGAGRQRFVVRTECLNHPLFRALLEEAEEAFGYADAGPLELPCNTEAFTKVLEKIEEEKQMAAGRRHGLARGNSYRLLSTGRPVIIGRS

SEQ ID NO: 25672 - protein, 283 aa, Staphylococcus aureus
EIISNKYNFNYQIEHHEFGGASIDTFGEPLTEKTLNACKRADAILLGAIGGPKWTDPNNRPEQGLLKLRKSLNLFANIRPTIVVKGASSLSPLKEDRVEGTDLVIVRELTSGIYFGEPRHFNNHEALDSLTYTREEIERIVHVAFKLAASRRGKLTSVDKENVLASSKLWRKVVNEVSQLYPEVTVNHLLVDACSMHLITNPKQFDVIVCENLFGDILSDEASVIPGSLGLSPSASFSNDGPRLYEPIHGSAPDIAGKNVANPFGMILSLAMCLRESLNQPDA

SEQ ID NO: 25673 - protein, 176 aa, Zea mays
  misc_feature (45)..(45): Xaa can be any naturally occurring amino acid
  misc_feature (62)..(62): Xaa can be any naturally occurring amino acid
  misc_feature (88)..(88): Xaa can be any naturally occurring amino acid
  misc_feature (101)..(101): Xaa can be any naturally occurring amino acid
MECYMISSAALAVVPLGLAPLVRCSSFFAVDCSKKKIKTDKPYGXIEGGLIVYVHANGRKGXGNAEDQFVYKYGANVDGYIPIYNQVXWYPTGDVYICGTXTGLLIWAVTLAGILGGGVLLIYNTSALSDLKISNACASCYSPCKITVSVYNLTSMDAQPSPCNNNQCTKKTEKKR

SEQ ID NO: 25674 - protein, 217 aa, Escherichia coli
MAQTLLSSFGTPFERVENALAALREGRGVMVLDDEDRENEGDMIFPAETMTVEQMALTIRHGSGIVCLCITEDRRKQLDLPMMVENNTSAYGTGFTVTIEAAEGVTTGVSAADRITTVRAAIADGAKPSDLNRPGHVFPLRAQAGGVLTRGGHTEATIDLMTLAGFKPAGVLCELTNDDGTMARAPECIEFANKHNMALVTIEDLVAYRQAHERKAS

SEQ ID NO: 25675 - protein, 319 aa, Thermotoga maritima
MKKIAVLTSGGDAPGMNAAVRAVVRYGVRQGLEVIGVRRGYSGLIDGDFVKLEYKDVAGITEKGGTILRTSRCEEFKTEEGRELAAKQIKKHGIEGLVVIGGEGSLTGAHLLYEEHKIPVVGIPATIDNDIGLTDMCIGVDTCLNTVMDAVQKLKDTASSHERAFIVEVMGRHSGYIALMAGLVTGAEAIIVPEIPVDYSQLADRILEERRRGKINSIIIVAEGAASAYTVARHLEYRIGYETRITILGHVQRGGSPTAFDRRLALSMGVEAVDALLDGEVDVMIALQGNKFVRVPIMEALSTKKTIDKKLYEIAHMLS

SEQ ID NO: 25676 - protein, 323 aa, Magnetospirillum gryphiswaldense
MFGVEPISFCEDMTMIRPRIIVIGVGGAGGNAVNNMILSKIEGVEFIAANTDAQALGLSLADRRIPLGGYVTKGLGAGSRPELGRSAAQESIDDILTAIDDANMVFITAGMGGGTGSGAAPVIAQAARERGILTIGVVTKPFHFEGGHRMGTAEAAIEELQHVVDTLIIIPNQNLFRIASERTTFIDAFKMADNVLNSGVRSVTDLVVKPGLINLDFADIRIVMSEMGKAIMGTGEAEGEPRAVKAAEAAISNPLLGDTSIAGAKGVLINITGGMDMTLFEVDEAANRIRTEVAPDANIIFGSTFDEKLDGKMRVSVVATGIA

SEQ ID NO: 25677 - protein, 407 aa, Zygosaccharomyces rouxii
MATHEEFIRTQVFGTVFEITNRYTDLNPVGMGAFGLVCSATDTLAGQPVAIKKIMKPFSTAVLAKRTYRELKLLKHLRHENLICLQDIFLSPLEDIYFVTELQGTDLHRLLQTRPLEKQFVQYFLYQILRGLKYVHSAGVIHRDLKPSNILINENCDLKICDFGLARIQDPQMTGYVSTRYYRAPEIMLTWQKYDVEVDIWSAGCIFSEMIEGKPLFPGKVHVHQFSIITDLLGSPPRDVIITICSEDTLKFVTSLPHRDPVPFQERFKAVEPDAVDLLGRMLVFDPKKRITAADALVHPYLAPYHDPTDEPIAEAQFDWDFNDADLPVDTWRVMMYSEILDFHKIGGSDGQIDTNAAFDDQVAAATAGPMLPLWLNSNININNSHPVNIQVQLLRHQQPRITVVYQ

SEQ ID NO: 25678 - protein, 261 aa, Novosphingobium aromaticivorans DSM 12444
MAEYETILVEQKGAVTLITLNRPQALNALNSQVLAELIEAFAAYEADASQRCAVLTGSGEKAFAAGADIKEMSEKPAADFYNEDFFSKWTSHLVKTTRKPWIAAVNGFALGGGCELAMMADFIIASENAKFGQPEIKLGVAPGMGGSQRLTRAVGKAKAMDMCLTGRMMDAAEAERSGLVTRVVPLADLLADALKTAETIAAMPPMAAVANKEMVNAAFETTLDQGLLFERRVFQILTASEDKAEGMKAFIEKRPGVWKGR

SEQ ID NO: 25679 - protein, 499 aa, Legionella pneumophila str. Lens
MIRNSMKSHTELLSWSLLQKEAKRVRLNSDSQPRVVPDSNNYESRKQINCIVYDYSRQRVNRTIIDLLIDLANEVKLPEKIDNLINGKKINISENRPALHTALRDLSNKSILIDGLDIMSEVVSTREKIRMISNRIREKKWLGYSGLPITDVVNIGIGGSDLGPRVCIHALSNYVSKEFNYHFISDVDPASFNDVIVKINPETTLFIVSSKSFTTKETLLNARKAFALYEDRASIDQHFIAVTAHPERAHQIGIKTVLPIWDWVGGRFSFCSAVNLITAIAIGYEQFVELLAGAHDVDTHVQFTDFKNNIPVLMALIGIWNNNFLNIHNLLILTYSKKLEYFVPYVQQLDMESNGKSIDVNGRMVGYATGPIVWGGLGNQAQHSYFQLLCQGTHRCVGDFITLKTNDEHEINSMCHYKMKVLSEGIQTIENPYGYIPGNMPMNHLILSDCSPYTLGALVALYEHKIFVQSVIWNINPFDQPGIESAKSAHREITLSSEL

SEQ ID NO: 25680 - protein, 379 aa, Streptococcus pneumoniae TIGR4
MKFNELNLSADLLAEIEKAGFVEASPIQEQTIPLALEGKDVIGQAQTGTGKTAAFGLPTLEKIRTEEATIQALVIAPTRELAVQSQEELFRFGRSKGVKVRSVYGGSSIEKQIKALKSGAHIVVGTPGRLLDLIKRKALKLQDIETLILDEADEMLNMGFLEDIEAIISRVPENRQTLLFSATMPDAIKRIGVQFMKAPEHVKIAAKELTTELVDQYYIRVKEQEKFDTMTRLMDVAQPELAIVFGRTKRRVDELTRGLKIRGFRAEGIHGDLDQNKRLRVLRDFKNGNLDVLVATDVAARGLDISGVTHVYNYDIPQDPESYVHRIGRTGRAGKSGQSITFVAPNEMGYLQIIENLTKKRMKGLKPASVEESFQSKNR

SEQ ID NO: 25681 - protein, 264 aa, Corynebacterium glutamicum ATCC 13032
MQSAETRSPYDDDADASRQISADERIHAEVVRGLASRGRERMSGNFRAAVFGINDGLVSNVALVMGVMATGVPAQIVLITGISGLLSGALSMAAGEYISVRSQTELLDASLPDPKAREALHALDVESNELELVYRARGMSEDEARAKASQVFQRISDQKRISDNVLGSTEIQSAGSARSAATFSFLSFAIGAFLPIVPYVFGMEGLAGAVVSLVLVGLSLMATGATTGLLSGKPPGIRAVRQLSIGYGAALVTYVLGLLFGMIL

SEQ ID NO: 25682 - protein, 545 aa, Flavobacteria bacterium BBFL7
MKNINPTETNAWLQLEKHFEGFDDFSLREEFKKDASRAQKLTIIDKDFYVDFSKNLITESTRTHLTALATECGLKEAINSYFTGAVINATEKRSVLHTALRTPQAHADKSLESNVSDAIASKQKMFDYVDGILNGDTLSANGKKFDTIVNIGIGGSDLGPVMIYEALQAYKNNMTLHFVSNVEGDHVEEVLKKINPDTTLFVIVSKSFGTQETLTNATTIRNWFTEKLEASAVSKHFIAVSSNVDKAVNFGIDHKNIFPMFDWVGGRFSLWSTVGMSVALGIGTDNFQALLDGAHEMDNHFRNTDFEKNIPVQLALMTIWYNNFYRAQSEVIIPYTQYLHRLPAYLQQAIMESNGKCVDRDGNSVTYDTGNIVWGEPGTNSQHAFFQLIHQGTKLIPAHFIAFAKAKYNQPDHHNKLMANFIAQTEALMNGKTRSEAKKDLERSGKSKDEIDMLLPFKVFEGDQPTTTILIDELTPQSIGKLIAMYEHKIFTEGIIWNIYSYDQWGVELGKVLADTILDNIENKEYADHDSSTSAILKRFGNLNS

SEQ ID NO: 25683 - protein, 403 aa, Shewanella oneidensis MR-1
MKRVVITGMGVVSSIGNNKQEVTESLKAGRSGITHSAQFEEMQLRSHVWGNIKLDPSELIDRKALRFMGDAAAYAYIAMQEAIKDAQLTEEQYSNPRVGLIVGTGGASSSNQVQAADILREKGVKRVGPYIVPRIMASTASACLATPFKIKGMNYSISSACATSAHCIGHAVELIQMGKQDMVFAGGAEELDWTLTMGFDAMGALSTKYNATPDKASRTYDADRDGFVISGGGGILIVEELEHALARGAKIYAEVIGYGASSDGYDMVAPSGEGAVRCMRLALADVDTPIDYINTHGTSTPVGDVRELEALREVFKDKCPPVASTKSMTGHALGAAGVHEAIYSLIMMENSFIAPSINIDNLDEAAKDMPIVREYRDAELNTVMSNSFGFGGTNATLVMRKYK

SEQ ID NO: 25684 - protein, 504 aa, Matthiola incana
MLAAYAIPILTAILSIFWYLLKRVQRRPPLPPGPRGLPIVGNLPFLDPDLHTYFTSLAQTHGSIFKLNLGSKLTVVISSPSLAREILKDQDINFANHDVPLTGRAATYGGLDILWSPYGAEWRMLRKVCLLKLLSRKTLDSFYELRRKEIRERTRFLYKQSRGEAPVNVGDQLFLTMMNLTMNMLWGGSVKAEEMASVGTEFKGVISEITRLIGEPNVSDFFPWLARFDIQGLVKSMRVSARQLDAVFDRAIKQMQQITSSDGECKDFLQYLMKLKDQESDSEVPITLNHVKAVLTDMVVGGTDTSMNTVEFAMAELINKPELMKKAQQELDQVVGKDNIVEESHITKLPYIVAIMKETLRLHPTLPLLVPRRPAEAAVVGGYTIPKDTKIFINVWCIQRDPNVWEKPTEFRPERFLDNNKPRDFTGTDYSYFPFGSGRRICAGVALAERMVLYTLATLLHSFDWKIPQGHVLDLEEKIGIVLKLKTPLVALPVPRLSDSNLYI

SEQ ID NO: 25685 - protein, 801 aa, Staphylococcus aureus subsp. aureus Mu50
MAKQKLVMIGNGMAGIRTIEEILERANDLYDITVIGKEPYPNYNRIMLSNILQNKMTVEETIMNPYEWYEEHGIELITNDPVIEVDRANQSVTTANGIEVSYDKLIFATGSKAFVIPVPGSTLPSVIGWRTIDDTEQMMNIAKTKKKAIVIGGGLLGLECARGLLDQGMEVTVLHLAEWLMEMQLDRKAGNMLKADLEKQGMKFEMQANTTEILGEDDVEGVKLADGREIPADLVVMAVGIRPYTEVAKESGLDVNRGIVVNDVMQTSDSNVYAVGECAEHNGKVYGLVAPLYEQGKVLADHLTNKETNGYKGSTTFTSLKVSGCDLYSAGQIVENAEIKGIEIFNSVDNNYKKIFLKDGNVVGAVLYGDIDDGSRFYNMMKKGESTEDYTLVSLLTKGGEEASLSIADMADDETICGCNGVDKGTIVNAITENGFTTVEEVTAKTKAGNSCGKCKPQIAQILQHTLGDDFVAAKPAAICGCTDLTRDQIVTQIRAKGLKTSKEVRHVLNFKNKGGCPKCRPAINYYLNMVYPHDHEDERESRFANERYHANIQNDGTFSVIPQMRGGVTDADQLIRLGEVAKKYHVPLVKVTGSQRVGLYGVKKEELPNIWEDLGMRSASAYGKKTRSVKSCVGKEFCRFGTQYTTRLGIRLEKTFEYIDTPHKFKMGVSGCPRSCVESGVKDFGIISVENGFQIYIGGNGGTEVEKAEFLTTVETEDEVIKLCGALMQYYRETGIYAERTAPWLRRLGFENVKEVLLDPERQNELFERIMDAKKAVEAEPWEAITSNAQARKIFEVEKV

SEQ ID NO: 25686 - protein, 265 aa, Petunia x hybrida
MAQLRADDLSFIFGLLGNIVSFMVFLAPVPTFYKIYKRKSSEGYQAIPYMVALFSAGLLLYYAYLRKNAYLIVSINGFGCAIELTYISLFLFYAPRKSKIFTGWLMLLELGALGMVMPITYLLAEGSHRVMIVGWICAAINVAVFAAPLSIMRQVIKTKSVEFMPFTLSLFLTLCATMWFFYGFFKKDFYIAFPNILGFLFGIVQMLLYFVYKDSKRIDDEKSDPVREATKSKEGVEIIINIEDDNSDNALQSMEKDFSRLRTSK

SEQ ID NO: 25687 - protein, 353 aa, Bacillus cereus ATCC 10987
MEKIERLRSAFDEAGIDGILLTNEHSRRYMANFTGTAGVVLISKNRAQFITDFRYVEQATKQAVGYEIVQHAGLIIDEVAKQVKELGIQKLGFEQDTLTYSSYSAHKEAIDAEFVPTSGLVEKLRLIKTDSEIKILKEAAQIADAAFEHILSFIRPGVSEIEVSNELEFFMRKQGATSSSFDIIVASGLRSALPHGVASEKVIETGDFVTLDFGAYYKGYCSDITRTIAVGEPSDKLKEIYNIVLEAQLRGVNGIKAGLTGREADALTRDYITEKGYGEYFGHSTGHGIGLEIHEAPGLAFRSDTVLEPGMAVTVEPGIYIPGIGGVRIEDDIIVTSEGNEVITKSPKELIIL

SEQ ID NO: 25688 - protein, 475 aa, Pseudoalteromonas tunicata D2
MNLMWLRRDLRIDDNPALIAALQSGPTQALFIATPEQWQQHDMAPIQVDFIERHLNLLAEQLAKYGIPLTVLTVPNYASCTIALKEFCHTQQISQIFANQEVELNECIRDRQILAAGLNLTLYEADVIVPKGTVKTGKGDMFHVFTPFRNAWVKQLQQHSIKTSSHPSEVLTHYQSIRAEKIVLEATKKSSEKWPLVSDIKKHVMPEFLQTKHADYKQYRDFPALKGTSGVSPYLAIGALSSKMLASQVLQHVPFILDNAKADIFCWLNELAWRDFYKHLLFAYPNLIKGITFSEKYSNLNWPNSNEYFIAWCEGRTGYPLVDAAMRQLRQTGWMHNRLRMVVASFLTKHLLVDWRLGEQFFMQHLIDGDFSANNGGWQWAAGTGCDAQPYFRIFNPITQSEKFDPDGSFIRKYLPELSNVPVKYIHLPHSYLAATGQSECYWPAIVEHSQARQIALAFYKQQLGAPENDSNARN

SEQ ID NO: 25689 - protein, 344 aa, Helicobacter pylori
MILKRVTEALEAYKNGEMLIVMDDEDRENEGDLVLAGIFSTPEKINFMATHARGGMGVSLPKDSVKKFESPPVVPVNDSNPATAFTVSIDAKEAKTGISAFERHLTIELLCKDTTKPSDFVRPGHIFPLIAKDGGVLARTGHTEASVDLCKLAGLKPVSVICEITKEDGSMARRGDKFLSDFALKHNLKILYVSDLISYRLENESLLKMFCQEEREFLKHQTQCYTFLDHQQKNHYAFKFKGATTNGLAPLVRFHPIKEDFDFLTTGAFEVFFKALEYLKHEGGYLIFMNTHSKENNIVKDFGIGALVLKNLGIKDSTLLSSSEDRQYKALSGFGLKLVETISL

SEQ ID NO: 25690 - protein, 225 aa, Anaplasma phagocytophilum HZ
MLWCDANLTVRTLKNTVQYTGVRGITDLMVMPGLINLDFADVKVVMSEMGKAMMGTGEAEGEHRAVAAAEAAISNPLLDNISMKGARGILINITGGMDMTLFEVDAAANRIREEVDEEANIIFGSTFDENSAGRIRVSVLATGIDSTHTSNSKGRMTRGSESDLGVSDVGGDSARVGVSGYARAGQESSGAPAEADLFSRGSGNRNSSLNWNSKSFDVPAFLRKK

SEQ ID NO: 25691 - protein, 399 aa, Saccharomyces cerevisiae [sequence omitted]

SEQ ID NO: 25692 - protein, 283 aa, Staphylococcus aureus
EIISNKYNFNYQIEHHEFGGASIDTFGEPLTEKTLNACKRADAILLGAIGGPKWTDPNNRPEQGLLKLRKSLNLFANIRPTTVVKGASSLSPLKAERVEGTDLVIVRELTSGIYFGEPRYFNNHEALDSLTYTREEIERIVHVAFKLAASRRGKLTSVDKENVLASSKLWRKVVNEVSQLYPEVTVNHLLVDACSMHLITNPKQFDVIVCENLFGDILSDEASVIPGSLGLSPSASFSNDGPRLYEPIHGSAPDIAGKNVANPFGMILSLAMCLRESLNQPDA

SEQ ID NO: 25693 - protein, 556 aa, Zea mays
  misc_feature (117)..(117): Xaa can be any naturally occurring amino acid
  misc_feature (129)..(129): Xaa can be any naturally occurring amino acid
  misc_feature (153)..(153): Xaa can be any naturally occurring amino acid
SPLSKPPQQEEAGESQAEGSPRSPISLPSAAAGGDGGAEEAAGGHAAAAGASPQAGRAGVGLERGVPQRVAVAADADLRPPPLGSRRHRRRRRHRARAPPHLRLPLPPPPPPRRRPXSPPTSTPPPTPXAQAAPPAPGHAHQGHPGDCPPPAXETPPPPAVQLAKAVAEPKTPPPPPPQQHRQPARKTPGSGATTSGGSERDGATPRSTGSAGMPEVSHLGWGHWFTLRELEEATDGLTEENVIGEGGYGIVYKGMLHDSTLIAVKNLLNNRGQAEKEFKVEVEAIGRVRHKNLVRLLGYCVEGAYRMLVYEYVDNGNLDQWLHGDVGEVSPLTWDVRMNIMLGTAKGLAYLHEGLEPKVVHRDIKASNILLDQQWNARVSDFGLAKLLWSEKSYVTTRVMGTFGYVAPEYASTGMLNERSDVYSFGVLIMEIITGRSPVDYTRAAGEVNLVEWLKTMVAERKAEEVVDPKMAEKPSPKTLKRALLVALRCVDPDANKRPKMGHVIHMLEMDDLLFRDDKKPGRDVHPHGSDRYSSKEEGSISKREHHHHHHHRHR

SEQ ID NO: 25694 - protein, 987 aa, Saccharomyces cerevisiae
MQSQDSCYGVAFRSIITNDEALFKKTIHFYHTLGFATVKDFNKFKHGENSLLSSGTSQDSLREVWLESFKLSEVDASGFRIPQQEATNKAQSQGALLKIRLVMSAPIDETFDTNETATITYFSTDLNKIVEKFPKQAEKLSDTLVFLKDPMGNNITFSGLANATDSAPTSKDAFLEATSEDEIISRASSDASDLLRQTLGSSQKKKKIAVMTSGGDSPGMNAAVRAVVRTGIHFGCDVFAVYEGYEGLLRGGKYLKKMAWEDVRGWLSEGGTLIGTARSMEFRKREGRRQAAGNLISQGIDALVVCGGDGSLTGADLFRHEWPSLVDELVAEGRFTKEEVAPYKNLSIVGLVGSIDNDMSGTDSTIGAYSALERICEMVDYIDATAKSHSRAFVVEVMGRHCGWLALMAGIATGADYIFIPERAVPHGKWQDELKEVCQRHRSKGRRNNTIIVAEGALDDQLNPVTANDVKDALIELGLDTKVTILGHVQRGGTAVAHDRWLATLQGVDAVKAVLEFTPETPSPLIGILENKIIRMPLVESVKLTKSVATAIENKDFDKAISLRDTEFIELYENFLSTTVKDDGSELLPVSDRLNIGIVHVGAPSAALNAATRAATLYCLSHGHKPYAIMNGFSGLIQTGEVKELSWIDVENWHNLGGSEIGTNRSVASEDLGTIAYYFQKNKLDGLIILGGFEGFRSLKQLRDGRTQHPIFNIPMCLIPATVSNNVPGTEYSLGVDTCLNALVNYTDDIKQSASATRRRVFVCEVQGGHSGYIASFTGLITGAVSVYTPEKKIDLASIREDITLLKENFRHDKGENRNGKLLVRNEQASSVYSTQLLADIISEASKGKFGVRTAIPGHVQQGGVPSSKDRVTASRFAVKCIKFIEQWNKKNEASPNTDAKVLRFKFDTHGEKVPTVEHEDDSAAVICVNGSHVSFKPIANLWENETNVELRKGFEVHWAEYNKIGDILSGRLKLRAEVAALAAENK

SEQ ID NO: 25695 - protein, 332 aa, Rubrobacter xylanophilus DSM 9941
MSEQYDVVVVGSGPAGYTAALYAARANLRTLVFQGFEAGGQLMLTTDVENYPGYPEGVTGPEMMEDFERQAARFGAEMRPDNVDRVDFSGRPFRLWAEGQEEPVLARAVIVATGAKARWLGLPGEQRLMGRGVSGCATCDGFFFKDKRVAVVGGGDTAMEEALFLSRYASEVVIIHRRDEFRASKIMLGRARKNPKISFITDTVVTDVLGEDAVEGLSLRNVKTGEESTLEVEGFFVAIGHDPATEIFRGQLEMDEGGYLLQKEHTMTSVPGVFAAGDVADRRYRQAVTAAGDGCRAAIDAERWLEEQGEAQEAEDPGVWTAGKDRSPAGSG

SEQ ID NO: 25696 - protein, 283 aa, Staphylococcus aureus
EIISNKYNFNYQIEHHEFGGASIDTFGEPLTEKTLNACKRADAILLGAIGGPKWTDPNNRPEQGLLKLRKSLNLFANIRPTTVVKGASSLSPLKAERVEGTDLVIVRELTSGIYFGEPRYFNNHEALDSLTYTREEIERIVHVAFKLAASRRGKLTSVDKENVLASSKLWRKVVNEVSQLYPEVTVNHLLVDACSMHLITNPKQFDVIVYENLFGDILSDEASVIPGSLGLSPSASFSNDGPRLYEPIHGSAPDIAGKNVANPFGMILSLAMCLRESLNQPDA

SEQ ID NO: 25697 - protein, 237 aa, uncultured archaeon GZfos27A8
MYSNAGIEATEVIGMADEKKNDIPEKGAVVQRDRETYAIAPDTPAGVVSPDVLRKIAEVAEKYGAAAIKITSAQRMVIVGLKEEDIDPAWNDLGMSPGAAIGLCVRSVKICPGTTFCKKGISDSLGLGMALHDEYHGMSLPAKFKIGVSGCPNCCGESWVKDLGFFGFKNGFKVVVGGEAGKKPRIAQELTYVESIDDAKKVARSVFDYYTANAKPKERIGDFIDRIGFEEFTKGVL

SEQ ID NO: 25698 - protein, 493 aa, Arabidopsis thaliana
  misc_feature (112)..(112): Xaa can be any naturally occurring amino acid
MVVEEENRSMEEGLLQHQNDIDDRRITACVILSTFVAVCSAFSYGCAAGYTSGAETAIMKELDLSMAQFSAFGSFLNVGGAVGALFSGQLAVILGRRRILIDIYPFFLGGYXRLKTLWACDFFCVFGWLSIAFAKNVFWLDLGRISLGIGVGLISYVVPVYIAEITPKHVRGAFTASNQLLQNSGVSLIYFFGTVINWRVMAVIGAIPCILQTIGIFFIPESPRWLAKIRLSKEVESSLHRLRGKDTDVSGEAAEIQVMTKMLEEDSKSSFSARLHPHHRRTLVVGIAPLMLIQQLSGASGITYYSNAIFRKAGFSERLGSMIFGVFVIPKALVGLILVDRWGRRPLLLASAVGMSIGSLLIGVSFTLQQMNVLPELIPIFVFVNILVYFGCFAFGIGGLPWVIMSEIFPINIKVSAGSIVALTSWTSGWFVSYAFNFMFEWSDFMFDFSAQGTFYIFAAVGGMVIHFYLDARTGNQRTIIGKNVQASLTGTS

SEQ ID NO: 25699 - protein, 283 aa, Staphylococcus aureus
EIISNKYNFNYQIEHHEFGGASIDTFGEPLTEKTLNACKRADAILLGAIGGPKWTDPNNRPEQGLLKLRKSLNLFANIRPTTVVKGASSLSPLKEECVEGTDLVIVRELTSGIYFGEPRHFNNHEALDSLTYTREEIERIVHVAFKLAASRRGKLTSVDKENVLASSKLWRKVVNEVSQLYPEVTVNHLLVDACSMHLITNPKQFDVIVCENLFGDILSDEASVIPGSLGLSPSASFSNDGPRLYEPIHGSAPDIAGKNVANPFGMILSLAMCLRESLNQPDA

SEQ ID NO: 25700 - protein, 499 aa, Legionella pneumophila str. Lens
MGYNVPHYIGGQLINETDTEAQAIYNPALGEIIGQVHFASKATCDRAVAIAKAAGNEWSQTPAIKRARVLFRFRELLEKYQMDLARIVTREHGKTLDDAKGSVARGIEVVELHCGLVNELKGDFSAEVASHIDCHTFRQPLGVCAGISPFNFPVMVPIWMMIPAIACGNSFILKPSEQDPSAPVRLLELLNDAGLPPGVANCIQGNKTTVEHLLAHPDIAAFTAVASTPVAEYIYTTAAAYGKRAHTFGGAKNHCVVMPDADLDQAANAIVGAAYGSAGERCMALSVVVTVGQHTADALINKISPLIRAIRVDAGDVEGTDMGPLVSQAHRQRVLAAIEKGVNEGARLIIDGRTFQHPQYPQGFYLGPCLFDEVTEEMSVYQNEIFGPVLVIVRVNHFEEALALVNKHQYGNGTAIFTRDGFTAREYSQRVQAGLVGINIPIPVPIANHPFGGWKRSVFGDTNMHGEESIHFYTRRKTVTSKWPITELKDSSFAMPTHD

SEQ ID NO: 25701 - protein, 283 aa, Staphylococcus aureus
EIISNKYNFNYQIEHHEFGGASIDTFGEPLTEKTLNACKRADAILLGAIGGPKWTDPNNRPEQGLLKLRKSLNLFANIRPTTVVKGASSLSPLKQERVEGTDLVIVRELTSGIYFGEPRHFNNHEALDSLTYTREEIERIVHVAFKLAASRRGKLTSVDKENVLASSKLWRKVVNEMSQLYPEVTVNHLLVDACSMHLITNPKQFDVIVCENLFGDILSDEASVIPGSLGLSPSASFSNDGPRLYEPIHGSAPDIAGKNVANPFGMILSLAMCLRESLNQPDA

SEQ ID NO: 25702 - protein, 531 aa, Nostoc sp. PCC 7120
MTTKPEKIIIFDTTLRDGEQCPGATLNIDEKLAIAKQLARLGVDIIEAGFAFASPGDFEAVHKIAQTVGTQSGPVICSLARARHDDIKAAAEAIKPAAKGRIHTFIATSDIHLQYKLKKTRPEVIAIAEEMVAYAKSFTDDVEFSPEDAGRSDPEFLYQVLERAIAAGATTINIPDTVGYTTPSEFGAIIKGIKENVPNIDQAIISVHGHNDLGLAVANFLEAVKNGARQLECTINGIGERAGNAALEELVMAMHVRRQYFNPFLGRHPDSEEALTNIDTKQIYKTSRLVSNLTGMLVQPNKAIVGANAFAHESGIHQDGVLKNKLTYEIMDAQLIGLTDNQIVLGKHSGRNAFRTRLKELGFELSETELNKAFVKFKEVADKKKEISDWDLEAIVNDEIQQAPDLFRVELVQVSCGSNARPTATVTLRTPDGEELTDAAIGTGPVDAVYKAINRVVNVPNQLIEFSVQSVTAGIDAIGEVTIRLRYESRVFSGHAANTDIIVASAQAYVNALNRLYASLQTQDKQTEVTA

SEQ ID NO: 25703 - protein, 283 aa, Staphylococcus aureus
EIISNKYNFNYQIEHHEFGGASIDTFGEPLTEKTLNACKRADAILLGAIGGPKWTDPNNRPEQGLLKLRKSLNLFANIRPTTVVKGASSLSPLKQERVEGTDLVIVRELTSGIYFGEPRHFNNHEALDSLTYTREEIERIVHVAFKLAASRRGKLTSVDIENVLASSKLWRKVVNEVSQLYPEVTVNHLLVDACSMHLITNPKQFDVIVCENLFGDILSDEASVIPGSLGLSPSASFSNDGPRLYEPIHGSAPDIAGKNVANPFGMILSLAMCLRESLNQPDA

SEQ ID NO: 25704 - protein, 395 aa, Thermoplasma acidophilum
MGDITDLLSKVSIDDVYDEWEDQASGSLPEDAEIENVYKTLNVKIKVIGCGGGGSNTVNRLYDDALKNADLIAINTDASHLRSIKVKHKLLIGQKTTKGLGTGADPKVGEEAAIEEIVAIKKIVQNTDITFVTAGLGGGTGTGCAPVIARAAKEAGSIVISVVTLPFESEGPLRMDNAVIGLEKLAQFSDTLVAIPNQKLLSEVPNAEMKVAFAYADKVLADTIRSIVEIITKTGIINIDYSDIKTVMQSGGVALIGMGQSKKGGDRIMTALEEALKPRLIDVDVSTAKDCVFKIIAPPDITVSEVGKAMDEIKKKINPRSRIIWGLTIDKDLDKDVKVLIFMTGVSSAYLVKDVESARKAGEHVHRIICGRDRHGELDQPMIRENIFFNLIITT

SEQ ID NO: 25705 - protein, 261 aa, Passiflora edulis
VLNHGIPNEFMDTVERMTKAHYNKCMEQRFNELVASKALEGVQVELKDMDWESTFYIRHLPESNIAEIPDLDDEYRKVMKDFAAKLEKLAEELLDLFCENLGLEKGYLKKALYGSRGPTFGSKVSNYPPCPKPELVKGLRPHTDAGGIVLLFQDGKVGGLQLLKDGQWVDVPPIPHAIVINIGDQLEVITNGKYKSVDHRVVAQTDGARMSLASFFNPGSDAVIYPAPALVEKEAEEKKQLYPKFVFEDYMKIYAGLKFHA

SEQ ID NO: 25706 - protein, 259 aa, Rhodopseudomonas palustris CGA009
MSTFEFIIVERQNAVGIIKLNRPKMLNALSFGVFREIGAAVEDLEADDAIGCILITGSEKAFAAGADIKEMQPKGFIDMFNEDFTSIGGDRLARCRKPTVAAVAGYALGGGCELAMMCDIIIAADTAKFGQPEITLGTIPGIGGTQRLTRAIGKYKAMDLCLTGRMMDAQEAERSGLVSRIVPADKLMEEALGAAEKIATMSRPTAAMAKSAVNRALETTLAEGLAVERDLFRSTFALEDRAEGMAAFIEKRKPNNQNR

SEQ ID NO: 25707 - protein, 377 aa, Medicago sativa
HDAENSSLLRFNALWEASYRHDSLLVFSTGRSPLLYKQLRKEKPMITPDITIMSVGTEITYGKSMVPDDGWVQELNQKWDKDIVIEEASKFPELKPQAETEQRAHKVSFYVKKDNAKQVTEALSKILEQRGLDVKIIYSGGVDMDILPQGAGKGQALAYLLKKFETEGKLPGNTLVCGDSGNDAELFSIPGVYGVMVSNAQEELLQWHAENAKDNPKIPHASERCASGIIQAIGHFNLGPNLSPRDVSDIGQEQSVENVSAVQEIVNFCLLSEKWRRAEVENSELFIAAIKASTDPSGAYIHPSGADHSLKGYINILRKVYGNKQGKQFRIWLDNVLATQISSDIWLVKFDKWELHDEERHGCVVTTILRKDSDWFT

SEQ ID NO: 25708 - protein, 491 aa, Bacillus thuringiensis serovar konkukian str. 97-27
MSKYKTILQSNKDELHSLYEIANQDSWKPIYHIHPPFGLMNDPNGVSYYNDEYHVFYQWYPFGPIHGMKHWGHVKSKDLINWERMPVAIIPTESYESHGAYSGSAIVKDDLLHLLYTGNIKNPDDSRDAKQCMATMDSQYTMTKYSNNPVIDIIPDGYTKHVRDPKVWKHNDIYYMLLGAQRKNKTGTLLLYKSKDLYNWNFQGEITTNLKEFGFMWECPDYFQLSGKDVLLFSPQGIEKDRENFHNIYNVVYAIGHFDIKNLYFHIDSYYEADKGFDFYAPQTLEDSTSRRLLFAWAGSSEITYPSDDYMWAHCLTLPRELTLEDNILKQKPVSELTKLRTTKKEISGDITAGLNVLSTLDNEGSYELIVTLKTEDAKRFGLSLFHNEEECFPITFNRKEGTVSIDRSNFCHQFGGEYGYERYKKINIQDTIELQIFVDTSIVEIFLCDGSTVFTSRVFPRKDLKHHIAIFSDAKLNFIITQYKLKRGIV

SEQ ID NO: 25709 - protein, 826 aa, Bacteroides thetaiotaomicron VPI-5482
MKIIIIGGVAGGATTAARIRRTNEAAEIILLEKGKYISYANCGLPYYIGGVIKEREKLFVQTPEAFSTRFRVDVRTENEVIFIDRKRKTVTVRQSSGDTYEESYDKLLISTGASPVRPPLPGIDLNGIFTLRNVADTDRIKEYINSHAPRKAVVIGAGFIGLEMAENLHAQGAKVSIVEMGNQVMAPIDFSMASLVHQHLMDKGVNLYLEQAVASFERDGKGLKVIFKNGQSISADIVILSIGVRPETTLARAAELKIGEAGGIAVNDYLQTSDESIYAIGDAIEFRHPITGKPWLNYLAGPANRQGRIVADNIQGAHIPYEGAIGTSIAKVFDMTVASTGLPGKRLRQAEINYMSSTIHPSSHAGYYPDAMPMSIKITFDPKTGKLYGGQIVGYDGVDKRIDEIALVIKHEGTIYDLMKVEQAYAPPFSSAKDPVAVAGYVAENIITGKVQPVYWRQLRDIEMENNFLLDVRTPDEFSLNTLPGAVNIPLDELRDRLDELPKDKMIYTFCAVGLRGYLAYRILVQHGFEKVRNLSGGLKTYHAAAAPIILREESENEVPAQPNANIQQPADAQPQKTVSPVEAVKTIRVDACGLQCPGPILKMKKTMDSLVSGDRVEITSTDPGFPRDAAAWCNSTGNQLISKETAGGKSVVVIEKGEPKSCNIVTSCEGKGKTFIMFSDDLDKALATFVLANGAAATGQKVTIFFTFWGLNVIKKLHKPNVEKDIFGKMFGMMLPSSSRKLKLSKMSMGGIGGKMMRYIMNRKGIDSLESLRQQALENGVEFIACQMSMDVMGVKQEELLDEVTIGGVATYMERADNANINLFI

SEQ ID NO: 25710 - protein, 941 aa, Solibacter usitatus Ellin6076
MRMKFLVFLTLASSAFCQTLPSGVQKKASVGGITEYEFPNGLQVLLYPDPANPKVTVNVTYLVGSRHEGYGETGMAHLLEHMDFIETNDGRQIKNEIVAHGAAWNGTTSDDRTNYFETVTATDDNLRWALNMEAARMVNVKINKQLLDVEMTVVRNEFERGENSPQRVLSERVASTAFLWHNYGKSTIGSREDIEKVPAERLLAFYKKYYQPDNAVLTISGKIDEAKTLQWVNETVGRIPRPTRQLDQTYTVEPAQDGMRYVELRRIGEGQELIMAYHTPAAAHPDTAALQVLAGVMSGGGGGRGGRGGGGAGNGRLTKALVDNKKAESASMRVAQLHDPGLTEVSATLSKEQSIDEVKKIILETLKGIVTEPPTKEEVDRVKTRMARAMEQQLTDAQQIGLGMTVPISQGDWRLMFLAHDRIQKVTPEDLVRVAKAYIKDSNLTVGVFIPDAAPDRAPVPAAPDLTPIFTNYKSSIAVSRAEEFDPTPANIERRLQRGQLANGMHVVMLPKKMAGGTVTVAVELHFGDAKSLAGRNAAAQLAGGLLMSGTADKNRQQIQDEMERLDARITVSGGGGGGGFGGRGGGGGRGGPAGGGGVSSASATITVKPENLEPALRLAVQMLRAPAYSETEFDRMKSQRVRALENVPSQPEQLSAQELQRHLSPFAKGDPQYQPTREEQLAEMKAVTLADVKKFHDDFYGASHGEFVVVGEVDQAAVKKLAADLLGSWNTPAPYARLSSPYKKAEAINRKIETPDKENAQFEAGMRIKLSEKDGDYPAMVLANYMFGGSITARMPNRIRNREGLSYGASSRFSVPTDGDAALFSATVSCNPVNMPKVEASFLDELKKTHAEGFTAAEVAEAKKAYADARKVARSQEAALVGLIASHEQLGRTLLYDEQMDTKIQALTVDQINAAFRKYLDPALVTIVKAGDFKKVSVYQ

SEQ ID NO: 25711 - protein, 250 aa, Arabidopsis thaliana
MKFNVANPTTGCQKKLEIDDDQKLRAFYDKRISQEVSGDALGEEFKGYVFKIKGGCDKQGFPMKQGVLTPGRVRLLLHRGTPCFRGHGRRTGERRRKSVRGCIVSPDLSVLNLVIVKKGENDLPGLTDTEKPRMRGPKRASKIRKLFNLKKEDDVRTYVNTYRRKFTNKKGKEVSKAPKIQRLVTPLTLQRKRARIADKKKKIAKANSDAADYQKLLASRLKEQRDRRSESLAKKRSRLSSAAAKPSVTA

SEQ ID NO: 25712 - protein, 245 aa, Pseudoalteromonas tunicata D2
MIVNSGIYQGHIRHRRFSPVSHVFNYQLSTFGIDLDEVDELCSKHRLFGRQWYKLIRFCEKDYLKNEPGTLKQRIASTVKRLGGTWDGGRVMFVGQCRSLGIYFSPINLFYCFNKDDSCVWMLAEVSNTPWNERHYYLININSDAMTAKDFHVSPFMEMNMKYKWRVSQPQQRLLVHIENHPMHTQGVKVFDATMAMKKQPFSSLAYLKMWLSLPFMTLKVMSGIYWQALLLFIKRVPFVPYEHR

SEQ ID NO: 25713 - protein, 493 aa, Bordetella bronchiseptica RB50
MSLSVGNAALLPGRNLIGSEWREAALGARFAVADPATGKVIAHVPDSGARDAGAAVTAAHQAFADWRRTPAKVRAQIIKRWNALLHENAEDLARLISSEQGKPLAEARGEVSYAASYVEWFAEEATRADGDLIPSPAQGRRMFALREPVGVVAAITPWNFPAAMIARKIAPALAAGCTVVCKPAEDTPLTSLALTALAQQAGVPPGVLNIVTASRGRAAEVADAWLDDPRVRKITFTGSTPVGKHLARRSADTLKRVSLELGGNAPFIVFDDADLDAAVEGLMVSKFRNGGQTCVCPNRIFVQAGVHDAFVRKLAARVEGLVVGPASDPASQIGPMINARAVEKIEHHVADALERGARLAVGGKRIHSARCAGDHYYAPTVLTGVDETMACFREETFGPVAPITVFASEADVVAAANATAFGLAAYFYSTDVRRIWRLADALETGIVGVNEGALAAEAAPFGGVKDSGYGREGSRHGLAEYMQIKYVCQGQLD

SEQ ID NO: 25714 - protein, 265 aa, Oceanobacter sp. RED65
MSAILLEKHEHIATLTLNQPKLRNSISEIEVVDAFVDALNEVEQDSEIRCLIITGAGSAFSSGGNIKHMLNKEGMFAGDANDIRESYKRVIQRIPLALYNFPLPTIAAVNGPAIGAGCDLAMYCDMRIASTHAKFAESFIKVGLIPGDGGAWILPKIAGISCAAEMAFTGESIDAQTALKWGLVSQVVEPEALMLEANNLAQRVSNNPPQALKATKQLLRSAQNLNLEQTLDLSAAIQASLHQTEDHLEAVQAMIEKRAPKYKGQ

SEQ ID NO: 25715 - protein, 336 aa, Burkholderia xenovorans LB400
MTIRVAINGYGRIGRNTLRAFYENGKKHDIEIVAINDLGDARTNAHLTQYDTAHGKFPGEVSVDGDYLVVNGDKIRVLANRNPAELPWGELNVDVVMECTGFFTTKEKASAHIKGGAKKVIISAPGGKDVDATIVYGVNHHVLKASDTVISNASCTTNCLAPLVKPLNDKIGLVNGLMTTIHAYTNDQVLTDVYHEDLRRARSATHSQIPTKTGAASAVGLVLPELNGKLDGYAIRVPTINVSIVDLSFIAARDTTVEEVNAIMKEASEGSLKGILGYNQAPLVSIDFNHNPASSTFDATLTKVSGRLVKVSSWYDNEWGFSNRMLDTAVALAHAK

SEQ ID NO: 25716 - protein, 649 aa, Triticum aestivum
  misc_feature (637)..(637): Xaa can be any naturally occurring amino acid
MNSSMDEINLLRQHQRHQQHHLSVRGIGEEIDLEIDQCEDPTFSGAALEGVTSHHPQDPVVPADDHKSFLIPCSQPGAVDGQPQPTPPQAEERAGMLRLSAHTKKKKKVVKKWRDEWADTYKWAYVAVHDNTSRIFCTVCNARGRKHRRNPYGNEGSRNMQMSALEEHNNSLLHREALRLQSASKEKVQTPEKERLVYVKALSKTAASILESLFKKDPYEAEFIQSIQEVVHSIEPVLVKNSQYVQILERLLEPERCFIFRVPWVDDRGEAHVNRGFRVQFSQALGPCRGGLRFHPSMNLSVAKFLAFEQTLKNALSLYKLGGAAGGSDFDPKGKSEIEVMRFCQSFMDELYRYLGPDQDFPAEDVGVGPREMGFLFGQYRRLSGHFQGNFTGPKIFWSGSSFRTEATGYGLVFFARVVLADMNKELKGLRCAISGSGKIAMHVLEKLLSCEAIPVTVSDSEGYLFDGDGFDYVKYTLIRNIKAQQRSLKEYLKTFPRAKYINDAKPWGEQCDIAFPCASQNEIDQGEALSIISSGCRVLIECSNMPCTGQAVDILRKAKVHVAPAKATAAGGVAVGELELNPEFSLMQWSVEDFENKIQEAVKQTYDRSMKAAQEYGILKENPESLVHGANISAFXNIAQAMTDQGCV

SEQ ID NO: 25717 - protein, 394 aa, Rickettsia prowazekii
MAKAKFERTKPHVNIGTIGHVDHGKTSLTAAITIILAKTGGAKATAYDQIDAAPEEKERGITISTAHVEYETQNRHYAHVDCPGHADYVKNMITGAAQMDGAILVVSAADGPMPQTREHILLAKQVGVPAMVVFLNKVDMVDDPDLLELVEMEVRELLSKYGFPGNEIPIIKGSALQALEGKPEGEKAINELMNAVDSYIPQPIRATDKPFLMPIEDVFSISGRGTVVTGRVESGIIKVGEEIEIVGLKNTQKTTCTGVEMFRKLLDEGQSGDNVGILLRGTKREEVERGQVLAKPGSIKPHDKFEAEVYVLSKEEGGRHTPFTNDYRPQFYFRTTDVTGTIKLPSDKQMVMPGDNATFSVELIKPIAMQEGLKFSIREGGRTVGAGIVTKINN

SEQ ID NO: 25718 - protein, 358 aa, Campylobacter jejuni subsp. jejuni NCTC 11168
MKTYKVAVLAGDGIGPLVMKEALKILTFIAQKYNFSFEFNEAKIGGASIDAYGVALSDETLKLCEQSDAILFGSVGGPKWDNLPIDQRPERASLLPLRKHFNLFANLRPCKIYESLTHASPLKNEIIQKGVDILCVRELTGGIYFGKQDLGKESAYDTEIYTKKEIERIARIAFESARIRKKKVHLIDKANVLASSILWREVVANVAKDYQDINLEYMYVDNAAMQIVKNPSIFDVMLCSNLFGDILSDELAAINGSLGLLSSASLNDKGFGLYEPAGGSAPDIAHLNIANPIAQILSAALMLKYSFKEEQAAQDIENAISLALAQGKMTKDLNAKSYLNTDEMGDCILEILKENDNG

SEQ ID NO: 25719 - protein, 511 aa, Campylobacter jejuni subsp. jejuni NCTC 11168
MKDNKIIIFDTTLRDGEQALGSSLGINQKLQIALALENLGVDVIEAGFPVSSQGDFKAVQKIASKVKNSTICALSRALDKDIDMAYEALKVAKHFRIHTFIATSTLHMQDKLKKDFDEILSMAKRAIIRARSYTDDVEFSCEDAGRTPIDNLCFMVENAIKAGAKTINIPDTVGYTLPSEFANIIKILFNKVPNIDKAIISVHCHNDLGMATGNSLSAILQGARQIECTINGLGERAGNCALEEVVMAIKTRKDYLKGFYTDIKCENIFKTSKLVSAITNESIPSHKAIVGSNAFSHSSGIHQDGVLKNRQTYEIISPSAIGIHENRMLMTARSGRAMIKTCLENLGYDENTYNLDDVYERFLRLADKKGQVYDYDLEALMFLSYESEEENEFVLEKLSVISGNIPTACVCMRIKEELKTEACTGNGPVEAVFNCIARITNLKPALKAYSINAKSSGVDAQGQVDVDLEFKGRKFHGKGLSTDVIEASAQAFVSAYNAIYRSLKVEERKMA

SEQ ID NO: 25720 - protein, 219 aa, Aspergillus oryzae
MSLFRAGNFACFRAGRLAAPINARFLSTNTGRGDPSVKTSPADAPAVPPKDSSLIRQEGPAEAMARHQPDYEATIDHGTSKFSPVPKRVMDGSEPGDTVPAAVLSGAPTDLQARTVRIYRPSKPATQSGTWHQHHWRMDWDVLQKGHRWENPLMGWQSSADNMQGTHLNFKSKEDAIMFAQKQGYEYFVQEPNERRFVPKAYANNFVHEPKKIKHIRTK

SEQ ID NO: 25721 - protein, 452 aa, Rickettsia prowazekii
MVLNIKAPENIVLKPTITVFGVGGAGSNAVNNMIHANLQGANFVVANTDAQSLEHSLCINKIQLGVSTTRGLGAGASPEVGALAAQESENEIRSSLENSNMVFITAGMGGGTGTGSAPIIARIAKELGILTVGVVTKPFHFEGGHRMKTADKGLIELQQFVDTLIVIPNQNLFRIANEQTTFADAFKMADDVLHAGVRGVTDLMIMPGLINLDFADIKAVMSEMGKAMMGTGEDSGEDRAIKAAESAISNPLLDHSSMCGARGVLINITGGPDMTLFEVDNAANRIREEVDNIDANIIFGSTFNPELKGIIRVSVVATGIDADKVPKYKLAIDKNTNTLPEETYNESIIQHTQIETIPSFNSYSTENIEINESSIKQDYTGNEQELRLHVNAVNKPENNSQKSSFLGKIWESLRTSNNQTLERKNVIVNTVDQDNKESDIHDIPAFLRKKRD

SEQ ID NO: 25722 - protein, 290 aa, Oryza sativa
  misc_feature (168)..(168): Xaa can be any naturally occurring amino acid
MSSGGELALRQEYVIGDEIGRGRFGTVRRCYAVATGEAFAVKSTPKAPLREAEAADALDLALAEQEPKVHLVASAPGPGASPHVVALHAAFEDDAAVHLVVDLCAGGDLLSLVSSRGRLPEHEAADLVAQLASALASCHRRGVAHRDVKPDNLLFDGGGVLKLGDFGXSAGWFGDGRPMTGLVGTPYYVAPEVVAGREYGEKVDVWSAGVVLYMMLSGTLPFYGATAAEVFQCVLRGNLRFPPRAFASVSPEAKDLMRRMLCKDVSRRFSADQVLRHPWIVSRGGAAVMG

SEQ ID NO: 25723 - protein, 260 aa, Rubrobacter xylanophilus DSM 9941
MRTGTEQLLYERRGARAYITFNRPEARNAMTWEMYEALYECCEEVDRDEGVRVVVLRGAGGRAFVAGTDIRQFREFESGEDGIAYERRMERVIGRLEEVGKPTVAVVDGYAVGGGLSICAVCDLRVCTPEARFGIPIARTLGNCLSMKNYARLMALVGPARTKALLFTARMFSAEEALAAGLATEVVPREELDGRVEELCSALESHAPITMRVTKEALRRITFAGLPDGSDLVRQTYGSEDFHEGVAAFVEKRSPRWRGR

SEQ ID NO: 25724 - protein, 200 aa, Guillardia theta
MYKIFLHYKYTLIFNYLFRILMVRSLRYEELRIMFCNILKYIGENISDFIQKVIDLEIYFRLYRKRISFSKKKLINNSNCFTLKKIASVGVFMGKFFIGKRFLFFISFINVIKGFDTYKYGVVSSHGEKHFTKGNNLKRSHFIKISNNFVKGDGIFIKDNSNNILGFGLTTKDYYIVKSNHPNLLLINFSDVGIYIRIKY

SEQ ID NO: 25725 - protein, 603 aa, Caulobacter crescentus CB15
MRQTFDESTDPSFGPKHVPLIRQAMAAQGLDGFLVPHEDEHQNEYLPAANDRLAWASGFTGSAGAGVILSDRAAVFVDGRYTLQVREQVDQGVFEIRDLVEGGVPAYLETVSKGAVIGYDARLHSPAALDGLKAAATRAGAVLKPVEANPVDQAWGSARPAQPMAPVVPQPLEHAGEESSAKRARVGASVAALGADAAVITAPASIAWLFNVRGGDVIRTPLPLSQAIVNADGTARLFLEPAKVTTDLPAWLGNQVSLETPDKLEAALAELSGKSVVVDPAQSSAWYFDTLTAAGATVVRAMDPCTMPRACKNAVELDGAREAHRRDGAALTRFLHWLATEGQINPPDEKEAVAKLEAFREATGVLKDLSFDTIGAANGHGALPHYRPTERSNERAKMGSLLLVDSGGQYLDGTTDVTRTVAIGEPSAEMVQRNTLVLKGHLAIARLRFPAGTTGSAIDALARMALWAHGLDYDHGTGHGVGVYLGVHEGPQRISKAPNTIALQPGMIVSNEPGYYKDGEYGIRIENLEIVMPAEDVPGGERPMHRFEALTLAPIDRRLIDKALLTAEEIAQFDAYHARVLREIGPRVEPEVRAWMEAACAPL

SEQ ID NO: 25726 - protein, 122 aa, Thermosynechococcus elongatus BP-1
MKGIQQSNIEGFQRQIRSAPVPVIVHFWAPWCGLCRLIDPLLDQLEQSLPQQLQVLRINADENFALSRHFQLRSLPTVLFFDRGELVQRFDPALVQGDFRQALQQLLAHSFPSLLPAESHRS

SEQ ID NO: 25727 - protein, 341 aa, Solanum melongena
MADLLSNYSSKLEAVPPSHCLPLHERPVDPVEIVNTIPVIDLGKAKGDERPAVVQQLMKAFEEYGFFQIINHGVPEKLMEEAMKVYKEFFSLPAEEKERYAKDAANNTATGAAKMYSSSAKHYDSEEHRYWRDVLEHSANLDGKDRETWPDKPSRYREVIGEYSDELRRVSKVILGMVAEGLGLEPGFFDKGLGQRMLVNHYPACPDPSLTLGVGGHCDPNLITIIQQEVYGLQILKDDKWIGVEPKPNAFVVNSGLPITVISNGKLASVAHRVVTNTTHSRTSIGTFICPENIVEPAKALVGPGNPPQFKSFNWGIDFMPHYLSKKSVYHAALEPFKIDA

SEQ ID NO: 25728 - protein, 283 aa, Staphylococcus aureus
EIISNKYNFNYQIEHHEFGGASIDTFGEPLTEKTLNACKRADAILLGAIGGPKWTDPNNRPEQGLLKLRKSLNLFANIRPTTVVKGASSLSPLKQERVEGTDLVIVRELTSGIYFGEPRHFNNHEALDSLTYTREEIERIVHVAFKLAASRRGKLTSVDKENVLASSKLWRKVVNEVSQLYPEVTVNHLLVDACSMHLITNPKQFDVIVCENLFGDILSDEASVIPGSLGLSPSASFSNDGPRLYEPIHGSAPDIAGKNVANPFGMILSLAMCLRESLNQPDA

SEQ ID NO: 25729 - protein, 330 aa, Legionella pneumophila str. Lens
MTIRVAINGYGRIGRCILRSIFEYNRQNEFEVVAINDLSGIDVTAHLTRYDSTHGPFRSDVSIEGNMLIVDGHGIQVIAERDPAKLPWKQLDIDIVFECTGFFTSRDAAMGHINAGAKKVLISAPAKGVDTTVVYGVNHSVIKASDVIVSNASCTTNCLAPVVKVLHDAIGIESGLVNTVHAYTKDQMLLDGSHKDLRRARSATQSIIPTKTGAAAAVGLVLPELAGKLDGFAMRVPVLNVSVVDLTFQAKRATSVEEVNDILRKAKSRILQINEDPLVSCDFNHNPASAIFDTTETKVIGNLVKVVAWYDNEWGFSNRMIDTAHQMMNC

SEQ ID NO: 25730 - protein, 540 aa, Kluyveromyces lactis NRRL Y-1140
MVDDIVRSSSPQRDSSVEDVYSDLYSTFSQMTTTTANDIEQRPYPFTWRTGIMFVSSTIGGMLFGYDTGVISGVLIAMNPKDLNFHSLEIWQKEIITSITCAGSFIGSIIAFPLADRCGRKHTLTVCCIIFAASSMLMAVSYTFEMLVTGRLVVGIAVGIAAQCIPIYLTEISPAKIRGTMLTLNSISITGGQFAAYVIAYFMIDNDHPQSTAAWRYLFALGSIPAIVFLLTLDFIPESPRWLLSKSRLVEAELALHKVYPAATVPEIRHKLRKLTSDLNKLRYHNDETDPLLFPVNKRRSVASTRTGRSSLGATYYNEQLGKKRHRWEGKSKRALIIGCVLMFFQQTSGFNAFMYYSATIFEQVGFTNPLVPAIIVAFTNFSFTLLAMKLIDTMGKRTLLLMTIWIMTVGLLLCSVGFELNNLALLVVSVIVYVGAYATGMGVVPWSSVEFLPLNRRAVGGSMISCTNWLTNSVLSLTYLTITDRIGNENTMLLFALFTIFNWLFVYIWYPEVKGLSLEEIGQVFENGVDVHFIYRNYH

SEQ ID NO: 25731 - protein, 408 aa, Sphingomonas sp. P2
MRSIAIVGANLAGGRAVEALRQAGFDGRITLIGEEPWRPYERPPLSKEVLWDPANVPDNFFLQDEAWYDDNRIDMRLGTRAEAIDLAGGGVRLSGGELVQADRILLATGGHARKLNLAGSNCANVHYLRTRDDATRMALDLREGASIVIVGMGVIGAEVAASAVKLGCKVTVVEPMPVPMERALGRRFGQWLGEEHRKRGVATHFNCGVTGFRFSDNRVSAVEADDGTVIPCDAVIVGVGIVPATSLARDAGIEVNNGIIVDRRCQTSNLAVFAAGDVAEQDGFFGGRFRQETYQNAADQAQAAALAMLGQEVSYCKPMWYWSDQFDLNIQFCGQIPVEAEVAIRGEMDSNAFVAFFLAGEAIEGVLTVNRAPDMGVGKRLVERRARASAASLADAGMSLRDLLKQAG

SEQ ID NO: 25732 - protein, 427 aa, Chlorobium tepidum TLS
MMSNNQFDSIESAIEDIKNGKLIIVVDDEDREDEGDFIAAAEHVTPEMVNFITKEARGLLCVAIPMERARELQLEPMVQRNTSQHETNFTVSIDAIAEGVTTGISAYDRYMTLKMLADPSSTADDFSRPGHIFPLRAMDGGVLRRVGHTEAAVDLCRLAGCQPAGLLCEILHDDGSMARVPELLKLKEKLGMKLITIKDLVAYRMQRSKLVHRAVESKLPTAYGEFKLIAYETIVDQQNHMAFVKGDVGNGEPVLARVHSQCATGDTFGSLRCDCGHQLETALRMIEKEGRGVLIYLMQEGRGIGLINKLKAYNLQDEGFDTVEANEKLGFKPDLRDYGIGAQILQDLGVRKMRLMTNNPKKIVGLEGYGLEIVERVPLEIEPNEVNRHYLQTKRDKLGHMIQMASGNERILFERLADEQLKQHKKD

SEQ ID NO: 25733 - protein, 297 aa, Halobacterium sp. NRC-1
MGEDVGQNGGVFRATEGLYEEFGDDRVIDTPLAESGIIGSAVGMAAYGLKPVPEIQFSGFMYPGFDQVVSHMSRLRTRSRGRFTLPMVLRAPMGGGIRAPEHHSESKEAFYAHEAGLKVAMPSTPYDAKGMLIASIRDPDPVVFLEPKKIYRAFREDVPDDPYEVELGDAAVRTEGEDVSVFTWGAMTQPTVEAAENLDRIDVEVVDLRSLSPIDFDTIIESFKKTGRAAIVHEAPNTGGLGAEITATIQEEALLYQEAPVERITGFDVPFPLAALEDYYLPEPARIAAGIEEAFDF

SEQ ID NO: 25734 - protein, 337 aa, Coccidioides posadasii
MVVKVGINGFGRIGRIVFRNAVEHPEVEIVAVNDPFIETHYAAYMLKYDSTHGRFKGDVKFSENGLDVDGKHVRFYQERDPANIPWAETGADYVIESTGVFTTTEKASAHLKGGAKKVIISAPSADAPMFVMGVNNETYKSDIKVLSNASCTTNCLAPLAKVVNDNFGLVEGLMTTVHSYTATQKTVDGPSSKDWRGGRTAAQNIIPSSTGAAKAVGKVIPSLNGKLTGMSMRVPTSNVSVVDLTCRTDKSVTYDQIKEAMKKASANELKGIMSYSEDALVSSDLNGDPHSCIFDATAGIALNDHFIKLVAWYDNEWGYSRRVIDLIAYIAGVDAGK

SEQ ID NO: 25735 - protein, 478 aa, Halobacterium sp. NRC-1
MAREFTLPDVGEGVAEGELVRWLVDEGDTVTEDQPVAEVETDKAQVEVPAPVDGTVQELHWAEGDVVPVGDLFVTFDVDGEASATADDGDESGDEAASATSEASGRTFAPPSVRTLARELGVDLDSVEGSGPSGRITDGDVRAAAEGGEDTTEPATEATSATERVDEDDTAASAGSQEPAGREKTLAAPATRGVARELGVDINDVPAVEQRDGEAFVTAEAVQAYAEGGQAAQGEAGGAATREFVAGGETTEPYRGIRRTIGEQMAESKYTAPHVTHHDTAVIDSLVETRSKLKARAEAEDVKLTYMPFVMKAVVAALKEFPVLNSELREDDEEIALKQDYNIGVAVATDAGLMVPVVEHVDQKSMLEISTEMNDLVEQARERSIAPADMDGGTFTITNFGAIGGEYATPIINYPETAILGLGAIDERPVAEDGDVRAAQTLPLSLSIDHRVIDGAEAAQFTNRVMEYLTDPELLLLE

SEQ ID NO: 25736 - protein, 474 aa, Onion yellows phytoplasma OY-M
MKTMKRVKTVTARSSDFGKWYTDVCLKAELIAYSEAKGFIIYLPYGYALWENIQKHLNCTLQKTGHQNVYFPLVFPEKLFHKEKNHIQGFSPEAAMITTTGKKNLSEKLVIRPTSEILFSQYYSKTITSYRDLPKLYNQWCNVVRWEKTTKPFLRGKEFLWQEGHTVHATEQEAMQQTLSILDIYQKLGKNLLALPFVCGKKTETEKFAGALITYSIEALMHDGQALQAGTSHYLGTNFAKSFQIQFQDCDHQKKYVHQTSWGVSTRLIGALIMVHSDDEGLVLPPYVSPMQIVIIPLQPQDDAVKQTSENLFSILQKNYRVHLDLQDKTAGWKFSQYELKGVPLRIEIGKRGLENDEVTIFQRYNFAKQNIKTKDLPSQIPQLFETIHNNMYQKALQHLEQNRKQATTYEEFKTYLKQGGYVAMSISGTDAELQIKQETGATARVILETNLITANCPVTNKKALQTVLFARAY

SEQ ID NO: 25737 - protein, 280 aa, Porphyra purpurea
TNWDDMEKIWHHAFYSELRVDPAEHPVLLTEAPLNPKANRERMTQIMFESFSVPAFYVAIQAVLSLYASGRTSGVVIDSGDGVTHTVPIYEGYSLPHAVLRIDLAGRDLTGHMAKLLQQRGYSFTTSAELEIVRDIKQQLCYVAEDYDKELANSSSNSALEKEYELPDGQTITVGAERFQCPEALFKPELLGNEMMGMHRTAYSSIMKTDIDIRKDLYANAVMSGGSTMFAGIANRVQREIEALAPKSIKVKVIAPPERQYSVWIGGSILSSLSTFQQMW

SEQ ID NO: 25738 - protein, 112 aa, Solibacter usitatus Ellin6076
MKKIEAIIQPFKMDEVKEALMGIGIEGITISEVRGHGRQKGHKEVYRGQEYNVDLLPKLKMEMVVASDRSDEVIKVLAGAARTGKIGDGKIFIYDVAEAIRIRNGDRGDLAL

SEQ ID NO: 25739 - protein, 466 aa, Burkholderia sp. 383
MSCRSEWSERHDDSSTEETAALLDMLRLHRANVARSGEQTEVLMTQSSHVKVIGLPHSKDAYAIRDFLKRGVVEYEWCELTSDNDCMRELGITPLRDVRLPAVIFPDGSCLFQPTLSEIATKLGWVVRPRFVEYDVSIYGAGPAGLSAAVYAASEGLRAVVIERNAVGGQAGTSSLIENYMGFPEGIPGAELTERARQQAVKFGVELLMMREGVHASFVDGKIRVDLADGSILTARSNICATGIEYRSLNVPDEQKFLNAGLFYGAGSSEAPMCEGKEVFIVGGGNSAGQAAMNFSRHATEVTLIVRGASLAATLSQYLIERLEKTDNIKVRYGSKVTALHGEGTLEAIEIQSERGESEVVRTSHLFVCIGGAPNTEWAKDTSIIRNPDGYLVTGSDLYEHPSFEKVWPLERRPYFLETSVPGSFAAGDVRSGSVKRVASAVGEGAMAVTFVHRFLAENSPGPVST

SEQ ID NO: 25740 - protein, 170 aa, Zea mays
  misc_feature (142)..(142): Xaa can be any naturally occurring amino acid
  misc_feature (154)..(154): Xaa can be any naturally occurring amino acid
YDKNLGRIEKWVLRKAFDDEEHPYLPQHILYRQKEQFSDGVGYNWIDGLKSFTEQQVTDEMMNSAAQMFPYNTPVNKEAYYYRIIFERLFPQDSARETVPWGPSIACSTPAAIEWVEQWKASNDPSGRFISSHDSAATDRTXTSWRWSTATGTXANGTVNGNDVAVAIAV

SEQ ID NO: 25741 - protein, 405 aa, Saccharopolyspora erythraea
MTGMGVVSPLGVGTEQFHANQQLGRSAVRRVTAYDPGDDPVRIAAEVDLPEQFQFTRRDQLRTDRCTQLAIVAARLGVEEAKLDLAASDTSRIGVVIGSGMGGVGTWERNCLALHESGVRAMRTKTVPMSMINDPSASIAIRYGTTGPCTTVTTACASGADALVAAAQMIRLGEADVVLAGGAEAPLSRSVLAGFARLGALSEDNDAPESACRPFSADRTGFVMGEGAAVLVLESAEHATARGAQVRARMAGYGRSADAYHVTMPHPEAAGARAAIVAALRDAGAQPSDVDFVNAHGTGTALNDHAEALAMRAVFGTGVERIPVTATKSLTGHSLGAAGAVEAVATVQAVSSGVIPPTANLRVPDPELGIDVVHGGPREARINLALSNSFAFGGHNVVLAFAPPL

SEQ ID NO: 25742 - protein, 343 aa, Vibrio vulnificus
MSISNTVTKVKDFDVNQMDDDFNDDIEINEKEDLTEEKVKLREEFDASNKSLDATQLYLGEIGFSPLLTAEEEVLYARRALRGDEAARKRMIESNLRLVVKISRRYSNRGLALLDLIEEGNLGLIRAVEKFDPERGFRFSTYATWWIRQTIERALMNQTRTIRLPIHVVKELNIYLRTARELSQKLDHEPTAEEIAAQLDIPVDDVSKMLRLNERISSVDTPIGGDGEKALLDIIPDANNSDPEVSTQDEDMRVSLIHWLEELNPKQKEVLARRFGLLGYEPSTLEEVGQEIGLTRERVRQIQVEGLRRLREVLIKQGLNMENLFDIVWIEFAFSNRKKAMES

SEQ ID NO: 25743 - protein, 520 aa, Arabidopsis thaliana
MAQVSRICNGVQNPSLISNLSKSSQRKSPLSVSLKTQQHPRAYPISSSWGLKKSGMTLIGSELRPLKVMSSVSTAEKASEIVLQPIREISGLIKLPGSKSLSNRILLLAALSEGTTVVDNLLNSDDINYMLDALKRLGLNVETDSENNRAVVEGCGGIFPASIDSKSDIELYLGNAGTAMRPLTAAVTAAGGNASYVLDGVPRMRERPIGDLVVGLKQLGADVECTLGTNCPPVRVNANGGLPGGKVKLSGSISSQYLTALLMSAPLALGDVEIEIVDKLISVPYVEMTLKLMERFGVSVEHSDSWDRFFVKGGQKYKSPGNAYVEGDASSASYFLAGAAITGETVTVEGCGTTSLQGDVKFAEVLEKMGCKVSWTENSVTVTGPPRDAFGMRHLRAIDVNMNKMPDVAMTLAVVALFADGPTTIRDVASWRVKETERMIAICTELRKLGATVEEGSDYCVITPPKKVKTAEIDTYDDHRMAMAFSLAACADVPITINDSGCTRKTFPDYFQVLERITKH

SEQ ID NO: 25744 - protein, 332 aa, Streptomyces viridifaciens
MATRAVARRQSATGETADSASSVRAHGGEIADRDLVGMYLDEIARTPLLDAAKEVELSQTIEAGVFAQQVLDGEEESRTDATREELQALVDAGERAKDVFIRSNLRLVVAVARRYPRSGLPLLDLIQEGNAGLVRAVEKFDYRKGFKFSTYATWWIRQAITRSIADQSRTIRLPVHLVEELGRIRRVQREFNREHGRDPEPAEVAAELGSTPERVIDVLDWARDPVSLNMAVDDAGETQFGDLLEDTSAVSPEQSVLTLLRSEELDDLIGRLDQRTASIIKMRYGIDDGRERTLTEVGKEHGLTRERIRQIEKHALLELKKLARDTGFDAAA

SEQ ID NO: 25745 - protein, 187 aa, Pseudomonas syringae pv. tomato str. DC3000
MNKKQRDEISKLLSYVLRHAPESMGLTLDRDGWCEVDELVGKANANGHSFDRQALEEVVETNEKKRFTLSEDGQRIRAAQGHSTEQVQVQHIEKEPPAWLYHGTASRFMASIETQGLIAGSRHHVHLTEDPETALSVGKRYGQPVLLAVDAKGMFEAGVQFFQADNGVWLVEAVPIEWLTKVADTVS

SEQ ID NO: 25746 - protein, 221 aa, Flavobacteria bacterium BBFL7
MSKLIAPSVLAADFANLQRDVEMINRSEADWFHIDIMDGVFVPNISFGMPVLRDIAKHATKTIDCHLMIVDPDRYVKTFADLGCDILTVHYEACTHLHRTLQLIKSHGMKAGVALNPHTSVHLLSDVIQDIDMVCLMSVNPGFGGQSFIENTYDKITQLKKIIDFKGCDTLIEIDGGVTDKNAKQLVDAGADVLVAGSYVFKSSDQVATIAGLKSMVNPAI

SEQ ID NO: 25747 - protein, 140 aa, Triticum aestivum
EPNDAPTKNISPEAAIAKLAEDTGNELNEINKQLEELQKMVVQRCRKMTTNEKRKLGAGLCQLSPEDLNKALELVAQDNPSFQTTAEEVDLDMDAQSETTLWRLKFFVREALEQQANENTKRKNDMYNALAKTDSKRIKR

SEQ ID NO: 25748 - protein, 247 aa, Zea mays
  misc_feature (27)..(27): Xaa can be any naturally occurring amino acid
  misc_feature (237)..(237): Xaa can be any naturally occurring amino acid
LHPLRCARFPRAVRNLTWPCRRWWSTXVVFPPVARPPGSAGSHFLGGAGVRGLEIGGNFIKFTAIGVYLEDAAVPALAKKWGGKTADELASDAAFFRDVVTGDFEKFTRVTMILPLTGEQYAEKVTENCVAFWKAAGLYTDAEGVAVEKFKQVFKPHTFPPGASIHFTHSPAGVLTVAFSRDSSVPVAGGVAIDNKLLCEAVLESIIGEHGVSPAAKLSLAARVSELLTKGTAAAAXLRAEPVSVTA

SEQ ID NO: 25749 - protein, 426 aa, Arabidopsis thaliana
MTTTISHLPTELLDEIISRVPLKSTRAVRLTCKNWDSLFKNRSFMKEEAAAKEGESRMIVLMDKNLFAMSIFFNGIDIDPSAEQRGKLTCLYDDSEQVKISQVFHCEGLLLCVLEDDKCSLVVWNPYWGQTRWIEPRYFSRIQNCYGRYMYVYALGYNNKSRSHKILRFIDGAFDFPFWYEIYDFDSDLWTTLDVTPQWFINFPPRGCYNRGVTLKGNTYWCAIRRKSNTNWFVDLDHIICFDFTSERFGPLMPLPFVRYTSGSLVTLSCVREEKLAVLFCNNATVEVWITTKIETDKISWSKFLTVNMYVDLLEGSFFIDEVKKVAMIFDIPMNRETVYIVGEAGNVKELHLGQPVDVDKHFSPLFVCSYVPSLVQIKQPPGCQRKQESSLEKRRCDDENISRLIAHEETYVVYGRYVPSRKKPR

SEQ ID NO: 25750 - protein, 510 aa, Phytophthora infestans
MRIASTSLLLASLALADALKTPLEYEHEFSAWMKTHSVSFSDALEFAKRLENYIANDMYIMEHNLENAWTGVKLDHNEFSSMSFEEFKFKMTGYVMPEGYLEQRLASRVDNLWSDVQVPDSVDWQDKGGVTPVKNQGMCGSCWAFSTTGAVEGAAFVSSGKLVSLSEQELVDCDHNGDMGCNGGLMDHAFAWIEDNGGICSEDDYEYKAKAQVCRDCEKVVKISGFQDVNPQDEHALKVAVAQQPVSVAIEADQKAFQFYKSGVFNLTCGTRLDHGVLAVGYGSENGQKFWKVKNSWGSSWGEKGYIRLAREENGPAGQCGIASVPSYPFATLIKKDEETETQKIVEEPRSVPAANAVESFPAEEARDFRPVNLADLFSSAKIKQCGDVGSAIIDFSDLEVTPSSPQRGQPVSFFGNGNAKKDFDSANFKLGVKLAGTQVFGHSGKLCGDTHIPLPLGLGHIDVHGFACPMKKGKSSDLKVDVNLPIIAPAGNYEIQLTSDDDSNSSLFA

SEQ ID NO: 25751 - protein, 336 aa, Burkholderia thailandensis E264
MTIRVAINGYGRIGRNTLRAFYENGKKHDLEIVAINDLGDAKTNAHLTQYDTAHGKFPGEVSVDGDYLVVNGDKIRVLANRNPAELPWGELGVDVVMECTGFFTSKEKASAHLKGGAKKVIISAPGGKDVDATIVYGVNHDVLKAEHTVISNASCTTNCLAPLVKPLNDKIGLETGLMTTIHAYTNDQVLTDVYHEDLRRARSATHSQIPTKTGAAAAVGLVLPELNGKLDGYAIRVPTINVSIVDLSFIAKRDTTVEEVNAIMKEASEGALKGILGYNDAPLVSIDFNHNPASSTFDATLTKVSGRLVKVSSWYDNEWGFSNRMLDTAIALANAK

SEQ ID NO: 25752 - protein, 751 aa, Pseudomonas fluorescens Pf-5
MIALRPSGLLRRLLLFILLFSLCFTVLASSVQLYFEYRREMRDIDSRMELIRAGYLGSLERNLWDLNQEQLTVQLQGLVDFSDVARVHLISNDFDLQQGSAELIGPLRVERFPLSYQPPSGPLRQLGELQVSTDLGAVYRRLYATGLASLLWMSVFLCGLAVALSGLFYRLVTRHLQVMADFARRVAAGELHEPLHLDKRQRPDGDEIDTVARALDDMRRAVLDDVQRREADRLALQDKRDELQKMVQRRTASLMHAKDEAEAANLAKSRFLATMSHELRTPLNGILGMAELLRSAPLGSQDRQRLQALHQAGEGLLSILNEVLSFARLEEGESRPEVRDFSLRQLLEEVTTLLQPRAEANRTRLELHIDEQLAPRQQGAEQYLRQVLSNLLANAIRFTEDGWVRVEVQVLHSAAEGQRLRCCVRDNGIGIAASMREKIFERFVQASDEVSRRYGGTGLGLAICKHLLQQLDGRIGVDSELGQGSSFWFELVLGVGQEPLPSPQLQVPAQGLKILVVEDVALNREVASGLLQRDGHQVWLAQDGEAALALCRQQAFDLLLLDVHLPGISGVELCRDIRRRPGPNRQVRIFALTASVQPSVVRSYLQAGMQGILGKPLQLASLRQVLAGQVQVPQADTEEGLLDQSVLDTHRSLLGEQKLQGLLQVLADALDQQQPLLSDALAAEDCTEVLHLAHRLAGSADSLGFCALARVLRELEGAAEQADRPALAALGVSLQTSWQQSRALLQQLLAA

SEQ ID NO: 25753 - protein, 344 aa, Bacillus clausii KSM-K16
MNVKMAINGFGRIGRMVFRKAFLEGKVDITAINASYPADTLAHLIKYDSIHGPFMADVYAKDGQLFVNGKKIELLAERDPRRLPWEALGIDIVIEATGKFKTKEAAGAHLQAGAKKVIITAPAKGEDATIVVGVNESDYNPQEDHILSNASCTTNCLAPVAKVLDEKFGIESGMMTTVHSYTNDQKNIDNPHKDLRRARACGQSIIPTSTGAAKALSKVLPNLDGKLTGMALRVPTPNVSLVDLVVNLKTETTAEAINNAFWEASQGTLKGILGITDEPLVSIDFNGEEQSAVVDGQSTAVLNNRQAKVLAWYDNEWGYSCRVVDLMNHVAAQMSTKEEIHSAS

SEQ ID NO: 25754 - protein, 106 aa, Triticum aestivum
MAKSYGTLFLLALIVFSLLQTMVMASSGSRVKYNPKRYGPGSLKRSQCPKECDRRCSQTQYHNACILFCNKCCRKCLCVPPGYYGNKQVCSCYNNWKTQEGGPKCP

SEQ ID NO: 25755 - protein, 302 aa, Pseudomonas fluorescens Pf-5
MFARMRTGLDQPIAALLNTRLVWPSRHLPHANHNNSRTHMTPSSSLLSRVEAGVAWITLNRPEQRNALDIPTLKQLHALLEHCNSDPAVRVLVLTGSGRSFCAGADLAEWAEAEARGALESYGWTETAHALMTCLHSLDKPTIAAINGTAVGGGMDLALCCDLRVAGQSARFKAGYTSMAYSPDAGASWHLPRLIGSEQAKRLLFLDELWSAERALAAGLVGEVCADEQLIGSVSELAARLATGPTFAFAQTKKLIRQGADRSLAQQLAAELAAGLLCGRSADGAEALRAVSEKRPPRFQGL

SEQ ID NO: 25756 - protein, 472 aa, Guillardia theta
MNKLFSIKIGPYYLGKTLGVGSFGKVKLGEHELCGQKVAVKILNRKKIKNLKMEEKVKREICILKLFMHPHIIRLYEVIETPTDIFVVTEYITGGELFDYIVERGRLNEDESRKFFQQMISGIEYCHNHMVVHRDLKPENILLDAHLNVKIADFGLSNIMKDGNFLKTSCGSPNYAAPEVINGKSYLGPEVDVWSCGVIMYALLCGSLPFDDENIPNLFKKIKSGIYILPGYLSDLSRDMIAKMLITNPLLRITINEIRDHPWFNSRLPKYLSFPTFKKNFVIQKKLNIDDNILELVSNKTFLSKKYIKLGIMKHERNSTAIIYHLIRESITPFDMITVDNSYIRDIIKKENVIKKSNEKEHNTSLHQAFLGIESPRENLKDILNEIQRAIKTFRSKTHNLNHFSVIIVINTNSLFETKYKKKKEIILRTTTILIQIFKRSMKYLIDLQKINGDSFFFLSTCNFIKQELNLK

SEQ ID NO: 25757 - protein, 562 aa, Nocardia farcinica IFM 10152
MILMTSRAQPTWKGDPSMAHDRAGRPARASDLDDIAHLVTAYFSRVPDPRDPAQRVVFGTSGHRGSSLDCAFNEAHILAITQAIVEYRATRGITGPVYLARDTHALSEPAWTTALEVLAGNGVTAMIDARDRYTPTPALSHAVLRHNRGGTKHQADGIVVTPSHNPPRDGGFKYNPPHGGPADTGVTDAIAARANELLADGLTGVRRATYQQALATGVERYDYLDHYIADLPNVLNLDAIRGAGIRLGADPMGGASVDYWEEIGQRYDLELEVVNPFVDPTWRFMTLDSDGKIRMDPSSRYAMAGLVAIKDDYDISTGNDADADRHGIVTPDGGLMNPNHFLAVAIEYLVANRMGWDALTKIGKTVVTSSMVDRVVSVLGRQVHEVPVGFKWFVPGLFSGSLAFGGEESAGASFLRMDGTVWTTDKDGILLALLAAEIAAVTGQTPSARYGELERRYGSPAYARIDAPAGAEQKKLLSQLTPDMITSEEIAGEPITAVLTRAPGNGAPLGGLKVTTENAWFAARPSGTEDKYKIYAESFQGPEHLAQVQAAAEEMVGKALQP

SEQ ID NO: 25758 - protein, 328 aa, Bacillus cereus ATCC 14579
MDLDVSGRNVFRAALNNSEVEVVAINDLTDAKTLAHLLKYDTVHGTLNAEVSANENSIVVNGKEIKVIAERDPAQLPWSDYGVEVVVESTGRFTKKSDAEKHLGGSVKKVIISAPASDEDITVVMGVNHEQYDAANHNVVSNASCTTNCLAPFAKVLNEKFGVKRGMMTTIHSYTNDQQILDLPHKDLRRARAAAENMIPTSTGAAKAVALVLPELKGKLNGGAVRVPTANVSLVDLVVELDKEVTVEEVNAAFKAAAEGELKGILGYSEEPLVSIDYNGCTASSTIDALSTMVMEGNMVKVLSWYDNETGYSNRVVDLAAYMTSKGL

SEQ ID NO: 25759 - protein, 368 aa, Kluyveromyces lactis NRRL Y-1140
MFRQSIVKQSCRFLATKKQPSIGRYTGKPNPKTGKYTVSFIEGDGVGPEISKSVKAIFSAAKVPIEWESCDVSPIFVNGLTTIPDPAVASINKNLIALKGPLATPIGKGHRSLNLTLRKTFGLFANVRPAKSIEGYKTTYENVNLVLIRENTEGEYSGIEHVVAPGVVQSIKLITQDASERVIRYAFEYARAVDRSKVLVVHKSTIQRLADGLFVDVAKKLSSEYPDIELQTELLDNTVLKTVQHPEAYDDVVVVCPNLYGDILSDLNSGLSAGSLGLTPSANIGHTVSIFEAVHGSAPDIAGQNKANPTALLLSSVMMLNHMGLTEHADKIEKAVLTTIASDAKNRTGDLGGSASTSSFTDAVIERL

SEQ ID NO: 25760 - protein, 283 aa, Staphylococcus aureus
EIISNKYNFNYQIEHHEFGGASIDTFGEPLTEKTLNACKRADAILLGAIGGPKWTDPNNRPEQGLLKLRKSLNLFANIRPTTVVKGASSLSPLKEERVEGTDLVIVRELTSGIYFGEPRHFNNHEALDSLTYTREEIERIVHVAFKLAASRRGKLTSVDKENVLASSKLWRKVVNEVSQLYPEVTVNHLLVDACSMHLITNPKQFDVIVCENLFGDILSDEASVIPGSLGLSPSASFSNDGPRLYEPIHGSAPDIAGKNVANPFGMILSLAMCLRESLNQPDA

SEQ ID NO: 25761 - protein, 467 aa, Frankia sp. EAN1pec
MAPRGGGQPLVQELSGQVEAGDPARPARAALMRPGARDAGWSLADVPDQRGRTAVVTGANSGIGFEAAKALAERGATVVLACREPARAEQAAARIRAAAPRADVHVEPLDLISMTSVRAAAERIRAAHPRLDLLVNNAGVMLPSPGPGGAALGAGFGDDGLGDHGIEPTFGVNHLGHFALTGLLLDRLLATPHSRIVTVSSLAHLVGRLDLEQLRRLPPHADRPGGSPPVVVPDQRAGSPSEPPLASPARQRSQRRSETQRRSETQRRSETQRGSGTPRAQGMQRLQSLQGTRGPQSRRLPRQRLPYPTSKLANLMFTFELQRRLAATGASTIAVAAHPGIARTGLTRNLMPPARVFMGQRLAPLMSWLVQEPEIGALATVRAALDPAVHAGEYYGPSGLFRSTGPPAVGRSSARSRDARQQQRLWAESERLTGVTYDFDPSSGTGPGGVGSWRNNGRSASRSAELT

SEQ ID NO: 25762 - protein, 480 aa, Pseudomonas putida KT2440
MSHKTYNNYIDGQWCEGHATLGNYSPSDTGDLIGQYHQASAEQARQAIQAARAAQPLWAASGLESRQQVLMAIGDELIARKEELGELLSREEGKPLAEGIGEVNRSGQFFHYYAAEVLRQMGETAASVRPGVDIEVHREPVGVVGIITPWNFPMATAAWKIAPALAFGNAVVFKPANLVPASAWALTEIISRQGLPSGTFNLVMGSGADVGEALIQSAEIDALTFTGSLQTGRRVAVATAGNLVRCQLEMGSKNALVVMDDADLELAVECALNGAFFGTGQKCTASSRLIVCDGIHDRFVEALRLRMRQLKVGHALEAGVQIGPVADARQLEQNLAYLQLAQAEGATLIEGGERLQLACDGYYMRPALFINSRNDMRINREEVFGPIACVIRVRDFEEALATLNDTEYGLTAGIITQSLRHASHFKRRAQTGCVMVNLPTAGTDYHVPFGGRKASSFGPREQGQYARDFYTVVKTTYLRP

SEQ ID NO: 25763 - protein, 656 aa, Burkholderia mallei ATCC 23344
MCGITGFVGPVACAPQTARATLARMTDSLAHRGPDDTGLWIDHDAGVALGHRRLSIVDLSEHGHQPMLSACGRYAMTFNGEIYNFRQLRSELEREHRAPEWRGHSDSEVLLAAFCAWGVDRALQKAVGMFALALWNRESRVLTLARDRIGEKPLYYGRIGGSFVFGSELKALRRFPGFDAHPIDRDALCLYLRHASVPAPYTIYEGIRKLPPGTYAQLEDLAEAPAPRRYWSLERAIAAGRANPFDGDANAAVAQLDYVLRDAIAEQSVADVPLGAFLSGGVDSSVIVALMQTQTAQPVQTFTIGFHEAGYDEAGYAKAVARHLGTSHTELYVKPADVLATVPRMPCVYDEPFADSSQIPTLLVSELTRRHVKVSLSGDGGDELFGGYTRYFLTPRLWGRLRRVPAAVRMRIAAALHALRPDHADQIASLVQGAWSASAQRDASPRVGDRLHKLANVMTADSRASLYRLLMSSVHHPERFTLAGHEPQTLIDTPGAWPAGLSFAEQAMAVDTLTYLPTDILTKVDRAAMAVSLETRMPFLDHRVVEFAWRLPEALRIPDGQDKWLLRKLLYRYVPRPLIDRPKQGFCAPVGAWLRGELSDWAAELLRPARLRDEGYLDAARVERLWRQHQSGRMNWQHPLWTVLMFQAWLERQRAE

SEQ ID NO: 25764 - protein, 283 aa, Staphylococcus aureus
EIISNKYNFNYQIEHHEFGGASIDTFGEPLTEKTLNACKRADAILLGAIGGPKWTDPNNRPEQGLLKLRKSLNLFVNIRPTTVVKGASSLSPLKEERVEGTDLVIVRELTSGIYFGEPRHFNNHEALDSLTYTREEIERIVHVAFKLAASRRGKLTSVDKENVLASSKLWRKVVNEVSQLYPEVTVNHLLVDACSMHLITNPKQFDVIVCENLFGDILSDEASVIPGSLGLSPSASFSNDGPRLYEPIHGSAPDIAGKNVANPFGMILSLAMCLRESLNQPDA

SEQ ID NO: 25765 - protein, 113 aa, Chlorobium tepidum TLS
MKYIVAMIQPHKLPDVKKSLAAAGIRKMTVTNALGCGAQGGYTEMYRGIPSEVNLLKKVKLEIAVNEEFADATVKAIIKGAKTGEIGDGKIFIFDLPECIRIRTEEKGHAAIG

SEQ ID NO: 25766 - protein, 982 aa, Nostoc sp. PCC 7120; identical to SEQ ID NO: 360

SEQ ID NO: 25767 - protein, 441 aa, Chlorobium tepidum TLS
MKSFLSKSGAIAAGLLLAAATFSPPIQAATPTPDAVNAFAIDNFFLFICAVLVLFMQAGFALVETGLNSAKNAVNILFKNLMDMAIGGIIYYFVGYGLMYPGEAFSGGFFGFGGPGISTAMPEIAGGTLYPAVDFLFQVAFAATAATIVSGAVAGRMQFRAYLIYSAVISAVVYPISGFWLWGGGWLKALGFHDFAGSLLVHALGGFAGLAGAIVLGPRIGRFNEDGTPNAMPGHNLALSTLGVFILLIGWYGFNPGSQLAIVGGDNTAAVMKIAVNTTLAACAGAVVAMIFAWGLFKKPDLTMALNGMLAGLVAITANCDVVSYNASLIIGAVGGILVVLGIMLLDKLRIDDPVGAWPVHGLNGIWGGVAAWIFGGQPMVAQLVGSLVVPFWGFVTMMVLFLILKAMGILRVHKDEEMKGLDISEHEEEAYYGFDIYTTQ

SEQ ID NO: 25768 - protein, 537 aa, Aspergillus foetidus
MARLLKAVTVCALAGIAHAFNYDQPYRGQYHFSPQKNWMNDPNGLLYHNGTYHLFFQYNPGGIEWGNISWGHATSEDLTHWEEQPVALLARGYGSDVTEMYFSGSAVADVNNTSGFGKDGKTPLVAMYTSYYPVAQTLPSGQTVQEDQQSQSIAYSLDDGLTWTTYDAANPVIPNPPQPYQAQYQNFRDPFVFWHDESQKWVVVTSIAELHKLAIYTSDNLKDWKLVSEFGPYNAQGGVWECPGLFKLPLDGGSSTKWVITSGLNPGGPPGTVGSGTQYFVGEFDGTTFTPDADTVYPGNSTANWMDWGPDFYAAAGYNGLSIKDHVHIGWMNNWQYGANIPTYPWRSAMAIPRHLALKTINNKTTLVQQPQEAWSSISSKHPLYSRTYSTFSEGSTNASTTGETFRVDLSFSATSKASTFAIALRASANFTEQTLAGYDFAKQQIFLDRTKSGDVSFDNTFASVYHGPLVPDSTSMVRLSIFVDRSSVEVFGGQGETSLTAQIFPSNDAVHARLVSTGGATEDVRVDVHNITSTWN

SEQ ID NO: 25769 - protein, 530 aa, Arabidopsis thaliana
MEASISFLGSTKPNISLFNPSSNVLPRRDFPLPALKLKKVSVLPRILHQKRLIRAQCSDGFKPEEDDGFVLEDVPHLTKFLPDLPSYPNPLKESQAYAIVKRTFVSSEDVVAQNIVVQKGSKRGVHFRRAGPRERVYFRSDEVKACIVTCGGLCPGINTVIREIVCGLNNMYGVNNILGIQGGYRGFYSKNTMNLTPKVVNDIHKRGGTFLQTSRGGHDTAKIVDNIQDRGINQVYIIGGGGTQKGAEKIYEEVERRGLQVAVSGIPKTIDNDIAVIDKSFGFDTAVEEAQRAINAAHVEVESVENGVGIVKLMGRYSGFIAMIATLANRDVDCCLIPESPFFLEGKGGLFEFIEERLKENRHMVIVIAEGAGQDYVAQSMRASETKDASGNRLLLDVGLWLTQQIKDHFTNVRKMMINMKYIDPTYMIRAIPSNASDNVYCTLLAQSAVHGAMAGYSGFTVGPVNSRHAYIPISQVTEVTNTVKLTDRMWARLLASTNQPSFLTGEGALQNVIDMETQEKIDNMKISSI

SEQ ID NO: 25770 - protein, 559 aa, Chlorobium tepidum TLS
MYLSRSAEWSALESHYQDISHQAMIDLFSTDPNRHERFSLSFNAIHLDYSKNRISARTMELLMDLVRRSGIEKKRRQMFEGEQINFTEHRSVLHTALRRPPGYTMTIDGNDVASEVSDVLDQMKAFCKKVISGEWKGYTGKRITDVVNIGIGGSDLGPFMVTEALKPFAHGKLKVHFVSNVDGSHLVETLRGLNPETTLFIIASKTFTTQETLANAVSARAWFLVKAGNRDHVAKHFVAVSTNREKVEEFGIDPDNMFRFWDWVGGRYSLWSAIGLSIALYLGFDRFRELLAGAHAMDEHFLNAPLEENMPMILAMLGIWYNNFFGAHSQAIIPYDQYLHRFPAYLQQLDMESNGKRVDRAGHEVDYATGPVIWGEPGTNAQHAFFQLLHQGTEIVPVDFIVSLKSQNPVGEHHDMLVANCFAQSEALMKGKSEAEARAELEAAGLSGGDLEKLLPHKLFPGNRPTNTIVLDELNPFNLGSLIALYEHKVFVQGVVWNINSFDQWGVELGKQLAKAILPEFDAVDPVETHDASTNALINRYRQFRNGLKFPKSNQLKMF

SEQ ID NO: 25771 - protein, 290 aa, Exiguobacterium sibiricum 255-15
MNICVVTGANSGMGMVTIQELLERGDRVIATVRSQKKATLLIQLLREHAVSDANLEVEIVQLDQLDSVRRFADVLFDRIGRIDRLILNAGIMVPPYHVTKDGFESQFQVNYLSHFYLIERLLPLIEQGHDPRVISISSLAGEGGMIRTDIELEAIAHVRKEQYNPMKSYRESKLLQMVHMRELAEQYGTLATFVSVHPGIVNTDLFYRGKYGKVLKTVLKPVAQVGYWTGKLYTPEYGAKTALYLATTDDVIDNGGYYADSAPRLSNPVVEDEAYRQQARALSKRWVGLD

SEQ ID NO: 25772 - protein, 760 aa, Corynebacterium glutamicum ATCC 13032
MSLERNTQKSSMGVRSMSARLARSLTGNRVRTNPVLDPLLSIHRQFHPRADVQVLERAYDTAERLHDGVIRKSGDPYITHPLAVATIAAEIGMDTTTLVAALLHDTVEDTDYSLDDLTRDFGEEVARLVDGVTKLDKVALGAAAEAETIRKMIVAMSQDPRVLVIKVADRLHNMRTMRFLPPEKQAKKARQTLEVIAPLAHRLGMASVKWELEDLSFAILYPKKYEEIVRLVADRAPSRDRYLKEIIDQVTGGLRENNIAAEVLGRPKHYWSIYQKMIVRGRDFDDIFDLVGIRILVDNVNNCYAAIGVVHSLFNALPGRFKDYISAPRFGVYQSLHTTVMGPGGKPLEVQARTHDMHYNAEFGIAAHWRYKETKGSHSGEQAEVDQMAWMRQLLDWQKEAADPNEFLDSLRYDLTSKQIFVFTPKGDVVNLPVNSTPVDFAYAVHTEVGHRCIGAKINGKLVALETKLKSGDRVEVFTSKDQNAGPSRGWQEFVVSPRAKAKIRQWFAKERREEYLEAGRDALAAVIQRGGLPMHRLFTASSMKTVATELHYPDVDALYTAIGSGSVSAQHVVNRLMAIFGDEEDAEDALVARTPFSELVNSRATTESSTGILVEGSPDVMAKLAKCCMPVPGDEIFGFVTRGGGVSVHRTDCTNVEKLKEEPERIVSVSWASEGQGSVFSATLQLEALDRAGLLFELTRVINEQKVSVTAMNSHCSEDRVATVRFTFAVSDTKQLGSLMTQLRNAEGVFDVYRVTSGG

SEQ ID NO: 25773 - protein, 432 aa, Flavobacteria bacterium BBFL7
MEHIVIIGNGIAGVTAARHIRKLSDKRITIISAESKFFFSRTALMYVYMGHMKFEHTQPYENDFWAKNRIELVHDYVHTVETDAKKVHLNSGRDIMYDKLILATGSISNKFGWPGQDLEGVQGLVSRQDLEQLEISAPNNKVCKRAVIIGGGLIGVELAEMMASRQIPVTFLIREKGFWSGVLPMPNADMISRHVKSHHIDLKEEEEMAEIIADDSGKVKAIITKKGQTIPCDFVGLCAGVRPRISFLKNSGIELQRGIMVNRHLETSVKDVYAIGDCAQQRDPVGERKPIEAVWYTGRMMGEALAQTICGNPTKWNPGHWFNSAKFFDIEYQTYGWVWSKPKQGHDHFHWLHEDDKRAVTIEYDISTRKFIGINTFGIRMKHEVFDLWLSQSKSIDEVIENLDKACFNPEFFNKPFEQIKRAFSSNQQIKS

SEQ ID NO: 25774 - protein, 393 aa, Staphylococcus aureus subsp. aureus Mu50
MQFDNIDSALMALKNGETIIVVDDENRENEGDLVAVTEWMNDNTINFMAKEARGLICAPVSKDIAQRLDLVQMVDDNSDIFGTQFTVSIDHVDTTTGISAYERTLTAKKLIDPSSEAKDFNRPGHLFPLVAQDKGVLARNGHTEAAVDLAKLTGAKPAGVICEIMNDDGTMAKGQDLQNFKEKHQLKMITIDDLIEYRKKLEPEIEFKAKVKMPTDFGTFDMYGFKATYTDEEIVVLTKGAIRQHENVRLHSACLTGDIFHSQRCDCGAQLESSMKYINEHGGMIIYLPQEGRGIGLLNKLRAYELIEQGYDTVTANLALGFDEDLRDYHIAAQILKYFNIEHINLLSNNPSKFEGLKQYGIDIAERIEVIVPETVHNHDYMVTKKIKMGHLI

SEQ ID NO: 25775 - protein, 93 aa, Triticum aestivum
GNVFARPGSFSPPPVELKEGPLDQFSHEMEPFLGKQGLPVCLNKGVVELVPDPVVCEKGKPLFPKAAPPLGVFGTKMGTFRLSLVSPWLSDAF

SEQ ID NO: 25776 - protein, 833 aa, Sphingomonas elodea
MEFLEATAILADASSAEAVRSAETRQHLVVIGNGMAGCRAVEELLARDGTGFRVTIFGAEPHVNYNRIMLSPVLAGEKTFQEIVINDSDWYAQHGIELVAGDPVVAIDRAACTVTAKSGRITGYDKLLIATGSDPFIIPVPGHDLPGVISFRDMADVNVMLAAASEGGDAVVIGGGLLGLEAAHGLTLRGMKVTVLHLMPTLMERQLDEAAGWLLKSALEARGQTILTGADTAAILGDGKVEGVQLKDGRILPAKLVVMAVGIRPSVKLAREAGLAVGRGIQVDDHMVTSDAKVLAVGECVEHDGQCYGLVAPLWDMCRSLADGLVARTNPYRGSVTSTKLKVAGLDVFSAGDFSGGEGCEDIVLRDAARGIYKRVVLKDDRVIGAVLFGDTSDGSWYFDLLKKGEDVAPIRDMLIYGQAFASGGGQPDPKAAVAALSDDAEICGCNGVSKGQVVATINGGACSLDAVRAGCKASASCGSCTGIVETLLALTLGEDGVQSGPKTMCKCTTYSHDEVRRAIVEGAMKSIPEVMQRLHWSTPDGCSSCRPALNYYLLCAWPGEYVDDQQSRFVNERLHANIQKDGTYSVVPRMWGGVTTPAELRAIADVVEKFNAPMVKVTGGQRLDIFGIRKEDLPAVWADLNAAGMVSGHAYAKALRTVKTCVGSEWCRFGTQDSTGLGIKLERGFWGSWMPHKFKMAVSGCPRNCAEATIKDFGVVCVDSGYELHVGGNGGIHVRATDLLVKVATEEEAMHYAAAFVQLYREEARYLERTAPWIERVGLASVKARVVEDEPGRDALAARFWHSQSFSQDDPWAERVAGADAGLHQPLLAAAE

SEQ ID NO: 25777 - protein, 230 aa, Arabidopsis thaliana
MNNTFVESSNISEYDIGEESDLFRAPDPILEEPILTVDPLSAALTMISCGEDTSQGLCELPDLGSLQSGQQLLDKAFYECEQDLMMKSAMESPFSDVLDIKNISVVTTINENQDMQKSVSSGNLSSMDWSHAQQETVMIQNFPDFDFGYGMRRAFSEGDIQKLGAGLVQSPLDRIIVSCTSEDRREKLSRYKNKKSRRNFGRKIKYACRKALADSQPRVRGRFAKTEERK

SEQ ID NO: 25778 - protein, 653 aa, Bacillus subtilis
ADSSYYDEDYRPQYHFTPEANWMNDPNGMVYYAGEYHLFYQYHPYGLQWGPMHWGHAVSKDLVTWEHLPVALYPDEKGTIFSGSAVVDKNNTSGFQTGKEKPLVAIYTQDREGHQVQSIAYSNDKGRTWTKYAGNPVIPNPGKKDFRDPKVFWYEKEKKWVMVLAAGDRILIYTSKNLKQWTYASEFGQDQGSHGGVWECPDLFELPVDGNPNQKKWVMQVSVGNGAVSGGSGMQYFVGDFDGTHFKNENPPNKVLWTDYGRDFYAAVSWSDIPSTDSRRLWLGWMSNWQYANDVPTSPWRSATSIPRELKLKAFTEGVRVVQTPVKELETIRGTSKKWKNLTISPASHNVLAGQSGDAYEINAEFKVSPGSAAEFGFKVRTGENQFTKVGYDRRNAKLFVDRSESGNDTFNPAFNTGKETAPLKPVNGKVKLRIFVDRSSVEVFGNDGKQVITDIILPDRSSKGLELYAANGGVKVKSLTIHPLKKVWGTTPFMSNMTGWTTVNGTWADTIEGKQGRSDGDSFILSSASGSDFTYESDITIKDGNGRGAGALMFRSDKDAKNGYLANVDAKHDLVKFFKFENGAASVIAEYKTPIDVNKKYHLKTEAEGDRFKIYLDDRLVIDAHDSVFSEGQFGLNVWDATAVFQNVTKES

SEQ ID NO: 25779 - protein, 567 aa, Zea mays
MAVRLLANKESRRPKGEIMKNRKHYMDMRFWVLMPWKFNECYALFVIDHGKKHVTFIDFTPTQDLYKHIHTKSYLILQAMTMWGNDRWMKFVRLLELFIFFLLIDPCPRRPRLCLRQQGQSEHEEIHVSSGGVLAYTDDDDCESRRPLLLRTPASAECYSVSAAVFPFLFPALGGLLYGYDIGATSGATISLKLSTFSGTTWYNLSSVQTGLVVSGSLYGALIGSVLAYTIADFLETAPSQIRGMLISLKEFFIVLGMLLGYIAGNLYVEVVSGWRYMYASSTPLCLIMGVGMCWLPSSPRWLLLCAIQGKGNLPETKENATRCLCRLRGQASPDLVSEQIDLILEELSYIDQEKQASFGEIFQGKCLKAMIIGCGLVFFQQVTGQPSVLYYAATIFQSAGFSGASDATRVSILLGLLKLIMTGVAVLVVDRLGRRPLLIGGVSGITVALFLLSSYYTLLKDASYVAVIALLLYVGCYQLSFGPIGWLMISEVFPLRLRGRGLGVAVLVNFASNALVTFAFSPLEDLIGTGALFSGFGVIAVASLAFIFWIVPETKGLTLEEIEASL

SEQ ID NO: 25780 - protein, 428 aa, Prosthecochloris aestuarii DSM 271
MAFELDPGLFEHEQDIGVSIKVVGVGGCGGNAVNNMIDRKISGVDFIAFNTDRQALLNSKAPVRIQIGKKATNGLGAGADPAKGRQAAEDDREIIAGQLRGADLVFITAGMGKGTGTGAAPVIASIARNMGILSVGVVTRPFNFEGRIKAGIADSGIAELGKYIDTLIVIENERILSIAEEGISATDAFNMANDVLYRAAKGIADIITRHGHVNVDFADVRSIMSGAGDAVMGSAAASGDRRALKAASDAITSPLLEGVSLKGSKGVLVNMTGDVTMRDMSDAMSYIEEQVGKDAKIINGYVEDRDASGEIRVTVIVTGFNRQHHDDEGDADHPYVVDMPGSKTLPQHSFVRQTASPGYHGQKPDDLRVPAYIRRKISIHDPLDLGSGKSHKPQNDESDEITMPSSRSSDDRIRKGSTDTPAYLRRRH

SEQ ID NO: 25781 - protein, 106 aa, Taraxacum officinale
ELPMATMLMKVSWAVVLLVVCMGLLTPETEALTCGQVVGAVAPCLGYLRNGGSPSRQCCNGVRSIRTSARTTADRKTVCNCLKSASSSYPWCWWELRRQSPREMWC

SEQ ID NO: 25782 - protein, 230 aa, Candida albicans SC5314
MPRSKRSKLVTLAQTEKKGKENKTRLFDEVRSALDTFKYIWVLQFDDIRTPVLQDVRNDWVGSKLILGKRKVLQKALGETIEEEYKDNLHQLSKLCEGLPGLLFTDESPETVEAYFKAYSKQDYSRAKSRAPIDFTIPAGIVYSRGGQISIEEDVPMSHSLEETLRNKLKVPTKIKAGKIILEEPYVVCNKGDVLDTRQALLLKQFGVAASEFKIPILGYYDGEVHKYDN

SEQ ID NO: 25783 - protein, 491 aa, Bacillus cereus ATCC 10987
MKNQDQALIFEVSKEGRIGYSLPKLDVEEVKLEDVFESDYIRVEDAELPEVSELDIMRHYTALSNRNHGVDSGFYPLGSCTMKYNPKINESVARFAGFANIHPLQDEKTVQGAMELMYDLQEHLIEITGMDTVTLQPAAGAHGEWTGLMLIRAYHEANGDFNRTKVIVPDSAHGTNPASATVAGFETITVKSNEHGLVDLEDLKRVVNEETAALMLTNPNTLGLFEENILEMAEIVHNAGGKLYYDGANLNAVLSQARPGDMGFDVVHLNLHKTFTGPHGGGGPGSGPVGVKADLIPYLPKPILEKTEDGYRFNYDRPEAIGRVKPFYGNFGINVRAYTYIRSMGPDGLRAVTEYAVLNANYMMRRLAPFYDLPFDRHCKHEFVLSGRRQKKLGVRTLDIAKRLLDFGYHPPTIYFPLNVEECIMIEPTETESKETLDGFIDKMIQIAKEVEENPEVVQEAPHTTVIKRLDETMAARKPVLRYEKPAPVQV

SEQ ID NO: 25784 - protein, 118 aa, Taraxacum officinale
ECKERATPEQVADYTLKLLHRRIPPAVPGIMFLSGGQSEVEATLNLNAMNQSPNPWHVSFSYARALQNTCLKTWGGRPENVKAAQDALLQRASSNSLAQLGKYTGQGESEEAKKGMFV

SEQ ID NO: 25785 - protein, 315 aa, Capsicum annuum
MAAEISISASSRAICLQRNPFPAPKYFATAPPLLFFSPLTCNLDAILRSRRKPRLAACFVLKDDKLYTAQSGKQSDTEAIGDEIEVETNEEKSLAVRLAEKFARKKSERFTYLVAAVMSSLGITSMAVISVYYRFSWQMEGGEMPFSEMFCTFALAFGAAIGMEYWARWAHRALWHASLWHMHESHHRPREGPFELNDIFAIINAVPAIAFFSFGFNHKGLIPGICFGAGLGITVFGMAYMFVHDGLVHKRFPVGPIAKVPYFQRVAAAHQLHHSDKFDGVPYGLFLGPKELEEVGVIEELEKEVNRRIKSLKRL

SEQ ID NO: 25786 - protein, 577 aa, Aspergillus oryzae
MSKHLSRFSHHPRAASGPLECPYEGRDIITSCQFNKGSAFSEEERNVFKLHGLLPPNIQTLEEQVQRAFQQYKSRPDALAKNTFMASMKAQNEVLYYKLIQTHLKEMFSVIYTPTEGDAIQNYSRLFRRPEGCFLNIKDQDRIEECLCNFGRGIDVDYIVVSDGEEILGIGDQGVGSILISVAKLVLATLCAGIHPSRQLPVVLDCGTDNKDLLNDELYLGLRQPRVRGDEYDRFVEKFVTTARKMFPKAYIHFEDFGLHNASRLLNQYRPHIPCFNDDIQGTGCVTLAALMAAFHVSNIGLADVRVVVFGSGSAGTGIAKQVADTIATDTGRTKQEASAQIWCLDKPGILLKSLGDQLTAAQAPFARDDNEWPKEKGTDLLSVVKEVKPHVLIGTSTKPKAFTENIIREMAKHVEHPIVFPLSNPTRLHEASPEDINHWTEGRALMATGSPFPPVERNGVEYEVAECNNSTCFPGIGLGAVLSRTQILSDKMLVAAARALASQSPALQDPNRPLLPDVENVREISVHIARAIIETAIEEGYAQEKDIPSHEEELEEWIRVQMWEPIYRPLVKAGEK

SEQ ID NO: 25787 - protein, 337 aa, Microdochium nivale
MVVKVGINGFGRIGRIVFRNAIEHDDIEIVAVNDPFIETKYAEYMLKYDSTHGNFKGTIEVASDGLVVNGKKVQFFTERDPSAIPWGKAGADYVVESTGVFTTIDKAGAHLKGGAKKVIISAPSADAPMYVMGVNNETYDGKADVISNASCTTNCLAPLAKVIHDKFTIIEGLMTTVHSYTATQKTVDGPSAKDWRGGRTAAQNIIPSSTGAAKAVGKVIPDLNGKLTGMSMRVPTANVSVVDLTVRIEKGASYEQIKEAIKEAANGPLKGVLAYTEDEIVSSDMIGNPHSSIFDAKAGISLNDNFVKLVSWYDNEWGYSRRVLDLLAYIAKVDAGK

SEQ ID NO: 25788 - protein, 524 aa, Caulobacter crescentus CB15
MTSVPAGAISKRDNVVVFDTTMRDGEQSPGASMSLEEKLELAKILEEMGVDVIEAGFPIASNGDFEAVRQIAELITESTVCGLARAAAGDIDRCAEAVRRAKRGRIHTFISTSPVHMKYKLQMEPDAVLEAITRSVSHARNLVGDVEWSAEDATRTERDFLKRCVEAAIKAGATTINLPDTVGYSYPSEYGELFRDVITSVPGADKAIFSAHCHNDLGLAVANSIAAIEGGARQVEVAINGIGERAGNAALEEIVMALRVRGDHLPYGTSVDPVHITRASRYVSAITGFPVQFNKAIVGKNAFAHESGIHQDGMLKNAETYEIMKPEDVGQGATNLVMGKHSGRHAFREKLKALGYELGQNALNDAFGRFKELADKKKHVFDDDIVALVDDALARGSEKIRVSRLRVVAGTDGQSAELTLDIDGVASTAEATGDGPVDAVFNAIHKIVPHSAALRLFQVHAVTEGTDAQAQVSVRLEEDGRIATGAAADTDTLTASAKAYVNALNNLFARKEKSRPEAAIASGF

SEQ ID NO: 25789 - protein, 319 aa, Bacillus clausii KSM-K16
MKRIGVLTSGGDSPGMNAAIRAVVRKAIFHGLEVYGISYGYQGLINGDIKKMELGSVGDIIHRGGTMLYTARCEEFKTLEGQQKGIEQLKKFGIEGLVVIGGDGSYRGAQQLTKHGFPTIGVPGTIDNDIPGTDFTIGFDTALNTVIDAIDKIRDTATSHDRTYVIEVMGRHAGDLALWAGLADGAETIVIPEAEHNMEQILATIKRGQERGKKHSIIVVAEGVGSGIEFGDRISKEMNMETRVTVLGHIQRGGSPTGADRVLASRLGAKAVDLLLEGKAGMTVGIQKNELVYHPIDEILDRPHTIDQEMYKLSQELSI

SEQ ID NO: 25790 - protein, 529 aa, Arabidopsis thaliana
MGHRHSKSKSSDPPPSSSSSSSGNVVHHVKPAGERRGSSGSGTVGSSGSGTGGSRSTTSTQQNGRILGRPMEEVRRTYEFGRELGRGQFGVTYLVTHKETKQQVACKSIPTRRLVHKDDIEDVRREVQIMHHLSGHRNIVDLKGAYEDRHSVNLIMELCEGGELFDRIISKGLYSERAAADLCRQMVMVVHSCHSMGVMHRDLKPENFLFLSKDENSPLKATDFGLSVFFKPGDKFKDLVGSAYYVAPEVLKRNYGPEADIWSAGVILYILLSGVPPFWGENETGIFDAILQGQLDFSADPWPALSDGAKDLVREMLKYDPKDRLTAAEVLNHPWIREDGEASDKPLDNAVLSRMKQFRAMNKLKKMALKVIAENLSEEEIIGLKEMFKSLDTDNNGIVTLEELRTGLPKLGSKISEAEIRQLMEAADMDGDGSIDYLEFISATMHMNRIEREDHLYTAFQFFDNDNSGYITMEELELAMKKYNMGDDKSIKEIIAEVDTDRDGKINYEEFVAMMKKGNPELVPNRRRM

SEQ ID NO: 25791 - protein, 318 aa, Kluyveromyces lactis NRRL Y-1140
MLRVAGRRFFSREAVPYDKTIKNLLLNHDTKVIFQGFTGKQATFHAKISQEYGTNIVGGTNPKKAGQVHLGQPVFASVAEAVKETGATATGIFVPPSIAAPAIKEAIEAQIPLAVAITEGIPQHDMLYIAEMLKSQDKTRLVGPNCPGIISPSARCRIGIQPTSIFKPGKIGIVSKSGTLTYEAVQQTTITDLGQSLVIGIGGDAFPGTDFIDALTLFLNDPQTEGIILLGEIGGTAEIEAAEYLKSYNLTREKPLPVASFIAGTVAGQMKGVRMGHSGAIVEGSGTDAESKKKALRSANVAVVESPGHLGKALLDQF

SEQ ID NO: 25792 - protein, 333 aa, Paracoccus denitrificans
MAVKVAINGFGRIGRNVLRAIIESGRNDIEVVAINDLGPVETNAHLLRYDSVHGRFPAEVKVTDDSIDVGRGPIKVTAIRNPAELPWGDIDVIMECTGIFASKEKVQPHLSTGAKRVLISAPGDNADKTIVYGVNHDTLTKDDIVVSNASCTTNCLSPVAKVLNDSIGIARGFMTTIHSYTGDQPTLDTMHKDLYRARAAALSMIPTSTGAAKAVGLVLPELKGRLDGVAIRVPTPNVSVVDLVFEAARDTSVEEINEAIRTAANGSLKGILGYTDEPLVSSDFNHDSHSSVFHMDQTKVMEGRLCRILTWYDNEWGFSNRMSDTAVAMGKLI

SEQ ID NO: 25793 - protein, 455 aa, Burkholderia sp. 383
MKNLQRHLSARHIRFLALGSAIGTGLFYGSASAIQLAGPAVILAYILGGAAVYMVMRALGEMAVRDPVAGSFGHYATENLGPFAGFVTGWTYTLEMVIVAIADITAFGIYMGFWFPDVPQWIWVLGVVAIICGLNLCHVKVFGELEFWLSIIKVGAIVAMIGGGVAILLTGMHFGHSADVPTFANLWNHGGFLPNGVGGLIASLSVVIFAYGGIEVIGMSAGEAKDPERVIPRAINAVPARILLFYVLTMVVLMSISPWTGVGNEGSPFVQIFSALGVKSAATILNLVVISAAISAINSDIFGAGRMMFGMARQGQAPRVLMTTSRHGVPWVTVVVMAAALLVGVLLNYLMPKDVFLMVAAIATFATVWVWLMILLSQVAMRRRLSSTEVAALKFKVPLWPVAPALTIAFMGFVIVMLGWFEDTRVALYVGAAWLALLALVFYARIRPKFAPASR

SEQ ID NO: 25794 - protein, 481 aa, Clostridium acetobutylicum ATCC 824
MSELSFRDLGLSEEILKSIEKLGYKKPSSIQEKVIPVILNGKDIIAKAKTGSGKTAAFAIPVCEKIELEEREPQVLVLAPTRELAYQIKEDFLNIGRFKRLRCISIFGKEPISNQIRELKQRVHIVVGTPGRVLDHIERGTLNLEKVKYFIIDEADEMLNMGFIEQVESILIKMPKNKNTFLFSATLPEEIVMLSKKYMKNFENIEVQNEGKTKGGIHQVYYEVESREKFDLLKKVIYKEVPGSSIIFCRTKNNVEDVLVKMKNMKFSCMAIHGGMLQENRIAVMNAFKRGEFTFLIATDVAARGIDVENVTHVINYDIPMEKESYIHRIGRTGRMGNKGIAITFVTSKEERFLKEIEEQFSLEIIKEEPPTREEVKKGQEVFKTASKQLNKTKANKSEKLNKDITKIYLSAGKKKKIRPGDIAGTISSIDGVSPEDIGIIDIHDNFSYVEILSGKGDIVLNAIEDKTIKGKKVRAEKAQK

SEQ ID NO: 25795 - protein, 193 aa, Corynebacterium efficiens YS-314
MGVADSMVRETRTGVLKWFYAGVMTDTHGTFIPTADLVDIIGDDVRSCDTQFRNLGGRTDFHGTITTVKCFQDNALLKSILGEDNPGGVLVIDGDASLHTALVGDIIAGLGRDHGWSGVVVNGAIRDSAVIGEMEFGCKALGTNPRKSSKTGAGERDVVVSFGGVDFTPGHYLYADSDGIVVTENPVKAPASN

SEQ ID NO: 25796 - protein, 394 aa, Onion yellows phytoplasma OY-M
MANEKFIRNKPHLNVGTIGHVDHGKTTLTAAITQVLSTRGLAKSRAYDQIDNAPEERERGITIKTSHVEYETEKRHYAHVDCPGHADYVKNMITGAAQMDAAILVVSGADSVMPQTREHILLARQVGVPKIVVFLNKCDLSPDEQILELVEMEVRELLSQYDFPGDDIPVIRGSALKALEGDAHYVAQVNELIETLDTYIEDPVREVDKPFLMPVEDVFTITGRGTVVTGRVERGQVKAGDEVEIVGLKETRKTIVTAVEMFKKDLDFAQAGDNVGALLRGINREDVQRGQVLAKPGSVKPHSKFVAQVYVLTKEEGGRHTAFFSQYRPQFYFRTTDITGVVELQGDVKMVMPGDNAELVVTLNNPIAIEEGTKFSIREGGKTVGAGSVSKLLN

SEQ ID NO: 25797 - protein, 600 aa, Alvinella pompejana epibiont 6C6
MERLFTKNTQAIFWNNNKTAIQRMLDYDYVIKRDKPSVAGIVAPTSSNKFEKFFWGADEIMVPIYRNTADAKKAQPQADVLLNFASFRTAYNVTNEALDIGGFRVIMITAEGIPERLARAMNQKARDLGVTVIGPATVGAIAPGAFKIANIGGTIQNIIKSKLHRAGSCGLVTRSGGLFNELSNIISLNADGIAEGVAIGGDRFVGSTFIDNLLRMEKNPDVKYMVLLGEVGGIEEYKVIEAVKSGEITKPIIAWCIGTIAKYYDSGVQFGHAGASANSDMETAEAKNRAMAEAGIHVPSSFNDLPATIKEVYESLNLEPIPEPEMNKIPSYRRPKQFICTISDDRGEEATYAGYPISSVALPSTGKSIGDVISLLWFKKVYPKWATDFIETVLKTVADHGPAVSGAHNAKVTARAGKSVVESLVTGLLTIGPRFGGAIDGAAEYFKYADDNNLSPKEFLSYMKKKGIPIPGIGHRIKSLKNPDLRVKGLMDYAKENFPATPLLDYARTVEALTTSKKENLILNVDGTIGILMVDMWRALGYSEKEIDEFISSGTLNAFFIVGRSIGFIGHVLDEKRLAMPMYRTPWDDILYQVDEAEEL

SEQ ID NO: 25798 - protein, 411 aa, Xanthomonas campestris pv. campestris str. ATCC 33913
MSRRVVVTGMGMVSPLGNDLATSWDGIIHGRSGIGPIRQIDASQFTTRIAGEIKNFDPTQFVSAKDVKKMDSFIHYGVGASFMALDDSGLEINESNAERVGAILGSGIGGLLGIEEQTIKLHEGGARKISPFYVPSTIINMLPGQVSLIKGLKGPTFSAVSACATSNHSIGTAMRMIQHGDADVMLAGGAERGSSPSSVGGFCAMKAMSTRNDDPTAASRPWDKQRDGFVLGDGAGVLVLEEYEHAKARGARIYAELVGFGASSDAFHMTAPSEDGEGAARSMAAAMRDAKLNPEQIGYLNAHGTSTPLGDLAETMAMKRALGDHAYKTMVSSTKSMTGHLLGAAGGVEAIFSVMALHTGIIPPTINLEEPSEGCDLDYVPNVAREVQVDAVMSNGFGFGGTNGTLVFKRI

SEQ ID NO: 25799 - protein, 590 aa, Cryptococcus neoformans var. neoformans B-3501A
MFFKKNSDAPKKPRHAPDRDDVPSLEDLGVELHPDTARYVADSQALADAIGGNGLKDIFSSGLVLIAAFSTCMGGLLFGFDQGILSIVLTMSQFLGQFPDVDANVSSSAAFNKGIMTALLELGAFIGALQAGFVADRYSRKKAIALGSVWFVIGAILQTTSYSFAQLVIGRFVGGLGVGLLSAVAPMYISEISPPNIRGSLLAMEAATIVSGIVIMFYITYGSRYIPGDWSFRLPFLVQVAPCILLTIGLWKLPYSPRWLAQVGRDEDSLHALMRLRGFPVTDPRLQAEWITIRAEAIQNREVIVKAHPSLQGKDFMSELKLEIASWVDMFKPKLIKRTIIGPILMMFQQFSGINALIYYSPTLFEQLGLDYEMQLDMSGVLNIIQLVACVLAFFVIDRVGRRPLLLFGSTANTICHVIVAVVMAKFSHDWVRYSKEAWVAVAFIFIYIFTYGVGWAPVPWAMPAEVHTSSRRAKGVAITTCANWLGNFIIGLITPPMLQNIKYGTFLFFGAFTFLSGLYVWFFCPEPMGKTLEQMDQIFHSNTAHEDNLAKSDIQAVILNSPVAGPLSGTASAEKINDKDTQQEWVETV

SEQ ID NO: 25800 - protein, 486 aa, Exiguobacterium sibiricum 255-15
MNQWTREARYRPLSDLAPEVYQLMKEEVRNSPWRFSFHIQPPTGLLNDPNGFVYHNGTYHLFYQWFPLGPVHGLKYWYHMTSKDLVHWFDEGAALIPNDDPDSHGAYSGSGFVKNDQVHVMYTGNKRDAEWNRHTSQIVGHLRSDGRIEKHLPPAIPEVPTGYTEHFRDPKVFQHHDTWYCIIGAQRDDLSGCTVMYQSLDAENWTFMGELNTGYDQFGYMWECPDYFELDGKGFLLFSPQGISPENDRYQNIFQSGYLMGQPLALPELTFQHEDFVELDFGFDFYAPQTTLAADGRRILVGWMGLPDISYPSDRFNWAHGLTLPRELTLENQQLRQKPVRELISLRKETLYKQELELVDQLLPAQAEIFELELSQLQLSSDQLEVKLRVSDQEQTVLRYDQQTRRFTMDRASSGAEVPALDYGTTRSVTLTEPLHTLRVFVDRSSVEVFLNDGEAVASARIFPKTTSQGIVLTGDATAHLAIYSL

SEQ ID NO: 25801 - protein, 274 aa, Silicibacter pomeroyi DSS-3
MTQNEIDTGSELLMCGLADGVATLTLNNPERRNALSGDLPQALGRMLALLDDDPRARVLVLTGAGGAFCAGGDITSMGAALGDGAQPDADAMTRRLRQAQDDIALRLARLSKPSIAALPGAAAGAGMSLALACDLRVSGHSGYLLPAFGGIGLSGDFGGSWLLARLIGPARAKEVYFTNRRICADEALALGLVNRVVADADVLGEAQALAAQIAGFAPMALRYMKENIDRAGDVDLRQALDIEADRMIRTLLSDDHREGARAFAEKRRPRFSGA

SEQ ID NO: 25802 - protein, 733 aa, Oryza sativa
MAIIIPGSFHRSTALRVISVLFVLAVVVPDAGGRHQHHRHDCLPFTCGRLSNVSSPFRRRGDPSGCGFTSYELTCTDDKATIQIYEGTYSVTGINYSDSTFWVVDANISDSPNTLPQRIVPPYPTTTLNTGCHTIHIELEPASSRWSAFVNCSQEINNNEKYRPVACLNNTSRSFVYVLIGSIYSCYIDNLEPSCGHLAITPLHGNDTRVLEENPSCEDVVKIMRGGFAVRFPYTIDAAYSFKECRAETFRHFREEPASSAGIKYTMADTATFDIRYMACVIRVARLPAAVKLFVLLTIIAMWLLKWIADDPYCYILVLDCLAFYPQVSCTLAAFTNEICSGPTKSNSRYRYFTLGMTGIVRSNDRKQFGAVKYRYLEVGGGGGAPLVVMTFLAHKCWKKRITIDAVDKFLRMQLMLGPTRSLQGSEKLGQGGYGSVYQGVLLPGNIHVAVKILANYSCDGEEFINEVSTIGSIHHVNVVSLVGFCAEETRRALVYEYMPNGSLEKYIFSPEKSFSWEKLNEIALGIARGINYLHRGCEMQILHFDIKPHNILLDSKFIPKVADFGLAKLYPQDNSFVPVSAARGTIGYIAPEMISWSFGVISSKSDVYSFGMLLLEMVGGRRNSKQDMSSSSQAYYPSWVYNQLAQQELGEVVTSAFNMHELEKKLCIVGLHCIQMNSYDRPTMSEVIEMLEGDVDGLRLPSRPFFCDDEPMPHLVDVGFDRIDLAQSGTIN

SEQ ID NO: 25803 - protein, 332 aa, Serratia entomophila
MSQNTLKVNELHDDADFDENGTEAESFDEKALVEEEASENDLAEEELLSQGVTQRVLDATQLYLGEIGYSPLLTAEEEVYFARRALRGDVPSRRRMIESNLRLVVKIARRYSNRGLALLDLIEEGNLGLIRAVEKFDPERGFRFSTYATWWIRQTIERAIMNQTRTIRLPIHIVKELNVYLRTARELSHKLDHEPSAEEIAEQLDKPVHDVSRMLRLNERMPSVDTPLGGDSEKALLDILADEKDNGPEDTTQDDDMKQSIVKWLFELNAKQREVLARRFGLLGYEAATLEDVGREIVLTRERVRQIQVEGLRRLREILQMQGLSIEALFRE

SEQ ID NO: 25804 - protein, 498 aa, Asparagus officinalis
MPLILVILLLLPILLLVIRREKSTSSKLPPCPPKLPLIGNLHQLGSLPHQSLHALSVKYGPLMLLKLGEIPTLIVSSSDMAREIMRTHDHIFASRPSLLTSDILLNGATDVVFAPYGEHWRQMRKLCVNHLLSAKMVQSFRLMREEEVSSMLTRISGLVNMSEVLNLFTSKILFNAISGKFFVEEEGRINVFCKLIRENIAILAQLSVSDFFPSLGWLDLVFGVGARARATAKKWDDVLDEVIEDHVKRSNETGDADDQEERADFVSVLMALQEDDNTGFTLNRNIIKAILQDMIAAGTETSFLVLDWGMTELVRNPGTMKKLKDEVRSVAGSETVVREEDISKMFYLKAVIKEILRLHPPVPLLIPRESMDHCNVQQYEVPSKTRVLINAWSMGRDPKVWEDPEEFRPERFLDSDIDFRGQCFEFVPFGAGRRICPGMHFAAANLELALANLMYRFDWELPDGMKSEDLDMGDSPGLTTRRRQNLHLVARPFQRVKR

SEQ ID NO: 25805 - protein, 280 aa, Pseudomonas syringae pv. tomato str. DC3000
MSEDRSSNGQKSWLGKLTQAFVHEPKNRQELLELLREAHQNKLLDSEALAIVEGAIQVADLQVRDIMVPRSQMISIKATQTPREFLPAVIDAAHSRYPVIGESHDDVLGVLLAKDLLPLILKADGDSDDVKKLLRPATFVPESKRLNVLLREFRANHNHMAIVIDEYGGVAGLVTIEDVLEQIVGDIEDEHDVEEDSYIKPLPSGDFLVKALTPIENFNEFFDSVFSDDEFDTVGGLVMNAFGHLPKRNEITEIGAYRFRILSADSRRIHLLRVSPISRP

SEQ ID NO: 25806 - protein, 510 aa, Sphingomonas elodea
MIKHALSVTRDGDFAQWYQTVISEADMAEDSGVRGCMVIRPWGYGIWERIQRLLDDRIKATGHENCYFPLFIPLSYFEKEAEHVDGFAKEMAVVTHHRLIQKDGRLVPDPEAKLEEPLVVRPTSETVIGAAMSRWVQSWRDLPVLINQWANVVRWEMRTRMFLRTAEFLWQEGHTAHATVEEAQEETRKMLEVYRDFAETCLAMPVVAGEKPENERFPGAVSTFSIEAMMQDGKALQAGTSHFLGTTFSSAQDIKFQNSEGQFELAQTTSWGVSTRMIGGLIMVHGDDDGLRVPPMVAPWQIVIVPMLRDQPEDAATIDYCKSLQAELAKLTALGEPVRALLDLKAVKAQTKRWGWVKKGAPIVIEVGGRDVAGGNVSVIQRNKLYREDGKLDSRIMPRGDFVAEAAAILESIQQGLYLDARERLDSNIRRDVTDFDGLAAMFADSVKFPGWAEVSWAKPTGAELDAVVERLKALKLTFRNVPGTAAPAEGTCLFTGKPAVERILVARAY

SEQ ID NO: 25807 - protein, 214 aa, Mannheimia succiniciproducens MBEL55E
MNQSLLASFGSSEERVIAALDTFKQGNGVLVLDDENRENEGDLIFPAETITTEQMAKLIRYGSGIVCLCITDELCQKLELPPMVAANTSVNKTAFTVTIEAAEGVSTGVSAADRVTTVKVAVADNAKPSDLHHPGHVFPLRAAENGVLARPGHTEAAVDLARLCGYKPAGVICEITNDDGTMARTPELVAFAQKFGYAVVTIEDLIAYRTKYNK

SEQ ID NO: 25808 - protein, 151 aa, Triticum aestivum
  misc_feature (79)..(79): Xaa can be any naturally occurring amino acid
  misc_feature (103)..(103): Xaa can be any naturally occurring amino acid
  misc_feature (108)..(108): Xaa can be any naturally occurring amino acid
  misc_feature (125)..(125): Xaa can be any naturally occurring amino acid
MLPAMAGLAWSPRCKSSLSPSPAEFNTITTANSIGMARGAAIPLVLVAMVATMLLVATDAAISCGQVTSALSPCISYAXAGNGANPTAACCSGVRSLAGAARXTADKXAACKCIKSAAGGLNAGXAAGIPSKCGVSVPYAISANVDCSKIR

SEQ ID NO: 25809 - protein, 499 aa, Zea mays
MEGAGKDGNPLRNYRIGKTLGIGSFGKVKIAEHISTGHKVAIKILNRRKIRGMEMEEKVKREIKILRLFMHPHIIRLYEVIDTPADIYVVMEYVKCGELFDYIVEKGRLQEEEARRFFQQIISGVEYCHRNMVVHRDLKPENLLLDSKCNVKIADFGLSNVMRDGHFLKTSCGSPNYAAPEVISGKLYAGPEVDVWSCGVILYALLCGTLPFDDENIPNLFKKIKGGIYTLPSHLSGAARDLIPRMLVVDPMKRITIREIREHDWFKILLPRYLTVPPPDSAQQVKKVDEETLREVLGMGYDKNLLVESIQKRLQNEATVAYYLLLDNRLRTTSGYLGAECQEAMDSSFSNIASYETPSSARGNRQQIFMESPVGLRPHLPAERKWALGLQSRAHPKEIMSEVLKALQELNVYWKKIGHYNMKCRWSPGFPAQIHNNHNFSAGSIETDSLSERLSLIKFEIQLYKTRDEKYLLDLQRVSGPQLLFLDLCAAFLTQLRVL

SEQ ID NO: 25810 - protein, 447 aa, Bacillus cereus ATCC 10987
MLHRYLPMTEEDKKEMLQTIGVQTIDELFSDIPESVRFKGDLKIKEAKSESELLKELSQMASKNANLKEYASFLGAGVYDHYAPVIVDHVISRSEFYTAYTPYQPEISQGELQAIFEFQTMICELTGMDVANSSMYDGGTALAEAAMLAAGHTRKKKILVSSAVHPESRAVLETYAKGQHLEVVEINHKDGVTDLDVLQSEVDDTVACVIVQYPNFFGQVEKLADIEKIVHQQKSLFIVSSNPLSLGALTPPGKFGADIVIGDAQPFGIPTQFGGPHCGYFATTKAFMRKIPGRLVGQTVDSDGKRGFVLTLQAREQHIRRDKATSNICSNQALNALAASVAMTALGKQGVKEMARQNISKAQYAKRQFEAKGFTVTFAGPFFNEFVVDCKRPVKEVNDALLQKNIIGGYDLGRDYKEHENHMLVAVTELRTKEEIDTLVNEMGAIQ

SEQ ID NO: 25811 - protein, 477 aa, Oryza sativa
MDPTAPNSGDANGGAAADATAPSNTTVTLPPLTLRDVPLLPSAAAATDTIPNPISRHPYFHPPATFYISPGDVSLRHAFFDLASASPSPLVAYRRAGPRAGVAVDPARARAAVVTCGGLCPGLNTVLRELVVGLRELYGVRDVFGVAAGYRGFYGPDADHARLDLAAVDDWHKKGGTVLKTTRGGFDLNKIVDGIVARGYTQVYAIGGDGTMRGAVAIFNEFKRRGLNISITGIPKTVDNDIGIIDRSFGFQTAVEIAQQAIDAAHVEAVSAVNGIGLVKLMGRSTGHIALHATLSSRDVDCCLIPEVDFYLEGKGGLFEFLYERIKQKGHAVVVVAEGAGQELIPRTDDQKREQDESGNIVFLDVGPWLKSELGKWWKREHPSELFTVKYIDPTYMIRAVPANATDNLYCTLLAHSAIHGIMAGYTGFVPGPINGNYSYIPLEDVAVAKNPVDVNDHKWAWVRSVTNQPDFMKPKY

SEQ ID NO: 25812 - protein, 325 aa, Lilium longiflorum
GINGFGRIGRLVARVALQSDDIELVAVNDPFITTDYMTYMFKYDTVHGQWKHHEIKVKDSKTLLFGEKPVTIFGVRNPEEIPWGEAGADFVVESTGVFTDKDKAAAHLKGGAKKVIISAPSKDAPMFVMGVNHTEYKSDIHIVSNASCTTNCLAPLAKVINDKFGIVEGLMTTVHAITATQKTVDGPSSKDWRGGRAASFNIIPSSTGAAKAVGKVLPALNGKLTGMAFRVPTVDVSVVDLTVRLEKAATYDQIKAAIKEESEGGLKGILGYIDEDLVSTDFVGDSRSSIFGAKAGIALNDNFVKLVAWYDNEWGYSTRVVDLLR

SEQ ID NO: 25813 - protein, 520 aa, Gibberella zeae PH-1
MPSTSIYKSVIYPGNHEKLSSPTDTQNFIDNKLVSSKTTKWIDVHDPATNNIITRVPESTKDELEEAVRSAKAAFPGWKRTSIIKRQQIMFKLTHLIREHMDNLATSIVTEQGKTFADAKGDVLRGLQVCETACGITTQLTGEVLEVAKDMETRSYRQPLGITAAICPFNFPAMIPLWSLPLATVTGNCMIVKPSERDPGAAMMIAELCREAGFPPGVVNVVHGSKDTVNFLLDEPEIQAISFVGSNKAGEYIYQRGSANGKRVQANLGAKNHALLSLDANKEHALDSIAGAAFGAAGQRCMALSVLITLGDAKQWVDDLVKKAKNHVAGSGFDSKSDFGPLITPQARDRCEALITSAEKEGAKILLDGRGWKPEGFPDGNWVGPTVIAGVTPEMECYREEIFGPVLLCMEADTLQSGINIINSNAWGNGAVIFTNNGAKASLFQQEIDAGQVGINVPIPVPLPMFSFTGNKRSVAGTGLANFYGKDGLRFYTQWKTVTSLWKADDASTGEKLTSMPTSS

SEQ ID NO: 25814 - protein, 319 aa, Brevibacillus choshinensis
MSEQKIYDVIIAGAGPAGMTAAVYTSRANMSTLMLERGIPGGQMANTEEIENYPGFTTILGPDLSTKMFEHAQAFGAEYAYGEIKEIRDEAPYKRVISGDKEYLAKSVIVATGAEHRLLGVPGEKELSGRGVSYCAVCDGAFFRNKELVVVGGGDSAVEEAVFLTRFASKVTIVHRRDQFRAQKILQKRAFENEKIEVIWDTAVKEIRGEGKVQSVLLENTKTGEQREFSTDGVFIYVGMDPLTESVRSLGITNEAGYVLTDEKMYTKVKGVFAAGDVREKMLRQVVTATGDGSIAAQSAQHFVEELNEALKEQNVTIS

SEQ ID NO: 25815 - protein, 549 aa, Oceanobacter sp. RED65
MNMAQVNVTVPDLGGIEEVEVIEISVGKGDSVDADDSIVVLESDKATMEVPAPSAGTIAEISVSVGDKVSTGSQVAVMDSDSADAGEKNPSPEQKDADEPKPQQVDQQAQTESKQESSSSSAEPQEIEVRVPDLGGIDEVEVIEIPVSKGDQLQQDDSILVLESDKATMEVPAPQEGELVSIEVKVGDKVSQDTLVAKMKVVGSSGSPTDSSSKAKTQEPAEKTSSPSQATQKSAPAKASPEPQQTQTTSGKVHAGPAVRKLAREFGVDLTDVSATGPKGRILKEDVQAFVKQRVKQPAVASGGPMGVVGSNEDFSKFGPITEQPLNKIKQATARNMVKSWSEIPQVTQFDQADITELEAYRKGKMQSMLPEGVRVSPLAFIARACVKALQAYPTFNSSLKGQGESLVLKQYYNIGIAVDTPEGLLVPVIKDADKKGIVELAQDSSELAKKARDKKLPMDAMQGGCFTISSLGGIGGTSFTPIVTAPQVAILGVSKAKMEPVWNGEEFEPRLMLPLSLSYDHRVIDGAEAARFTRYLCELLTDVRHLLL

SEQ ID NO: 25816 - protein, 318 aa, Xanthomonas campestris pv. campestris
MNTTSDTALLVVNLGTPESPTVPAVRRYLAEFLSDRRVVAIPPLFWKPLLYGVILPIRGPKSAEKYAKVWLPDGSPLAVYTRRLTEGLQQVMPDWHVTWAMRYGAPALRKALDGLRARGIKRIVVLPLYPQYSTTTTASIQDVVDAWRPSAPEIAVEVIQDYCEDAGWVAAIADSIRTHWQVHGRSEKLMFSFHGLPQRVANAGDPYPQQCERSAQAIVTALGLGPDAWQMGYQSRFGAERWLQPYAEPTLWALAEGGVRSFDLVCPGFATDCLETLEEVALGFAETLAERGATLSYIPCLNDSTTHAQALAAVARRA

SEQ ID NO: 25817 - protein, 374 aa, Chlamydomonas reinhardtii
MAAMMQKSAFTGSAVSSKSGVRAKAARAVVDVRAEKKIRVAINGFGRIGRNFLRCWHGRQNTLLDVVAINDSGGVKQASHLLKYDSTLGTFAADVKIVDDSHISVDGKQIKIVSSRDPLQLPWKEMNIDLVIEGTGVFIDKVGAGKHIQAGASKVLITAPAKDKDIPTFVVGVNEGDYKHEYPIISNASCTTNCLAPFVKVLEQKFGIVKGTMTTTHSYTGDQRLLDASHRDLRRARAAALNIVPTTTGAAKAVSLVLPSLKGKLNGIALRVPTPTVSVVDLVVQVEKKTFAEEVNAAFREAANGPMKGVLHVEDAPLVSIDFKCTDQSTSIDASLTMVMGDDMVKVVAWYDNEWGYSQRVVDLAEVTAKKWVA

SEQ ID NO: 25818 - protein, 466 aa, Arabidopsis thaliana
MQATALSSGFNPLTKRKDHRFPRSCSQRNSLSLIQCDIKERSFGESMTITNRGLSFKTNVFEQARSVTGDCSYDETSAKARSHVVAEDKIGVLLLNLGGPETLNDVQPFLYNLFADPDIIRLPRPFQFLQGTIAKFISVVRAPKSKEGYAAIGGGSPLRKITDEQADAIKMSLQAKNIAANVYVGMRYWYPFTEEAVQQIKKDKITRLVVLPLYPQYSISTTGSSIRVLQDLFRKDPYLAGVPVAIIKSWYQRRGYVNSMADLIEKELQTFSDPKEVMIFFSAHGVPVSYVENAGDPYQKQMEECIDLIMEELKARGVLNDHKLAYQSRVGPVQWLKPYTDEVLVDLGKSGVKSLLAVPVSFVSEHIETLEEIDMEYRELALESGVENWGRVPALGLTPSFITDLADAVIESLPSAEAMSNPNAVVDSEDSESSDAFSYIVKMFFGSILAFVLLLSPKMFHAFRNL

SEQ ID NO: 25819 - protein, 318 aa, Xanthomonas axonopodis pv. citri
MNTTPDTALLVVNLGTPESPTAPAVRRYLAEFLSDRRVVAIPPLFWKPLLYGVILPIRGPKSAEKYAKVWLPEGSPLAVYTRRLAGGLQAVMPDWHVEWAMRYGEPALRKTLDRLRARGIKRIVVLPLYPQYSTTTTASIQDVVDAWRTSAPEIAVEVIQDYCEDTGWVAAIAESIRAHWQVHGRSEKLMFSFHGLPQRVADAGDPYPQQCERSAQAIVAALGLGADEWQMGYQSRFGAERWLQPYAEPTLWKLAEGGVRSFDLVCPGFATDCLETLEEVALGFSETLAERGATLSYIPCLNASDAHAHALAAMARRA

SEQ ID NO: 25820 - protein, 333 aa, Candidatus Kuenenia stuttgartiensis
MSVRIGINGFGRIGRNVFRVISKRNNIDVVAINDLADSKSLAMLLKYDSIHGRFDGSIQIKENALMVNDKEVRLLMEKDPAKLPWKSIGVDIVIESTGIFTSRSDCSKHLDAGAKKVLLSAPAKDKIDATIVVGVNNKDLRPEHKIVSNASCTTNCLAPLAKVLHDNFGIEKGLMTTIHAYTNDQRILDFMHKDIRRARAAAINIIPTTTGAAKAIGEVIPSLKGKLDGLAMRVPVPDGSVTDLVVMLAKEVDRDAINAAMKTAAEGDLKGILEYCGDPIVSSDIIGNPHSSIFDSALTYVIDKRMAKVISWYDNEWGFSNRMVDLIELMSRL

SEQ ID NO: 25821 - protein, 161 aa, Idiomarina baltica OS145
MEYNTSELCDLYPDMVDVVEPMFESYGGRSSFGGQLVIVKCHEDKGLIEETLNQDGGGKVLLIDGGGSVRRALIDLAIAEQALDNDWEGIICYGSVRDVDSLEELDMGILGVASIPVGASSEGIGEIDIPVNFGGVTFLPEDHIYVDSTGVILSPEPLDIE

SEQ ID NO: 25822 - protein, 359 aa, Gentiana triflora
MEGGILSNATTVCVTGASGYIGSWLAMRLLERGYTVRATVRDPGNLKKVQHLLELPKASTNLTLLKADLTEEGSFDEAIHGCHGVFHVATPMDFESKDPKNEVIKPTIDGFLSIIRSCVKAKTVKKLVFTSSAGTVDVQEQQKPVYDENDWSDLDFINSTKMTGWMYFVSKILAEKAAWEVTKANDIGFISIIPTLVVGPFITTTFPPSLITALSLITGNEAHYGIIKQGQFVHLDDLCEAHIFLYEHPEAEGRYICSSHDTTIHDLAKMIRQNWPEYYIPTKLKGIDEDIPVVSFSSNKLIDLGFQYKYTLEDMFRGAIDTCKEKRMLPLSIGHQKESTDPEVDEVVKEMELIQDSLD

SEQ ID NO: 25823 - protein, 755 aa, Desulfovibrio desulfuricans
MSTSRRDFLKYFAMSAAVAAASGAGFGSLALAADNRPEKWVKGVCRYCGTGCGVLVGVKDGKAVAIQGDPNNHNAGLLCLKGSLLIPVLNSKERVTQPLVRRHKGGKLEPVSWDEALDLMASRFRSSIDMYGPNSVAWYGSGQCLTEESYVANKIFKGGFGTNNVDGNPRLCMASAVGGYVTSFGKDEPMGTYADIDQATCFFIIGSNTSEAHPVLFRRIARRKQVEPGVKIIVADPRRTNTSRIADMHVAFRPGTDLAFMHSMAWVIINEELDNPRFWQRYVNFMDAEGKPSDFEGYKAFLENYRPEKVAEICRVPVEQIYGAARAFAESAATMSLWCMGINQRVQGVFANNLIHNLHLITGQICRPGATSFSLTGQPNACGGVRDGGALSHLLPAGRAIPNAKHRAEMEKLWGLPEGRIAPEPGYHTVALFEALGRGDVKCMIICETNPAHTLPNLNKVHKAMSHPESFIVCIEAFPDAVTLEYADLVLPPAFWCERDGVYGCGERRYSLTEKAVDPPGQCRPTVNTLVEFARRAGVDPQLVNFRNAEDVWNEWRMVSKGTTYDFWGMTRERLRKESGLIWPCPSEDHPGTSLRYVRGQDPCVPADHPDRFFFYGKPDGRAVIWMRPAKGAAEEPDAEYPLYLTSMRVIDHWHTATMTGKVPELQKANPIAFVEINEEDAARTGIKHGDSVIVETRRDAMELPARVSDVCRPGLIAVPFFDPKKLVNKLFLDATDPVSREPEYKICAARVRKA

SEQ ID NO: 25824 - protein, 443 aa, Desulfovibrio vulgaris subsp. vulgaris str. Hildenborough
MPFVPHSPEDVSVMLDAIGVNTIEDLFADIPAEMRPKSFALPKGLSEMDVCSRLEALSARNRTDVVSFLGAGFYDHHIPKAVDALSSRGEFYTAYTPYQPEAAQGTLQAIFEFQTAVCRLLDMDCANASVYDGGSALFEAMMMAVRATRRRKLVIDEALSPIYRTMLASYTSNLQLELVTVPHRDGLSDMDALKASVDDTCAAVVVQNPNFFGAITDFTDLFTHARAHKALGVISVYPVMQSVLKTPGEMGADIAVADGQSIGQPLSFGGPYLGIMTCTKPLVRQIPGRIVGRTQDVDGRTGYVLTLQAREQHIRRAKATSNICSNQALCALRSLIHLTLLGPEGLVRTAELSMERARYAAERLTALPGVELLHDAPFGNEFAVRLPVSAFEVVDRLTARGYVPGFPVGRYYPGMDNVLLVACTEKHSFEQVGILAEMLGGIL

SEQ ID NO: 25825 - protein, 109 aa, Taraxacum officinale
EYTVRALQRTMPPAVPAVVFLSGGQSEEEATVNLNAMNQYKGKKPWTLTFSFGRALQQSTLKAWSGKVENVEKAQAAFLARCKANSEATLGIYKGGSGLSEGASESLHI

SEQ ID NO: 25826 - protein, 321 aa, Xylella fastidiosa 9a5c
MSDYPASAKHSRLLILGSGPAGWTAAVYAARANLQPVLITGLQQGGQLMTTTEVDNWPGDAHGLMGPDLMERMQAHAERFDTKVIFDQIYKADLSTRPFTLFGDSGLYTCDGLIIATGANAKYLGIPSEEAFKGRGVSACATCDGFFYRDQDVAVIGGGNTAVEEALYLSNIARKVYLIHRRDKLRAEKIMQNKLFSKAATGKIELIWNNAVEEVLGNDASVTGVRIRSTQDSSTRDIDVQGLFVAIGHHPNTDLFAGQLAMNNGYLQIHSGTAGNVTQTSVEGVFAAGDVADQHYRQAITSAGFGCMAALDAERFLDKGN

SEQ ID NO: 25827 - protein, 321 aa, Bacillus cereus ATCC 14579
MNSVSEEKIYDVVIIGAGPAGMTAAVYTSRANLSTLMLERGIPGGQMANTEDVENYPGYESILGPDLSNKMFEHAKKFGAEYAYGDVKEVIDGKEYKTIIAGKKEYKARAIIVASGAEYKKIGVPGETELGGRGVSYCAVCDGAFFKGKELIVIGGGDSAVEEGVFLTRFASKVTIVHRRDTLRAQKILQDRAFQNEKVDFIWNHTIKEINEASGKVGSVTLVDVNSGEEKEVKTDGVFVYIGMLPLSKPFVELGITNENGYLETNERMETKIPGIFAAGDVREKMLRQIVTATGDGSIAAQSAQHYVEELLEELKTVSEK

SEQ ID NO: 25828 - protein, 525 aa, Idiomarina loihiensis L2TR
MSKDFILPDIGEGIVECEIVEWLVAEGDEVKEDQPVVEVMTDKAMVEIPAKDDGIVEKLYYQKGDIAKVHEPLFAIKPADGSSDEAPAKESEPTKKEEPKTEEEQTSSSGDTTDFILPDIGEGIVECEIVEWLVSEGDEVKEDQPVVEVMTDKATVEIPAKDDGTVVKLYHKKGDIAEVHKPLFALQPAGGVQSSGSNAPQSHVDPDAKTSPSDSKAEAEPPAKARQGKAIASPAVRRLARESDINIAEVPGSGKKGRVLKKDIEAFKSGEQKSAASSDSQQPQKAAATSGGTRTEAIRGVKAAMAKQMMSSVSTIPHFTYADEFDVTDLIALREKLKEQYKEKGIRLTVMPFFIKALSLALKEFPVMNAQVNEDCTEITYFDDHNIGMAVDTKIGLLVPNVKQVQNKSIIDVANEVTRLTQASREGKLPQADMKGGTISISNIGVIGGTVATPIINKPEAAIVALGKVQELPRFDANGNVVARKIMTVSWSGDHRIIDGGTIARFNKLWQEYLEDPTSMLVNMV

SEQ ID NO: 25829 - protein, 424 aa, Rickettsia prowazekii
MTTILVIVIIIMISLSALFAATETAITASSPGKIHKLKIAGNKRAKTVLEVLKKKEKVIGTLLIGNSLINTICTTIATTLFISLLGNNGTIVASGVMAFIIIVFAEVVPKAIAVAKPEQLTLKMSSTIVIFLKLFKPINIALDYITKIFCFIFRINLNPQISGTEEVRGVIEHYHQEGGVYKSERNMLGGILDIRNMTVSEIMTHRSNIIALNIDLPYELIIKTLLSGAHTRIPLWQDNRDNIIGILNLKDLLKALYENNNDDKKVDINTLLTPPWFIPDNALVVDQLHAFRERNNHFACVVDEYGTLLGIITLEDVIEEIVGPITDEHDRLNNEIIQESNTEFIIKGTTTIRDINRELDWNLSDEDANTIAGLIIHKIARIPNQGEVIKIFNFKIIILKKIANKIDSVKITVLPMTEETISSE

SEQ ID NO: 25830 - protein, 279 aa, Bacillus clausii KSM-K16
MAEPMILDGNDVSKRIKDKLALQVAALEQKGVRPCLATILVGDDPASATYVRMKGNACKRLGIESKKIELPKETTTKELLAVIRELNNDSSVHGILLQHPVPSQIDERAAFDEIAIEKDVDGVTTLGFAQNAFGFAHYPSCTPAAILAILDHYQLPIEGKHAVVVGRSPILGKPVSQMLLNRNATVTICHSRTENVSDFVEKADIVVAAVGKPNFIQGEWIKSGAVVLDAGYNKGNIGDCEYDGCAQRASAITPVPGGVGPVTISMLLKHTVEAAERSV

SEQ ID NO: 25831 - protein, 868 aa, Desulfovibrio vulgaris subsp. vulgaris str. Hildenborough
MRIAALFTCIIGVFMLATSVQAAQPADITRLSNGLTVLVLKDDRFPLASLRLYVHAGSAFETPEEAGISHLLEHMVFKGTVKRPKGQVARDVESVGGYLNAATSFDYTVYLTDMPSTQWKLGMDVLRDMAFEPALDPAELESEKDVVIAELQRGEDSPDSRIFQSLQAGTLKGTTYERPIIGYRETIRATTADTMRAYIRKHYQPQSMLLTVVGNVDPAEVRAEAERLFGGLTNDQNITPPAAIDARAFAHGPVVNVEHGPWKKVYLGVALPVPGLKALQAAQLDMLSQLLGGDPTALLYRTFKYEKQLVDDISVANYSFERVGMLYITAELDADKVETFWKELTTMLAGLKADAFTEQEFERARLNIEDGLYRSKETVAGLASKEGYFQFFSDGPQGEANYLQAVRDVERPQLEALIRDWLRPERLTVSVLLPEGTKAPALAATLKSTWPSKGKAAEEGNAAAVGKTETVDLGGGRKVVLIPDTTLPYTALDMVFSGGNALLDQNRQGLAALTASVLTKGTLKHDAPTLEAFQSDRAASLGASAGRRTFTLSLREPSRFDGDMFGLLHEVLTTPALAPDEVAREKRNQVASIRAREDQPLGLAFRHLTPFLFPGHSYGFYHLGQPETVEGFTRDDVKAFWARQAAQPWVMSVAGSFDREAVLRFAKSLPAPSGKPVSLDAPAWTPEKALDLRLPERNQAHLLLVFPTVGLAHKDTPALELLQSVLAGQSGLLFRDMRDKQGLGYTVTAMNWQSDLAGFMVLYIGTEPGKLEQAEAGFRKVIDQLHATALPDEELRRGKNQMRGDYYREHQRLGSRSSEAAMLTSQGYPLLFNREVIDKAEKLAPSDLERVARTYLDMNKVRVVKVLP

SEQ ID NO: 25832 - protein, 163 aa, Pseudomonas fluorescens
MIHYVTPDLCDAYPELVQVVEPMFSNFGGRDSFGGEIVTIKCFEDNSLVKEQADQPGAGKVLVVDGGGSLRRALLGDMIAEKAAKNGWEGLVIYGCVRDVDVLAQTDLGVQALAPHPMKTDKRGIGDLNVVVTFASVTFRPGEYVYADNNGVIVSPSPLKMPE

SEQ ID NO: 25833 - protein, 376 aa, Arabidopsis thaliana
MSPPPQRIGLPWPELNDGLAYKDAISSSESELTTVSEFYFTKYKSSAPLLGWIQRIQNGQIQIDGEVVKDPNTLLRSGSKLVYSRLPWKEPDTPYSLEVLYEDDDLIALNKPSGLQVLPGGLFQQRTVLTQLQWCFGKNDSYIGSRESPHPVPVHRLGRGTSGILLCAKTKLAKTKLAAYFAEGTSLVGSGNLDQECGTGRKLSKIYRALADGIVEEDEARPFLLFVVIKQPIGVVRYPGVAQGLYVASPEGKPAFSKVFVLERDREKNCSLVKVEIQSGRPHQIRIHLAYMGHPLVGDPLYVAGGQPKCFDPDLVDDAAAFAEDGGYRRPNQAVPGDCGYHLHAHQVELPNLLNTHKVVKIVAPLPPILQTRCET

SEQ ID NO: 25834 - protein, 106 aa, Xanthobacter autotrophicus Py2
MSVEKVSDQNFEQDVLQSSAPVIVDFWAEWCGPCRMVAPILEEVSGEMGEKIRIVKLNVDENPATASKYGIMSIPTLLLFKDGKIASRQVGAAPKAKLVQWINGAI

SEQ ID NO: 25835 - protein, 460 aa, Bacillus clausii KSM-K16
MNVLEKEKGTYTSDVHEYVQHVYETVKQRNPYENEFHQAVKEVLDSLLPVLAKRPQYIRQAILERIVEPERMISFRVPWVDDQGNVQVNRGFRVQFNSALGPYKGGLRFHPSVNTSIIKFLGFEQIFKNALTGQPIGGGKGGSDFDPKGKSDGEIMRFTQSFMSELSKYIGPDTDVPAGDIGVGAKEIGYMFGQYKKMRGRFEAGVLTGKDIAYGGSLARKEATGYGTVYFVEEMLKEKGHSFAGSTVVVSGSGNVSIYAMEKAMHLGAKVVACSDSEGYIYDKRGINLETVKRLKESEKKRISEYVNEHPQAHFFQGCSDIWSVPCDIALPCATQNEIDENTATVLVSNGVKAIGEGANMPSTLEAVNVFHEHGVLFAPAKAANAGGVSVSALEMAQNSARLSWTFEEVDAKLQDIMKTIYRDCIEAAKENDAPGNLVVGANIAGFVKVADAMIAQGVI

SEQ ID NO: 25836 - protein, 279 aa, Kluyveromyces lactis NRRL Y-1140
MLLLALSDAHIPERAIDVPLKFRKLLNVPNKIQQVTLLGNCTKSASFLKFVNTISENIVFVRGEFDPATVSTTKNPAEEMPLSTVISQGPFRIGCCNGYTLVPKNDPLSLLTLARQLDVDILLWGGTHNVEAYTLEGKFFINPGSCTGAFSTDWVQEDVEENYKTSEQQEPAEASTNGSNQQPKEIKEEIKEPSNNDSEKSGEDKADIIEDKGNSEEHLQEGKEYEHDSSDDEFDDIDINGGGIPSFCLLDIQDITCTLYIYTYVDNEIKVDKVVYRKD

SEQ ID NO: 25837 - protein, 413 aa, Blastopirellula marina DSM 3645
MKRRVVVTGLGIVTSLSHRLDEFWTKLTAGESGIHELKLFDTSKFKVNFGGDVHDWRPTEYFDSKELNRIDRFTQFAMVGAVDAINDSKIEFSNYDSFRCGVILGSGIGGLQTIEDQVERLLMKGPDRVSPMTIPKLMLNAAGGNISIRYGLRGPNFTVATACASATNAIGDAMKAIQYDEADVMITGGTEAAITPMGMSAFANMRALSTRNDDPAKASRPFDLGRDGFVMSEGAGIVVLEELESAKARGATIYAELVGYGCSGDAGHITSPDEEGRGASRAMQNALNDGALNANCIDYINAHGTSTPPGDVAETKAIKNVFGEHAYQLSVSSTKSALGHSLGASGGIEMIISIMAMKTSTVPPTINLEDPDPKCDLDYTPNVAKTRELNFAMSNSFGFGGHNASVIVGKYKE

SEQ ID NO: 25838 - protein, 105 aa, Candidatus Pelagibacter ubique HTCC1002
MLIDFKDEEFETKIKNEDISVVQFSAEWCAPCKSLKPIMDKFSDSYKDKANFYYADIENAGINTGSAAGVRGVPTVIVYKKGVEVDRKVGGVAESQMKEFLDKHI

SEQ ID NO: 25839 - protein, 650 aa, Photorhabdus luminescens subsp. laumondii TTO1
MDSDILRTSLLIRETEEALLRLYSTGELHGTVHTCIGQELTGAIVCKFLKKNDWVFSNHRCHGHFLSRTGDVTGLIAEVMGKETGVCGGRGGSQHLCKEGFFSNGIQGGILPVATGAAFAKKLRHDNSISIAFIGDGTLGEGVVYEVLNIAAKWDLPLLIVLENNQYAQSTHISETLSGSISKRAQAFGMRYTKSDVWNWEHLIAETEELINYTRNQRHPAFLQIDTYRLKAHSKGDDLRNIDEIEHFNTIDPINVILRERAAELETEVAGVQERVNDAIRKAKQARSSPFYGAETQLQSRSSTFHPLPSQGSKIRLSRAINKAFLEIMELDKNILFIGEDVKAPYGGAFKISDGLSDSFPEQVINTPISESAIVGIGCGLAMHGYCPFVEIMFGDFLTLAFDQILNHAAKFRDMYNDQVKVPLVIRTPMGAGRGYGPTHSQTLEKHFMGIPGLTILAINNLIDPAIVYKTLAKQEEGPVLLIENKILYTKSIRNAPLGFTSYASDDPFPAVVVSPLSTNVDVVIFGYGGLSDLLVDVAEELFVEHDVIAQVICPLQIYPFSVIPYIKLVSKCKIAIIVEEGQGFAGFGSEVVAQLTEILGKLLPRTIRIYPSSMAIPSSKALENLMIPGKDMLIERILKAYISEAEPQQ

SEQ ID NO: 25840 - protein, 470 aa, Leuconostoc mesenteroides subsp. mesenteroides ATCC 8293
MVSVMWFRRDLRLEDNIALFNALRHSNEILCVFHINPEQVTEKSTVNQSAFFASVLYFKNKLKKQGINLNIMYGDINDCFASLKQKLPDWHDIFFNFDERGFGRNRDQKSVAFFEDKLKVKAHPYIDYNLHGATEVKKDSGAGYKVFTPYFKRWIRQEKPAPVSYVIDKRIKSARLLFPENEQLLETFIDDRFSFIKKDLGSETAKKVLNRFINESLDQYDEERDFPANDSTSHLSRYLRTGEISIRTVWRAIDQSPDSDGKSTFMKELCWRDFYNMIYVMYPNQNVESVNKDFRHVDWINNEQQFEAWRTGQTGFPIVDAAMRQLNATGWMHNRLRMIVASFLTKDLLIDWRWGEAYFHNKLLDYDAASNIGGWQWAASTGTDSVPYFRIFNPTLQSKKFDSNGLFIKKYVPELKNVDNKMIHEPGKLSESEQTRFNVRIGQNYPFPIVDHSYARKRAISIYESSKDVN

SEQ ID NO: 25841 - protein, 124 aa, Glycine max
MAARRAHAAATLALLVAALVLSAAPAPAEGAVANCGQVVSYLAPCISYAMGRVSAPGGGCCSGVRGLNAAAATPADRKTTCTCLKQQASGIGGIKPNLVAGIPGKCGVNIPYAISQGTDCSKVR

SEQ ID NO: 25842 - protein, 332 aa, Onion yellows phytoplasma OY-M
MKNENQKAKTKTKENKKIAVLTSGGDAPGMNAAIRALVFESAKQGFEVFGVKDGYLGLFNNQIEILNPQTFPRVLNVSGTFLGTSRFLDFQNNLDVRKQCAQNLKTLGIDKLVVIGGDGSYKGASKLHELGIKCVGLPATIDNDICATDFTIGFSTALNNIVDAIEKLRDTSVSHNRCSIIEVMGRHKGDLALFGGLAAGADVIVTRENLLSQKTICQKIKSLRQANQRHAIVVVTEHIFDVASLAKEVENYSGFETRAQVLGHIQRGGKPTAEDLVLAFRMGSYAVSLLQQNIFNCAVGTCGLNLHYTTFGDLFEKTYEKNELFNVVAKLL

SEQ ID NO: 25843 - protein, 389 aa, Corynebacterium efficiens YS-314
MHHQPLVGIVRSMNARTPDTKSDSYDALLVLSFGGPEGPEEVRPFLENVTRGRGIPPERLDEVGAHYYHFGGVSPLNRLNKEIIANVKAELAARGYDIPVYFGNRNWKPFDNEAAEQMAADGIRNALVFATSAWGGYSGCRQYHEDIQGMRAHLEEIGAPEVTFTKLRQFYDHPRFVRTMAQYVRESFDKLPEDLRDEARLVFTAHSIPLNSKDADGNPIDGSIYSRQVEESSALIAREAGIDDFDVVWQSRSGSPHVPWLEPDIVDHAVELNENNGQKALVVCPVGFISDHMEVIWDLDSELMDEATRRGMVIERVATVGPSDEFATMVVDLIDEMEMKRVIERLGTLPVRGSTVNGEPCVPGCCAPRRRPAASQTNPNADAPVASRS

SEQ ID NO: 25844 - protein, 336 aa, Cupriavidus necator
MTIKVAINGYGRIGRNVLRAHYEGGKRHDIEIVAINDLGNAATNAHLTQYDTVHGRFPGEVSVDGDAFRVNGDRIRVLAQRNPAELPWGELGVDVVMECTGLFTSKEKASAHLRGGAKKVIISAPGGKDVDATIVYGVNHGVLKATDTVISNASCTTNCLAPLVKPLHEKLGLVNGLMTTVHSYTNDQVLTDVYHEDLRRARSATMSMIPTKTGAAAAVGLVMPELDGRLDGFAVRVPTINVSLVDLSFVAARPTTVEEVNGILKAAAEGELKGILDYNTAPLVSVDFNHNPASSTFDATLTKVNGTLVKVSAWYDNEWGFSNRMLDTAVALAHAR

SEQ ID NO: 25845 - protein, 911 aa, Streptomyces coelicolor A3(2)
MSSADDQTTTTTSSELRADIRRLGDLLGETLVRQEGPELLELVEKVRRLTREDGEAAAELLRGTELETAAKLVRAFSTYFHLANVTEQVHRGRELGAKRAAEGGLLARTADRLKDADPEHLRETVRNLNVRPVFTAHPTEAARRSVLNKLRRIAALLDTPVNESDRRRLDTRLAENIDLVWQTDELRVVRPEPADEARNAIYYLDELHLGAVGDVLEDLTAELERAGVKLPDDTRPLTFGTWIGGDRDGNPNVTPQVTWDVLILQHEHGINDALEMIDELRGFLSNSIRYAGATEELLASLQADLERLPEISPRYKRLNAEEPYRLKATCIRQKLENTKQRLAKGTPHEDGRDYLGTAQLIDDLRIVQTSLREHRGGLFADGRLARTIRTLAAFGLQLATMDVREHADAHHHALGQLFDRLGEESWRYADMPREYRTKLLAKELRSRRPLAPSPAPVDAPGEKTLGVFQTVRRALEVFGPEVIESYIISMCQGADDVFAAAVLAREAGLIDLHAGWAKIGIVPLLETTDELKAADTILEDLLADPSYRRLVALRGDVQEVMLGYSDSSKFGGITTSQWEIHRAQRRLRDVAHRYGVRLRLFHGRGGTVGRGGGPTHDAILAQPWGTLEGEIKVTEQGEVISDKYLIPALARENLELTVAATLQASALHTAPRQSDEALARWDAAMDVVSDAAHTAYRHLVEDPDLPTYFLASTPVDQLADLHLGSRPSRRPGSGVSLDGLRAIPWVFGWTQSRQIVPGWYGVGSGLKALREAGLDTVLDEMHQQWHFFRNFISNVEMTLAKTDLRIAQHYVDTLVPDELKHVFDTIKAEHELTVAEVLRVTGESELLDADPVLKQTFTIRDAYLDPISYLQVALLGRQREAAAANEDPDPLLARALLLTVNGVAAGLRNTG

SEQ ID NO: 25846 - protein, 108 aa, Ralstonia solanacearum
MSEQIKYVSDASFEADVLKSDKPVLVDFWAEWCGPCKMIAPILDEVSKDYGDKVQIAKLNVDENAGVPAKFGIRGIPTLILFKNGAVAAQKVGALSKSQLTAFLDSHL

SEQ ID NO: 25847 - protein, 346 aa, Brassica napus
MALEHIKIFLIVSLVSSFCFSTTLSRLLDDELIMQKKHDEWMAEHGRTYADMNEKNNRYVVFKRNVERIERLNNVPAGRTFKLAVNQFADLTNDEFRFMYTGYKGDFVLFSQSQTKSTSFRYQNVFFGALPIAVDWRKKGAVTPIKNQGSCGCCWAFSAVAAIEGATQIKKGKLISLSEQQLVDCDTNDFGCSGGLMDTAFEHIMATGGLTTESNYPYKGEDANCKIKSTKPSAASITGYEDVPVNDENALMKAVAHQPVSVGIEGGGFDFQFYSSGVFTGECTTYLDHAVTAVGYSQSSAGSKYWIIKNSWGTKWGEGGYMRIKKDIKDKEGLCGLAMKASYPTI

SEQ ID NO: 25848 - protein, 337 aa, Glomerella lindemuthiana
MAPIKVGINGFGRIGRIVFRNAVEHPDVEIVAVNDPFIETKYAAYMLKYDSTHGIFNGEIAQDGNDLVINGKKVKFYTERDPAVIPWKETGADYVVESTGVFTTIDKAKAHLQGGAKKVIISAPSADAPMYVMGVNEKSYDGSAVISQASCTTNCLAPLAKVINDKYTIIEGLMTTVHSYTATQKTVDGPSAKDWRGGRTAAQNIIPSSTGAPKAVGKVIPELNGKLTGMSMRVPTANVSVVDLTVRIEKGATYDEIKQAIKEAAEGPLKGVLAYTEDDFVSTDMIGNPNSSIFDAKAGISLNNNFVKLVSWYDNEWGYSRRVLDLLAHVAKVDASK

SEQ ID NO: 25849 - protein, 589 aa, Phaseolus vulgaris
MSSISLKENGGEVSVNKDYSNGGGVRDLYGEDSATEDHLITPWTFSVASGCSLLRDPRYNKGLAFTEGERDAHYLRGLLPPSVFNQELQEKRLMHNLRQYEVPLHRYMALMDLQERNERLFYKLLIDNVEELLPVVYTPTVGEACQKYGSIFRRPQGLYISLKEKGKILEVLKNWPEKSIQVIVVTDGERILGLGDLGCQGMGIPVGKLSLYTALGGVRPSSCLPVTIDVGTNNEKLLNDEFYIGLRQRRATGQEYAELLDEFMRAVKQNYGEKVLVQFEDFANHNAFDLLEKYSSSHLVFNDDIQGTASVVLAGLLASLKLVGGTLADHTFLFLGAGEAGTGIAELIALEVSKQTKAPVEETRKKIWLVDSKGLIVSSRLESLQQFKKPWAHEHEPVKGLLEAVKAIKPTVLIGSSGAGKTFTKEVVETMASLNEKPLILALSNPTSQSECTAEEAYTWSKGRAIFASGSPFDPVEYEGKLFVPGQANNAYIFPGFGLGLIMSGAIRVRDEMLLAASEALAAQVSEENYDKGLIYPPFTNIRKISANIAAKVAAKAYDLGLASHLPRPKDLVKYAESCMYSPGYRSYR

SEQ ID NO: 25850 - protein, 325 aa, Idiomarina loihiensis L2TR
MAKMNLLQAINSALDLAMAKHDNVYSFGEDTGGFGGVFRATSGLTEKYGKHRNFNTPLVEQGIIGFANGLASQGSYAIAEIQFGDYIFPAFDQIVNETAKFRYRSGNEFNVGGLTIRTPYGGGIAGGHYHSQSPEAYFAHTPGIKIVTPRNPYEAKGLLLSAIFDKNPVLFMEPKRLYRASTGDVPEEEYTIPLGKADVVKEGKDITVLGWGAQMEMIEKAVEKSEEDGVSCEVIDLRTISPWDVETVTESVLKTGRLVITQEAPITGGFASEIAATVQDKCFLYLESPIGRVCGIDVPYPLCHEKEYMADHLKIYEAIKRSMNY

SEQ ID NO: 25851 - protein, 289 aa, Shigella flexneri 2a str. 301
MSILIDKNTKVICQGFTGSQGTFHSEQAIAYGTKMVGGVTPGKGGTTHLGLPVFNTVREAVAATGASASVIYVPAPFCKDSILEAIDAGIKLIITITEGIPTLDMLTVKVKLDEAGVRMIGPNCPGVITPGECKIGIQPGHIHKPGKVGIVSRSGTLTYEAVKQTTDYGFGQSTCVGIGGDPIPGSNFIDILEMFEKDPQTEAIVMIGEIGGSAEEEAAAYIKEHVTKPVVGYIAGVTAPKGKRMGHAGAIIAGGKGTADEKFAALEAAGVKTVRSLADIGEALKTVLK

SEQ ID NO: 25852 - protein, 352 aa, Prosthecochloris aestuarii DSM 271
MNNEIRREELLREPVKHIDIKELNVVPLIEQMGNTAFQARNLARAASIMDRMQRDEECAVILTLAGSLISAGLKQAIIDMLDNNMVDVIVSTGANIVDQDFFEALGFKHYKGDPFADDATLREMHIDRIYDTYIDEDDLRVCDDTMAIIANSMKPGAYSSREFIMEMGRYIEDNNLDKNSIVYKAYEKGVPIFVPAFSDCSAGFGLVHHQWNNPDQHVAIDSVKDFRELTRVKIVNDKTGIVMLGGGVPKNFTQDIVVAAEVLGYEDVSMHTYAVQVTVADERDGGLSGSTLKEASSWGKVDTVFEQMVFSEATIAFPLLAGYAYHKRGWEGRKAKNFNAMLAEEQEQAGKP

SEQ ID NO: 25853 - protein, 236 aa, Anaplasma phagocytophilum HZ
MLAKKEDFHTFGNGVGSAGTGGVVVSASMLSADFSNLREEIAAVSTAGADWLHIDVMDGCFVPSLTMGPVVISGIRKCTNMFLDVHLMINRPGDHLKSVVDAGADMITVHAESEVHLCRLIKQIKLYGKKVGVSIVPKTHHSVLEYIIHDLDVVLVMSVDPGFGGQAFLEPQLKKIEHIRKMIEESSSTAKIAVDGGVSTDNARAVIEAGANILVVGTALFAADDMSKVVRTLKSF

SEQ ID NO: 25854 - protein, 517 aa, Hemerocallis hybrid cultivar
MDRERLTAEMAFRDSSIVIKIRRKLPDFLQSVKLKYVKLGYRSTTKPPFYLLLPLLLIAASLIFRIHTTLTFPANFSIDFVTAFSSSSIALLLLGVYYTRRPRPVYLVDFACYKPEDEHKISNEGFLEMTESTTAFNDKSLDFQTKITVRSGLGDETYLPPGIQARPPKLSMAEARLEAETVMFGCLDALFESTGINPSRDIGILIVNCSLFNPTPSLSAMIVNHYKMREDVKSFNLGGMGCSAGLISIDLAKDMLQANPNSYALVLSTENITLNWYFGNDRSMLLSNCIFRMGGAAVLLSNKRKDAKRAKYRLLHTVRTHKGADDSCYNCVYQREDEGGKVGVSLAKELMAVAGDALKTNITTLGPLVLPLTEQGKFLATLITRKLLKLKGVRPYIPNFKRAFEHFCVHAGGRAVLDEVEKNLGLEKTDMEASRSVLHRFGNTSSSSLWYELAYNEAKGRVGKGDRVWQIGFGSGFKCNSAVWKAMKDVPAIDRTASGSSRMCNPWGDCIDRYPVK

SEQ ID NO: 25855 - protein, 369 aa, Bacillus clausii KSM-K16
MKLERLQTLQRQMGEKQAWFAFITSKENVFYLTGYRTDPHERLIAFFVFPNSHFLVVPKMEESMVRKAGYEGDILSYSDNENVWENIYARIPEHEPRNLPLICVEERLVSFERIRALQALDKQVSFTDCEGLLMEQRLQKTNEELQTLRAAAAFADRGVELGVAALKTGVTEMEVVAAIEYGLKQQGIREMSFQTTVLFGDHASAPHGKPGNRQLQEGEFVLFDLGVVLEGYCSDITRTVAYGNVSEQEATIYHTVLKAQEAALAAAKPGAVIGAVDQAARHVITEAGYGAFFPHRLGHGLGIDVHESPSMHQDNQNHLKERMTFTVEPGIYIPDRCGVRIEDDVVITAAGCEVMTSYPKTLDPVPVRL

SEQ ID NO: 25856 - protein, 117 aa, Prunus persica
MAYSAMTKLALVVALCMVVSVPIAQAITCGQVSSSLAPCIPYVRGGGAVPPACCNGIRNVNNLARTTPDRQAACNCLKQLSASVPGVNPNNAAALPGKCGVSIPYKISASTNCATVK

SEQ ID NO: 25857 - protein, 320 aa, Salmonella typhimurium LT2
MIKKIGVLTSGGDAPGMNAAIRGVVRAALTEGLEVMGIYDGYLGLYEDRMVQLDRYSVSDMINRGGTFLGSARFPEFRDENIRAVAIENLKKRGIDALVVIGGDGSYMGAKRLTEMGFPCIGLPGTIDNDIKGTDYTIGYFTALGTVVEAIDRLRDTSSSHQRISIVEVMGRYCGDLTLAAAIAGGCEFIVVPEVEFNREDLVAEIKAGIAKGKKHAIVAITEHMCDVDELAHFIEKETGRETRATVLGHIQRGGSPVPYDRILASRMGAYAIDLLLEGHGGRCVGIQNEQLVHHDIIDAIENMKRPFKSDWMECAKKLY

SEQ ID NO: 25858 - protein, 718 aa, Xylella fastidiosa Dixon
MNVSLFPQELDVLLRRSGVSTLNPELSQGLVQACQALPSEAGQQVAWPVLLDMLDALVVLSADETLLIAALLFDLPMLRPMLPVLPWRSSTHQQMVGSLLDGQDAAEQVWTLHAGCAAGRNGEGLRRLLLALVHDLRVVPILLARQLAKMRAAGVLLESQRRALAQLTRDIHAPLANRLGIWQLKWELEDLAFCYLESEIYRSIASALDESRVARERYISVIAMELSRVLAEHGVCAEVSGRPKHIYSIWRKMQKKRLHFEQVYDLQAVRVMVEDMAACYAALGVVHALWAPVPGEFDDYIARPKANDYRSLHTAVLGPEERTVEVQIRTHEMHAHAELGVAAHWKYKEDGKGAERDFDRKIVWMRQLLEQAQEGEFGEVVEALDTELLEDRVYALTPKGEVIDVPQGATPLDFAYHVHTMVGHCCRGAKVNGRIVPLTYRLRSGDRVEILTAKEANPHRDWLLRANGFLASRRSRDKVRAWFNKIERARNVQVGKESLDRELKRVGQQHVDLSPIARRFHADSVDDLYVQIALGNIGPNQVSRALLETERVVAFAPFARPSKKRHGLSKSMFTVQGVSNILVQLARCCQPVCGEPIAGYLTLSRGVTVHRADCAVLMRLNAMHPQRVLLVEWGSQLSGSYEVEILVRAVNRRWLLKDIADVIAQEDAHMLEMSSDAFRDNAYLQFRVRLRLSHHRQLAALLGKLDGLSGVNEVRRMG

SEQ ID NO: 25859 - protein, 547 aa, Yersinia pestis CO92
MANHPRAGQPAQQSDLINVAQLTSQYYVLQPDAEDPAHAVKFGTSGHRGSSVRHSFNEAHILAIAQAIAEVRHQHGISGPCYVGKDTHALSEPAFISVLEVLTANGVDVVVQQDNGFTPTPAISHVILCHNAQGKALADGIVITPSHNPPEDGGIKYNPPNGGPADTNLTSVIEKRANQLLSQNLKGVKRQTLDKAWQSNHLREQDLLQPYVEGLVDVVDIPAIQQAGLKLGVDPLGGSGIAYWQRIAEYYKLDLTLVNNAIDQTFRFMHLDHDGVIRMDCSSESAMAGLLALRDKFDLAFANDPDYDRHGIVTPAGLMNPNHYLAVSINYLFQHRPQWGAGVAVGKTLVSSAMIDRVVADLGRKLVEVPVGFKWFVDGLHDGSFGFGGEESAGASFLRFNGTPWSTDKDGIIMCLLAAEITAVTGKDPQRHYDDLAQRFGAPSYNRIQAPATQAQKNALSRLSPEMVKANTLAGDPITARLTNAPGNGASIGGLKVMTENGWFAARPSGTEEAYKIYCESFLGAEHREKIEQEAVKIVSEVLAEAK

SEQ ID NO: 25860 - protein, 115 aa, Malus x domestica
MASSAVTKLALVVALCMAVSVAHAITCGQVTSSLAPCIGYVRSGGAVPPACCNGIRTINGLARTTADRQTACNCLKNLAGSISGVNPNNAAGLPGKCGVNVPYKISTSTNCATVK

SEQ ID NO: 25861 - protein, 537 aa, Zea mays
MLRSALFRSAPGLRRSPATAHLSTAAAAAAAWLSNGPASAPSRVRLLIGGEFVESRADEHVDVTNPATQEVVSRIPLTTADEFKAAVDAARTAFPGWRNTPVTTRQRVMFKFQELIRANMDKLAENITTEQGKTLKDAWGDVFRGLEVVEHACGMGTLQMGEYVSNVSNGIDTFSIREPLGVCAGICPFNFPAMIPLWMFPIAVTCGNTFVLKPSEKDPGAAMMLAELAMEAGLPKGVLNIVHGTNDVVNNICDDEDIKAVSFVGSNTAGMHIYSRASAAGKRVQCNMGAKNHAIILPDADRDATLNALIAAGFGAAGQRCMALSTAVFVGGSESWEDELVKRASGLVVSSGMVNDADLGPVISRQAKDRICKLVQSGVDSGARILLDGRKIVVPRYEDGNFVGPTILADVKSDMECYKEEIFGPVLLLMKAESLEDAIQIINRNKYGNGASIFTTSGVSARKFQTDIEAGQVGINVPIPVPLPFFSFTGSKASFAGDLNFYGKAGVQFFTQIKTITQQWKESPVQRVSLSMPTSQK

SEQ ID NO: 25862 - protein, 453 aa, Oryza sativa
MAAAAVLRSHGARRILSYPTLRAAVISGPTALPDASAAAAAAPQQPPPLAGTLWARSMATFTRTKPHVNVGTIGHVDHGKTTLTAAITKVLAEAGKAKAVAFDEIDKAPEEKARGITIATAHVEYETAKRHYAHVDCPGHADYVKNMITGAAQMDGGILVVSAPDGPMPQTKEHILLARQVGVPSLVCFLNKVDAVDDPELLELVEMELRELLSFYKFPGDEIPIIRGSALSALQGTNDEIGKNAILKLMDAVDEYIPDPVRQLDKSFLMPIEDVFSIQGRGTVVTGRVEQGTIKTGEDVEILGLTPSGPLKTTVTGVEMFKKILDHGEAGDNVGLLLRGLKRGDVQRGQVVCKPGTVKTYQKFEAEIYVLTKDEGGRHTAFLSNYSPQFYFRTADVTGKVVLPDGVEMVMPGDNVTAGFELISPVPLEPGQRFALREGGRTVGAGVVSKVYS

SEQ ID NO: 25863 - protein, 256 aa, Xanthobacter autotrophicus Py2
MAYETILVEQHDRVGLIRLNRPQALNALNGQLIGELNAALDAFEQDRGIGCVVLTGSEKAFAAGADIKEMQVFSYPATYLDDFITSWERLSRTRKPVIAAVAGFALGGGCELAMMCDFILAADTAKFGQPEIKLGVMPGAGGTQRLTRFVGKSKAMEMCLTGRLMDAVEAERAGLVSRVVPAAELLDEALKVAKVIAGMSAHVAMQTKESVNRSYETTLAEGIRFERRVFQAQFGVADQKEGMAAFIEKRPAKFEH

SEQ ID NO: 25864 - protein, 335 aa, Frankia sp. EAN1pec
MATRVGVNGFGRIGRNFWRALAASRRSDLEIVAVNDLTDNKTLAHLLKYDTTLGTLPESVSVGEDGIRVGDSTIKVLAERDPAALPWADLGVDVVIESTGRFTTAETAGKHLTAGAKKVIISAPAKGEDLTVVMGVNDDVYDPAKHHILSNASCTTNCVAPLAKVLDEAFGIERGLMTTIHAYTNDQVILDFPHSDLRRARAAAQNIIPTTTGAAKATALVLPHLKGKLDGIAMRVPVLDGSVTDLVVNLARPASKDEINAAYKAAAEGPLKGYLVYTEDPIVSSDIVGTPASCTFDSLLTMSSGSQVKVVGWYDNEWGYSNRLVDLTGLVAARI

SEQ ID NO: 25865 - protein, 412 aa, Arabidopsis thaliana
MERLISHPPLMIVSDLDHTMVDHQDHENLSLLRFNSLWEYAYRRDSLLVFSTARSPVLYKELRKEKPLLTPDIIITSIGTEIAFGNSMVPDHAWVESLNSCKWNREIVLEETSKFPELTLQPKTEQRLHKVSFYIDEGKGEALTKELSQLLEKRGLDVKIIYSWGKNVDVIPRGAGKGEALEYLLKKLQAEGIFPVNTLACGDSEHDAELFSIPDVHGVMVSNSQEELLKWRSENALNNLKVIHSTERCADGIIQAIGHFNLGPDLSPRDVSEFLDRKMDNVNPGHEVVRFYLFYERLRRGEIKNYETYIASFKDSCAEKSLRDTIDELKKCYGDKRGKKFWVWVDQVLVTDTIPGKWIVKFDKWEQCEDESQCCKTTVEFTSKGGDLVWEKVKQIWSEESKVKDDNSSWIL

SEQ ID NO: 25866 - protein, 231 aa, Arabidopsis thaliana
MSGILLRRLDTGEETELEAKGMFYGIGHSPNSQLLEGQVELDSSGYVLVREGTSNTSVEGVFAAGDVQDHEWRQAVTAAGSGCIAALSAERYLTSNNLLVEFHQPQTEEAKKEFTQRDVQEKFDITLTKHKGQYALRKLYHESPRVILVLYTSPTCGPCRTLKPILNKVVDEYNHDVHFVEIDIEEDQEIAEAAGIMGTPCVQFFKNKEMLRTISGVKMKKEYREFIEANK

SEQ ID NO: 25867 - protein, 1048 aa, Magnaporthe grisea 70-15
MTTAISSNHEPPYPPSSGDRGQAYPPVSRSQSTRHRPSTAQPPAPHRSVSHNHSGSMSSRPSSSARPVQDVLPNNDYETTNVAQKATKDSRPPQSSRDTATRQHRRSGSQRSGHHGHDGNAEAGPSTPSQASHGSSDPRTRKMRTVIPAQSGKWNLGKTIGAGSMGKVKLARKEDGTEQVACKIIPRVTPDDGHTPRAERERADLSKEVRTAREAAIVTLLSHPHICGLRDVVRTNFHWYMLFEYVNGGQMLDYIISHGKLKEKQARKFSRQIASALDYCHRNSIVHRDLKIENILISKTGDIKIIDFGLSNLFAPKSHLKTFCGSLYFAAPELLQARPYTGPEVDVWSFGIVLYVLVCGKVPFDDQNMPALHAKIKKGVVDYPNWLSSECKHLLGRMLVTDPKQRITMAEILSHPWMVKGYSGPPENYLPNREPLTLPLDQEVINGMTGFSFGPPEVIKAQLTRIIESEDYQRSIRAYQREKETQQTPKDPEKKRGFGFYRRRNSFSSKDTLTTPSSEGLALGNDPLNAFNPLVSVYYLVREKQEKDSASRRPATSARPNAVPEIAPPQEAHTNASAYEMPGENATGGRTRPRARTHGEDDAPTEPIRPPQLSPPAAPPPERLEPPKKESAAAGLLRRFSTRRRKEQPERLDKDRSHPPVVQVHSPAENSSQPTSAIRKSFSIRRGRRDREEQASAESQARMRAGSSQPQHSDLLSPPLSAGANTQTFRKGLGRSASVNSGEFSRRRAMGTARTSKDPPPTSGSDHSTIHEKPPKEQQEKRSPTTAGPSQSMTSRAKSLGHARQESIQARRQRREAEKKREANVPEETDAEVNGADDSSKERVTDFDLDKPVYLKGLFSVSTTSGKPVREIRTDIKRVLKQLGVDYTEIKGGFYCRHSPSIDLQNVADNGAASPAQTPSGAKRRFSFGALRSDGKEESNGERVPVTPRTPGRSGGGSGTDRDRHDSSSEVSENSEAREETSRRRDHPAGETRTHVRSDMGESMVSEFEIFIVKVPMISLHGIQFKRLGGNTWQYKNLADQILKELKL

SEQ ID NO: 25868 - protein, 533 aa, Rhodobacter sphaeroides 2.4.1
MKQIWQALKAHQQAVEHRAILDLFTDPRRAETFSTRLGDMLFDWSKTNIDHTARDLLIDLAGAAGVAEKREAMFSGAKINETEGRAVLHTALRNMDRPVRVDGVDVTPALRETHARMQAFVRDLRSGRFTGQGGPITDVVNIGIGGSDLGPAMACLALAPYADGPRCHFVSNVDGAHIHDTLQDLDPATTLVIVASKTFTTIETMTNAETAKRWMAKRVSDPAAQFAAVSTAADKTAAFGIDASRVFGFEDWVGGRYSMWGPIGLALMIAIGPEAFDAFLAGGAEMDRHFREAPFAENLPVLLALVGLWHNQICGHATRAVLPYDQRLARLPAYLQQLEMESNGKRVAMDGHELTHHSGPIVWGEPGTNGQHAFYQLIHQGSRIVPCEFLVAREGHEPDLAHQHLLLVSNCLAQSEALLRGRSVEEARAILGKKGLTGSELERQARHRVFPGNRPSTVLAYEKLTPATLGRIVALYEHRVFVEGVILGINSYDQWGVELGKELALALQPMLEGRAGTEGKDGSTAQLVAYLRR

SEQ ID NO: 25869 - protein, 349 aa, Zea mays
MASSSLPAPAAGRAELLKAFDDARTGVRGLVESVVSSVPELFRHADPYASIPLAPPGVSIPSTTSTPSPGAPPPPDDDYPERAFAAVRAFNELPAHERAPHYSRAVDGGANYSSNVDLYNSPAASWRDTIQILLGPNRHPDLADRIPAACRAEVLEWEVRATAVARALLRLLSQGLGLRPEALEDASCADGKLMVCHYYPHCPEPERTMGIVPHTDPGVLTVLAQDGVGGLQVKHQDEDGKISWVDVKPVPGALVINVGDLLQIMSNDEYTSVEHRVVMNTREEPRVSIGIFFSPGKRGDSVFYGPLPELVSSANPPKYRNFTMSEFYGTFFSRDLASKALLDNFKLSP

SEQ ID NO: 25870 - protein, 114 aa, Salinibacter ruber DSM 13855
MAESANVITLTDDNFEDEVIGADQPVLVDFWATWCGPCRQIAPIVEELADEYEGQAKIGKVDVDENPQTAQEYGVRSIPTLLFFKDGEAKEQVVGAAGKQPLKENLEALLGQPA

SEQ ID NO: 25871 - protein, 275 aa, uncultured bacterium
QPNAMGGREVGGLSNQLAAHMDIDNEVHRGIVQRFWNSPGIADKQGLKAVDLFEAIHDGKIKAVWIMSTNPVVSLPGADRVKSALEKCEYVVVSDCMEKTDTTSLANVLLPAATWGEKNGTVTNSERCISRQRSFLSSPGEAKPDWWAVAEVARRMGFVDGFDYAAPHEIFREHAELSGFENQDSSEKRRDFDISALTDIDSDMYENFDPVQWPVYKNAQGAITGTPRMFADGKFFTPNQKARIITVEPRLPVNNTSTEFPLILNTGRCRDQWHT

SEQ ID NO: 25872 - protein, 266 aa, uncultured bacterium
QPNAMGGREVGGLANMLAAHMELDNEAHRDIVQTFWQSPKIVNKPGLKAVDLFNAIDEGTIKAVWIMATNPAVSMPDADKVREALYKCEFVVVSDIMQSTDTTACAEVLLPALGWGEKDGTVTNSERRISRQRAFLSAPGEAKADWWVICQVAKRMGYAKAFEYKNSYEIFKEHARLSGYENQGTRDFDIASLADQTFQQYDEILPVQWPTQGHQGTARMFTTSRFYTPNKKARFIPVTPRLPVNLTSGAYPLILNTGRVRDQWHT

SEQ ID NO: 25873 - protein, 333 aa, Streptomyces arenae
MTVRIGINGFGRIGRNVFRAAAARSSELEIVAVNDLGDVPTMAHLLAYDSILGRFPEEVTAEPGAIRVGDRTIKVLAERDPGALPWGDLGVDIVIESTGIFTDAAKARSHVDGGAKKVIIAAPASGEDFTVVLGVNDGDYDPERHTIISNASCTTNCLGVLAKVLHDAVGIDSGMMTTVHAYTQDQNLQDAPHKDLRRARAAALNIVPTSSGAAKAIGLVLPELAGRLDAFALRVPVPTGSVTDLTVTTRRGTSVEEVKEAYAAAASGPYKGLLSYVDAPLVSTDIVGDPASLFDAGLTRVCGPQVKVVGWYDNEWGYSNRLIDLATLIGSSL

SEQ ID NO: 25874 - protein, 405 aa, Shigella flexneri 2a str. 301
MSSVDILVPDLPESVADATVATWHKKPGDAVVRDEVLVEIETDKVVLEVPASADGILDAVLEDEGTTVTSRQILGRLREGNSAGKETSAKSEEKASTPAQRQQASLEEQNNDALSPAIRRLLAEHNLDASAIKGTGVGGRLTREDVEKHLAKAPAKESAPAAAAPAAQPALAARSEKRVPMTRLRKRVAERLLEAKNSTAMLTTFNEVNMKPIMDLRKQYGEAFEKRHGIRLGFMSFYVKAVVEALKRYPEVNASIDGDDVVYHNYFDVSMAVSTPRGLVTPVLRDVDTLGMADIEKKIKELAVKGRDGKLTVEDLTGGNFTITNGGVFGSLMSTPIINPPQSAILGMHAIKDRPMAVNGQVEILPMMYLALSYDHRLIDGRESVGFLVTIKELLEEPTRLLLDV

SEQ ID NO: 25875 - protein, 868 aa, Xylella fastidiosa Ann-1
MSASPTVERWIVLKFGGTSVSRRHRWDTIAMVVRKRLEEHGTRVLIVVSALSGVTNELTAIAQGVVDSAQRVAALEQRHRDFLAELGLDAQAVLGTRFAMLSDLLQDARAVTRSLDWQAELLGQGELLSSTLGAAYLGASGVDIGWMDARDWLTALPPQPNQSEWSQRLSVSCQWKSDVEWRTRFDAQRAQVLITPGFISRHQDGGTAILGRGGSDTSAAYFGALLGAACVEIWTDVPGMFSANPKEVPDARLLTRLDYYEAQEIATTGAKVLHPRSIKPCRDTDVPMLILDTERPDVLGTRIDAEVEPVLGVKAISRRDGIVLVSMEGIGMWQQVGFLADVFTLFKKHGLSVDLIGSAETNVTVSLDPSENLVNTDVLTALSTDLSQICKVKIIVPCAAITLVGRGMRSLLHKLSEVWATFGKERVHMISQSSNDLNLTFVIDETDADGLLAVLHFKLIESGAMPVQDRAVFGSPWREIIGHVRTRVMPWWHSARMRLLAMRDEEGIGPCYVYHLPTVRERARQLNSVAAVDQRYYAIKANPHPAILRTLIEEGFGLECVSLGELRHVFAVVPHLVPSRVLFTPSFASRVEYEQAFLLGVNVTLDNVEALRLWPEVFRDRTLWLRIDLGYGDGHHEKVTTGGKTSKFGLSVKRIDEFIDVAKTLNITVTGLHAHLGSGVERGNHWSRMYDELAGFASRIGSVSTLDIGGGLPIPYRPDDEPFDVGAWGASLAEVKALHPKFQLVIEPGRFLVAEAGVLLTRVTQVIEKDDILRVGLEAGMHTLIRPALYDAWHGVENLSRLDETPHVLCDVVGPICESSDVFGRRRRLPAATASGDLMLIADAGAYGFSMASTYNLRGLPAEVVLDA

SEQ ID NO: 25876 - protein, 453 aa, Zea mays
  misc_feature (63)..(63): Xaa can be any naturally occurring amino acid
  misc_feature (146)..(146): Xaa can be any naturally occurring amino acid
  misc_feature (189)..(189): Xaa can be any naturally occurring amino acid
  misc_feature (209)..(209): Xaa can be any naturally occurring amino acid
  misc_feature (298)..(298): Xaa can be any naturally occurring amino acid
  misc_feature (305)..(305): Xaa can be any naturally occurring amino acid
  misc_feature (438)..(438): Xaa can be any naturally occurring amino acid
QDIAVVQNSLPCKVQDFPCGYLGLPLLVKKLPNAAFYELIDKDADKLPGWKASLINPSGRVTXVRAVLSTIPIYQLLAMEIPKWVIKAIDKIRRAFLWKAQKEINRGGHCLVAWGRVQRPLDLGGLGILDRILDLEIMGWALRMRXLWLRKTQPDRPWADLDIQLHPNSMAMFHISISSIIGDGSNTFXWKDKWLHGKSLADLPPLYSXMVKRAVKRRSMQDALDSNAWVRDIRGGLSAAALVEYLQLWDTLADFELHPGIEDQHIRTPSSTGEFSTQSAYCSFLVGAVDFEPWKEIXKTWGSTXCKFFIWLAVLNRCWTADRLARRGLEHPERCPWCDHEEENMQHLLISCAFARTVWFSVLRMASLQQYAPGSSDSFFVEWWRQATRQIPRQSRKGFNSLVVLVAWSIWKHRNMCVFEGASPSWDSIMSNVKDEAXLWCMAGAKGLRSLWP

SEQ ID NO: 25877 - protein, 776 aa, Arabidopsis thaliana
MMMSDLSLDLVEEILSRVPATSLKRLRSTCKLWNALFKNPGFTKKQFLKAPKESLVLMLKEYSVCPMIANLSVSAPSIEFKGALNLKNYPPYSEEVDIHEACHCDGLLLCTTMDYRIVVWNPCLGETRWIRWPKNIYSRFALGYEKNKYGRIYKILRCWDRHNSPTGRVDEFEIYEFSSDSWRVLDLVALDCHIASHIGVSFKGNTYWLASDKKDKYGLLLCFDFTTERFTRLCLPPSQDVSKMALSVVGGKQLSLLSQSDSTSKIMEMWVTNIIEDVLMWSKSFTVDIPIRGDYCPYLTSYLVDEEKKVAAQVKERMSGKILCCWNTPNTIGAITSPMSFRLVVMHVGDETESFFSLGDQITNREPFMMSDLPLDLVEKILSRVPATSLKRLRSTCRRWNALLKDRRFTEKHFHKAPKESRVLMLKEYRVFPISVNLKVTPPSVDFKGALGYSHSNSEQVVITEVFHCDGLLLCTTNDDRLVVWNPCLGETKWIQLKVDYRRYVSIFALGYIQNNESCRSYKILWTWYSYDYNSSPPQRGLGFEIYEFSSDSSWRVLDDVNHDSVVNHNSIIRSGVSLKGNTYMLAYDIEENSKFLLMFDFTTERLKRLCLPHFQDVGEMDLSVREEQLSVLNWSRITSKMEIWITNNFDTEATLLWKRVHLDSQCNCVRIFSSLYFDEEKKVVLYCNVKDGETSKKVVYIIGEDDGHYIEIPFVKSIKIERLQLIHTTRCAEGKERNLKDFVLADYSKTPSEPLLKFSQANLPQHQNSSNCCLR

SEQ ID NO: 25878 - protein, 326 aa, Kazachstania telluris
SIVGRPRHQGIMVGMGQKDSYVGDEAQSKRGILTLRYPIEHGIVTNWDDMEKIWHHTFYNELRVAPEEHPVLLTEAPMNPKSNREKMTQIMFETFNVPAFYVSIQAVLSLYSSGRTTGIVLDSGDGVTHVVPIYAGFSLPHAILRIDLAGRDLTDYLMKILCERGYSFSTTAEREIVRDIKEKLCYVALDFDQEMQTAAQSSSIEKSYELPDGQVITIGNERFRTPEALFHPSVLGLEAAGIDQTTYNSIQKCDVDVRKELYGNIVMSGGTTMFPGIAERMQKEITALAPSSMKVKIIAPPERKYSVWIGGSILASLTTFQQMWIS

SEQ ID NO: 25879 - protein, 317 aa, Synechococcus sp. CC9605
MALTELRIASRRSQLAMVQTNWVKAELEKAHPGLKITVEAMATQGDKILDVALAKIGDKGLFTKELEAQMLVDRADIAVHSLKDLPTNLPEGLMLGCITEREDPADALVVNAKNQAYKLETLPEGSVVGTSSLRRLAQLRHHYPHLIFKDVRGNVITRLEKLDSGDYDCLILAAAGLGRLGFSDRIHQLIPGEISLHAVGQGALGIECVEGKPEVLEAIKVLEHTPTSQRCLAERAFLRELEGGCQVPIGVNTRFEGDQLILTGMVASLDGKRLIRDQTSGEASEAEAIGIALANTLKGQGAGEILKEIFETVRPEA

SEQ ID NO: 25880 - protein, 326 aa, Candida rancensis
SIVGRPRHQGIMVGMGQKDSYVGDEAQSKRGILTLRYPIEHGIVNNWDDMEKIWHHTFYNELRVAPEEHPVLLTEAPMNPKSNREKMTQIMFETFNVPAFYVSIQAVLSLYSSGRTTGIVLDSGDGVTHLVPIYAGFSMPHGILRLNLAGRDLTDYLMKILSERGYTFSTTAEREIVRDIKEKLCYVALDFEQEMQTSSQSSAIEKSYELPDGQVITIGNERFRAAEALFRPNDLGLEAVGIDQTTYNSIIKCDVDVRKELYGNIVMSGGTTLFPGIAERMQKEITALAPSSMKVKIIAPPERKYSVWIGGSILASLSTFQQMWIS

SEQ ID NO: 25881 - protein, 323 aa, Xylella fastidiosa 9a5c
MTFQKNVPHTQPAKLATTPGPPGTAATPSLMSEDDDHRTITESQEKRRSWLERLSAAFSGDPHTLDDLLVILRSAEHHGLIATDTLRMMEGAIAIADLTVGDVMVPRSQMVSLPVESDLQTITKQMVESGHSRFPVHGENKDEVLGILLAKDLLRGVSANHTITNVHELLRPVGMIPESKKLNVLLKEFRLSHNHMAIVVDEYGGVAGLVTIEDVLEQIVGDIDDEHDETEDQTNMIAIQADGCYIVDALTPIEDFNERFNAEFPDDDYDTIGGLVTEAIGHLPETGDELTIGRFAFRVAKANARRIHILHVTVLPPNEQNTA

SEQ ID NO: 25882 - protein, 311 aa, Aspergillus oryzae
MGLFSSAEPPLTEANLSNQSGMTFVVTGATSGYGLHLATILYQHGGKVYLAARNASRAQSVIDDITRRHPESKGQLVYLHLDLGDLSTIKKSAEEFLTKESKLHVLWNNAGVMIPPQGSTTAQGYELQLGTNVIGPFLFTKLLYPALAKAAADSPPNSVRVVWLSSSAVRMAPTPAIDFSNMDYHKDEGAWTKYGRSKAANVLLAVEFARRSKKDGVASIVGPLKRISPAENNALLASRCRVGQRPEVGAYTELFAGLQPDIDPVNSGNWSLTCRVVVPPGRVVAGRKDLYDPELSEKFWQWNEEQVRSYL

SEQ ID NO: 25883 - protein, 578 aa, Burkholderia xenovorans LB400
MKASRFFIGTLKEAPADAEIVSHKLMVRAGMIRRVAGGIYNYLPIGLRSIRKVEAIVREEMNRAGAIELLMPAVQPAELWQESGRWEKYGPELLRFKDRKQSDFVIGPTHEEVVTDIARNQIKSYRQLPVNFYQVQTKFRDEIRPRFGVMRGREFIMKDAYSFDKDMDGLRESYRKMYDAYVRIFTRLGLDFRAVAADNGSIGGSGSHEFHVIAETGEDAIAYCPTSDFAANVEAAEALPLHAERAAPAEEMKKTATPGKAKCEAVAELLNIPLERTIKSIILATENEGAEPTIWLLMLRGDHDLNEIKASKLPGLADFRMATEAEIIETFGTPPGYLGPLNTKKPVKVVADRTVANMSDFVVGSNEVDYHTTGVNWGRDLPEPVVADIRNVKKGDPSPDGKGVIDICRGIEVGHVFQLGTKYSEAMNATCLDETGKPRPMEMGCYGIGVTRILGAAIEQNFDDRGIIWPESIAPFEVVLCPMGYDRSEAVREAADKLYATLLEAGIDVILDDRGERPGVMFADWELIGVPHRLVIGDRGLKDGKLEYQGRRDAEATLLPVEDAAQTVIAKVRAALAR

SEQ ID NO: 25884 - protein, 614 aa, uncultured archaeon GZfos18F2
MAHARLSIIDLAGGDQPIHNEDRSIWIVFNGEIFNYPELRKELKSRGHRFYTRSDTEVLVHLYEDHGPEFIHELNGQFAIALWDVRKKQLLLARDRMGIRPLFYFEKAGRLVFASEIKGLLADDRVPRTLDLKALSDIFTCWSPFGALTPFESVRQLLPGHYAMFSSNGMQIRSYWQPVFSAPPSKERSLDDWTEELNGLLYDAARIRLRADVPVGAYLSGGLDSTYISSLVKRSFNNRLCTFSVGFTDERFDETSFQEKAVQSLETDHRIVRCSERDIGKVFPQVIWHTETPILRTAPAPLFMLSGLVRENNFKVVLTGEGADEVFAGYNIFKEDRVRRFWARQPDSKLRPLLLERLYPYIFSRKNSRTRVFLENFFRKSLIQVDSPCYSHLIRWNNTALLKAFFSDELQAMAGKPPDFEERFISTLPSDFMSWDPLSRSQYTEMTIFLANYLLSSQGDRMAMGHSVEGRFPFLDHRVVEFACSMPPEYRLNGLKEKYILKHASRDLIPPELRRRPKQPYRAPISRCFFGKGSPDYVGELLSENAIRRAGYFHPKKVGRLVDKCQKQEGHLASERENMAVAGILSTQLLDHLFLRNFPPHPIQEPENVRVFGL

SEQ ID NO: 25885 - protein, 736 aa, Salinibacter ruber DSM 13855
MAKELERDLGLPSVLAISIGAMVGSGIFILPALAMKMAGPAVVLAYLLAGVLVLPAALSKAEMATAMPEAGGTYVYIERGMGPLLGTIAGIGTWFSLSFKGALALVGGAPYIVLLFDVPPQALALGIAGVLIVVNLLGVKQTGRIQVALVAVMLAAMVWFVGGSLGDVDPVRFEGFFDEGIGGLLAATGFVYVSYAGVTKVASVAEEIEHPDRNIPLGLLGSLAFTTLLYVLVVTVIVGAAPTAGLAGSSTPVADVAGSTLIQWGVLVVVAAAILALVSTANAGLLSASRYPFAMSRDKLVPDALQHVSDRFDTPTTAITVTGGVVLAMIAFVPIDDIAKLGSAFKILVFILVNLALVAFRESDLDDYEPAFRDPMYPWTQGVGVLGGLALLSQMGLVPLVGAVLITGAGALWYGAYARRRVGREGVVRDELRRRVGQQAAERTRVALDTGQRADRVVVGTTEDLRPDRETALVEVGAALTGAFEGGLTVVRFDAVPDQLPLDSAAEVQSPDDVDFETRMDRFGASVDGPFEYGEVVSHDVRHAVANFARHHAVDLLVLERTLSADRSWLDERDLDWISRHCSADLVLVEPTPLAVLDRIALVTDNGPFDPRKVELANGLAAAAGASLVLGHAVPADATEDQRATVRTYHEDLMGLCTVPVESNIVGTTTPAAMARAVSAADLVVVESDAAWWARLLDNREPQRIAGAFGGPAIVVRPQQAEGPSPVRRLLERVAF

SEQ ID NO: 25886 - protein, 327 aa, Xanthomonas campestris pv. campestris str. ATCC 33913
MSSPITLIEAITQALAWELEHDPAVLVLGEDVGVNGGVFRATAGLQQRFGSARVLDTPLDETTIAGLSVGLAAQGMKPVAEAQFDGFVYPMVDHLICHAARLRNRTRGRLHCPMVLRVPWGGGIRAPEHHSEANEAIFTNVPGLRVVLPSSPQRAYGLLLAAIRDPDPVIYMEPKRIYRQYKEVVANDGEALPLDVCFVLRDGTDVTLVTWGAQVKEALEAADKLASEGISAEVIDVATLRPLDFDTIAESVAKTGRCVIVQEAPRTAGFGAEIAAQLAEKSMYDLLAPVERVTGYDTHIPLFRLEMKFLPSVERIVTAARRAVAAG

SEQ ID NO: 25887 - protein, 439 aa, Xylella fastidiosa Ann-1
MFELLIVIALIFLNGFFAMSEMSLMTSRKSRLKQMAHSSKHAAKALTLAQNPESFLSTVQIGITLIGILTGLFGGDAIGTAIGQWLTALTPQLGEYTSIIGKTLSVALITFLTLIFGELVPKRLALTHSENIASTIAVPMSVLARIAAPGVWVLAKSTQLVLRVFGFGKIPSSAVTEEEIRLLVAESHEAGVIDDYERNMMNRVMRLGDRTADSLMTPRNRIAWLDNSADLEHNLEIMREHQFSRYPVYRSSDQDIVGILEVKSVITRIDSQTQTTLSLFQELCEPVFVSESTHALKLLEIFREEQQSMALVVDEYGEILGLVTISDLMGAVIGRLQNVENTDEDALMVTREDGSFLIDGTLPIEELREVLGAELPDGEENNYHTLAGMCISYFGRIPHVGEYFDWAGWRIEIVDLDGARIDKLLLQRLNKEKNHVPHK

SEQ ID NO: 25888 - protein, 409 aa, Prototheca wickerhamii
MARAKFERKKPHVNIGTIGHVDHGKTTLTAAITMALAARGGGKGKKYAEIDSAPEEKARGITINTAHVEYETESRHYAHVDCPGHADYVKNMITGAAQMDGAILVVSGADGPMPQTKEHILLAKQVGVPNIVVFINKEDQVDDIELIELVELEVRETLQRYDFPGDEVPMIPGSALMALTALTDNPKIKPGENKWVDKIYNLMDIVDSYIPTPKRNIEKPFLMAIEDVFSITGRGTVATGRVERGVVKIGDSVEIVGLGATKITTVTGLEMFQKTLDESIAGDNVGILLRGIQKTEIQRGMVLAKPKSITPHTNFEAQVYVLNKEEGGRDTPFFSGYRPQFYVRTTDVTGKIESFCTDAGEPIKMVLPGDRIKMKAELIQPIAIERNMRFAIREGGKTVGAGVVGKILK

SEQ ID NO: 25889 - protein, 229 aa, Rubrivivax gelatinosus PM1
MSPQRHFRIAPSLLSADFARLGEEVKDVIAAGADWIHFDVMDNHYVPNLTFGPMVCEALRKHAVTAAGVRVPIDVHLMVQPVDALAQAFAKAGADLVSFHPDASTHVDRTLQLIKDAGCQAGLVFNPAASLDVLEWVIDKVDLVLLMSVNPGFGGQSFIPSTLKKLARVRQLIDASGRDIRLEVDGGIKTDNIRAAADAGADTFVAGSAIFGQPDYKAVIDAMRARLAA

SEQ ID NO: 25890 - protein, 592 aa, Bartonella bacilliformis
MTINLHRPDIAELKPRITVFGVGGGGGNAVNNMINAGLQGVDFVVANTDAQALAMSKAERVIQLGAAVTEGLGAGALPEVGQAAADECIDEIIDHLADSHMVFITAGMGGGTGTGAAPVVARAAREKGILTVGVVTKPFQFEGARRMKTAEAGIEELQKSVDTLIVIPNQNLFRIANEKTTFADAFAMADQVLYSGVASITDLMIKEGLINLDFADVRSVMHEMGRAMMGTGEASGEGRALAAAEAAIANPLLDETSMCGARGLLISITGGRDMTLFEVDEAANRIREEVDADANVIFGAIDDESLEGVIRVSVVATGIDRLASDVVQPSHSKFQKSVSSVRKNDSGINQTASHPQSSQLRSESMVETIESLEVEVSQSQPVEEMFSPKSQIFAKPTDTASTSSRSAATYPFGHGQSDIYGKISNASRIQVNSIPQQSTAAAVSMEATAHVLSEMTNIVEQSEEKQAQIQPYIAPARMPELKDFSPFTHGQGIHSSGLEQGPRSLWQRLKQSLTYREEIEPEARLEPAVKPLQNEESHIYNKNVQKVSSQDSSVYAPHRSTKLQSRALQDQRAFVNEEDQLEIPAFLRRQAN

SEQ ID NO: 25891 - protein, 318 aa, Haemophilus influenzae R2866
MSDTKHAKLLILGSGPAGYTAAIYAARANLKPVLVTGLQQGGQLTTTDEIENWPGDFEMTTGSGLMQRMLQHAEKFETEIVFDHINRVDLSSRPFKLFGDVQNFTCDALIIATGASARYIGLPSEENYKGRGVSACATCDGFFYRNKPVGVIGGGNTAVEEALYLANIASTVHLIHRRDSFRAEKILIDRLYKKVEEGKIVLHTDRTLDEVLGDNMGVTGLRLTDTKTGEKEELKLDGLFVAIGHSPNTEIFQGQLELNNGYIVVKSGLEGNATATSVEGVFAAGDVMDHNYRQAITSAGTGCMAALDAERYLDAQEA

SEQ ID NO: 25892 - protein, 112 aa, Glycine max
MLKILMALLLLSLSFQAYGQFEEWCIADEQTPDDELQRAMEWACGKGGADCSKIQVNQPCYLPNTLKDHASYAFNNYYQRFKNKGGSCYFNSAAITTDLDPSHGSCKYEFVP

SEQ ID NO: 25893 - protein, 391 aa, Bordetella bronchiseptica RB50
MSAQISSLNAGAAPESFGIASVPEIIAELRAGRIVILVDEEDRENEGDLVMAAEFVTPEAINFMVTHGRGLVCLTLTEERCRQLDLPLMASRNGTRYGTNFTQSIEAAEGVETGISAADRARTIQVAVARDAQPSDLVQPGHIFPVRAVPGGVLVRAGHTEAGCDLTAMGGLTPAAVICEILKPDGTMARLPDLVEFAREHKLKIGTIADLIQYRSEHESIIARMGERMMQTPWGDFRCIAYRDDATRSPHLALVHGNIDPERETLVRVHEPASLLDVLDTGASPHSWSVGQALHAIAASPAGVLVLMNCQSSTEHLFGQIANWAGPAERAAAQEGDRFGLRTYGIGAQILRDLNVGRMKLLARPRKMPSMAGFALTITGYDCAPPNLRND

SEQ ID NO: 25894 - protein, 326 aa, Flavobacteria bacterium BBFL7
MKTIQFREAIAEAMSEEMRRDESVYLMGEEVAEYNGAYKASKGMLDEFGAKRVIDTPIAELGFAGIAIGSTMTGNRPIVEYMTFNFSLVGIDQIINNAAKIRQMSGGQFPCPIVFRGPTASAGQLAATHSQAFENWFANTPGLKVIVPSNPYDAKGLLKAAIRDDDPVIFMESEQMYGDKGEVPEGEYILPIGVAEIKREGTDVTIVSFGKIIKEAYKAADELEKDGISCEIIDLRTVRPYDKEAILKSVKKTNRLVILEEAWPFGNVSTEISHMVQAEAFDYLDAPIYKINTQDTPAPYSPVLFAEWLPNHTHVVDGVKKVMYKK

SEQ ID NO: 25895 - protein, 326 aa, Candida saitoana
SIVGRPRHQGIMVGMGQKDSYVGDEAQSKRGILTLRYPIEHGIVTNWDDMEKIWHHTFYNELRVAPEEHPVLLTEAPMNPKSNREKMTQIMFETFNVPAFYVSIQAVLSLYSSGRTTGIVLDSGDGVTHVVPIYAGFSLPHGILRIDLAGRDLTDYLMKILSERGYTFSTTAEREIVRDIKEKLCYVALDFEQEMQTSSQSSAIEKSYELPDGQVITIGNERFRASEALFRPADLGLEAVGIDQTTYNSIMKCDVDVRKELYGNIVMSGGTTMFPGIAERMQKEITALAPSSMKVKIIAPPERKYSVWIGGSILASLSTFQQMWIS

SEQ ID NO: 25896 - protein, 326 aa, Candida sake
SIVGRPRHQGIMVGMGQKDSYVGDEAQSKRGILTLRYPIEHGIVTNWDDMEKIWHHTFYNELRVAPEEHPVLLTEAPMNPKNNREKMTQIMFETFNVPAFYVSIQAVLSLYSSGRTTGIVLDSGDGVTHVVPIYAGFSLPHGILRIDLAGRDLTDYLMKILSERGYTFSTTAEREIVRDIKEKLCYVALDFEQEMQTSSQSSAIEKSYELPDGQVITIGNERFRASEALFRPSDLGLEAAGIDQTTYNSIMKCDLDVRKELYGNIVMSGGTTMFPGIAERMQKEITALAPSSMKVKIIAPPERKYSVWIGGSILASLSTFQQMWIS

SEQ ID NO: 25897 - protein, 424 aa, Desulfitobacterium hafniense Y51
MYQKTVLPNGVRIITEEIDYVRSVAVGIWVGAGSRDEKEGYEGISHFIEHMFFKGTKNRTARDIAESLEAVGGQLNAFTTKEYTCYYAKVLDEDMDLAMDVLNDMFFESLFDENEIEKEKKVVIEEIKMYEDSPDELIHDLFSDHVWNDHPLGRPILGTEESVKGLSREKILTFMDHHYAPDNLVIAVAGKIKHDEVLKKLAPLYGEFKRGGRRILEETPKGQQVQEMILKDTEQMHLILGVPGLGQEDEDLYPMHILNNILGGGLSSRLFQEIREQRGMAYTVFSYHSTYVDTGLFAIYAGTTPSNSQEVVECVLAEILDIKKNGISQSELQRTKSQIKGGLYLGLESASSRMSRLGKTELTYNRVISPEEVVEKLERVTVEDTKRVINRLWKRDKISLLMLGPAGNEVDMDALFEKIGWDEE

SEQ ID NO: 25898 - protein, 326 aa, Candida shehatae
SIVGRPRHQGIMVGMGQKDSYVGDEAQSKRGILTLRYPIEHGIVSNWDDMEKIWHHTFYNELRVAPEEHPVLLTEAPMNPKSNREKMTQIMFETFNVPAFYVSIQAVLSLYSSGRTTGIVLDSGDGVTHVVPIYAGFSLPHGILRIDLAGRDLTDYLMKILSERGYTFSTTAEREIVRDIKEKLCYVALDFEQEMQTSSQSSAIEKSYELPDGQVITIGNERFRAAEALFRPSDLGLEAAGIDQTTFNSIMKCDVDVRKELYNNIVMSGGTTMFPGIAERMQKEITALAPSSMKVKIIAPPERKYSVWIGGSILASLSTFQQMWIS

SEQ ID NO: 25899 - protein, 348 aa, Carica papaya
MAIICSFSKLLFVAICLFGHMSLSYCDFSIVGYSQDDLTSTERLIQLFNSWMLKHNKNYKNVDEKLYRFEIFKDNLKYIDERNKMINGYWLGLNEFSDLSNDEFKEKYVGSLPEDYTNQPYDEEFVNEDIVDLPESVDWRAKGAVTPVKHQGYCESCWAFSTVATVEGINKIKTGNLVELSEQELVDCDKQSYGCNRGYQSTSLQYVAQNGIHLRAKYPYIAKQQTCRANQVGGPKVKTNGVGRVQSNNEGSLLNAIAHQPVSVVVESAGRDFQNYKGGIFEGSCGTKVDHAVTAVGYGKSGGKGYILIKNSWGPGWGENGYIRIRRASGNSPGVCGVYRSSYYPIKN

SEQ ID NO: 25900 - protein, 326 aa, Kazachstania telluris
  misc_feature (139)..(139): Xaa can be any naturally occurring amino acid
  misc_feature (298)..(298): Xaa can be any naturally occurring amino acid
SIVGRPRHQGIMVGMGQKDSYVGDEAQSKRGILTLRYPIEHGIVTNWDDMEKIWHHTFYNELRVAPEEHPVLLTEAPMNPKSNREKMTQIMFETFNVPAFYVSIQAVLSLYSSGRTTGIVLDSGDGVTHVVPIYAGFSXPHAILRIDLAGRDLTDYLMKILCERGYSFSTTAEREIVRDIKEKLCYVALDFEQEMQTAAQSSSIEKSYELPDGQVITIGNERFRTPEALFHPSVLGLEAAGIDQTTYNSIQKCDVDVRKELYGNIVMSGGTTMFPGIAERMQKEITALAPSSMKVKIXAPPERKYSVWIGGSILASLTTFQQMWIS

SEQ ID NO: 25901 - protein, 254 aa, Salmonella typhimurium LT2
MNSQFAGLTREACVALLASYPLSVGILAGQWIALHRYLQQLEALNQPLLHLDLMDGQFCPQFTVGPWAVGQLPQTFIKDVHLMVADQWTAAQACVKAGAHCITLQAEGDIHLHHTLSWLGQQTVPVIGGEMPVIRGISLCPATPLDVIIPILSDVEVIQLLAVNPGYGSKMRSSDLHERVAQLLCLLGDKREGKIIVIDGSLTQDQLPSLIAQGIDRVVSGSALFRDDRLVENTRSWRAMFKVAGDTTFLPSTA

SEQ ID NO: 25902 - protein, 500 aa, Escherichia coli
MMTEPHVAVLSQVQQFLDRQHGLYIDGRPGPAQSEKRLAIFDPATGQEIASTADANEADVDNAVMSAWRAFVSRRWAGRLPAERERILLRFADLVEQHSEELAQLETLEQGKSIAISRAFEVGCTLNWMRYTAGLTTKIAGKTLDLSIPLPQGARYQAWTRKEPVGVVAGIVPWNFPLMIGMWKVMPALAAGCSIVIKPSETTPLTMLRVAELASEAGIPDGVFNVVTGSGAVCGAALTSHPHVAKISFTGSTATGKGIARTAADHLTRVTLELGGKNPAIVLKDADPQWVIEGLMTGSFLNQGQVCAASSRIYIEAPLFDTLVSGFEQAVKSLQVGPGMSPVAQINPLVSRAHCDKVCSFLDDAQAQQAELIRGSNGPAGEGYYVAPTLVVNPDAKLRLTREEVFGPVVNLVRVADGEEALQLANDTEYGLTASVWTQNLSQALEYSDRLQAGTVWVNSHTLIDANLPFGGMKQSGTGRDFGPDWLDGWCETKSVCVRY

SEQ ID NO: 25903 - protein, 319 aa, Listeria monocytogenes
MASEEKIYDVIIIGAGPAGMTAALYTSRADLDTLMIERGVPGGQMVNTAEVENYPGFDSILGPDLSDKMLSGAKQFGAEYAYGDIKEVVDGKEFKTVTAGSKTYKARAIIIATGAEHRKLGAAGEEELSGRGVSYCAVCDGAFFKNRELIVVGGGDSAVEEGTYLTRYADKVTIVHRRDKLRAQQILQDRAFKDEKVDFIWNSTVEEIVGDGKKVTGAKLVSTVDGSESIMPVDGVFIYVGLVPLTKAFLNLGITDDEGYIVTDEEMRTNLPGIFAAGDVRAKSLRQIVTATGDGGLAGQNAQKYVEELKESLEAEAAK

SEQ ID NO: 25904 - protein, 467 aa, uncultured archaeon GZfos18H11
MRIVMKFGGTAIANGEKIKTAANLVMQSKEAVENMEIVVVTSAIYAVTDTIYEHANRIAEEGKVEKVKEFVGELRNKHNMVASVAIGDTQVLKKVKGEIKERIAEMEKALIGICLLGELTLRSLDYIGSFGERLAAPILAGAIQSVGIDAVHFTGGDIGIITNAEYGSAQLSGGVEQEVRARIMPLLRDKIPVVCGFTGETKDGKITTLGRGGSDYTATIIGAAIDADEIWLWKDTEGIMSADPKRIKNARKIPYMSYIEAMELSYFGAAVLHPRAIEPAMKKKIPIRVKNLLNPDDEGTLIGEEQEKTKKAAKAITLIENTSIVNIAGTGIGSISDVASRIFSVLAAKNVDIIMISHGSSERTVSLVIDSAQLERAIDAIHSIPAVDTVIRDISYNSNVCTVGVVGVGMAGTVGVAGKVFSALGNEGISVKMISQGSSEFNISFVVQKEEAYKAAQAIHDVFEMGS

SEQ ID NO: 25905 - protein, 621 aa, Listeria monocytogenes str. 1/2a F6854
MCGFVGCVHDRITEITGADKETFRQMNSMITHRGPDDEGYFTDDHVQFGFRRLSIIDVENGHQPLTYENERYWIIFNGEVYNYVELREQLVAEGMTFETESDTEVIIATYAKYKEKTAERLRGMFGFVIWDKQEELVYGARDPFGIKPFFYAEEDDKLFMGSEKKSILHALKEKELDEVSLQNYMTYQFVPEPDSLTKNVKRLEPGHQFTKKIGQPMEITTYWKASFAPVTKSEDAWIKEVRDVMYDSVKMHMRSDVPVGSFLSGGIDSSIIAAIAKEYHPAIKTFSVGFERDGFSEIDVAKETADKLGVENISYVISPEEYMKELPKIVWHMDDPLADPAAIPLYFLSREARKQVTVALSGEGADELFGGYNIYNEPNSLAMFNKMPGVFKSLLNNVARIMPEGMRGKSFLERGTTPMEERYIGNAKMFTEKEKQILLPKYQAGHDYTNITDPFYAETTNYHPVERMQYIDIHTWLRGDILLKADRMTMANSLEVRVPFLDKEVYNVARNIPDTMKTTNGTTKYILRKAAATFVPEHVLNRRKLGFPVPIRHWLKDEMNAWVKNIIKESPTDHLINKQYVLDLLDDHCAGKFDYSRKIWTVVIFMIWYDVYVADKYDFGK

SEQ ID NO: 25906 - protein, 318 aa, Wolbachia endosymbiont strain TRS of Brugia malayi
MKNYRFGTKVLIIGSGAAGYAAAIYAARANLEPVVVTGMQPGGQLTITMGVENYPGFVSIQGPELMKQMRLHVEKVGAEIVNDEIKSVEQLEYSNEYKFRSSGNNDDYYSNAVIIAAGSQAKWLGLESERKFQGYGVSACATCDGAFFRNKIVAVIGGGNTAVEEAIFLTRFAKEVILIHRRDKLRAEKIMQDRLFANNKIKVIWNHTVEQVLGEENPKKVTGITIKSTKIDEIQELRVNGVFIAIGHAPNTGVFKSFIEMDEQGYIITKPGTTLTSRAGVFAAGDVQDKVYRQAVVAAGTGCMAALDAEKFLECTSK

SEQ ID NO: 25907 - protein, 481 aa, Xanthomonas oryzae pv. oryzae KACC10331
MFPGEPMSSASIDGAPDAGENTRFIILISCVATIGGFLFGFDSGVINGTVDGLKQTFQSTAAETGFEVASMLLGCAIGAFFAGRLADRSGRRAVLIISAALFLLSAIGAGASHSSGFFIFARVMGGFAVGAASVISPAYIAEVASARYRGRLATMQQIAIISGLFCAFLSNYLLANAAGASTEPLWAGQAAWRWMFWMQAVPSLLFLLLLLVIPESPRYLVVKGRREQALVVLKRLYGNAAAQTKLGEISASMSADRHKPKFSDLINQATGKIRPIVWIGIGLAVFQQLVGINVVFYYGAVLWQAVGFSEQDALLINVLSGGLSIGACLVTVMLVDKIGRKPLLWIGSAGMAVSLALVTYAFATASLDLNGKLAMSDAMGMLALVAANVYVVFFNASWGPVMWVMLGEMFPNQIRGSGLAIAGAAQWTSNFAITVSFPILLGSIGLAGAYGIYTVAAFISVFFVLKCVYETKGKELEQMEG

SEQ ID NO: 25908 - protein, 309 aa, Desulfovibrio vulgaris subsp. vulgaris str. Hildenborough
METRPLVIIGAGPAGLSAAVYTARAGIPTLVFGSAPKVAGDYDIDNYFGFDETITGRELIERGRRQAERFGAVLRDDRILGLHHGDDGGFRITTEAGETAACAIILATGVSRVRPGISNIADYEGKGVSYCVSCDGFFYRGLRVKVLGEGVFAANQALELLHYTPHVSICTQGKAASITPEFMTRLDEAGIAVDDRKIASLEGTPALSVLRYEDGSTEEAQGLFIAMGEASSLDFAYTLGVERNGVFLGADSDQRTNIPGVFAAGDCTGGFLQIAVAVGEGAKAARAAISYIKEECPFATSRRNTTTES

SEQ ID NO: 25909 - protein, 1372 aa, Cercospora zeae-maydis
MPTSNGGRTSPASLRSHHVRYASDSNIALRSTIMEQPEGPPELETYDSSGTNSSGNDGDEYAGTQESHSDSDGISSRHFVPGSGQAYAQDEVTPLTNVSTYGWSQPGSSNVSRTTTRGSVGSALPGTPAYEGTGTAMTNGTRRPANTRKESSNIYAPNRGPGSSMRYALNTGTRPRNGFTHMRRRNPNDEYRAQEKAYVQRIRQDGPDNDFQTEPRTPSLDYSFGSEDDEESPTNANYADHDPAEVDTLLYYGQEDLEPSVEELNIPANRERLEWHAMLANVLTGDVVKQEKKRLIGGPEQQGENTLKTEVWIGVRAKTCGRSIAAQKRLVEDGRSKVKQTIESIVAFEIKGEAEVGQSPMQQVQDVVKKIEKIEGLYPPRQAFRAAHPPAASSAYEHTCDAVIAWNNTTELIGTELGILQSWVGNMELDFTTARVRPEGEQHNELFDDSSFIDRILKEDGLKSLQGDKNLLNGVNTVIHKAKATLIANAEAFSDRHLPPYIEELLTLINFPSRLIQEIIRMRLSYAKKMKDAAQQGVMTAEQMILQFQILLQLAVKIKEQYLLIGQPEPGWDLPPCIDDNFDSVVLDALKFYFKMLNWKLMANKNTFKEAEILEQEWDFSNELGRHLDGGDVEVAEQFSSLTSKSMGRLAAPFEKELQRPADEVAGTAEMDKRYKSILDSVRVRQRKIFRFSRILSQRFENATEYNINIDNELYEDFLLALRLSGHFLVETNAESSVPTPGENEKAGGKVYILASPVLKERPKDIQSMLGTCYHAEDSPEDPSNPYVLILRPELPLVWEGDRMDASHSGKETLKVPQTLDLKTGRLRLVADGSLQRLQNANMAFTTATGNFDLTILVEQRANLCRESTKNWQRFAKLHTSSPTHSWTRSPLFALRSKPREGKAKAKNSTHPELLCFCYGIWSAFCHSHGRTTAGGQSHKLTKLALDWVSFICDDCVASDRKTFRWAVVALEFAMVMTRGQNILSISDEEYALLRSKVAGCRSLLISHFDIMGARGTVAAQAEKQRMDAMVGKLRLDIGKLKDDDESSRIVRAQWLDELEKLDQARKDREAERQALGRVLEDSNDADRALTHLSASAGNVHLRWQQGQFVGGGTFGSVYAAINLDSGHLMAVKEIRLQDPKMIPTVVSQIRDEMGVLQVLDHPNVVQYYGIEPHRDKVYIFMEYCSGGSLAGLLEHGRIEDETVVQVYALQLLEGLGYLHEASVVHRDIKPDNILLDHNGVIKFVDFGAAKVIAKQGKTMVADGPTGNGRQRSVQGTPMYMSPEVIKGGKHTGRLGAADIWSLGCVISEMATGSRPWANMDNDFAIMYNIANGNSPQMPTRDQMSDVGLDFLQAMLRTRPCEACVRCGASAT

SEQ ID NO: 25910 - protein, 470 aa, Frankia sp. EAN1pec
MTTSAETALEGLGSYRFGWADADAYAVDVERGLSEAVVRSISAKKNEPSWMTDLRLKGLKLFERKPMPTWGADLSGIHFDNIKYFVRSTEKQAEEWADLPEEIRATYDRLGIPEAEKQRLISGVAAQYESEVVYHKIREDLEEQGVIFLDTDSGLREHPEIFQEYFGSVIPVGDNKFAALNTSVWSGGSFIYVPPGVQVEIPLQAYFRINTENMGQFERTLIIVDEGAYVHYVEGCTAPVYSSDSLHSAVVEIVVKKNARCRYTTIQNWSNNVYNLVTKRAACHEGATMEWIDGNIGSKVTMKYPAVWLLGEQAHGEVLSIAFAGEGQHQDAGAKMVHAAPRTSSKIVSKSVARGGGRTSYRGLVQINEGSHASRSTVKCDALLVDTVSRSDTYPYVDVREDDASIGHEASVSKVGEDQLFYLMSRGLSEDEAMAMVVRGFIEPVARELPMEYALELNRLIELQMEGAVG

SEQ ID NO: 25911 - protein, 163 aa, Pseudomonas putida KT2440
MQHYVTPDLCDAYPDLVQVLEPMFSNFGGRDSFGGQIVTIKCFEDNSLVKEQVELDGKGKVLVVDGGGSLRRALLGDMLAEKAAKNGWEGLVIYGCVRDVDVLIQTDVGVQALASHPMKTDKRGIGDLNVVVTFAGVTFRPGEYVYADNNGVLVSPKPLKMPE

SEQ ID NO: 25912 - protein, 323 aa, Haemophilus influenzae R2866
MTKSAKIGVLLANLGTPDSPTPKSISRYLWQFLTDPRVVDLPRCKWYPLLKAIILPLRSKRIAKNYQAIWTEQGSPLLAISRQQKDALQAYLDKQNIDTQVEIAMTYGNPSMQSAVKNLLKNQVERIIVLPLYPQYSSSTTGAVFDAFANALKEERGLVPFDFIHSYHVDENYINALANSIKVRLKSDEFLLFSYHGIPLRYEKMGDYYREHCKQTTIAVVNKLGLTENQWGMTFQSRFGREEWLQPYTDKFLESATTQNIQKITVICPGFSVDCLETIEEIDKENRENFLKNGGQSYQYIPALNVEHAHIEMMGKLILEKLA

SEQ ID NO: 25913 - protein, 164 aa, Shewanella sp. ANA-3
MLDLLPDLFDHYPTKLSLLPLDFRSFGGKRLFWGEVVTVKCFEDNSKVKEVLAQPGHGKVLVVDGGGSPRRALLGDLIAQSALDNGWQGVVINGYVRDVARLSTFNLGVYALGAMPIKTEKLNQGHIDVPIEFGAVTVKPGMMLYADENGIAVSEASLNFAFLS

SEQ ID NO: 25914 - protein, 445 aa, Burkholderia sp. 383
MGIHVIKMPDIGEGIAEVELVAWHVEVGQTIKEDQPLADVMTDKAAVEIPSPVTGKVIELGGRIGEMMAVGSELIRLEVEGDGNLKAGAPVRESKVATAPVAAAPSKAVADAAAESSAKPAPKHAPAEPRRAKHAEHAERVEPPRAALAPGERPLASPAVRQRAWDMGVELRYVRGTGEAGRILHADLDAYAGSGSGAARGSRGAHAHGYGERNDETEVPVIGLRRAIARKMQEAKRRIPHFSYVEEIDVTELESLRTDLNRRYGDTRGKLTPLPLLIRAMVIALRDFPQINARFDDEAGVVTRYGAVHMGVATQTDGGLTVPVLRHAEARDVWSISAEIARLADAVRANRAQRDELSGSTITISSLGALGGIVSTPVINHPEVGIVGVNRIVERPMIRDGAVVARKMMNLSSSFDHRVVDGADAAEFIQAVRAVLERPALLFVE

SEQ ID NO: 25915 - protein, 121 aa, Brassica napus
MYRTAASRAKALKGSLSRGLAPARYASSNAVATSSSSTGFFGWLTGGSSSSLASLDMPLQGVSLPPPLADHVEPSKLKITTLPNGLKIASEMSPNPAASIGLYVDCGSIYEAPYFHGATHL

SEQ ID NO: 25916 - protein, 151 aa, Emericella nidulans
MSTSARRRLMRDFKRMQTDPPAGVSASPVADNVMTWNAVIIGPADTPFEDGTFRLVMHFEEQYPNKPPGVKFISQMFHPNVYGTGELCLDILQNRWSPTYDVAAILTSIQSLLNDPNTSSPANVEASNLYRDNRKEYIKRVRETVEKSWEE

SEQ ID NO: 25917 - protein, 188 aa, Pseudomonas syringae pv. phaseolicola 1448A
MNKKQRDEISKLLSYLLRHAPESMGLTLDRDGWSEVDDLIRKANAHGYAFDRQALNEVVETNEKKRFTLSEDDQRIRAAQGHSTVQVQVQHAEKEPPATLYHGTASRFMTSIETQGLIAGSRHHVHLTEDPETAMSVGKRYGQPVLLAVDAKGMFEAGVRFFQADNGIWLVKAVSRDSLTVLRLPIPE

SEQ ID NO: 25918 - protein, 439 aa, Salinibacter ruber DSM 13855
MDQDFSSKFSFDDAANEEAKICVVGVGGGGGNAINNMVQKGIHGSVEFIAVNTDSQALSENRAPQKIQAGQDLTSGLGAGARPSVGAEAIEESSEEIRQALDGYDMAFITAGMGGGTGTGGAPVVAAIARSLDILTVAIVTKPFDCEGSRRMNTAQEGIELLRENVDTLIVIPNERLLDIADPDTSLIEAFEKADEVLYNATRGISDLITVHGLINLDFADVQTTMKDGGTALMGSATATGENRSEKAAVQAISSPLLDGLSIAGATNVLVNITSGPSLGIREATQATSVIQKEAGEDVEVIFGTVIEEDIEDKLRVTVIATGFDRDEEPEDEGDDGRRTVPLEDQNEDDDPADYKGETNLRQLDTPAYERRNAPLRSEPSEDEPTDETDGESEDDTPNIRRLEADDLNERTDRDERSRSEEETDDDTDTPAFLRKMMD

SEQ ID NO: 25919 - protein, 142 aa, Rhodobacter sphaeroides 2.4.1
MQVKYLHTMVRVLDLEKSIAFFRLLGLEETRRTESETGRFTLVFMAPPGQPECPVELTYNWDGDEGLPSDSRHFGHLAYAVEDIYDMCARLQAAGVTINRPPRDGHMAFVRSPDNISIELLQMGDSLPPAEPWSSMQNTGHW

SEQ ID NO: 25920 - protein, 263 aa, Pseudomonas putida KT2440
MTFQHILFSIEDGVAFLSLNRPEQLNSFNTAMHLEVREALRQVRQSSDARVLLLTAEGRGFCAGQDLSDRNVAPGAEMPDLGQSIDKFYNPLVRTLRDLPLPVICAVNGVAAGAGANIPLACDLVLAARSASFIQAFCKIGLVPDSGGTWLLPRLVGMARAKALAMLGERLGAEQAEQWGLIYRVVDDAALRDEALTLARHLAAQPTYGLTLIKRSLNASFDNGFEAQLELERDLQRLAGRSEDYREGVNAFMNKRTPAFKGR

SEQ ID NO: 25921 - protein, 257 aa, Pseudomonas putida KT2440
MPRYIDVQAPEHGVQLITLQRPEALNALCTELLAELAAALQAAGNDEHVRATVITGSAKAFAAGADIREMADRDLVGILNDPRVAHWQSIAAFAKPLIAAVNGYALGGGCELAMCADIVIASTDARFGQPEINLGIIPGAGGTQRLLRAVGKPLAMQMVLTGEAITALRAQQAGLVSEITQPELTVERAMQVARSIAAKAPLAVRLAKEALLKAGDTDLASGLRFERHAFTLLAGTADRDEGIRAFQEKRQARFQGR

SEQ ID NO: 25922 - protein, 469 aa, Leuconostoc mesenteroides subsp. mesenteroides ATCC 8293
MTQQQLPQKWHLNGLSKNGLSNDTQTILKNGQKYELFYLVDTGKGLEANQQRTRWARSVSSDLTTFKVADSADIKPVSQQESVATGSIVKDADNLSGHGKNSLLAYATKYINGNQWTYMWYSTNQGENWHVAHNGKPVAKPYKEGKDFRDPHVIYDSDAKQFVMTVAEADDNNHMKIGFYISKNGTTWQYTDSFYSPRDLGTLEVPEIHQIYQKNNNQKQWILFFGANGFADDFQKSTGSYYVVGQLKNGQFEAETDPKRVDFGTDYYAAHNYQENNEQLLGFGWMGNWDYINRVSDDIKYKGNYSAFRKMFLSSDNKLKTSKIITNGLFDTKKKTALVRTHSKSHIKTNKAAYKISTVVNGNQKLTIRAGNGDSNVSFHFNNFDKKMTVHRQSNYVTNDAYNKDYNINLWGDWSEKVDFYVDQYSIEVFWPKTGQVATFAKYSNDSGDNIVFDNLDNKSSSLVVQEMK

SEQ ID NO: 25923 - protein, 424 aa, Rickettsia conorii str. Malish 7
MTTILVIVIIIMIALSALFAATETAITASSPGKIHKLKIAGNKRAKTILEVLKKKEKVIGTLLIGNSLINTVCTTIATTLFISFLGDNGPIVASGVMAFIIIVFAEVVPKAIAVAKPEQLALKMASTIVIFLKLFKPINIALDYITKIFCFILRINLNPQISGTEEVRGVIEHYHQEGGVYKSDRNMLGGILDIRNMTVSEIMTHRSSIIALNIDLPHEVIIKTLLSGAHTRIPLWQDNRDNIIGILNLKDLLKALYENNNDAKKVDINKLLTPPWFIPENALVVDQLHAFRERNNHFACVVDEYGTLLGIITLEDVIEEIVGPITDEHDRLNNEIIKKSNTEFIIKGTTTIRDINRELDWNLSDEDANTIAGLIIHKIARIPNQGEVIEIFNLKVIILKKIANKIDSVKITVLPTTEATISSE

SEQ ID NO: 25924 - protein, 225 aa, Glycine max
MGSDSNLGGSPSASSPSAKRTRDPEEEVYLDNLRSHKRYLSEIMASSLNGLTVGDSLPDNLMESPARSESMFSFRDDMSLQYSPMSEDSDDLRFCETPVHSCSSQPDSLPSSPVSPHRYQRPQNALPSAPSSSSNASYGSTIACPQPRQRGSDSEGRFPSSPSDICHSADLRRAALLRSVQMRTQPPGPASLDLPFVSNQESAPNIDPEERSCSYMKSLVDEREY

SEQ ID NO: 25925 - protein, 335 aa, Pseudomonas aeruginosa
MTIRLAINGFGRIGRNVLRALYTGHYREQLQVVAINDLGDAAVNAHLFQYDSVHGHFPGEVEHDAESLRVMGDRIAVSAIRNPAELPWKSLGVDIVLECTGLFTSRDKAAAHLQAGAGKVLISAPGKDVEATVVYGVNHRGVVRASHRIVSNASCTTNCLAPVAQVLHRELGIEHGLMTTIHAYTNDQNLSDVYHPDLYRARSATQSMIPTKTGAAEAVGLVLPELAGKLTGLAVRVPVINVSLVDLTVQVARDTSVDEVNRLLREASKGSPVLGYNTQPLVSVDFNHDPRSSIFDANHTKVSGRLVKAMAWYDNEWGFSNRMLDSALALAAARD

SEQ ID NO: 25926 - protein, 668 aa, Rhodobacter sphaeroides 2.4.1
MAVKDTDDGKPEDQDAETSLDMSQAAVKRMIAEARERGYITYDQLNTVLPQDQVSSEQIEDVMAMLSEMGINVIENEEAEEGEPAGELVEQGSGSREIAVAGTQGETLDRTDDPVRMYLREMGSVELLSREGEIAIAKRIEAGRNTMIAGLCESPLTFQAITIWRDELLSEDILLRDVIDLEATFGRSLDGDGDDEIDGPEIDEVEVAAAPAPAPRRSTSSEPELDADGNPISRAEEEDEDDEASAMSLAAMEAALKPRVLETLELIARDYGKLAEMQNRRMSATLNDHIRFTTEDEAAYQKLRSEIVLLVNELHLHNNRIEALIDQLYGINRKIMSINSAMVKLADAARINRREFIDEYQGYELDPMWAERMAAKSGRGWQTLMEKSRDRVEDLRGEMAQVGQYVGVDISEFRRIVNQVQKGEKEARQAKKEMVEANLRLVISIAKKYTNRGLQFLDLIQEGNIGLMKAVDKFEYRRGYKFSTYATWWIRQAITRSIADQARTIRIPVHMIETINKLVRTGRQMLHEIGREPTPEELAEKLQMPLEKVRKVMKIAKEPISLETPIGDEEDSQLGDFIEDKNAILPLDSAIQENLKETTTRVLASLTPREERVLRMRFGIGMNTDHTLEEVGQQFSVTRERIRQIEAKALRKLKHPSRSRKLRSFLDQ

SEQ ID NO: 25927 - protein, 709 aa, Synechococcus elongatus PCC 7942
MAAQNLYILHIQTHGLLRGQNLELGRDADTGGQTKYVLELAQAQAKSPQVQQVDIITRQITDPRVSVGYSQAIEPFAPKGRIVRLPFGPKRYLRKELLWPHLYTFADAILQYLAQQKRTPTWIQAHYADAGQVGSLLSRWLNVPLIFTGHSLGRIKLKKLLEQDWPLEEIEAQFNIQQRIDAEEMTLTHADWIVASTQQEVEEQYRVYDRYNPERKLVIPPGVDTDRFRFQPLGDRGVVLQQELSRFLRDPEKPQILCLCRPAPRKNVPALVRAFGEHPWLRKKANLVLVLGSRQDINQMDRGSRQVFQEIFHLVDRYDLYGSVAYPKQHQADDVPEFYRLAAHSGGVFVNPALTEPFGLTILEAGSCGVPVVATHDGGPQEILKHCDFGTLVDVSRPANIATALATLLSDRDLWQCYHRNGIEKVPAHYSWDQHVNTLFERMETVALPRRRAVSFVRSRKRLIDAKRLVVSDIDNTLLGDRQGLENLMTYLDQYRDHFAFGIATGRRLDSAQEVLKEWGVPSPNFWVTSVGSEIHYGTDAEPDISWEKHINRNWNPQRIRAVMAQLPFLELQPEEDQTPFKVSFFVRDRHETVLREVRQHLRRHRLRLKSIYSHQEFLDILPLAASKGDAIRHLSLRWRIPLENILVAGDSGNDEEMLKGHNLGVVVGNYSPELEPLRSYERVYFAEGHYANGILEALKHYRFFEAIA

SEQ ID NO: 25928 - protein, 826 aa, Shewanella sp. MR-4
MSISRREFLKANAAVAAATAVGVTLPVKMVEAAESDNIKWDKAPCRFCGVGCSVLVGTKAGKVVATKGDPESPVNRGLNCIKGYFLSKIMYGKDRLTTPLLRMKEGKYHKEGEFTPVSWDVALDTMAAKWKHSIATKGPTSVGMFGSGQWTIWEGYAASKLHKAGFLTNNIDPNARHCMASAVGGFMRTFGIDEPMGCYDDLEAADHFVLWGANMAEMHPILWARLSDRRLSHKDCRVHVLSTFENRSFDLADNPMVFRPQSDLVILNFIANYIIQNKAVNTDFVTKHTKFALGVDDIGYGLRPDHPLEKKAKNPGNGKSSPISFEEYAKFVSTYTLEYAAKMSGVEPEKLETLAKAYADPKVKVMSLWTMGINQHVRGVWANNMLYNIHLLTGKIATPGNSPFSLTGQPSACGTAREVGTFAHRLPADMVVANDAHRAITEKVWQVPEGTIPPKPGFHAVLQSRMLKDGKLNCYWTMCTNNMQAGPNINDEIYPGFRNPENFIVVSDPYPTVTAMAADLILPTAMWVEKEGAYGNAERRTHMWHQQVKAPEGAKSDLWQLVEFSKRFKVSEVWPAELIAKQPEYADKTLYEVLFANGVINKFPTTDCKGDLNDESAHFGFYLQKGIFEEYAAFGRGHGHDLADFDRYHETRGLRWPVVEGKETLRRFVEGSDPYVKAGEGYKFYGKPDGKAVIFALPYEPAAEEPNEEYDLWMSTGRVLEHWHTGSMTARVPELYRAYPDAQIFMHPEDAKARGLQRGDEVLVASPRGEVKTRVETKGRNKPPRGVVFMPFFDARQLVNKLILDATDPLSKETDFKKCPVKVMKA

SEQ ID NO: 25929 - protein, 475 aa, Rhodobacter sphaeroides 2.4.1
MQAAEPSFRESVDLMFNRAVALMDLSPGLEEKIRVCNSTYTVRFGVRLRGKIFTFTGYRSVHSEHMEPVKGGIRYALSVSQDEVEALAALMTYKCALVETPFGGSKGGLCIDPREWDEHELEQITRRFAYELAKRDLIHPAQNVPAPDMGTGEREMAWIADQYARMNTADINARACVTGKPINAGGIHGRVEATGRGVQFALREFFRHAEDKARAGLSGDLDGKRIIVQGLGNVGYHAAKFLTEEDGAKVTGVIERDGALVNPAGIPVEELRHWMMKTGSIRGFSQADFVEDGRKLLEEECDILIPAAMEGVITRENAARIKAPLIIEAANGPITFGADEILRQKGTVIVPDLYANAGGVTVSYFEWVKNLSHIRFGRMQRRAEEARSRALVEELERLSADQGLGWQLAPDFKQKFMQGSDELALVRSGLDDTMRIAYQSMREVWHGAEGAQDLRVAAYIVAIRRVAATYRSKGL

SEQ ID NO: 25930 - protein, 472 aa, Shigella flexneri 2a str. 301
MTTHLAWFRQDLRLHDNLALAAACRNSSARVLALYIATPRKWETHNMSPRQAELINAQLNGLQIALAEKGIPLLFREVDDFVASVEIVKQVCAENSVTHLFYNYQYEVNERARDVDVERALRNVVCEGFDDSVILPPGAVMTGNHEMYKVFTPFKNAWLKRLREGMPECVAAPKVRSSGSIKPAPSITLNYPRQSFDTAHFPVEEKAAIAQLRQFCENGAGEYEQQRDFPAVEGTSRLSASLATGGLSPRQCLHRLLAEQPQALDGGAGSVWLSELIWREFYRHLMTYYPSLCKHRPFIAWTDRVQWQSNPAHLQAWQKGKTGYPIIDAAMRQLNSTGWMHNRLRMITASFLVKDLLIDWREGERYFMSQLIDGDLAANNGGWQWAASTGTDAAPYFRIFNPITQGEKFDREGEFIRRWLPELRDVPGKAVHEPWKWAQKAGVKLDYPQPIVEHKEARVQTLAAYEAARKGK

SEQ ID NO: 25931 - protein, 264 aa, Burkholderia xenovorans LB400
MSQFLNYEQDEHIVTLTMNEPERRNPLTGNTAVEEFLAAIARIEADRSVRTVILTGAGTAFSSGGNIHDMERHASGSMPGMAIRQDYRRGIQQLPLALFNLEVPVIAAVNGAAIGAGLDLACMCDIRIASELARFAESFVKLGIIPGDGGAWLLPRIIGLSRAAEMTFTGQMIDAPQALEWNLVSRVVPHDDLLTIARGLARSIAANPPHAVRLAKRLLREGMHCRLDTLLEMSAAYQALSHQTADHREAVSAFIGKRSPSFNG

SEQ ID NO: 25932 - protein, 151 aa, Glycine max
MGAFTEKQEALVNSSFEAFKANLPHHSVVFFNSILEKAPAAKNMFSFLGDAVDPKNPKLAGHAEKLFGLVRDSAVQLQTKGLVVADATLGPIHTQKGVTDLQFAVVKEALLKTIKEAVGDKWSEELSNPWEVAYDEIAAAIKKAMAIGSLV

SEQ ID NO: 25933 - protein, 396 aa, Lactobacillus delbrueckii subsp. bulgaricus
MAEKEHYVRTKPHVNIGTIGHVDHGKTTLTAAITTVLAKKGLAQAEDYSQIDAAPEEKERGITINTAHVEYETEKRHYAHMDAPGHADYIKNMITGAAQMDGAILVVAATDGPMPQTREHILLARQVGVNSIVVFLNKCDLVDDPELIDLVEMEVRDLLSEYGYPGDDVPVVRGSALKALEGDEEAQKKIEELMDVVDEYIPTPERETDKPFLMPVEDVFTITGRGTVASGRIDRGTVKVGDSVEIVGLVEKVLTSVVTGLEMFHKTLDLGEAGDNVGVLLRGVDRDQIVRGQVLAAPGSIKTHKTFKGQVYILSKDEGGRHTPFFSDYRPQFYFHTTDITGEIELPEGTEMVMPGDNTEFSVTLIKPAAIEVGTKFTIREGGRTVGAGQVTEIDD

SEQ ID NO: 25934 - protein, 361 aa, Escherichia coli CFT073
MTCLSMLPIAQIVNKIVILFFYVCKFPTILPLSANNYGDLMGTTKHSKLLILGSGPAGYTAAVYAARANLQPVLITGMEKGGQLTTTTEVENWPGDPNDLTGPLLMERMHEHATKFETEIIFDHINKVDLQNRPFRLTGDSGEYTCDALIIATGASARYLGLPSEEAFKGRGVSACATCDGFFYRNQKVAVIGGGNTAVEEALYLSNIASEVHLIHRRDGFRAEKILIKRLMDKVENGNIILHTNRTLEEVTGDQMGVTGVRLRDTQNSDNIESLDVAGLFVAIGHSPNTAIFEGQLELENGYIKVQSGIHGNATQTSIPGVFAAGDVMDHIYRQAITSAGTGCMAALDAERYLDGLADAK

SEQ ID NO: 25935 - protein, 506 aa, Frankia sp. EAN1pec
MNGRPTAIGRTTAGQARGDRTTDDETAVTGRTAHAAQPTLARVLSGRMLLFLVLGDVLGSGIYALTGQIAADVGGMIWAPFLIAFALAFLTGTAYAELVGKYPRAAGAALYANEAFRRPFLTFMVGFTVLAAGITSTATAARAIGGKYLAEFVAAPTVVVAVVFILLTAVLNARGIEESARVNLVLTVIELTGLLLIVGIGVHALATGAGEPGRAFELRAEGPAPLALLAGTTLAFYAMLGFENSVNLVEEARRPRRDLPRALFGGMFIAGTVYLFVAFTCAMLVDPDILTGSGAPLLEVVKASDVPVPSKLFAAVALVAVANTALMNMVMASRLVYGMAAQGTIPTVFARVLPGRRTPPIAIGFVTALTVALASTGQLAGLADTTVLLLLLVFFVVNISALVLRREPVPPGAYRAPTWAPALGALSCAALATPLVHREGTVYLRALGLLALAVVLVLAQKVVSGRFRACELSGAARPAPSQPYPTATGTADFSGSRTSSPTAWRA

SEQ ID NO: 25936 - protein, 161 aa, Salmonella typhimurium LT2
MKYDTSELCDIYQEDVNVVEPLFSNFGGRSSFGGQIITVKCFEDNGLLYDLLEQNGRGRVLLVDGGGSVRRALVDAELARLATQNEWEGLVIYGAVRQVDDLEELDIGIQAIAAIPVGAAGEGIGESDVRVNFGGVTFFSGDHLYADNTGIILSEDPLDIE

SEQ ID NO: 25937 - protein, 159 aa, Burkholderia thailandensis E264
MSKLYSFNAQALSGGEVPLEQYRGKVLLIVNTASECGFTPQYAGLQQLYDRFRERGLAVLGFPCNQFGKQEPGDASQIGAFCEKNYGVTFPMFAKIDVNGANAHPLYRYLTEESPGILGLKAIKWNFTKFLVNREGEIVKRYAPSTKPEDIAADVEKLL

SEQ ID NO: 25938 - protein, 398 aa, Burkholderia xenovorans LB400
MDFQMLETETNGTIIKVIGVGGAGGNAVQHMINKGVQGVDFIVMNTDAQALSRSRASAVIQLGNTGLGAGAKPEMGRAAAEEARERIADALRGAHMVFITAGMGGGTGTGAAPVVAQIAKEMGILTVGVVSKPFEFEGGKRMRVAEAGSQQLEDHVDSLIVVLNDKLFEVMGDDAEMDKCFQCADDVLNNAVAGIAEIINVDGLVNVDFEDVKTVMGEQGKAMMGTATVAGVDRARLAAEQAVASPLLEGVDLSGARGVLVNITSSRSLRLSETREVMNTIKSYAAEDATVIFGAVYDDAMGDALRVTVVATGLGRAAKKQQSAPMTLLRTGTDNQPVNAHAAYAPQSAHASTADYGALDTPAVWRTSRDTAASHVQALQEKGVDTYDIPAFLRKQAD

SEQ ID NO: 25939 - protein, 478 aa, Idiomarina baltica OS145
MSEQIDQALARKYDAGFVSEIESETFPKGLDEDVIRRLSAIKGEPEWMLEWRLKAYRTWLKQTEPEWAHVDYPKIDYQDISYYSAPKSMKDKPKSLDEVDPELLRTYEKLGIPLHEQEMLAGVAVDAVFDSVSVVTTFREKLEEAGVIFCPISEALHKYPDLVKKYLGTVVPRGDNYFAALNSAVFTDGSFVYIPKGVRCPMELSTYFRINEQNTGQFERTLIVAEEGSYVSYLEGCTAPQRDENQLHAAVVELVALDDAEIKYSTVQNWYPGDENGKGGIYNFVTKRGLCEKNAKISWTQVETGSAVTWKYPSCILKGDNSVGEFYSVALTRGKQQADTGTKMIHLGKNTKSTIISKGISAGYSNNAYRGLVRMGPGAEGARNFTECDSLLIGDKCGAHTFPYIESSNPSAIVEHEATTSKVSDDQLFLCQQRGLDPEKAVSMIVNGFCKEVFRELPMEFAVEAGKLLEISLEGSVG

SEQ ID NO: 25940 - protein, 367 aa, Methanocaldococcus jannaschii
MEVEYMNFNELNLSDNILNAIRNKGFEKPTDIQMKVIPLFLNDEYNIVAQARTGSGKTASFAIPLIELVNENNGIEAIILTPTRELAIQVADEIESLKGNKNLKIAKIYGGKAIYPQIKALKNANIVVGTPGRILDHINRGTLNLKNVKYFILDEADEMLNMGFIKDVEKILNACNKDKRILLFSATMPREILNLAKKYMGDYSFIKAKINANIEQSYVEVNENERFEALCRLLKNKEFYGLVFCKTKRDTKELASMLRDIGFKAGAIHGDLSQSQREKVIRLFKQKKIRILIATDVMSRGIDVNDLNCVINYHLPQNPESYMHRIGRTGRAGKKGKAISIINRREYKKLRYIERAMKLKIKKLKFG

SEQ ID NO: 25941 - protein, 548 aa, Burkholderia thailandensis E264
MSQAIEVKVPDIGDYKDVPVIEVLVKPGDAVEPEQSLVTLESDKATMDVPSPSAGTVKEVKVKVGDAVSQGSLIVLLDGAQAAGRPAQANGAAASAAQPAAAPVAAAPAPVAAGGGTVDVRVPDIGDYKDVPVIEIAVKIGDTVEKEQSLVTLESDKATMDVPSPAAGVVKDIKVKVGDAVSEGSLIVVLEASGAAAASAPQAAAPAQAAPAPAAAPAPAPQAAPAPQAAPAAAPAPAASGEYRPSHASPSVRKFARELGVDVSRVAGTGPKNRITKDDVTAFVKGVMTGQRAAPAAAAPAGGGELNLLPWPKVDFSKFGPFEAKPLSRIKKISGANLHRNWVMIPHVTNNDEADITDLEALRVQLNKEHEKAGVKFTMLAFVIKAVVAALKKFPTFNASLDGDNLVFKQYYHIGFAADTPNGLVVPVIRDADKKGLVEIAKEMAELSKAAREGKLKPDQMQGGCFSISSLGGIGGTHFTPIINAPEVAILGLSRGQMKPVWDGKQFVPRLTLPLSLSYDHRVIDGAEAARFNAYLGALLGDFRRIIL

SEQ ID NO: 25942 - protein, 112 aa, Glycine max
  misc_feature (95)..(95): Xaa can be any naturally occurring amino acid
MDVADIASPSGQQEQGHRTVSSEPPKRPAGRTKFHETRHPLYRGVRRRGRVGQWVCEVRVPGIKGSRLWLGTFNTAEMAARAHDAAVLALSGRAXCLNFADSAWRMLPVLAA

SEQ ID NO: 25943 - protein, 608 aa, Arabidopsis thaliana
MPTWWGRKSCKNKDDNHRGIISTDRDIKSSAVVVDPPLTPTRGGTPRCSREFAGASSAFSGFDSDSTEKKGHPLPRPLLSPVSIHHQDHVSGSTSGSTSVSSVSSSGSADDQSQLVASRGRGDVKFNVAAAPRSPERVSPKAATITTRPTSPRHQRLSGVVSLESSTGRNDDGRSSSECHPLPRPPTSPTSPSAVHGSRIGGGYETSPSGFSTWKKGKFLGSGTFGQVYLGFNSEKGKMCAIKEVKVISDDQTSKECLKQLNQEINLLNQLCHPNIVQYYGSELSEETLSVYLEYVSGGSIHKLLKDYGSFTEPVIQNYTRQILAGLAYLHGRNTVHRDIKGANILVDPNGEIKLADFGMAKHVTAFSTMLSFKGSPYWMAPEVVMSQNGYTHAVDIWSLGCTILEMATSKPPWSQFEGVAAIFKIGNSKDTPEIPDHLSNDAKNFIRLCLQRNPTVRPTASQLLEHPFLRNTTRVASTSLPKDFPPRSYDGNFSLPTREPYPGRLSHDNYAKQPLSRTIKSPSRENVRAITSLPVSPCSSPLRQLGPAYKSCFLSPPHPSYAFPGQDSGYNLAEFAASPFRMKKDAMMEPSSFRTQTPNSPLRSRLV

SEQ ID NO: 25944 - protein, 272 aa, Magnetospirillum magnetotacticum MS-1
MTRTRTFRRDQRAPRAHLAWTELAAVGAIEDTDESRQAAVAQHFVAVSTALDKVAAFGIDPANAFGFWDWVGGRYSVDSAIGTSLAIAIGPDRFAELLAGFHAIDEHVRRTPFERNVPVLMGLLNVWYVNFLDAHTHAVLPYAQYLHRFPAYLQQLTMESNGKRVRWDGSPVTTETGEIFWGEPGTNGQHAFYQLIHQGTRLIPADFIAVANPAHPLVDAVGDGGAVQPGADVHGLFLANFFAQTKALAFGKTADESGPRAPRKPRGGSSRV

SEQ ID NO: 25945 - protein, 635 aa, Arabidopsis thaliana
MGFLVDTQKEGGGHSWGYVRSLVRRKQVDSANGQSHGHQLARALTVPHLVAIGVGATIGAGVYILVGTVAREHSGPSLALSFLIAGIAAGLSAFCYAELSSRCPSAGSAYHYSYICVGEGVAWIIGWALILEYTIGGSAVARGISPNLALIFGGEDGLPAILARHQIPGLDIVVDPCAAILVFVVTGLLCMGIKESTFAQGIVTAVNVCVLLFVIVAGSYLGFKTGWPGYELPTGFFPFGVDGMFAGSATVFFAFIGFDSVASTAEEVRNPQRDLPIGIGLALLLCCSLYMMVSIVIVGLIPYYAMDPDTPISSAFASHDMQWAVYLITLGAVMALCSALMGALLPQPRILMAMARDGLLPSIFSDINKRTQVPVKATVATGLCAATLAFFMDVSQLAGMVSVGTLLAFTMVAISVLILRYVPPDEQPLPSSLQERIDSVSFICGETTSSGHVGTSDSSHQPLIVNNDALVDVPLIKNQEALGCLVLSEETRRIVAGWSIMFTCVGAFLLSYAASSLSFPGLIRYPLCGVGGCLLLAGLIALSSIDQDDARHTFGHSGGYMCPFVPLLPIICILINMYLLVNLGSATWARVSVWLLIGVIVYVFYGRKNSSLANAVYVTTAHAEEIYREHEGSLA

SEQ ID NO: 25946 - protein, 626 aa, Zea mays
MLVPAQSAPAPPLCSLRSLSSHYLLLPSHFLPPGGVLPPLRRGDLAIRMGGGPRTFPGGVSKWQWKRMQAKKARQLLKARLARERQLYEMRKRVELRDAVAHLERPWDAGSSAGASAVAPTLLSVAAEDQLRALADRFHRPGGVDLWNDRDGPRVFASPATGAASARFFPRNAFHSIQPYALVGAGVEASAQGVRENAAEDGAHSSIASDREPAVELTERDDGTWEPVDALGDADVSDAGDWTSDDDDDEAAATPESEGMGDAGSWREQRAMVRRNGRSNGAARWESAGAMAAGSDNDAATPESEGMVDAGSWREQRAMVRRNGRSNGAARWESAGAMAAGSDNDAATPESEGMVDAGSWREQRAMVRRNGRSNGAARWGTAGATADSSDNDRGRSGRWTGSKATARSHVRQRGRTGAGSLSESEVTRARSEPKWGTRNRDDTRNGAGRWNAPRKDRMSDGGGFDSESGSARGKEPEPRRGARSKMNGSDSLRGRSKHNYSANANGGEKLFKYLSGDGDPRANSSNGFAEGLEAPKWKPRRMNRARSSNGGRDDDMGGRFRRGDDRVAGRLRANAKPINTTSGDDGSSADGERSRNGGRLLWGDEYSLRPTSELRGSWRDTGSHRL

SEQ ID NO: 25947 - protein, 500 aa, Pseudomonas syringae pv. tomato str. DC3000
MSESPVIGHYINGQANNGDGERYSDVFNPAIGTVQARVALASVKTVDEAVASAKAAFAGWADQSSLRRARVMFKFKELLDQHHDELAQIICREHGKVLSDARGEVVRGIEIVEFACGAPNLLKSDFSDNIGGGIDNWNLRQPLGVCAGVTPFNFPVMVPLWMIPMALVTGNCFILKPSERDPSASLLMARLLKEAGLPDGVFNVVQGDKVAVDALLQHPDIEAVSFVGSTPIAEYIYQQGTSRGKRVQALGGAKNHMIVMPDADLDQAADALIGAAYGSAGERCMAISIAVVVGDVGQRLIDKLLPRIDQLKVGNGMQADSDMGPLVTAVHKAKVEGFIDQGVKEGAKLIVDGRNFSVPGAEQGFFVGATLFDNVTPQMQIYKEEIFGPVLGIVHVADFASAVELINAHEFGNGVSCFTSDGGVARAFARTIKVGMVGINVPIPVPMAWHSFGGWKRSLFGDHHAYGEEGLRFYSRYKSVMQRWPDSIAKGPEFSMPTAK

SEQ ID NO: 25948 - protein, 341 aa, Glycine max
GPFSSAASTPIRATLFPGDGIGPEIADSVKQIFQAADVPIEWEEHYVGTEIDPRTQSFLTWESLESVRKNKVGLKGPMATPIGKGHRSLNLTLRKELNLYANVRPCYSLPGYKTRYDNVNLITIRENTEGEYSGLEHQVVRGVVESLKIITRQASLRVAEYAFHYAKAHGRERVSAIHKANIMQKTDGLFLKCCREVAEKYPEITYEEVVIDNCCMMLVKNPALFDVLVMPNLYGDIISDLCAGLIGGLGLTPSCNIGEGGIALAEAVHGSAPDIAGKNLANPTALLLSGVTMLRHLDLHDKAEQIQKAILNTIAEGKYRTADLGGSSKTTEFTKAIIDHL

SEQ ID NO: 25949 - protein, 476 aa, Kineococcus radiotolerans SRS30216
MAAPQNYLAVIKVVGVGGGGVNAVNRMIEVGLKGVEFIAVNTDAQALLMSDADVKLDVGRELTRGLGAGADPEVGRKAAEDHAEEIEEVLKGADMVFVTAGEGGGTGTGGAPVVARIARSLGALTIGVVTRPFTFEGRRRANSAESGIAELRDEVDTLIVIPNDRLLSISDKQVSILDAFKSADQVLLSGVQGITDLITTPGLINLDFADVKSVMQGAGSALMGIGSARGDDRAVQAAESAISSPLLEASIDGAHGVLLSIQGGSDLGLYEINEAARLVQEAAHPEANIIFGAVIDDALGDEVRVTVIAAGFDSGTPVRRRDERALGQVSGRPQQGSAVPPRTTRPDAWGAPAAPAAPAPQYQQQEQPPAPAPAPQPQYAQAQQAPSRPYGQQEYVPSQYGQPAYGQQPPAAPQQQQAPQQPAPQPVAHQAPQVVPSEDPVQVPRIIELPQDNASVRRPGRPRPEEDDLDVPDFLK

SEQ ID NO: 25950 - protein, 326 aa, Citeromyces matritensis
SIVGRPRHQGIMVGMGQKDSYVGDEAQSKRGILTLRYPIEHGIVTNWDDMEKIWHHTFYNELRVAPEEHPVLLTEAPMNPKSNREKMTQIMFETFNVPAFYVSIQAVLSLYSSGRTTGIVLDSGDGVTHVVPIYAGFSLPHGIVRIDLAGRDLTDHLMKILSERGYTFSTSAEREIVRDIKEKLCYVALDFDQELQTSSQSSAIEKSYELPDGQVITIGNERFRAPEALFHPSALGLEAAGIDQTTFNSIMKCDVDVRKELYGNIVMSGGTTMFPGIAERMQKEITALAPSSMKVKIIAPPERKYSVWIGGSILASLSTFQQMWIS

SEQ ID NO: 25951 - protein, 1767 aa, Shewanella sp. MR-4
MDKSKLRTFRSKILSHIALPLILIMAAVYGINAWFNYLSAESKLYDSLAQASNHSAYRLQLLLEHAQINTQGMADFIGFITNKEDISNSEKIKRILTNRLERNPDFYGSAVAFKPYTFANKKLFSPYVFRDGDDFHYLDIGAEGYDYTDGSWDWWSKAINQAGGYWSKVYFDEGAGNTLMVTYSVPFGPENAYFGVATVDLALNQLPEQLGVSPSQLVVLDDQGRLIFHSDKEKVLAMTSAEWLDRNTRQNKDFWALLDKGVNGQARFVDDKNLVYLASVASVAKHKWRVIVMVPEQQLLSTLLDDMASVVLNLSLLTLLLILTCYIAAKRLTRPLEMLESGILAFGQGKTQQLAIPNGAVSEIVTLSSTFNQMAELLAEREQAILDSRGNRFARLIDGMSDKSFYCSLDASGQLAQVSEGVTKVLGMSPELLKRKYQRLFTANPLNEKNWEYTDLALKGQNVPSHQVELLDAGGHPRRLDLFMQPLVSDTGELMSVEMLFTDVTEQFSAAAWSNAVLEAAPEAMLIVDQMGLIVFSNTRCQILFGYEASAMLGLQVESLLPEALRSNHARDRLQFLREGRDRPMANAKHVRALKADGGEFVAEIALSILPADNEGRRQVAASIRDMTQKLAVEQKIRDSELRFRGLVTNIPGAVYRTRIGDVWVMEYVSENIADITGYAASQFIENRQRTFESLILEEDRALCHQHIDRALAQQETFEVEYRIRHRDGSVRWVHEKGKASYTDEGFPLWFDGSIDDITESKLALVELESSRQQLTNITESIPCTVYQLRWISPVDRTFTFLSGAAYHMLGLHRDDLLKDFNIIAERIFDEERSEVVRALAGKSEDKLQWVREFRYRHPNGSTRWMEAGASGHICDDGAIIWNGYVMDITERKAMEEELAVSEAHFKALFDGSTIGIVNIDAKGVILDCNDQYCEDMGQSRESLCGMSIFEVLSLQDKETAKAQFKELAEGRVDHYRGERSFIRPNGEPLWMTVNVSALFDSQKRFESAVVSMVDMTELKLLSDELLVAKEEADAASKAKGDFLANMSHEIRTPMNAIIGMSQLCLQTELDKKQKNYVEKIERASKSLLSIINDILDFSKIEAGKLDIESVPFQLDTMLEDLSDMFSEKAAHKQLELLFAVAPNVPRHLFGDSLRLGQVLINLMNNAIKFTERGEVLLSLNLVEQQNDDVVLRFSVRDSGIGLTAEQQAKLFKSFSQADTSTTRKYGGTGLGLAICKQLVELMGGTIGVESQFGHGSTFYFTVKLQISSGQKLTVAQELEGMSILVADDNATARDIMRTTLESMGFRVDTVRSGEEAVTRCSQQEYAVALIDWKMPNLDGIETAKQIKQLAKNAPRILMVSAHATQEFLSQIEALGLAGYISKPISASRLLDGIMNSLGRAGVLPVRRNSESIDPKLLLPLKGKRILLVEDNEMNLEVATEFLEQVGIILSIATNGQIALDKLAQQSFDLVLMDCQMPVMDGYQATQAIRKRPELAELPVIAMTANAMAGDKEMCLKAGMNDHIAKPIEVNLLYQTLLKYLGAGVLPTEAASPNQLVEIPVKPINLDSKSVVKWPEHPELDIDRGLQLVQNSTRLYQRIFDRFVTSQRNVVELINKALANDKRDDAVRMAHTLKGLAGNLSSSKLVELARQLELHLSEKTEYQTELDQIQVLVASICEAIERVNPQFEEPTQSATEHLSQEALVSALNQLRQSLEDADSDAVTQIDALKPQVSSKLWQQLSPALTMINQYQFDEAVDLIDEVLAELA

SEQ ID NO: 25952 - protein, 297 aa, Escherichia coli
MKRQGTTLPANNHALKQYAFFAGMLSSLKKQKWRKGMSESLHLTRNGSILEITLDRPKANAIDAKTSFEMGEVFLNFRDDPQLRVAIITGAGEKFFSAGWDLKAAAEGEAPDADFGPGGFAGLTEIFNLDKPVIAAVNGYAFGGGFELALAADFIVCADNASFALPEAKLGIVPDSGGVLRLPKILPPAIVNEMVMTGRRMGAEEALRWGIVNRVVSQAELMDNARELAQQLVNSAPLAIAALKEIYRTTSEMPVEEAYRYIRSGVLKHYPSVLHSEDAIEGLLAFAEKRDPVWKGR

SEQ ID NO: 25953 - protein, 326 aa, Debaryomyces carsonii
SIVGRPRHQGIMVGMGQKDSYVGDEAQSKRGILTLRYPIEHGIVTNWDDMEKIWHHTFYNELRVAPEEHPVLLTEAPLNPKSNREKMTQIMFETFNVPAFYVSIQAVLSLYSSGRTTGIVLDSGDGVTHVVPIYAGFSLPHGILRIDLAGRDLTDYLMKILIERGYSFSTTAEREIVRDIKEKLCYVALDFEQEMQTSSQSSAIEKSYELPDGQVITIGNERFRAPEALFRPSDLGLEAAGIDQTTFNSIIKCDVDVRKDLYGNIVMSGGTTMFPGIAERMQKEITALAPSSMKVKIIAPPERKYSVWIGGSILASLSTFQQMWIS

SEQ ID NO: 25954 - protein, 326 aa, Debaryomyces hansenii var. fabryi
SIVGRPRHQGIMVGMGQKDSYVGDEAQSKRGILTLRYPIEHGIVTNWDDMEKIWHHTFYNELRVAPEEHPVLLTEAPMNPKSNREKMTQIMFETFNVPAFYVSIQAVLSLYSSGRTTGIVLDSGDGVTHVVPIYAGFSLPHGILRIDLAGRDLTDYLMKILSERGYTFSTTAEREIVRDIKEKLCYVALDFEQEMQTSSQSSAIEKSYELPDGQVITIGNERFRASEALFRPADLGLEAAGIDQTTYNSIMKCDVDVRKELYGNIVMSGGTTMFPGIAERMQKEITALAPSSMKVKIIAPPERKYSVWIGGSILASLSTFQQMWIS

SEQ ID NO: 25955 - protein, 362 aa, Triticum aestivum
  misc_feature (209)..(209): Xaa can be any naturally occurring amino acid
  misc_feature (215)..(215): Xaa can be any naturally occurring amino acid
  misc_feature (240)..(240): Xaa can be any naturally occurring amino acid
  misc_feature (273)..(273): Xaa can be any naturally occurring amino acid
  misc_feature (324)..(324): Xaa can be any naturally occurring amino acid
  misc_feature (337)..(337): Xaa can be any naturally occurring amino acid
MAMAMRRAAALGARHILAASASASSRAASRRHMGSLDAGAAMEKIRAAGLLRTRGLIGGQWVDAYDGKTIEVQNPATGEVLANVACMGNRETADAITSANTTFYTWSKLTASERSKALRKWHDLLMSHKEELALLMTLEQGKPMKEALGEVNYGASFIEFFAEEAKRVYGDIIPPTLADRRLLVLKQPIGVVGAITPWNFPLAMITRKXGPPMAXGCTVVVKPSEFTPLTALAAADLALXAGIPAGALNVVMGNAPEIGDELMQSTQVRKIAXTGSTAVGKKLMAGSANTVKKVSLELGGNAPCIVFDDADIDVARKGSLAAQXRTGEQTFVCSTRXLVQKGILQKIRKVFWQSVVQNLKFG

SEQ ID NO: 25956 - protein, 326 aa, Debaryomyces hansenii var. hansenii
SIVGRPRHQGIMVGMGQKDSYVGDEAQSKRGILTLRYPIEHGIVTNWDDMEKIWHHTFYNELRVAPEEHPVLLTEAPMNPKSNREKMTQIMFETFNVPAFYVSIQAVLSLYSSGRTTGIVLDSGDGVTHVVPIYAGFSLPHGILRIDLAGRDLTDYLMKILSERGYTFSTTAEREIVRDIKEKLCYVALDFEQEMQTSSQSSAIEKSYELPDGQVITIGNERFRASEALFRPSDLGLEAAGIDQTTYNSIMKCDVDVRKELYGNIVMSGGTTMFPGIAERMQKEITALAPSSMKVKIIAPPERKYSVWIGGSILASLSTFQQMWIS

SEQ ID NO: 25957 - protein, 185 aa, Triticum aestivum
MPSCLQIRPAHPLSVITVSTRSTSTSGMAASKGARKSLVSRTLERCRSGLNSGGKSSAAVAPGCFSVYVGPERERFVVRADRANHPLFRRLLDDAEQEYGYAAQGPLALPCSVDAFLDVLWHMDHDVHDDDDGEVALAPSTPICGLQRGGSGNIKVRPAGYRVLSPAKSTPASFFFSQTAAGGRW

SEQ ID NO: 25958 - protein, 326 aa, Candida intermedia
SIVGRPRHQGIMVGMGQKDSYVGDEAQSKRGILTLRYPIEHGIVNNWDDMEKIWHHTFYNELRVAPEEHPVLLTEAPMNPKSNREKMTQIMFETFNVPAFYVNIQAVLSLYSSGRTTGIVLDSGDGVTHVVPIYAGFSLPHGILRLDLAGRDLTDYLMKILSERGYAFTTTAEREIVRDIKEKLCYVALDFEQEMQTSAQSSAIEKSYELPDGQVITIGNERFRTAEALFRPSDLGLEAAGIDQTTYNSIMKCDVDVRKELYGNIVMSGGTTLFPGIAERMQKEITALAPSSMKVKIIAPPERKYSVWIGGSILASLSTFQQMWIS

SEQ ID NO: 25959 - protein, 313 aa, Erwinia carotovora subsp. atroseptica SCRI1043
MLANIIRIATRQSPLALWQARYVQQCLNHFYPDLHVELVPMVTRGDIILDTPLAKVGGKGLFVKELELALLEGRADIAVHSMKDVPVEFPDGLGLTTICERDDPRDAFVSNRYDSLEQLPEGSCVGTSSLRRQCQLRARRPDLVIRDLRGNVGTRLAKLDNGEYDAIILAVAGLKRLGLEERIRCALSPEESLPAVGQGAIGIECRLDDDRIRQLLAPLNHTDTAARVLAERAMNVRLEGGCQVPIGSYAELEGDTLWLRALVGAPDGSQMIVGERKGSVSDAEKIGVALAEELLAKGASAILQAVYQGQSSS

SEQ ID NO: 25960 - protein, 537 aa, Oryza sativa (japonica cultivar-group)
MESRKPPPSALVDNHVVPGDVVLDLAEMTNQTIKLGAGLRQDCDTIQATSAGRLRLSKPSKYWVESSQKRYIPSVEDTVLGVVVDTKPDNFLVDIKGPNLAFLPVLAFEGGTRRNIPKFEIGTLIYARVVKANSIMNPELSCMDATGKAAEFGQLKDGYMFDTSTGLSRIIFEWHRATKYGGKSLGETILMGAVEECTHKQLPSLSDLCVTLGEFSHICLASRRLSPSQSGMTSATGVEKVEVWCQDLAMGGRRVEINANKCGTHPTPSKPYYVDKIDTNEQKVVHYQVNCRPARDRNTGSYSVKHHYPSPIVSWIEDLSSFGNVSFSQDPEYADEQSRSSVGQSSASVNLHDMQISVRLTDEFIELAKENTGNNVETCGILGASFRDGTYYVTMLIIPKQEATAHSCQAVSEEEIHAILSEQSLYPAGWIHTHPSQTCFLSSIDLHTQYSYQVMLPEAVAIVIAPTDPTRQVFYGRNCGIFRLTDPGGMGVLRECSESGFHAHRETTDGGPIYETCSKVIFNPNLRFEIVDLRSAP

SEQ ID NO: 25961 - protein, 168 aa, Avena clauda
VMASSATSVAPFQGLKSTAGLPVSRRSASSLGSVSNGGRIRCMQVWPTEGIKKFETLSYLPPLSEEALLKQIDFLIRSKWVPCLEFSKVGFIFREHGSTPGYYDGRYWTMWKLPMFGCTDASQVIKEVEEVKKEYPDAYVRIIGFDNIRQVQCVSFIAFKPPGCEESG

SEQ ID NO: 25962 - protein, 273 aa, Glycine max
MAQTMLLMSSVSSSYSVDLKKDLFLQLQSQSLRPKFSQLSFNPLPSSTSSFSSPRTFTTLALFKSKTKAAPAKTKVTKPKQKVEDGIFGTSGGFGFTKQNELFVGRVAMLGFAASLLGEGITGKGILAQLNLETGIPLYEAEPLLLFFILFTLLGAIGGLGDRGKFVDDEPTTGGVIPPGKGFREALGLGSGPLFGFTKANELFVGRLAQLGFVFSLIGEIITGKGALAQLNIETGVPINEIEPLVLFNVLFFFIAALNPGTGKFVTDEGEDD

SEQ ID NO: 25963 - protein, 446 aa, Rickettsia prowazekii
MALIIQKFGGTSVANVERIKKLVPIIKAEIAKNNQVIVVVSAMAGVTNQLVTLCNEVSSLNKRSQFAEYDVALSSGEIVTASLLALALQEEEIKAQSLLAWQLPIRTNNNYSKALVEFITTDLLEKYLQLKIIPIIAGFQGINKSNRVTTLGRGGSDTTAALIAAAMKADRCDIYTDVDGIFTADPRIIPNAKRIKEIDFLEMLELASSGAKVLHPRAVELVMRYKIDMRVLSTFSPNTEGTLITSKDTIPLVKSTYMEESALNTKHSTKIDIPEDASGSTYKLPIELALQNRYNMENCVVRCITSNKNLLKVSVNSISLSFLQVANMITYNNNCIEFMQEIENNIEYNFITNLTDKNNLQTLLTKCKNNKQIQDFTFDTEIATISLIGYGIKNDCKLLTMILSQLTQDNINVHMMQLSEVKITLLINDKDVEKTIFNLYNLFKIS

SEQ ID NO: 25964 - protein, 642 aa, Arabidopsis thaliana
  misc_feature (59)..(59): Xaa can be any naturally occurring amino acid
  misc_feature (381)..(381): Xaa can be any naturally occurring amino acid
  misc_feature (389)..(389): Xaa can be any naturally occurring amino acid
AFCLCLSYVSGTDLIWNLSFIVLIAEFWKSIPTTEPYRVIVGDVRDKLYDTRERAHELXSNGHSDVPVEATFIKVEQFLEPLERCYRSLCSCGDRPIADGSLRDFVRQVATFGRSLVRVDIRQESDRHTDVLDAMTTHLDIGSDREWSEERRQEWLLSERSGKRPRFGSDLPKTEEIADVLDTFHVIAERPADSFGAYVMAMATAPSDVLAVERLQRECRVREPLRVVPRFEKRADGEAAPAAVARLFSVDWYKNRINGKQEVMIGYSYSGKDAGRLSAAWQLYKAQEELVKVAKEYGVKLTMFHGRGGTVGRGGGPTHLAILSQPPDTINGSLRVTVQGDVIEQSFGDANLCFRTLQRFTAATLEHGMRPPLSPKPEWRXLLDEMAVXATEAYRSVVFHEPRFVEYFRLATPELEYGRMNIGRRPSTRKPRGGTESLRAIPWIFAWTQTTFHLPVWLGFGSAIPHVIENDVRNLHMLHHMYQHWPLFRVTIDLIEMVFAKGDPGIAALYDTLLLSEELWPLGAKLSANFDETKKLILQVLSEWLCSSPTAGHNDLLERDPHLTQPLRLRDSHITTLNLSHAYTLKRIRDPRYHVTLRPHTPKAIAESRKPAKELIAPNPTREYAPGLEDTLILTMKGIAAG

SEQ ID NO: 25965 - protein, 168 aa, Avena clauda
VMASSATSVAPFQGLKSTAGLPVSRRSASSLGSVSNGGRIRCMQVWPIEGIKKFETLSYLPPLSEEALLKQIDFLIRSKWVPCLEFSKVGFIFREHGSTPGYYDGRYWTMWKLPMFGCTDASQVIKEVEEVKKEYPDAYVRIIGFDNIRQVQCVSFIAFKPPGCEESG

SEQ ID NO: 25966 - protein, 362 aa, Zygosaccharomyces bailii
MSKNIVVLPGDHVGQEIAQEAIKVLEAISEVSPKAKFNFQHHLIGGSAIDATGSPLPDEALAAAKKADAVLLGAVGGPKWGTGAVRPEQGLLKIRKELQLYANLRPCNFASESLLELSPLKPQHARGTDFIVVRELVGGIYFGQRKEDDGDGVAWDSERYTKPEVQRITRMAAFLALQHNPPLPIWSLDKANVLASSRLWRKTVEETIKNEFPQLTVKHQLIDSAAMILIKNPTQLNGIIITSNMFEDIISDEASVIPGSLGLLPSASLASLPDTNEAFGLYEPCHGSAPDLPKGKVNPVAMILSAAMMLKLSLNMAKEGEALETAVKQVLDSGVRTGDLGGSNSTSEVGDAIAKAVKQILA

SEQ ID NO: 25967 - protein, 215 aa, Brassica napus
  misc_feature (185)..(185): Xaa can be any naturally occurring amino acid
MTSFSTFSELLGSEHESPVTLGEEYCPKLAASCPKKPAGRKKFRETRHPVYRGVRLRNSGKWVCEVREPNKKSRIWLGTFLTAEIAARAHDVAAIALRGKSACLNFADSAWRLRIPETTCPKEIQKAAAEAAVAFKAEINNTTADHGIDVEETIVEAIFTEENNDGFYMDEEESMFGMPALLASXAEGMLLPPPSVQFGHTYDFDGDADVSLWSY

SEQ ID NO: 25968 - protein, 168 aa, Avena maroccana
VMASSATSVAPFQGLKSTAGLPVSRRSNAGLGSVSNGGRIRCMQVWPIEGIKKFETLSYLPPLSEEALLKQIDFLIRSKWVPCLEFSKVGFIFREHGSTPGYYDGRYWTMWKLPMFGCTDASQVIKEVEEVKKEYPDAYVRIIGFDNIRQVQCVSFIAFKPPGCEESG

SEQ ID NO: 25969 - protein, 398 aa, Blastopirellula marina DSM 3645
MAKDVFQRTKPHVNVGTIGHIDHGKTTTTGAILAVQAAKGLAKNKAYSEIAKGGTVRDATKTVTIAVAHVEYETPNRHYAHIDCPGHADFVKNMITGAAQMDGAILVVSAADGPMPQTKEHVLLARQVGVPYVCVFLNKCDLVDDEELLDLVELEVRELLSKYEFPGDDCPVIRGASLPAYNNPADPEASKCITELMEALDTYIPEPTREADKPFLMAIEDVFSIEGRGTVATGRIERGVVKVGEEVLIIGLNDAPTKTTVTGIEMFNKILQEGYAGDNVGCLLRGVKREDISRGQVLAKPGTITPHTKFEAEIYCLSKEEGGRHTPFFSGYRPQFYFRTTDVTGTANLIGAEMCMPGDNVRIEVELHKPIAMDDGVRFAIREGGRTVGSGVVTKIIA

SEQ ID NO: 25970 - protein, 154 aa, Bradyrhizobium sp. BTAi1
MSADRDHNRCKGWPKLPGTDMAVPGSVPPVLIYRTERSVTQSAPGRRRWILEFERSAAPFIEPLMGWTGSSDPFASIRLEFPDCESAVGFAEKNGWDYRVIDPPARKPLIKGYADRFKYELADAMARAAHGRSKCSEQSSITRTESPSGWPNRK

SEQ ID NO: 25971 - protein, 505 aa, Oryza sativa
MEGAGRDGNPLGGYRIGKTLGIGSFGKVKIAEHILTGHKVAIKILNRRKIKSMEMEEKVKREIKILRLFMHPHIIRLYEVIDTPADIYVVMEYVKSGELFDYIVEKGRLQEEEARRFFQQIISGVEYCHRNMVVHRDLKPENLLLDSKCNVKIADFGLSNVMRDGHFLKTSCGSPNYAAPEVISGKLYAGPEVDVWSCGVILYALLCGTLPFDDENIPNLFKKIKGGIYTLPSHLSPLARDLIPRMLVVDPMKRITIREIREHQWFTVGLPRYLAVPPPDTAQQVKKLDDETLNDVINMGFDKNQLIESLHKRLQNEATVAYYLLLDNRLRTTSGYLGAEFHESMESSLAQVTPAETPNSATDHRQHGHMESPGFGLRHHFAADRKWALGLQSRAHPREIITEVLKALQELNVCWKKIGHYNMKCRWSPSFPSHESMMHNNHGFGAESAIIETDDSEKSTHTVKFEIQLYKTRDEKYLLDLQRVSGPQLLFLDLCSAFLTQLRVL

SEQ ID NO: 25972 - protein, 292 aa, Rickettsia conorii str. Malish 7
MAILINKKTQVICQGFTGLQGTFHSEQAIAYGTNMVGGVTPGKGGHTHLDLPVYNTVHEAKAKTGANASVIYVPPGFAADSILEAIDAEIEVVVCITEGIPVLDMVKVKRALVGSKTRLIGPNCPGVITPGECKIGIMPGHIHKRGTIGIVSRSGTLTYEAVAQTTAVGLGQSTCIGIGGDPVNGTNFVDCIEMFLKDDETKAIIMIGEIGGNAEEDAAEFIKQSKIKKPIVSFIAGITAPPGKRMGHAGAIIVGRTGSAEDKLEALQSAGVIITRSPADIGKTMLDLLNKG

SEQ ID NO: 25973 - protein, 530 aa, Arabidopsis thaliana
MADPSEQKEKVVKEKKEKVKKEKVVKEKVAKASSSGQKKKDVKKETGLGLSVKKDENFGEWYSEVCKQDMIEYYDISGCYILRPWSMAIWEIMQIFFDAEIKKMKVKNCYFPLFVSPGVLEKEKDHIEGFAPEVAWVTKSGKSDLEVPIAIRPTSETVMYPYYSKWIRGHRDLPLKLNQWCNVVRWEFSNPTPFIRSREFLWQEGHTAFATKAEADEEVLQILELYRRIYEEYLAVPVVKGMKSENEKFAGGLYTTSVEAFIPNTGRGVQGATSHCLGQNFAKMFEINFENEKAETEMVWQNSWAYSTRTIGVMIMTHGDDKGLVLPPKVASVQVVVIPVPYKDANTQGIYDACTATASALCEAGIRAEEDLRDNYSPGWKYSDWEMKGVPLRIEIGPRDLENDQVRTVRRDNGVKEDIPRGSLVEHVKELLEKIQQNMYEVAKQKREACVQEVKTWDEFIKALNEKKLILAPWCDEEEVERDVKARTKGETGAAKTLCSPFDQPELPEGTLCFASGKPAKKWTYWGRSY

SEQ ID NO: 25974 - protein, 395 aa, Mycoplasma mycoides subsp. mycoides
MAKEQFDRSLPHVNIGTIGHVDHGKTTLTAAITKVLSEQGNAEFKDYANIDNAPEERERGITINTAHVEYKTANRHYAHVDCPGHADYVKNMITGAAQMDGAILVVAATDGPMPQTREHILLSRQVGVPKIVVFLNKCDMVEDDEMIDLVEMEIRDLLTEYDFDGEGAPVIRGSALGALNGDSKWTGAINELMAAVDEYIPTPQRDADKTFLMPVEDVFTITGRGTVATGRVERGTVKVNEEVEIIGLKEEPTKTVVTGLEMFRKLLDFAVAGDNVGALLRGVDRHSVERGQVLAKPGTIKPHTVLKASVYALTQEEGGRHKPFFNKYRPQFYFRTTDVTGEVTLPQGTDMVMPGDNVEMEIQLIKPVAVEEGTKFSIREGGRTIGAGTVISIEK

SEQ ID NO: 25975 - protein, 965 aa, Phalaenopsis equestris
  misc_feature (212)..(212): Xaa can be any naturally occurring amino acid
MSRSTVERHASIDAQLRLLAPRKVSEDDKLVEYDALLLDRFLDILQEIHGEDIRETVQECYELSAEYEATHDSKKLEELGHVLTSLDPGDSIVVAKSFSNMLNLANLAEEVQIAFRRRIKLKKGDFVDENSAATESDIEETLRRLVHELKKSPEEVFDALKNQTIDLVFTAHPTQSVRRSLLQKHGRIRNWLLQLYAKDITPDDEQELDETXQREIQAAFRTDEIRRTAPTPQDEMRAGMSYFHETIWKGVPKFLRRVDTALKNIGINERVPYNAPLIQFSSWMGGDRDGNPRVTPEVTRDVCLLARMMAANLYFSQIEDLMFELSMWRCSDELRVRADELHRASKKDAKHYIEFWKQVPPNEPYRVVLADVRDKLYNTRERSRHLLSSGSSDIPEETTLTNVEQFLEPLELCYSSLCTCGDRPIADGSLLDFMRQVSTFGLSLVRLDIRQESDRHTDVLDAITTHLGIGSYRDWSEEQRQEWLLSELSGKRPLFGPDLPKTEEIADVLDTLRVIAELPHDSFGAYIISMATAASDVLAVELLQRECQVKKPLRVVPLFEKLADLEAAPAALSRLFSINWYRNRIDGKQEVMIGYSDSGKDAGRLSAAWQLYKAQEDLIKVAKEFGVKLTMFHGRGGTVGRGGGPTHLAILSQPPDTIHGSLRVTVQGEVIEQSFGEEHLCFRTLQRFTAATLEHGMHPPISPKPEWRALLDEMAVVATKEYRSIVFQEPRFAEYFRLATPETEYGRMNIGSRPSKRKPSGGIESLRAIPWIFAWTQARFHLPVWLGSGTAFKHVVAKDIKNLYMLQEMYNEWPFFRVTIDLVEMVFAKGDPGIAALYDKLLVSDDLWSFGERLRANFEETKTLLLQVAGHRDLLEGDPYLKQRLRLRDAYITTLNVCQAFTLKRIRDPSFHVNLRSHLSREIMNSNKPAAELVKLNPTSEYAPGLEDTLILAMKGIAAGLQNTG

SEQ ID NO: 25976 - protein, 365 aa, Listeria innocua
MEKNIDVLQNWLKDQGAEVAFITDPENIAYFSGYHSEPHERVLGLAVFPESEPFLFTPALEVEDVRGGDWSHPAYGYNDTENPFKIIADEIKKRVANPSKFAIEKKHMSVDRYEQLAGLFSGSSFIPIEHKIEQIRLIKTEAELKILKEAALLADYAVQVGVDEIAEGKTEAEIVAKIEYEMKKKGVTAMSFDTMVLTGKNGALPHGTPGETKIKKGDLVLFDLGVVHKGYCSDITRTVAFGDITDEQKKIYDTVLEAQVAAVDKVKAGIKASEIDLTARNIIREAGFGDYFPHRLGHGLGASVHEFPSITETNNMELQENMVFTIEPGIYVPGVAGVRIEDDLVVTKDGVQVLTEFPKTLQVIK

SEQ ID NO: 25977 - protein, 322 aa, Photobacterium profundum
MKNNNYGVLLVNLGTPDEASPAAIKRFLSEFLHDKRVVDMTRWLWCPILHGVILPIRSPKVAKLYQSVWMEDGSPLMVYSQRQRQALEKQLNVPVALGMTYGTPSIATGLAELKQQGCNKVLVLPLYPQYSGTTTAAVFDRIAKELKQQPHIPELRFINHYFDHPDYIDALALSVTDFWAENGEPDYLLCSYHGIPKRYADNGDPYPQHCHATTEKLAERLAMPREKMSMSYQSIFGREEWLQPYTEVTIEALAQKGIKRLDVMCPAFSVDCLETLEEIAEQCKETFIKAGGDVFNLIPCLNDNEAHIRMMKNLVTQHSQGW

SEQ ID NO: 25978 - protein, 965 aa, Phalaenopsis amabilis
  misc_feature (212)..(212): Xaa can be any naturally occurring amino acid
MSRSTVERHASIDAQLRLLAPRKVSEDDKLVEYDALLLDRFLDILQEIHGEDIRETVQECYELSAEYEATHDSKKLEELGHVLTSLDPGDSIVVAKSFSNMLNLANLAEEVQIAFRRRIKLKKGDFVDENSAATESDIEETLRRLVHELKKSPEEVFDALKNQTIDLVFTAHPTQSVRRSLLQKHGRIRNWLLQLYAKDITPDDEQELDETXQREIQAAFRTDEIRRTAPTPQDEMRAGMSYFHETIWKGVPKFLRRVDTALKNIGINERVPYNAPLIQFSSWMGGDRDGNPRVTPEVTRDVCLLARMMAANLYFSQIEDLMFELSMWRCSDELRVRADELHRASKKDAKHYIEFWKQVPPNEPYRVVLADVRDKLYNTRERSRHLLSSGSSDIPEETTLTNVEQFLEPLELCYSSLCTCGDRPIADGSLLDFMRQVSTFGLSLVRLDIRQESDRHTDVLDAITTHLGIGSYRDWSEEQRQEWLLSELSGKRPLFGPDLPKTEEIADVLDTLRVIAELPHDSFGAYIISMATAASDVLAVELLQRECQVKKPLRVVPLFEKLADLEAAPAALSRLFSINWYRNRIDGKQEVMIGYSDSGKDAGRLSAAWQLYKAQEDLIKVAKEFGVKLTMFHGRGGTVGRGGGPTHLAILSQPPDTIHGSLRVTVQGEVIEQSFGEEHLCFRTLQRFTAATLEHGMHPPISPKPEWRALLDEMAVVATKEYRSIVFQEPRFAEYFRLATPETEYGRMNIGSRPSKRKPSGGIESLRAIPWIFAWTQARFHLPVWLGSGTAFKHVVAKDIKNLYMLQEMYNEWPFFRVTIDLVEMVFAKGDPGIAALYDKLLVSDDLWSFGERLRANFEETKTLLLQVAGHRDLLEGDPYLKQRLRLRDAYITTLNVCQAFTLKRIRDPSFHVNLRSHLSREIMNSNKPAAELVKLNPTSEYAPGLEDTLILAMKGIAAGMQNTG

SEQ ID NO: 25979 - protein, 889 aa, Shewanella sp. MR-4
MAGNVADNVTDMYASLRSNVSMLGQILGDTMRTHLGDSFLEKVEQIRKLAKDSRRGDEAAREQMLELLTALPDEELVPFAKAFNQFLNLANLSEQFHTISRNCDELVCVPDPVEQLLGRMLNGRIDQTKMLDCLKTLDIDLVLTAHPTEISRRTLIQKYAAIVDCLAEQENNQLSDRERRQINLRLRQLIAQIWHTNEIRRERPTPVDEARWGLSTIEESLWHAVPDFLRQLNDQVQDRTGQQLPIDIAPVRFSSWMGGDRDGNPFVTAKVTQEVLDRNRHAAARLFLKDIVLLVGELSMEEANSELMAYTNNSCEPYRFVLRSLRQKLRDTIDYLNARIEGHNPEVDKSTLIWQESDLKAPLEMLYKSLCDCGMRLIANGLLLDILRRLACFGIHMLRLDIRQDAGRHCDVLAELTRYLGMGDFNHWDETEKQAFLLRELSNRRPLIPSNWQPSADVAEVLNTCRLIAKHPAKALGSYVISMASKPSDVLTVLLLLKETGCTHPMRVVPLFETLSDLNNAAECITALLDIDWYRGYTKGMQEVMIGYSDSAKDAGVMAAAWAQYRAQEQLVAVCKQAGVKLTLFHGRGGSIGRGGGPAHKAILSQPLGSVDGRIRVTEQGEMIRFKFGLPKLAVQSLALYTSAVLEATLLPPPEPKQEWRNCMERIAEESVSAYRGIVREEPDFVPYFRAATPEVELGKLPLGSRPAKRRVDGGIESLRAIPWIFAWSQNRLMLPAWLGAGEALQAACQRGEMGLLQDMEREWPFFSTRISMLEMVYAKAEPNLARYYETCLVPPNLHHLGETLRQRLDLGIKVVLELTKSDTLMAHTPWNRESVKLRNPYIDPLNFLQTELLARTRKETTEAPASEHVQLALMLTIAGVAAGMRNTG

SEQ ID NO: 25980 - protein, 497 aa, Geobacillus thermoleovorans
MTMISAQTTEADLWIDGEWRPAASGERFDVIDPATGEVTARVANAGEDDVDAAVAIAEEAFSVRRWLAISPLERGRILRRIAELIRQHHCELAQLMTRENGMPINLALFIEIPLADCFDFFASLVVKPQGEVLPFSVAGSAPDYMAWTMKEPIGVAGLITPWNFPLLMPTWKIAPALAAGCTMVVKPAPETPLTALKLAEICHEAGVPEGVINVLPGLDEAGKALVRHPRVPKIAFTGETETGRHILQAAAPHIKRVTLELGGKSPNIIFADADLEQAAKSALFGVFYNSGQVCQAGSRILVERTVYEPFVERLAERAKKLKVGPGTNPRSDLGPVISREQYEKVLRYIEIGKQEGARLAAGGRALDGGGGGYFIEPTVFADVSPSMRIACEEIFGPVAAVIPFADEEEAVRIANGTMYGLAAAVWTNDIKRALRLARRVKSGTVWLNTYQVLSPTVPFGGYKQSGLGRELGMQALDAYLETKTVICDLNDRPMTLF

SEQ ID NO: 25981 - protein, 326 aa, Kodamaea ohmeri
SIVGRPRHHGIMVGMGQKDSYVGDEAQSKRGILTLRYPIEHGIVTNWDDMEKIWHHTFYNELRVAPEEHPVLLTEAPMNPKSNREKMTQIMFETFNVPAFYVNIQAVLSLYSSGRTTGIVLDSGDGVTHVVPIYAGFSLPHGILRIDLAGRDLTDYLMKILSERGYTFTTTAEREIVRDIKEKLCYVALDFEQEMQTSSLSSAIEKSYELPDGQVITIGNERFRASEALFRPADLGLEAAGIDQTTYNSIMKCDLDVRKELYGNIVMSGGTTMFPGIAERMQKEITALAPSSMKVKIIAPPERKYSVWIGGSILASLSTFQQMWIS

SEQ ID NO: 25982 - protein, 426 aa, Rhizobium etli
MSFSSIDEAIEAIEAGEMVIVVDDENRENEGDLVVAAEKITAEHIAFMMKYARGLICVPLPAERLDKLEIPLMVTRNSDSLQTAFTVSVDCKHGTTTGISAEDRAATVKSLIDPQTRPEDLSRPGHIFPLRANRLGVLGRPGHTEAAVDLARLAGLAPAGVICEIANDDGTMSRLPDLEKFAIEHGLHIVTIDALIEYCRSRDTRVKRYAQSFMPTRFGDFKAIAYRDSLTGTEHLALTLGELCEKEDVLVRVHSECLTGEAFRSMRCDCGQQLEMALRAVQLAGAGCVIYMRGQEGRGIGLGNKIAAYSLQDHGRDTLEANRELGFASDSREYNAAADIIRDLGIGSVRLLTNNPTKIEALRTSGVIVSSRQSLIAASSASNITYFKTKRDRFGHLLDQDTSAEHVGRSNVFSVFGAQVFSGPLG

SEQ ID NO: 25983 - protein, 575 aa, Desulfitobacterium hafniense Y51
MRVSQILNPTLREVPAEAEVVSHQLLVRAGLIRKSAAGIYTYLPLGLRVLRKIEQIVREEMDAKGGQEVLLPIIQPAELWRESGRWDLYGQELMRLNDRHNREFCLGPTHEEIITDLIRGEIRSYKQLPLLLYQIQNKYRDERRPRFGLMRGREFIMKDLYSFDRDEAGLAESYKKMYDAYTRIFTRCGLSFRPVEADAGAIGGTGGTHEFMVLAESGEAAVVYCPDCDYAANVEKAECKPAPMAVDAPIGAYRSVDTPGTKTIEQVAEFLKVSKSDLVKSLLYQGDDKLILVLVRGDREINEIKVNNALGPFINLQLAGPEAVLEKLGCEPGYVGPIGAPKNLTVVADLEVPLMAKAVCGANAEDKHYVDAVPEKDFRIDQILDLRMVNAGEPCPQCGSPLKEARGIEVGQVFKLGTKYSKALNAVFLDENGAEHPCVMGCYGIGVSRTMAAAIEQNNDKDGIIWPIPIAPYHVIVVPVNMKDDQVRETGEALYQELLKLGVEAVLDDRDERPGVKFKDADLVGYPLRVTVGSKTLANGEVELRDRKTGEVQLVKVEELAGRIQGMIREALNIG

SEQ ID NO: 25984 - protein, 326 aa, Lodderomyces elongisporus
SIVGRPRHQGIMVGMGQKDSYVGDEAQSKRGILTLRYPIEHGIVSNWDDMEKIWHHTFYNELRVAPEEHPVLLTEAPMNPKSNREKMTQIMFETFNVPAFYVSIQAVLSLYSSGRTTGIVLDSGDGVTHVVPIYAGFSLPHGILRIDLAGRDLTDYLMKILSERGYAFSTTAEREIVRDIKERLCYVALDFEQEMQTSSQSSAIEKSYELPDGQVITIGNERFRTPEALFRPADLGLEAAGIDQTTYNSIMKCDLDVRKELYGNIVMSGGTTMFPGIAERMQKEITALAPSSMKVKIIAPPERKYSVWIGGSILASLSTFQQMWIS

SEQ ID NO: 25985 - protein, 326 aa, Metschnikowia reukaufii
SMVGRPRHQGIMVGMGQKDSYVGDEAQSKRGILTLRYPIEHGIVNNWDDMEKIWHHTFYNELRVAPEEHPVLLTEAPMNPKSNREKMTQIMFETFNVPAFYVSIQAVLSLYSSGRTTGIVLDSGDGVTHLVPIYAGFSMPHGILRLNLAGRDLTDYLMKILSERGYTFSTTAEREIVRDIKEKLCYVALDFEQEMQTSSQSSAIEKSYELPDGQVITIGNERFRAAEALFRPTDLGLEAVGIDQTTYNSIIKCDVDVRKELYGNIVMSGGTTLFPGIAERMQKEITALAPSSMKVKIIAPPERKYSVWIGGSILASLSTFQQMWIS

SEQ ID NO: 25986 - protein, 102 aa, Zea mays
MVVLVVATTSDPASIGPAAAFLAMPGWSPGPPIAEGMESFTNGNVRLLKHEHSIIAEDDLDQRWQEATGESVSEVIFLSKHTAVSKRPALTVHPIGLFFSHM

SEQ ID NO: 25987 - protein, 282 aa, Triticum aestivum
MPLLAPAAKTLFPSRLPPASPRLHLRRATATAAGGRGDGAAAVSAASGTSARDRRLARVREERRRREYDREHTYPGWARVLENACRDDEEMRAILGDSIGNPELMKQRIQERVRAKGREGFNRPKTGSVAAFKVSFRDFNPLNAFIWFELFGEPTDRDVDLLGGVIQAWYVMGRLGAFNSSNLQLANSMLDFDPSYDSEEASAVMPSSFHDISDVEFQDSWGRVWVDLGTSDHLGLDVLLNCLTQLSSEHLGIKQVVFGGRKLGDWEEGMTSSDYGYKHFKI

SEQ ID NO: 25988 - protein, 146 aa, Glycine max
MANTLQRALRATMARRFSTDALAEIKRGEIGMVSGIPQEHLRRRVVIYSPARTASQQGSGKVGKWKINFLSTQKWENPLMGWTSTGDPYSHVGDSALTFDSEEAAKAFAEKHGWEYSVKKPHTPLLKVKSYADNFKWKGPPKSGEE

SEQ ID NO: 25989 - protein, 426 aa, Rickettsia prowazekii
MSNQNINKRVVITGLGLVTPVGLNVSSTWKNIVGGVSGIKTITEFDTSKLACKIAGVIDNSEQNGFKLENFTQADDINRLSKMDKFIHYGIAAATEAVEDSGWLPKDEKSRDRTGLILGSGIGGLKMIEDTSIKLYKENNGKVSPFFIPASLINLLSGLVSIKYGFSGPNQAAVTACSTGAHAIGDAMRMIKHGYADVMIAGGAEAPVTPVGIAGFVAARALCTKYNDNPEKASRPWDKDRSGFVMGEGAGIVVLEEYEHAINRGAKIYCEVIGYGSTGDAYHMTAPHPKGRGAYRAMSEALQDADITPSMIDYINAHGTSTPLGDMIELDATQKLFLESNPKILMSSTKSSIGHLLGAAGSVEFIFSVLTIRDQIAPPTLNLENPIDDVKIDLVKFKARETVIDYVLSNSFGFGGTNASLVIKKI

SEQ ID NO: 25990 - protein, 253 aa, Oryza sativa (indica cultivar-group)
MESAPASRVRREDVARAVAALLRWLQHHPTPAPEPIYLLVTLKRAPARRFEHTLRLPRSPFPSISLVSDRLPADLPDDIDPLPSPALGSLPPAARRGLVLVDRRLRVRPGGKGKAAAKAARVVPVDLADQAWADSAREAARRVELRVEGGTCRAVRVGHAAMAREEAVENVVAAVEAAAACVPRKWRNVRALHVKAPESVALPLYSAVGTGGGDDGGNGEAEDAKRKGVAVKEQGIVKRRKKSSSVSVGGDQL

SEQ ID NO: 25991 - protein, 402 aa, Pseudomonas putida KT2440
MENMHSAMDSLVHGSNTLFILMGAILVLAMHAGFAFLEVGTVRHKNQVNALSKILSDFAISALVYFFIGYWIAYGVNFFQPATTLAVDHGYALVKCFFLLTFAAAIPAIISGGIAERARFVPQLCATALIVAFVYPFFEGVVWNGNLGLQAWLQARFGAPFHDFAGSVVVHAMGGWLALAAVLLLGARRGRYRDGRLVAFAPSSIPFLALGSWILIIGWFGFNVMSAQTLQGVSGLVAINSLMAMVGGTLSALLAGRNDPGFLHNGPLAGLVAICAGSDLMHPVGALATGLVAGALFVWTFTAAQNRWKIDDVLGVWPLHGLCGVWGGIACGVFGQVALGGMGGVSLVSQLLGSLMGVLVALAGGFAVYGAIRALHGLRLSHEQEFQGADLSLHRIGATSQD

SEQ ID NO: 25992 - protein, 319 aa, Moorella thermoacetica ATCC 39073
MRTIGVLTSGGDAPGMNAAIRAVVRQAAALKIDVIGISRGYAGLIQGDFRRLNTGSVAGIIHRGGTILLTARSEEFRTEAGRATALDNLHREGIEGLVVIGGDGSFHGAVHLAKKGLPVIGIPGTIDNDIAGTDYTIGFDTAVNTAVEAISRIRDTATSHERIFIIEVMGRRSGQIALAAGIAGGAESILIPEYPVNYDRVVEKLEQGRHRGKLHSIIVVAEGVGSALEVSEEIARRTRLESRVTILGHIQRGGAPTAFDCMLASRLGARAVDLLADGASSRMVGIAANELVDRDLETVLREKKSIDPELYRLAEVLAL

SEQ ID NO: 25993 - protein, 336 aa, Burkholderia sp. 383
MTIRVAINGYGRIGRNTLRAFYENGKKHDIEIVAINDLGDAKTNAHLTQYDTAHGKFPGEVSVDGDYLIVNGDRIRVLANRNPAELPWGELGVDIVMECTGFFTTKEKASAHLKGGAKKVIISAPGGKDVDATIVYGVNHDVLKAEHTVISNASCTTNCLAPLVKPLHDKIGLETGLMTTIHAYTNDQVLTDVYHEDLRRARSATHSQIPAKTGAASAVGLVLPELNGKLDGYAIRVPTINVSIVDLSFIAKRDTTVEEVNAIMKEASEGALKGILGYNTAPLVSIDFNHNPASSTFDSTLTKVSGRLVKVSSWYDNEWGFSNRMLDTAVAFANAK

SEQ ID NO: 25994 - protein, 522 aa, Glycine max
MATTKIGLGVGPVPTTTHRVTAVAAPSSAVFSPPPHRLFLINSRRPPLRPRPSPLPLRVASSSSSSSSVAAPGKGVENVVIIGSGPAGYTAAIYAARANLKPVVFEGYQAGGVPGGQLMTTTEVENFPGFPDGISGPDLMDRMRRQAERWGAELYQEDVEVIDVKSSPFTVQSSERKVKSHTVIYATGATAKRLRLPREDEFWSRGISACAICDGASPLFKGQVLAVVGGGDTATEEALYLTKYARHVHLLVRRDHLRASKAMQDRVFDNPNVAVHFNTEAVDLVSNTKGQMSGILVRKIDTGEEYVLEAKGLFYGIGHSPNTELLKGQVELDHSGYVQVQEGTAKTSVEGVFAAGDVQDHEWRQAITAAGSGCVAALSVERYLVSNDLLIEFHQPKTEEVKKELTDRDVHEGFDITLTKHKGQYALRKLYHDSPRLICVLYTSPTCGPCRTLKPILSKVIDEFDQNVHFVEIDIEEDPEIAEAAGIMGTPCVQYFKNKEMLKTVSGVKMKREYREFIEANK

SEQ ID NO: 25995 - protein, 851 aa, Saccharophagus degradans 2-40
MSKQRIVVVGNGMVGHKFIENLLAHEKADDYEIVAFSEEPRLAYDRVQLSKYFSGSTAEDLMLTSEDFYKENGVNYVLNEKVTAVKHDENKVVVASGKEIAYDKLILATGSFPFVPPIPGKDQPHCLVYRTIEDLEAITASAKESKVGVVVGGGLLGLEAGNALQNLGLEVHVVEFAPRLMAVQLDEGGGNLLRKKIEALGVNVHTEKNTQEIVAGETCRYRMNFADGSHLETDMILFSAGIRPQDELARNNDVLEIGERGGIVINNNCQTNIENIYAIGECALWDGKIFGLVAPGYQMSKVAISHITGGEDQFTGADMSTKLKLLGVDVASVGDAQGRTPGCLSYVYQDGVADVYKRIIVNAEKTRLLGAVLVGDVEAYGTLQQMYVNEMDLPEMPEAMILPSIDGSAASAGMGVDALPEGAIICSCNDVTKGQICCAVQDGSVTIGDIKANTKAGTSCGGCVALATQVMNSELTKLGVEVITDLCEHFAHTRQELHHIVRVEKIKTFGELIEKHGTGLGCDICKPTAASIFASVWNEYVLENQHAGLQDTNDHFMANMQKNGTYSIVPRVAGGEITPEKLIVLGQVAQKYKLYTKITGGQRIDLFGAQQHELPLIWKELVDAGFETGHAYGKSLRTVKSCVGSTWCRYGMLDSVGMAIRLEDRYKGLRSPHKIKFAVSGCTRECAEAQSKDVGVIATETGWSLYLCGNGGMKPRHADLFATGLDDETLIKYIDRFLMFYVRTADRLQRTSVWMDNLEGGLDYLKSVVIDDKLNVNAELESEMALVIDTYQCEWKTTIEDPEKLKRFRTFVNSDEKDNTVVFVEEREQIRPATEEERVRFVNAEEVAEIA

SEQ ID NO: 25996 - protein, 168 aa, Rhodospirillum rubrum ATCC 11170
MSPLYDIEVTTLDGAPQTLADYAGKVLLIVNVASKCGFTPQYKGLEALQRRYRDRGFCVLGFPCNQFGHQEPGDAGEIKSFCTLTYDVSFPMFAKIDVNGPDAHPLYRLLKAEAKGLLGSEAIKWNFTKFLVSADGETISRFAPTDTPESLRARIEALLPAAQGPLGA

SEQ ID NO: 25997 - protein, 308 aa, Thermoplasma acidophilum
MKSALLLLSYGSPERIEDLDEYLKNIFNGKPVPESVREENLRKYEMFGGRSPSNRIIESIARKLHEKIGDDMDVILAYKHWNPSIEEAVKGLGSYDNIVAIPLFSFYSQNVKDSYLNPLESALRRYGFSPRLEFVNGLANSDLFLPMWANIISEDASEDSFYLFDAHSLPAPDREEDYLFWLRYSTYKISQILGLSRSDFGFQGGHLGWLGPSIYDVLNRIDASKITVIPISFLYDHLEILYDLDYEFRKAVEAKGMHYRRVRMPNDSAMMVNMIERAARSAITHLSGEKINGSIIGQPRIADTDNGR

SEQ ID NO: 25998 - protein, 310 aa, Idiomarina baltica OS145
MSKTVRIATRKSKLAMWQAEHIQARLASLYPELTIELVPMSTRGDIILDTPLAKIGGKGLFVKELEAAMLEGRADLAVHSMKDLPVEFPPGLELHTICESEDPRDAFVSNHYQSLNELPEGAVVGTCSLRRRCQVKERFPHLIINDLRGNVQTRLRKLDEGQFDAIILAASGLIRLELGERITSFIPVEDSLPANGQGVLGIEVRSDDDEIKALLEPLQCPTTRFRVLAERAMNRRLQGGCQVPIGAFAVVDGDHLSLRGLVGDPDGVEVIREEIQGPVEQAEALGIELAEKLLARGAGEILKAVYDQHD

SEQ ID NO: 25999 - protein, 175 aa, Oryza sativa
MAPSVMASSATTVAPFQGLKSTAGMPVARRSGNSSFGNVSNGGRIRCMQVWPIEGIKKFETLSYLPPLTVEDLLKQIEYLLRSKWVPCLEFSKVGFVYRENHRSPGYYDGRYWTMWKLPMFGCTDATQVLKELEEAKKAYPDAFVRIIGFDNVRQVQLISFIAYKPPGCEESGGN

SEQ ID NO: 26000 - protein, 106 aa, Triticum aestivum
MSGVWVFKNGVVRLVENPGSERTSTVRRKALLHTPSGQVVSSYATLEAKLTALGWERYYEDPALYQFHKRGCLALISLPRDFNHFSSVHMYDVVIKNRESFRVVDA

SEQ ID NO: 26001 - protein, 202 aa, Triticum aestivum
  misc_feature (69)..(69): Xaa can be any naturally occurring amino acid
  misc_feature (81)..(81): Xaa can be any naturally occurring amino acid
MVFGNIGSWAAQLITEAGGKVVSIRDVTGAVKNSNGIDIAKLMKHSAENRGIKGFDGGDPADPTSLLTXEECDVLIPAALXGGVINQDNADPIKAKYIIEAANHPTDPEADEILAKKGVLILPDILANSGGVTVSYFEWVQNIQGFMWDEEKVNRELKTYMTRAFRDTKEMCRSHHCDLRMGAFTLGVNRVARATVLRGWEA

SEQ ID NO: 26002 - protein, 485 aa, Xanthomonas campestris pv. vesicatoria str. 85-10
MATELAPPQNAQILERLGRRYDAGFITEIESDSLPPGLDEDVIRALSAKKDEPQWMTDWRLEAYRHWLKMPMPEWAKLQISPIDFQALSYYSAPKGPKYASLDEVPKELLDTYDKLGVPLHERAKLAGVAVDAVFDSVSVGTTFRKELAEKGVIFCSMSEAIKEHPEIVRQYLGSVVPVGDNYFAALNSAVFSDGSFVFIPAGVRCPMELSTYFRINAGHTGQFERTLIVCEDKAYVSYLEGCTAPMRDENQLHAAVVELVTLEDAEIKYSTVQNWYPGDEEGRGGIYNFVTKRAECRGARSKVTWTQVETGSAITWKYPSCVLIGDDSVGEFHSVALTHHRQQADTGTKMIHIGKRTKSKIVSKGISAGRGQNTYRGQVKVDRNADGARNYTQCDSLLIGKQCGAHTFPYIEVKNPGATVEHEATTSKISDDQLFYCRARGISQEDAVSLIVDGFCKQVFRELPMEFAVEAKKLLEVSLEGSVG

SEQ ID NO: 26003 - protein, 349 aa, Magnaporthe grisea 70-15
MYEGFMANGTAAGGQLTTTTDVENFPGFPKGIGGQELMDAMREQSSRFETEIISETVAKVDLSSRPFKYCTEWSPEVMHTADTLVIATGASARRLGLPGEDKYWQNGISACAVCDGAVPIFRNKPLFVIGGGDSAAEEAMFLTKYGSHVTVLVRKDKLRASSIMAKRLLSHPKVTVKFNSVGVEVKGGEDGLMSHMVIKDVVTGKEETLEANGLFYAIGHDPATQLVKGQLETDEEGYIVTKPGTPLTSVEGVFACGDVQDKRYRQAITSAGSGCMAAMDAEKFLAEQEDVEPDREARIFYREGTPSGSAKLKLPSWQGLSLASNTLVLAMYGERDNAVRITLTFQKWA

SEQ ID NO: 26004 - protein, 217 aa, Arabidopsis thaliana
HQDNSARVVMIRSLVPGVFCAGADLKERRTMSPSEVHTYVNSLRYMFSFIEALSIPTIAAIEGAALGGGLEMALACDLRICGENAVFGLPETGLAIIPGAGGTQRLSRLVGRSVSKELIFTGRKIDAIEAANKGLVNICVTAGEAHEKAIEMAQQINEKGPLAIKMAKKAIDEGIETNMASGLEVEEMCYQKLLNTQDRLEGLAAFAEKRKPLYTGN

SEQ ID NO: 26005 - protein, 249 aa, Glycine max
MKFNIANPTTGCQKKLEIDDDLKLRAFWDKRISQEVVGDALGEEFKGYVFKITGGCDKQGFPMKQGVLTPGRVRLLLHRGTPCFRGYGRRNGERRRKSVRGCIVSPDLSVLNLVIVKKGESDLPGLTDVEKPRMRGPKRASKIRKLFNLSKEDDVRKYVNTYRRTFTTKNGKKVSKAPKIQRLVTPLTLQRKRARIADKKKRIAKAKSEAAEYQKLLASRLKEQRDRRSESLAKRRSKLSSAAKQAATA

SEQ ID NO: 26006 - protein, 963 aa, Picea abies
MARNNLEKMASIDAQMRLLVPGKVSEDDKLIEYDALLLDRFLDILQDLHGEDIRAMVQECYERSGEYEGKNDPHKLEELGNVLTSLDPGDSIVVASSFSHMLNLANLAEEVQIAYRRRNKIKRGGFADESNATTESDIEETFKRLVNQLGKSPAEVFDALKNQTVDLVLTAHPTQSVRRSLLQKHARIRNCLSQLYGKDITPDEKQELDEALLREIQAAFRTDEIRRTPPTPQDEMRAGMSYFHETIWKGVPKFLRRIDTALKSIGINERVPYNAPLIQFSSWMGGDRDGNPRVTPEVTRDVCLLARMMAANLYYSQIEDLMFELSMWRCSDELRARALQLHSASKKDAKHYIEFWKQIPPNEPFRVILGDVRDKLYNTRERTRQLLSNGISDIPEEVTFTNIDEFLEPLELCYRSLCSTGDQPIADGSLLDFMRQVSTFGLSFVKLDIRQESDRHSDVADAITRHLGIGSYKEWSEEQRQAWLLSELQGKRPLFGPDLPKTDEVRDVLDTFHVISELPADNFGAYIISMATAASDVLVVELLQRECHVKKPLRVVPLFEKLADLEAAPAALARLFSINWYRNRIDGKQEVMIGYSDSGKDAGRLSAGWALYKAQEDLIKVAKEFGIKLTMFHGRGGTVGRGGGPTHLAILSQPPDTIHGSFRVTVQGEVIEQSFGEEHLCFRTLQRFTAATLEHGMRPPVAPKPEWRELMDEMAVVATKEYRSIVFQDPRFVEYFRSATPELEYGRMNIGSRPSKRKPSGGIESLRAIPWIFAWTQTRFHLPVWLGFGAAFKHVMEKDIRNLHMLQQMYNEWPFFRVTIDLIEMVFAKGDPGIAALYDKLLVSDDLWAIGEKLRANYGETKDLLLQVAGHKDLLEGDPYLKQRLRLRDSYITTLNVCQAYTLKRIRDPNYHVNLRPHLSKESSTKPAAELVKLNPTSEYAPGLEDTLILTMKGIAAGMQNTG

SEQ ID NO: 26007 - protein, 484 aa, Bordetella parapertussis
MENLGYPARLELYVAGQWRGVEGRRTQVVVNPSTQQPLGELPLASAEDIDDALAAADQAFGDWARTTAWERADILQRAAALIEARRDRLAVVLTLENGKPLADSHGELDRVVETILWCAEEGKRTYGRVLPARAQRLSQSSLKRPVGPVAAFVPWNFPAALAARKLAAAMAAGCTVVLKPAEETPAICIELVRAFVDAGTPAGVVNLLYGVPAQVSERLIASPIIRKVSFTGSVAVGRLLASMAAGHLKPATMELGGHAPVVVFDDVDADRVAKMCVGFKYRNAGQVCLSPSRFYVHERIADRFAESFVRHAGLLRVGDGMEEGVQMGPLNNVLRLQAAERLVEQAVGAGASLALGGRRIGQRGYFYPPTVLEGVPDAADILAEEPFCPVAPIMRFGSMDEVIGRANHPSLGLAAYAFTNRMATSAEFAERIEAGWIGINNFVPALADAPIGGMKDSGLGYEGGPEGLDAYLHARFVSQLNVEV

SEQ ID NO: 26008 - protein, 318 aa, Gloeobacter violaceus PCC 7421
MAEQTVIITGASSGVGLHAADSLAQSGRWHVVMACRDKAKAQNAAASLGMRPQSYTIVHLDLASLASVRRFVQDFRALGQPLDALVCNAAVYTPTAREPRYTADGFELSVGTNHLGHFLLCNLLLEDLQNSPAAEPRLVILGTVTHNPKELGGSIPPRPDLGDLRGLEQGFKAPHTMIDGKAYNPVKAYKDSKVCNLLTMRELHRRFHTSHKITFSALYPGCVATSGLFRESPRLFQILFPVFQKYVTGGFVSEAEAGGRVAALVDDPAYSRSGVYWSWGNRQKKDGKSFIQDVSTEASDEDKARRLWDLSAGLVGLA

SEQ ID NO: 26009 - protein, 255 aa, Zea mays
MCQTVRRTPPLLSPSLGSWASLPTPEQPSSPCSASPPPRTAPPAPPARAGGTQLPASSLRRGYTMEGAGRDANPLGGYRIGKTLGIGSFGKVKIAEHILTGHKVAIKILNRRKIRSMEMEEKVKREIKILRLFMHPHIIRLYEVIDTPADIYVVMEYVKSGELFDYIVEKGRLHEEEARRFFQQIISGVEYCHRNMVAHRDLKPENLLLDSKCNIKIADFGLSNVMRDGHFLKTSCGSPNYAAPEVISGKLYAGP

SEQ ID NO: 26010 - protein, 402 aa, Xanthomonas campestris pv. vesicatoria str. 85-10
MRRVVITGMGITSCLGNDLDTVSSALRVSRSGITALPDHAEAGLRSQVGGAVALDLDSLIDRKLKRFMGDASAYAYLAMRDAIADAGLDAEQVSGLRTGVIAGSGGGSSQWQVETADLLRNRGVRKVGPYMVPRTMCSSVSASLATAFKIRGLSYSLSAACATSAHCIGAAADLIRHGAQDVMFAGGGEELHWTMSVMFDAMGALSTGFNDRPAVASRPYDAQRDGFVIGSGGGMLVLEDYEHAIARGARIHAELLGYGVTSDGADMVAPSGEGAVRCMHMAMQGLQRPIDYLNTHGTSTPLGDVTELGAVREVFGDYVPPLSSTKGLSGHSLGAASVHEAIYSLLMLRDGFMAGSAHIDELDPSAEGFPILRQTQDATLNTVMSNSFGFGGTNAALVFGRV

SEQ ID NO: 26011 - protein, 785 aa, Vibrio parahaemolyticus RIMD 2210633
MNKFRLVNSCLFIAMLVACTFAYMAHINSKSTQQLHSALSEVGHQLIEERDVIVNQYAIKERKNFELTKSLVDIEVEAEKLADTFDNAVWFPISPNRQKIQQTLAKFEQRVIQTTSQLDMLIGVQVENQYALLMLLDIYEEEFSTHIGETQLDKHYVEFFSRDLVNQSGEQSESGANFLGRLHESDKKIELLTNELLDHNYFVFVEEAEHSLLDLAQNEARFTWLFVFVAVMLLVGSFLYQLQYRMHNLKQLNSELEAETDKAERAAKAKSSFLAAMSHELRTPMNGVLGISQLIAEETKEPVTKEHIKVILDSGQHLMTILNDILDFSKVEENKLELEKAPFHLEQVLTPVCSAIQPLIDEKSIDLIVENDVPNNTEFTGDCARLRQILFNLAGNAVKFTNEGHVLIRTELNSEDKHLLIIVSDTGIGIAPDKQGRVFNSFEQADSSTTRRFGGTGLGLAIVKKLTELMGGSITLKSVEGVGTQFIVTLPIPWNESEKPSPQHTPVQTRSTQNLRILLAEDNRVNALVAKGFCEKLGHAVDVAENGLVAVEKARDNDYDLILMDNHMPEMNGVEATRFIREKLGVKTLLFAYTADVFREAHDHFIAAGADHVLTKPLQRESFADALKQFSARLKVKQTEEVSPVSNVLQLQRKPIENLRLTEEELSNSEMLASLKEHPNELLDLLNSIITDFELAVDDLIENFMQSDFDALKLTMHTTKGMALNLGLKILASQALELETQLKMNQVPAIEQLQMLINRLQVNIHQGHRLRDELVKAQQNSEQVF

SEQ ID NO: 26012 - protein, 515 aa, Shigella flexneri 2a str. 301
MCSIFGVFDIKTDAVELRKKALELSRLMRHRGPDWSGIYASDNAILAHERLSIVDVNAGAQPLYNQQKNHVLAVNGEIYNHQALRAEYGDRYQFQTGSDCEVILALYQEKGPEFLDDLQGMFAFALYDSEKDAYLIGRDHLGIIPLYMGYDEHGQLYVASEMKSLVPVCRTIKEFPAGSYLWSQDGEIRSYYHRDWFDFDAVKDNVTDKNELRQALEDSVKSHLMSDVPYGVLLSGGLDSSIISAITKKYAARRVHHEIHFTVQEGLDAIRDVIYHIETYDVTTIRASTPMYLMSRKIKAMGIKMVLSGEGSDEVFGGYLYFHKAPNVKELHEETVRKLLALHMYDCARANKAMSAWGVEARVPFLDKKFLDVAMRINPQDKMCGNGKMEKHILRECFESYLPASVAWRQKEQFSDGVGYSWIDTLKEVAAQQVSDQQLETARFRFPYNTPTSKEAYLYREIFEELFPLPSAAECVPGGPSVACSSAKAIEWDEAFKKMDDPSGRAVGVHQSAYK

SEQ ID NO: 26013 - protein, 326 aa, Pichia farinosa
SIVGRPRHQGIMVGMGQKDSYVGDEAQSKRGILTLRYPIEHGVVTNWDDMEKIWHHTFYNELRVAPEEHPVLLTEAPMNPKSNREKMTQILFETFNVPAFYVNIQAVLSLYSSGRTTGIVLDSGDGVTHVVPIYAGFSLPHGILRIDLAGRDLTDYLMKILSERGYTFSTTAEREIVRDIKEKLCYVALDFEQEMQTSAQSSAIEKSYELPDGQVITIGNERFRAAEALFRPSDLGLESAGIDQTTYNSIIKCDLDVRRELYGNIVMSGGTTMFPGIAERMQKEITALAPSSMKVKIIAPPERKYSVWIGGSILASLSTFQQMWIS

SEQ ID NO: 26014 - protein, 421 aa, Streptomyces coelicolor A3(2)
MVDADQTFVIVGGGLAGAKAAETLRTEGFTGRVILVCDERDHPYERPPLSKGYLLGKEERDSVFVHEPAWYARHDIELHLGQTVVAIDRAAKTVHYGDDGTHVSYDKLLIATGAEPRRLDVPGTGLAGVHHLRRLAHAERLKGVLATLGRDNGHLVIAGAGWIGLEVAAAAREYGAEVTVIEPAPTPLHGVLGPELGAVFAELHESRGVRFRFGVKLTEIVGQDGVVLAARTDDGEEHPAHDVLAAIGAAPRTALAQAAGLEIADRAHGGGIVVDDHLRTSDPDIFAAGDVASFHHALFDTSLRVEHWANALNGGPAAARAMLGRGLAHDRVPYFFTDQYDLGMEYSGWAPAGSYDQVVIRGDAAKREFIAFWVKEGRVLAGMNVNVWDVTEPIQQLIRSKTRVDTEDLANPHVSLESLVA

SEQ ID NO: 26015 - protein, 292 aa, Shigella flexneri 2a str. 301
MSDDNSHSSDTISNKKGFFSLLLSQLFHGEPKNRDELLALIRDSGQNDLIDEDTRDMLEGVMDIADQRVRDIMIPRSQMITLKRNQTLDECLDVIIESAHSRFPVISEDKDHIEGILMAKDLLPFMRSDAEAFSMDKVLRQAVVVPESKRVDRMLKEFRSQRYHMAIVIDEFGGVSGLVTIEDILELIVGEIEDEYDEEDDIDFRQLSRHTWTVRALASIEDFNEAFGTHFSDEEVDTIGGLVMQAFGHLPARGETIDIDGYQFKVAMADSRRIIQVHVKIPDDSPQPKLDE

SEQ ID NO: 26016 - protein, 404 aa, Campylobacter jejuni subsp. jejuni NCTC 11168
MKRVVVTGIGMINALGLDKESSFKAICNGESGVNKITLFDATDFPVQIAAEVKNFDPLEVVDGKEVKKIDRFIQLGIKAAREAMQDAGFSEELDKEEFGIVSASGIGGLPNIEKNSIICSERGPRKISPFFIPSALVNMLGGLISIEHGLKGPNISCVTACAAGTHAIGEAYKSIALGNAKKMLVIGAEAAICPVGIGGFASMKALSTRNEDPQHASRPFDKERDGFVMGEGAGALVFEEYEEAKKRGATIYAELIGFGESADAHHITSPTLDGPLRAMKKALNMAGNPKVDYINAHGTSTPVNDKNETAAIKELFGNNIPLISSTKGQTGHCLGAAGAIEAVVSVMVLRDGVVPPTINQLVKDDECDLDYIPNISRKVDLKVVMSNSFGFGGTNGCVVFKKVD

SEQ ID NO: 26017 - protein, 326 aa, Pichia holstii
SIVGRPRHQGIMVGMGQKDSYVGDEAQSKRGILTLRYPIEHGIVTNWDDMEKIWHHTFYNELRVAPEEHPVLLTEAPMNPKSNREKMTQILFETFNVPAFYVSIQAVLSLYSSGRTTGIVLDSGDGVTHVVPIYAGFSLAHAILRIDLAGRDLTEHLMKILSERGYPFSTTAEKEIVRDIKEKLCYVALDFDQELQTSSQSSAIEKSYELPDGQVITIGNERFRAPEALFHPSALGLEAAGIDQTTYNSIMKCDVDVRKELYGNIVMSGGTTMFPGMAERMQKEITALAPSSMKVKIIAPPERKYSVWIGGSILASLSTFQQMWIS

SEQ ID NO: 26018 - protein, 598 aa, Rickettsia sibirica 246
MTKIRINLLRNLFTEYDIDGYIIPSNDKYMSEYVPSYAKRLEYITGFTGSNGIAIIYKDTALFFTDGRYLEQANKELDLELFKLFDLKDISKFGKDAKIGYDSELFTYPTISNLKFNFQKINGNLVDKIWPNQPLEPNSKVYLHDIKLAGVSHTDKISKCREIFLDSRFCRNDIEESGNDTEQSALVILDSSSICWLLNLRASDVAYTPLMFAKVILTSTQLYLFINPTRIDAEIINARPEITILPEEEFENILRDSENTHLSKPAYRIFIDDTIASVHIMDLVADKKVQKITDPCLMLKACKNDVEIKHAIDLHIKDAVALCEFFADFSQCHPRENGDPEKHSNELTEYSLGLKLTEQRAKQEGYVSDSFPAICGFQENSAIIHYRADQKTAKKIEGQGILLIDSGGQYQGATTDITRTIVIGTPTDEQKKRYTQVLKGHIALAKAKFPKNIIAGANLDILARQYLWQEMLDYPHGTGHGVGSFLSVHEGPQSINLRNKTILKAGMILSNEPGFYVPGKYGIRIENLMYVKENNGWLEFETLSLVPYASKLTDMKLLNIDEINYIKEYYNKIRAKIYDLLSTQARNWLNNEINLYCN

SEQ ID NO: 26019 - protein, 883 aa, Salmonella typhimurium LT2
MNEQYSALRSNVSMLGKVLGETIKDALGEHILDRVETIRKLSKSSRAGNEANRQELLTTLQNLSNDELLPVARAFSQFLNLANTAEQYHSISPKGEAASNPEVIARTLRKLKNQPDLNDATIKKAVESLSLELVLTAHPTEITRRTLIHKMGEINNCLKQLDNTDIADYERHQVMRRLRQLIAQSWHTDEIRKQRPSPVDEAKWGFAVVENSLWQGVPNYLRELNEQLEENLGYKLPVDFVPVRFTSWMGGDRDGNPNVTADITRHVLLLSRWKATDLFLKDIHVLVSELSMVDATPELLALVGEEGASEPYRYLMKKLRARLMATQSWLEARLKGEKLPKPAGLLTQNEQLWEPLYACYQSLQACGMGIIANGELLDTLRRVKCFGVPLVRIDIRQESTRHTEALGEITRYLGIGDYESWSEADKQAFLIRELNSKRPLLPRNWEPSNDTREVLETCKVIAEAPKGSIAAYVISMAKTPSDVLAVHLLLKEAGIGFAMPVAPLFETLDDLNNADDVMTQLLNIDWYRGLIQGKQMVMIGYSDSAKDAGVMAASWAQYQAQDALIKTCEKAGIELTLFHGRGGSIGRGGAPAHAALLSQPPGSLKGGLRVTEQGEMIRFKYGLPEVTVSSLSLYTSAILEANLLPPPEPKDSWRHIMDELSVISCETYRGYVRENKDFVPYFRSATPEQELGKLPLGSRPAKRRPTGGVESLRAIPWIFAWTQNRLMLPAWLGAGTALQKVVEDGKQSELEAMCRDWPFFSTRLGMLEMVFSKADLWLADYYDQRLVAKTLWPLGKELRDLLEEDIKVVLAIANDSHLMADLPWIAESIQLRNVYTDPLNVLQAELLYRSRLTEEQGKSPDPRVEQALMVTIAGVAAGMRNTG

SEQ ID NO: 26020 - protein, 819 aa, Streptomyces coelicolor A3(2)
MQNTGTRTPATTPTHCPYCALQCGMNLTPVEGGTVEVSERTDFPVNRGALCGKGRTAAAVLAPGARLTSPLVRSGDGALVPAGWDEALDRIAGNLERTRARYGADALGVFGGGGLTNEKAYALGKFARVVLGTSQIDYNGRFCMSSAAAAGTRAFGLDRGLPFPLEDVPRTGCVILVGSNPAETMPPSLRYFTELRENGGTLIVVDPRRTKTAEQADLHLAPRPGTDLALALGMLHLVVAEGRVDEAYVEERTSGWEEARAAAMAHWPEYVERITGVSVPELREAVRLFCAPEAAMVLTARGPEQQAKGTDTVGAWINLCLATGRAGRPLSGYGCLTGQGNGQGGREHGQKADQLPGYRKLTDPAARRHVAEVWGVDPDALPGPGRSAYELLDALGTDVRSLLVMGSNPVVSAPRAAHVEGRLRSLDFLAVCDVVLSETAELADVVLPVTQWAEETGTTTSLEGRVLLRRRAITPPDGVRGDLEVLHGLAGRLGVQKGFPTDPEEVFEELRRASAGGPADYSGIDYRRLAEENGVFWPCPAQPAADDTHTADPGTGTDTRTRTGTGSGSGSGSGRDMSTETGTGSGMYTDTGTASGMSTDTGSGSTDAGIGRDPRAATGTGSGMSTDTGRVTRTATGTGSGMSTDTGSDSDSDSSDAGAGLRAAPHPGTPRLFLDRFATDDGRARFAPVTHRPSAEEPDDEYPVLLTTGRVVSQYQSGAQTRRVAELNAAAPGPFVELHPRLAARLGAADGDPLAVVSRRGRAVAPARITTGIRPDTVFMPFHWPGEGRANTLTNPALDPTSRMPEFKVCAVRVETVTS

SEQ ID NO: 26021 - protein, 396 aa, Wolbachia endosymbiont strain TRS of Brugia malayi
MSIDLSLPELPVLYPRITVVGVGGAGGNAVNNMIQSNLQGVNFVVANTDAQALEKSLCDKKIQLGINLTKGLGAGALPDVGKGAAEESIDEIMEHIKDSHMLFITAGMGGGTGTGAAPVIAKATREARAGVKDKASKEKKILTVGVVTKPFGFEGVRRMRIAELGLEELQKYVDTLIVIPNQNLFRVANEKTTFSDAFKLADNVLHIGIRGVTDLMVMPGLINLDFADIETVMSEMGKAMIGTGEAEGEDRAISAAEAAISNPLLDNVSMKGAQGILINITGGGDMTLFEVDAAANRVREEVDENANIIFGATFDQAMEGRVRVSVLATGIDCSVTHDNKQETSSVNQDETSEEKKFEWSYSQTLLPEAKQAEQVSEGVKWSSNIYDIPAYLRRKK

SEQ ID NO: 26022 - protein, 108 aa, Erwinia carotovora subsp. atroseptica SCRI1043
MSDKIIHLTDDSFGTKVLQAEGATLVDFWAEWCGPCKMIAPILDEIAEEFEGKLTVTKLNIDENPATAPKYGIRGIPTLLLFKNGEVAATKVGALSKGQLKEFLTANL

SEQ ID NO: 26023 - protein, 249 aa, Candida glabrata CBS 138
MSLAKPVSLKVNAALFDVDGTIIISQPAIAAFWRDFGKDKPYFDAEHVIHISHGWRTYDAIAKFAPDYADEEYVNKLEGEIPEKYGEHSIEVPGAVKLCTDLNKLPKEKWAVATSGTRDMAQKWFKFLNIDRPEYFITANDVKQGKPFPEPYIKGREGLGYPINKEDPSKSKVVVFEDAPAGIAAGQAAGCKIIGIATTFDVDFLKEKGCDIIVKNHESIRVGGYNPETDEVEFIFDDYLYAKDDLLKW

SEQ ID NO: 26024 - protein, 263 aa, Pseudomonas aeruginosa PAO1
MTDLSPLQTRVEAGIAWLVLNRPQQRNALDIPTLEALHVRLDACERDPAVRAVVLGGSGRSFCAGADLAEWAAAEARGELESYGWTEAAHALMGRLHALDKPTVAAVNGSAVGAGMDLALCCDFRIAAASARFKAGYTGMAYCPDAGASWHLPRLLGSEAAKRLLFLDEAWSAERALGAGLVGEVVADEHLVEAVGAFAARLASGPTFAFAQTKRLLRDGAGRSLAEQLRAEQAAGLLCGRSEDAAEALRAVAEKRSPQFSGR

SEQ ID NO: 26025 - protein, 364 aa, Ustilago maydis 521
MPAIQPKSHVLVTGGSGFIAIWTIYQLLERGHNVRATVRSDDKGNYLKHVFEKYGDKLSYTIAEDLEKEGAFDDAVQGVDAVLHTASPFHYNIEGDPKRTLINPAVNGTRNVLSSIQKHGSNVKRVVITSSYAAILDSTRRGTIVYTEEDWNISSVENVEKKGKDQDASDAYRASKTMAERAAWQFVEENKPSWDLVTINPPLVFGPIIHQVNSPEKLNTSVGFVWGLLHGSKTEDDLLTPSGSCVDVRDVAYAHVESLVRDDAGGNRFAVSLNSFVWQDVVDIIHNDSSVPVEWKKQVPTGKQGTGSSVKQNRLDGSKATRQLGLNYIQLKDLVQDMVASLADAEKRRWSGVPSANILSRTKH

SEQ ID NO: 26026 - protein, 124 aa, Thermoplasma acidophilum
MAIIADPKTGKTYKKEIPAERMGSLVGRKIGDEIDGVFFDLVGYKLVVTGGSSIDGFPMRSDLQTQGKKQILVSYKKGYRGKNGIRKRITVRGSIIGSDISQINLKIVQYGPTPLEEKKDDQQA

SEQ ID NO: 26027 - protein, 998 aa, Pseudomonas aeruginosa PAO1
MAAGRPGTGCGDHPLLRLSGIPADFLERRPAGPGAGAGAGEAAVRRAGLPGRGGGAGQLAALPARRRRRTGRPDTGLPHARARSRPGVFRRAGAARGGGDLLQPPAAGAHPIPRRPRRLSRRAVVRRKLRGGLRPLRRPPRQRRMGFRQPTELRQAGAPAHRLHRPRTTHRHAVRRAPGRRREHPCAARTADGGLPAGGGLAALAAGGEDGRDRPGPAWLSRRRQHPALAGRQRARLSAPRRQPRGRLVSGHGGVLARRLLWRVLLFSLCFTVLAGAVQLFFEYRREMREIEARLELIRSGYLASFERSLWDLNQEQLNVQLRGLGDFPDIARVSLQSADFNLLQGDQRPRGMLRVERFPLSYQPPGGERRQLGELEIAIDLAAVYRRLVSGGLASLLWMGSFLCGLAVALSWLFHSLVTRHLWRMSEFAGHIAEGDLQQPLRLDKVDRERDEIDAVAAALEDMRQALRTDRRRRDADRDELRRQVERRTASLRRAKDQAEAADRAKSRFLATMSHEIRTPLNGILGMAELLREASLGERDRQRLRALATAGEGLLAILNEVLHFARLEEAPDVPEAVDFSLRSLLEDVLTLLEPRARENATRLDLWLDPQVHDGHRGAEQFLRQVLTNLLGNAVKFTEAGEVRVRVERLARSAGSERLRLSVADDGIGIPEEMRERIFERFTQGGDAVTRRYGGTGLGLAISKRLVEALGGRIGVESRVGQGSTFWFEIELALASLSGATPPAASVSALEVLLVEDVALNREVAQGLLERDGHRVMLAEDAGPALALCRQRRFDLILLDMHLPGMAGLELCAGIRRQLDGLNRATPIFAFTASIQPDMVRRYFAAGMQGVLGKPLRMDELRRALGEVGTSVPALAVDAALDRQMLETHRRLLGRHKLAGLLGNLLGSLDEQLPLLAEALDQADLAEAANIAHRLSGSCHSMGLVALGAGLGELEREALGAAGVDPRAWGARLGSLRRDGAEALRRAGFLGEADSAAG

SEQ ID NO: 26028 - protein, 260 aa, Thermoanaerobacter tengcongensis MB4
MEYKNIEVKIEKGIATITINRPKALNALNTETLEELENVLEVLQNDDGVKVIVITGAGEKAFVAGADISEMKDMSVFEAKKFAELGQKVFRKIELVKKPVIAAVNGYALGGGCELALACDIRIASRNAKFGQPEVGLGIIPGFGGTQRLPRIVGVSKAKELIYTGDMIDAEEALRIGLISKVVEQDKLLEEAYGIAKKIMSKGLVAVSLAKEAINKSLEVDIDSGMEYEANAFAMCFGTQDQKEGMAAFLEKRAPKFEGR

SEQ ID NO: 26029 - protein, 289 aa, Vicia faba var. minor
HHSPLPQSPQHGYCCCRRSSLFSSSINTVKSSRSSNRMFASVVIPQSSVEPLCIGTTISSQKLWMPRFYVAVAQEEAVVAVDDEEKVVVEEEEKENEEGQGEKENGEEIVAEEDTRTKLYFGNLPYSVDSAKLAGLIEEYGSAELVEVLYDRDTGKSRGFAFATMTCVEDCKAVIENLDGKEFMGRTLRVNFSDKPKAKESLYPETEYKLFIGNLSWKVTSEILTEAFQEHGTVVGARVIYDGETGNSRGYGFVSYANKSEMEAALTIMNDVELEGRALRVSLAQGKRS

SEQ ID NO: 26030 - protein, 361 aa, Oryza sativa
  misc_feature (308)..(308): Xaa can be any naturally occurring amino acid
MAAAAIAAASLLPSSAFALRRLSSAANVSRFAQLKRFDRARRFAPAAAMSTSSGPKEAPANNPGLQAPSEKDPATKGYFMQQTSGRRVSWVKRDGWGSSGSLWAAVGQGGEDVAVLPRLWETRAAGQCQVWVGSSEWLGSGGWGGRFDMNNGITDGGGEAERGERGVVEEEGLWWREGTADRRFRCQAPSAETEAGCLMFRVKDPKVSLDFYSRVMGMSLLKRLDFPEMKFSLYFLGYEDVESAPTDPVKRTVWTFGQRATLELTHNWGTENDPEFKGYHNGNSDPRGFGHIGVTVHDVYKACERFEXLGVEYVKKPDDGKMKGIAFIKDPDGYWIEIFDLNRIGAVTSGSIMMCLKCYEL

SEQ ID NO: 26031 - protein, 390 aa, Wolbachia endosymbiont of Drosophila ananassae
MSKIIEIRAPKTLGGESVTEGIVKIKKGIGEAVKVDDLIFEIETDKTALELTAEASGQITEFLVKEDDVISPDQLLAKLSVGEVKEEAKKEDKSESAAKKDAPSARKIMEENAISAESVKGTGMGGRITKADVIGHMNKAEQPAIKQYELPKSVVNGEQREERVKMSKIRQVIAARLKASQNTAAILTTFNEIDMKNVMDLRTKYKDAFEKKYGIKLGFMSFFIKAAVQALKEIPEINAEISGDEIIYKHYYDIGVAVGTDKGLVVPVIRSADQMSFAEIELTLVALGKKAREGKLQVSEMEGATFTISNGGVYGSLLSTPIINPPQSGILGMHSIQNRPVAVGNAVEIRPMMYIALSYDHRIVDGKGAVTFLVKIKNYIEDPNRLVLEV

SEQ ID NO: 26032 - protein, 608 aa, Capsicum annuum
MATGQLFSKTTQALFYNYKQLPIQRMLDFDFLCGRETPSVAGIINPGSEGFQKLFFGQEEIAIPVHSTVEAACAAHPTADVFINFASFRSAAASSMSALKQPTIRVVAIIAEGVPESDTKQLIGFAKANNKVVIGPATVGGIQAGAFKIGDTAGTIDNIIQCKLLQAWICGIRLKSGGMSNELYNTIARVTDGVYEGIAIGGDVFPGSTLSDHVLRFNNIPQVKMIVVLGELGGRDEYSLVEALKQGKINKPVVAWVSGTCATLFKSEVQFGHAGAKSGGEMESAQAKNQALRDAGAVVPTSYEAFEGAIKAAFENLVSEGKTTPVKEITPPNIPEDLNTAIKSGKVRAPTHIISTISDDRGEEPCYGGVPMSSIVEQGLCVGDVISLLWFKRSLPRYCTRFIEICVLLCADHGPCVSGAHNSIVTARAGKDLVSCLVSGLLTIGPRFGGAVDDAARYFKDAYDRGLTPYEFVESMKKKGIRVPGIGHRIKRGDNRDKRVEILQLYARDNFPSVKYMEYAVQVETYTLSKANNLVLNVDGAIGTLFLDLLAGSGMFTKPEIDEIVEIGYLNGLFVLARSIGLIGHTFDQKRLKQPLYRHPWEDVLYTK

SEQ ID NO: 26033 - protein, 527 aa, Silicibacter sp. TM1040
MTSKTDTVNQQDRVLIFDTTLRDGEQSPGATMTHDEKLEIAELLDDMGVDIIEAGFPIASEGDFKAVSEIAERSKNSVICGLARANFKDIDRCAEAVRKAAKPRIHTFIGTSPLHRAIPNLTMDEMAERIHDTVTHARNLVDNVQWSPMDATRTEWDYLCRVIEIAIKAGATTINIPDTVGYTAPRESADLIRRLIETVPGADEIIFATHCHNDLGMATANSLAAVEAGARQIECTINGLGERAGNTALEEVVMAMRVRNDIMPFQTGIDTKKIMHISRRVATVSGFNVQFNKAIVGKNAFAHESGIHQDGMLKNKETFEIMRPEDVGLAGTSLPLGKHSGRAALRDKLSSLGFEIGDNQLKDVFVRFKELADRKKEVFDDDIIALMRTSGDEDDHLKLVSMKVVCGTGGPAESTVEMEVDGKDVTETAEGDGPVDATFKAIRKIHPNAAHLQLYQVHAVTEGTDAQATVSVRLEEDGVIATGDSANTDTVVASAMAYIDALNRLIVRRDKMGEGADSREISYKDVD

SEQ ID NO: 26034 - protein, 232 aa, Alkalilimnicola ehrlichei MLHE-1
MKKLVLLRHGQSIWNQENRFTGWHDVDLTEKGREEAQAAGQLMKRHGLRFDYAYTSVLKRAIRTLWIGLDELDQMWIPVTKAWQLNERHYGALTGLNKAETAEEYGAEQVHIWRRSYDTPPPPLDETSPYHPRHDPRYASLKPEQLPATESLALTLERVLPYWNERIVPTLRDCDNVLIAAHGNSIRALIKHLDGLDDEAIMKVEIATGDPLVYELDDALAVVDKHYLRERD

SEQ ID NO: 26035 - protein, 866 aa, Haemophilus influenzae R2866
MLGRFLGETINDAQGEDILELIENIRKLSRNSRAGDDKARQALLDTLGSISNENIIPVARAFSQFLNLTNIAEQYQTISREHSLAQSSSQSLSELFKRLKEQNASVEEVHKTVEKLLIELVLTAHPTETTRRSLIHKHIEINKCLSKLEHHDLTEKERNIIERLLLRLIAEAWHTNEIRTVRPTPFDEAKWGFAMLENSLWQAVPEFLRQLNETAREFLGYDLSVGLKPVRISSWMGGDRDGNPFVTAQITKKVLYFARWKAADLFLQDISKLADELSMMKCSDEFRDKYGEHLEPYRFVVKNLRNQLTATLAYFDDHLSNRTPRVSESEIILEDNQLWEPLYDCYQSLIQCGMRIIANGSLLNILHRISCFGVTLSQMDIRQESTRHTDAIAEITRYIGLGDYSQWMEDDKQAFLIRELSSRRPLIPQNWTPSPETKEILDTCKVIAQQKQGVIACYVISMARSASDVLAVHLLLKESGVPYHIPVVPLFETLEDLDAAEKVMTQLFNVGWYRGVINNRQMVMIGYSDSAKDAGMMAASWAQYRAQEALVNLTEKLGIELTLFHGRGGTIGRGGAPAHAALLSQPPRSLKNGLRVTEQGEMIRFKLGLPAVAVETFDLYASAILEANLLPPPEPKPEWRTIMDELSTISCDIYRGVVRGDKDFVPYFRSATPEQELSKLPLGSRPAKRNPNGGVESLRAIPWIFAWMQNRLMLPAWLGAGAAIRQIIEQGKGDIIHKMCENWPFFSTRIGMLEMVFSKSDTWLSQQYDQRLVKKELWYLGENLRKQLEDDIQTVLSLSHQSELMSDLPWIADSIALRNIYTDPLNLLQVELLHRFRENPEQVNPDVEQALMITITGIAAGMRNTG

SEQ ID NO: 26036 - protein, 139 aa, Triticum aestivum
  misc_feature (53)..(53): Xaa can be any naturally occurring amino acid
TKPWFTAGTFLCKDDHRKIVAGTNNHQVRLYDTASQRRPVVSVDFRESPIKAXAGDPDGHTVYIGTGTGDLASFDMRTGKLLGCYVGKCSGSIRSIVRHPELPLIASCGLDSYLRIWDTNTRQPLSAVYLQAAPHDSGY

SEQ ID NO: 26037 - protein, 107 aa, Brassica napus
  misc_feature (34)..(34): Xaa can be any naturally occurring amino acid
  misc_feature (55)..(55): Xaa can be any naturally occurring amino acid
MATSCGALFLLALHVFSLLQPMVMASSGSGGKYXRHKRYGPGSLKRSQCPKECDXRCSQTQYHNACIPFCNKCCRKCLCAPPGYYGNKQVCSCYNNWKTQQGGPKCP

SEQ ID NO: 26038 - protein, 388 aa, Pyrenomonas salina
MYKTVLVGVLSVAAGANAFQMGSSFVPRMGGQAETARRATMTGPVMAEDPVKCGINGFGRIGRLVARIMIKDPETNLIHVNAGSATPDYMAYQFKYDSIHGRFDGAVVVDGEDLVIDGQRVITTRQRDPKDIGWDKTGVEYLCESTGVFLTSEKAQAHIDGGCKKVIFSAPAKDDSLTVVMGVNPDDYKGQTDFVSCASCTTNGLAPLVKCINDKFGIEEGLMTTIHAMTATQAVVDSSSRKDWRGGRAASGNIIPSSTGAAKAVAKVIPDVKGKLTGMAFRVPTIDVSVVDLTCKLKKETTYEEICNEVKKRAAGDMKGVLGYCDEPLVSTDFESESISSTFDAEAGIMLNPSFVKLVAWYDNEWGYSTRVKDLMVHMAKVDAKVSA

SEQ ID NO: 26039 - protein, 570 aa, Oryza sativa
MAIALRLAAAPLRLRLVSPAPPAIGGAGDGGRRGGGGAARIGVLGRARCRRRRGGGGRLEVAAAAADDSARCRAKGVGAAAAAAETLGGIGVGGGDQLSVVMKFGGSSVSSAARMREVAGLILAFPEERPVVVLSAMGKTTNLLLLAGEKAVGCGVIRVSEIEEWNLIKDLHIKTVEELALPRSVIHTMLDELEQLLKGIAMMKELTLRTTDYLVSFGECMSTRIFAAYLNKIGVKARQYDAFDIGFITTDDFGNADILEAAYPAVAKRLHGDWIRDPAIPIVTGFLGKGWKSGAVTTLGRGGSDLTATTIGKALGLREIQVWKDVDGVLTCDPNIYPNATTVPYLTFEEAAELAYFGAQVLHPQSMRPAREGDIPVRVKNSYNPKAPGTLITKQREMDKVVLTSIVLKSNVTMLDIVSTRMLGQFGFLAKVFSIFEDLGISVDCVATSEVSISVSLDPSKIWSRELIQQELDHVVEGLEKIAVVHLLQQRAIISLIGNVRRSSLILEKAFQVLRKSGVNVQMISQGASKVNMSLIVHDSEAKQCIKALHQAFFEDDVLTEVEEEALHMS

SEQ ID NO: 26040 - protein, 429 aa, Aspergillus nidulans FGSC A4
MGQDAVHLQVLATSGDGPEQKHARTVLGLISKGKHWVLVTLLLGNVVVNESLPIVLDKTLGGGWPAVLGSTVLIGTILPPKRNLIFGEIIPQSVCVRYGLPIGAYLSPAVLVLMYAFAPVAWPTARLLDYLLGENHGTVYKKSGLKTLVTLHKSLGSQPAERLTEDEVTIITAVLDLKAKPVREIMTPMESVFTMPSNAVLDEKTMELILSAGFSRIPVHAPGNPGDFLGMLLVKTLITYDPDDAKRVKEFVLATLPETSPDTSCLDILNYFQEGHSHMALVSESPGSNGGALGVVTLEDVVEELIGEYAFPTFCVPISHEPSSKPAFPAVERQPSLPTPAPALTLDARTLRRSSTAPLAKTGLISTIPPEQRQQLDNLAPSNLARSPKQTRFPFVKIKRAGSGRASDTANGVGKDSGAVADENTPLLN

SEQ ID NO: 26041 - protein, 327 aa, Synechococcus sp. RS9917
MAGTLLFNALREAIDEEMARDPHVCVMGEDVGHYGGSYKVTKDLYEKYGELRVLDTPIAENSFTGMAVGAAMTGLRPIVEGMNMGFLLLAFNQISNNMGMLRYTSGGNFTIPTVVRGPGGVGRQLGAEHSQRLEAYFHAVPGIKIVACSTPTNAKGLMKAAIRDNNPVLFFEHVLLYNLSEELPAGEYTCALDQADLVQEGSDITILTYSRMRHHCLKAVEQLEADGISAELIDLISLKPFDMDTIARSIRKTHRVIVVEECMKTGGIGAELIALITEHCFDDLDARPLRLSSQDIPTPYNGTLENLTIIQPHQIVEAAMQIVRKGL

SEQ ID NO: 26042 - protein, 326 aa, Pichia norvegensis
SIVGRPRHQGIMVGMGQKDSYVGDEAQSKRGILTLRYPIEHGIVTNWDDMEKIWHHTFYNELRVAPEEHPVLLTEAPMNPKSNREKMTQIMFETFNVPAFYVSIQAVLSLYSSGRTTGIVLDSGDGVTHVVPIYAGFSLPHAILRIDLAGRDLTDYLMKILSERGYTFSTTAEREIVRDIKEKLCYVALDYDQEIQTASQSSAIEKSYELPDGQVITIGNERFRAPEALFHPSVLGLEAAGIDQTTYNSIMKCDVDVRKELYGNIVMSGGTTMFPGIAERMQKEITALAPSSMKVKIIAPPERKYSVWIGGSILASLSTFQQMWIS

SEQ ID NO: 26043 - protein, 215 aa, Campylobacter jejuni subsp. jejuni NCTC 11168
MYVAPSLLSANFLKLEEEVKAIEAAGADLLHIDVMDGHFVPNLTFGPCVIEKISTISKLPLDVHLMVKDVSKFVDLFISLKPKFISFHMESEVHPIRLCEYIRSQGIHPAIVLNPHTPIDSIKHMLEFVDMVLLMSVNPGFGGQKFLPLIHEKIKELRQMIDKKNAKVFIEVDGGVNGLNASDLEESGADILVAGSYIFSSNDYKTAISSLKLEF

SEQ ID NO: 26044 - protein, 486 aa, Vibrio parahaemolyticus RIMD 2210633
MEMKTHYIDGAMYIGCSEEHFTTYNPANGEPLANIKQANQSDMEAAIESAKRGFEVWSAMTAIERSRILNKAVAILRERNDELAALEVADTGKPIQEAIAVDITTGADVIEYYAGLAPSLQGEQQPLNENQFFYTRREPLGICAGIGAWNYPIQIAMWKSAPALAAGNAMIFKPSEETPLTALKLAEIYSEAGLPDGVFNVVQGDYRVGQMLTAHPDIAKVSFTGESGTGKVVMGDSAKTLKQVTMELGGKSPLIVFDDAKLDDAVSAAMVANFYTQGEVCTNGTRVFVHESIYDDFVAQLKTRTEKLVVGDPLDENTQIGALISKEHESKVLSAIESAKASGATLLTGGYKVTDNGLQNGNFVAPTVFIDCDDSMSHVQQEIFGPVMSVLKFSEEAEVIERANDTDYGLAAGVFTQNLSRAHRVIHKIQAGICWVNAWGDSPAEMPVGGYKQSGIGRENGVETLKHYTQTKSVLVQLSDFESPYA

SEQ ID NO: 26045 - protein, 222 aa, Oenococcus oeni PSU-1
MSKLVLIRHGESTANHDNIFTGWTDVPLTEKGISQAHVAGKQLSHSGIDFDIVYTSMLQRAIVTSYIILNEINQAWLPIVKSWRLNERHYGALRGLNKAETAQKYGDTQVREWRRSYTTVPPLLGHEESSERYLKLGIKEPLGESAEMSWKRVQPFWEDQIAKQLRSEKNVLLVAHGSSIRVLLKFLDRISDDNFMKVEVGNGEPIIYNFDQQLKVISKSNL

SEQ ID NO: 26046 - protein, 998 aa, Arabidopsis thaliana
MSDYGEKTCPLCAEEMDLTDQQLKPCKCGYQICVWCWHHIMDMAEKDQSEGRCPACRTPYDKEKIVGMTVDQERLRYDMTPEILASEGNMDRKKIQKSKPKSSDGRKPLTSVRVVQRNLVYIVGLPLNLADEDLLQRKEYFGQYGKVLKVSMSRTATGLIQQFPNNTCSVYITYGKEEEAIRCIQSVHGFILDGKALKACFGTTKYCHAWLRNVACNNQDCLYLHEVGSQEDSFTKDEIISAHTRVQQITGATNTMQYRSGSMLPPPLDAYTSDSSTGNPIAKVPSSTSVSAPKSSPPSGSSGKSTALPAAASWGARLTNQHSLATSALSNGSLDNQRSTSENGTLATSTVVTKAANGPVSSSNSLQKAPLKEEIQSLAEKSKPGVLKPLQQKIVLDPESKRTTSPNRDPSSNQISCLVESSYNSRVIDKPSAVENSLEHTSEIAEDVFDVGKLSADVAWMGITTNSRDETPGVPVVIGTHCDLGSITQSDNDVQNLEQCRKQSPTNTYAEADISLNGIHGSRPEWDWRSGLQSQIDVKEPLEVNDFSSFNNNRRGIAEAVSHSTSKFSSSISILDSNHLASRSFQNRETSCGMDSKTGSSFEIGSDRLHLPNGFSEKAMSNMEHSLFANEGRSNIQNTEDDIISNILDFDPWDESLTSQHNFAKLLGQSDHRASTLESSNLLKQHNDQSRFSFARHEESNSQAYDNRSYSIYGQLSRDQPLQEFGANRDMYQDKLGSQNGFASNYSGGYEQFATSPGLSSYKSPVARTQVSAPPGFSAPNRLPPPGFSSHQRGDLSSDIASGTRLLDSANLLRNAYHVPPPSGNLNAAGDIEFIDPAILAVGRGRLHNGMETADFDLRSGFSSQLNSFDNDARLQLLAQRSLAAQQVNGFHDPRNVNNFSSSFSDPYGISSRPTDQTQGTGLSPFTQLPRQASANPLLSNGHWDNKWNEPQSGNNLGITQLLRNERMGFNDNVYSGFEEPKFRRPGPGDPYNRTYGI

SEQ ID NO: 26047 - protein, 288 aa, Salmonella enterica subsp. enterica serovar Typhi str. CT18
MAAKIIDGKTIAQQVRSEVAQKVQARVAAGLRAPGLAVVLVGSNPASQIYVASKRKACDEVGFVSHSYDLPETTSEAELLALIDTLNADNTIDGILVQLPLPAGIDNVKVLERIAPDKDVDGFHPYNVGRLCQRAPRLRPCTPRGIVTLLERYNIDTYGLNAVVIGASNIVGRPMSMELLLAGCTTTVTHRFTKDLRHHVEHADLLIVAVGKPGFIPGEWIKEGAIVIDVGINRLENGKVVGDVVFDEAAARASYITPVPGGVGPMTVATLIENTLQACIEYHDPQGK

SEQ ID NO: 26048 - protein, 408 aa, Zea mays
MPSRIAACFRCAAAPSSGAGAGAAGPSLATSIYETHLGLVALSWSRTSLGLSLRAVLRLSATPPPGSSSSASGAGYLDDDADEEILAFRVSPWLFWRRRGSRRFRAGDRLVDLAWDLSRARFPVSGSPEPSSGFFVAVVVCGEMVLAAGDLTDLAYRRTRARRPSGPRPVLLSRREHVSLRDAGAGRGRSHTTWVNVQGKEREISVDLVARGRGRDKATAGKGKEKDRADVGMSVSVDGERVLHVRRLRWKFRGSERVDLGGGDGVQVSWDLHNWLFPPREPPPTEASTHAHAVFVFRFELASGGEESEADLGKNPSPSKAARRNTGVWGGYLARWGQRDWSETGSNGERRKGRGRRLAKESSSSSASVASSTASWASGSTVMDWASPEEVEMQRGDGFSLLIYAWKS

SEQ ID NO: 26049 - protein, 326 aa, Pichia stipitis
SIVGRPRHQGIMVGMGQKDSYVGDEAQSKRGILTLRYPIEHGIVSNWDDMEKIWHHTFYNELRVAPEEHPVLLTEAPMNPKSNREKMTQIMFETFNVPAFYVSIQAVLSLYSSGRTTGIVLDSGDGVTHVVPIYAGFSLPHGILRIDLAGRDLTDYLMKILSERGYTFSTTAEREIVRDIKEKLCYVALDFEQEMQTSSQSSAIEKSYELPDGQVITIGNERFRAAEALFRPADLGLEAAGIDQTTFNSIMKCDVDVRKELYGNIVMSGGTTMFPGIAERMQKEITALAPSSMKVKIIAPPERKYSVWIGGSILASLSTFQQMWIS

SEQ ID NO: 26050 - protein, 479 aa, Oenococcus oeni PSU-1
MKIVKFGGSSLSSGVQIRKVFQIVKSDPERRIVVVSAPGKRFKGDVKITDLLLKLAEAILNEEKTAQIYEQIFLRYQAIGDFFKIPRSGIEQLKEHLYSVAQADYPSNDFFRAALSAQGENMSAHLITLIFKQLGLKARLLTPKEVGLTVSGEARKAQILPGSYAKIAKTKFTDNEVLIFPGFFGITKNGLINTFSRGGSDITGAILARGFGADLYENFTDVDSIYAVNPGLVADPAPIKEMTYNEMRELSYAGFAVFHDEAILPAIQGKIPICVKNTNRPEMPGTKIVPRDKVSHKNKITGIASSHHFQAIYLHRYLINREVGFTAKILKIMADLNISYEHMPSGIDDLTIILDKNQLTNGRKEKLTQRIKDEIQPDDLQWRNDYAIIMVVGEGLVNRVGAMADIVDPIRDAGISLTMVNQGSSEISIMLGVRPEDEQKAVKAIYNDHFENGHPKKELQIPRASFKSVSKSLIANFFV

SEQ ID NO: 26051 - protein, 91 aa, Brassica napus
MRVHNHRLRFEVTPKPTMSLPGISFITARSVAVILFLCLFLLILPPFLPPLPPPPSTLLLLPLLLMILLIFLAFSPSNDPSLTVEVEPLDP

SEQ ID NO: 26052 - protein, 700 aa, Xanthomonas oryzae pv. oryzae KACC10331
MRAMCLALTSASLRAWRTLSSIGLRHALARARAARDACGARPVTPRCQQAGALTMCGLAGLLLASPRLHGEQLDALVRPMGAALRHRGPDDAGTWCDAQAGVALAHQRLSILDLSPLGHQPMRSADGRYVLAYNGEVYNFAQLRAALSALGHRFRGHSDTEVLLAAVVEWGLDETLTRCNGMFAIALWDERDNCLFLARDRVGKKPLYYGWAGDTLVFGSELKALWQHPDFDNGVDRNALTLLLRLGYIPAPACIHAHTFKLMPGRVLRMDAQAVAAGAAAHRADQAQQPFWNAREAMQRALAAPFTGSDAQAEEQLDSVLRDAVALRMVADVPVGVFLSGGTDSSIVTAMMQAQSAQPVHTFSIGFEGSHHDEAPLAREVATHLHTDHTELYVSGADALAVVPCLPDMFDEPFADASQVPTALVARLARGGVTVALSGDGGDELFFGYGRYQRALRNWRMHGLVPGPLRRLMAVAARRNGESSRTGGLAALVAEAGARGIGDIYRNRISRWRDPAAVVPGATEPDSFYSLADPLHGSGTPADAMMLADFAAYLPDDLLCKVDRTTMAVGLEARAPLLDWRVAEFAWSLPLSLKYRDGMSKYLLKRVLCRYLPDTMVYRGKRGFGAPVSAWLRGDLHGWADDLLAHGALQREGVFAADTVAGLWRDFNGGERKWHTHLWTVLMFQAWQAHWREQRAAITR

SEQ ID NO: 26053 - protein, 377 aa, Xylella fastidiosa 9a5c
MNSFAAVPVLIEEIRAGRMVVIVDDEDRENEGDLIMAAELVAPKDINFMVTHARGLVCLSLTRERCAQIGLSPMVQRNTTRFQTNFTVSIEAAEGLTTGISAYDRAHTIRTAVRPNAKPSDLHQPGHIFPLIAQPGGVLTRAGHTEAANDLPMLAGLEPAGVLVEIMNADGTMARRPQLEVFAQQHGLKIGSIADLIAYRLANEHTVERVDERVIETEYGSFLLVTYRDRIAHDLHFALVRGTLDASIPTLVRVQVENPLADMLHWRREDFGVAASDALRMIAAAERGVMVVLAAPRDSDALLARLRREPEVVSNVKDVGQWRRNGAGGQILADLGLGKLRVLGTPRRQIALAGFGLEVLEYVECRGGAPVAPQGVD

SEQ ID NO: 26054 - protein, 107 aa, Wolbachia endosymbiont strain TRS of Brugia malayi
MSDDITSVSDQNFKSEVADYKGFVLVDFWAEWCRPCKNLMPRVEQLAKDKKGKIKICKFNIDGGAEVLSKYGIQSIPTLIIFQDGKEIARKIGTINDLSSWVDDEIS

SEQ ID NO: 26055 - protein, 548 aa, Bacteroides thetaiotaomicron VPI-5482
MKTLSRTVLTLFVLSFSCLAAIAGEVSFKITKQYLNFPISHKENRGRMTFEVNGKPDLSVVIRLAPDEAEYWVFKDVSAFKGKTIKITYDGNEKGLSKIYQSDEIEGQAELYKEKNRPQFHFTTRRGWINDPNGLIYYEGEYHLFYQHNPFERDWENMHWGHAVSKDLIHWTELPDALYPDHLGTMFSGSAVIDYDNTAGFNKGKTPAMVAAFTAASSDRQVQGIAYSLDKGRTFTKYDKNPVINSKEKWNSQDTRDPKVFWYAPSKHWVLVLNERDGHSIYTSSNLKDWKYESHVTGFWECPELFELPVDGDKNHTKWVMYGATGTYMLGSFDGKVFTPEAGKYCYTTGSIYAAQTFTNIPASDGRRIQIGWGRISHPGMPFNGMMMLPTELTLRTTKDGIRLVNVPVKEVESLCKPLRSWKSLSSDEANRHLKEFYDADCLRIKTTIKLSHATDAGFNLFGQRMIGYDMNSNTLNGRFYSPQDPTSMELSADIYIDRTSIEVFIDGGLYSYSMERRPDTNNREGLHFWGNRIEVKDLQVFSVESIW

SEQ ID NO: 26056 - protein, 410 aa, Streptomyces coelicolor A3(2)
MTSKTRVVVIGAGLAGVTLARRLGELGTPALTLGDEEHRPYNRVLLAEVLAGRYGPEVIALPAPAGLLRGRVTGIDRAGRTVRCADGSVIAYDTLVLATGSNAVLPPLRGLFTPDHELPEGVHAFRTMDDCLGLSKAVRPGVRAVVIGGGLLGVSAARALAVRGAQVVLAQQSERLMERQLDPAASALVRRHLEGLGVEVHTECRVRDVRSVGGAVRSVEMGDGYALGADLVVLACGVRPRAGLAREAGLAVGKGVLVDDELRTSDPHIRAIGDCAQHADHVYGLAAPALEQAGVLAELLAEGGTATRHYTGTRALTRLTLTGADSPFAPLDLAAFGETDPRPGDDVVQLADATRGTYRKVVVRDDRLVGGVLVGELGTVGALARAWEGAEPLPSDGGPLLHLLTQDGGS

SEQ ID NO: 26057 - protein, 555 aa, Wolbachia endosymbiont strain TRS of Brugia malayi
MSKIEEFRSFMCEIKVDAFMLHTKDEYLNGHSDELTKLCGFTGTHGLLIVTKDNKCPFFTDGRYITQARNQLDQDNFQVHNIQEENPYEWVKANLTLTTSLGYYLQYFTVKEIRKYEDICKLVPYSIKKEISRRKQTIVSHAVEHSGESSKSKCEKVAKSINKEAEAVLLTDSNSISWLLNLRNENAKYTPCILGCAILYKNGNVDLFIQDKEYSTIEANLGNHTNIFDISKLKSSLCKINSIIIDPNTTPMSIMAIIKNKQIVEREDPCLIYKAVKNQTEIAGAIKAHTRDGIAVTNFLHWLENNTSTELEAEEKILEYRKEQDLFKQASFPTISAFNENGAIIHYRASSETNKVIQKDGLYLIDSGGEYLDGTTDVTRTIAIGNPTNEQITHYTIVLKAHIALASAVFPSGTTGGELDTLARIHLWKFGIDYMHGTGHGVGSYLSVHEGPQSISKGNKVKLMPGMILSNEPGYYIPEKYGIRIENLMYVDKQENGFLSFKQLTSIPYDRGLIDVQMLTKDEIEWINSYHQFVYKSLENSVKNKEWLKKICASL

SEQ ID NO: 26058 - protein, 269 aa, Geobacillus kaustophilus HTA426
MEQMKSNVVVLEGDWDHIRVEKNLDRKTATIIFDRPGKFNTISFIARSHFNEIFQMLDKDDDVRVIIIRGEGGVFTSGGNIMQFMERHPEELSELHKNVAAPERSPKPVIAQLEGYAFGVGLEIAMACDFRIAAENTLLALPELNLGMIPGSGGTQRIARIAGLGRAKDMIMRARRITAQEAYQWGLVTEVVPADKLDVAVQKLVDELLRFSPLTLKVCKEVLNASQEAPLSSGLEIEGRAYGMLRCTEDFAEGVQAFAEKRKPNFRGR

SEQ ID NO: 26059 - protein, 179 aa, Brassica napus
  misc_feature (24)..(24): Xaa can be any naturally occurring amino acid
MAQASRICHGVQQNPRAISNLSKXVISNLSKSNQRKSPFSVSLKTHQISSWGLKKSNNGSVIRPVRVTASVSTAEKSSEIVLQPIREISGLIKLPGSKSLSNRILLLAALSEGTTVVDNLLNSDDINYMLDALKKLGLNVERDSENNRAVVEGCGGIFPASLDSPLLTSPPAPHPLPPY

SEQ ID NO: 26060 - protein, 623 aa, Allium cepa
MESRDIESSPALNAPLLQASPPIKSSKLKVALLATSTSVLLLIAAFFAVKYSVFDSGSGLLKDDPPSDSEDYPWTNEMLKWQRTGYHFQPPNHFMADPNAAMYYKGWYHFFYQYNPNGSAWDYSISWGHAVSKDMIHWLHLPVAMVPDHWYDSKGVWSGYATTLPDGRIIVLYTGGTDQLVQVQNLAEPADPSDPLLIEWKKSNGNPILMPPPGVGPHDFRDPFPVWYNESDSTWHMLIGSKDDNHYGTVLIYTTKDFETYTLLPDILHKTKDSVGMLECVDLYPVATTGNQIGNGLEMKGGSGKGIKHVLKASMDDERHDYYAIGTFDLESFSWVPDDDTIDVGVGLRYDYGKFYASKTFYDQEKKRRILWGYVGEVDSKADDILKGWASVQNIARTILFDAKTRSNLLVWPVEELDALRTSGKEFNGVVVEPGSTYHLDVGTATQLDIEAEFEINKEAVDAVVEADVTYNCSTSDGAAHRGLLGPFGLLVLANEKMTEKTATYFYVSRNVDGGLQTHFCQDELRSSKANDITKRVVGHTVPVLHGETFSLRILVDHSIVESFAQKGRAVATSRVYPTEAIYDSTRVFLFNNATSATVTAKSVKIWHMNSTHNHPFPGFPAP

SEQ ID NO: 26061 - protein, 690 aa, Allium cepa
MSSDDLESPPSSYLPIPPSDEFHDQPPPLRSWLRLLSIPLALMFLLFLATFLSNLESPPSDSGLVSDPVTFDVNPAVVRRGKDAGVSDKTSGVDSGFVLDPVAVDANSVVVHRGKDAGVSDKTSGVDSGLLKDSPLGPYPWTNQMLSWQRTGFHFQPVKNWMNDPNGPLYYKGWYHFFYQYNPEGAVWGNIAWGHAVSRDLVHWTHLPLAMVPDQWYDINGVWTGSATILPDGQIVMLYTGATNESVQVQNLAVPADQSDTLLLRWKKSEANPILVPPPGIGDKDFRDPTTAWYEPSDDTWRIVIGSKDSSHSGIAIVYSTKDFINYKLIPGILHAVERVGMWECVDFYPVATADSSHANHGLDPSARPSPAVKHVLKASMDDDRHDYYAIGTYDPAQNTWVPDDASVDVGIGLRYDWGKFYASKTFYDHAKKRRILWSWIGETDSETADIAKGWASLQGVPRTVLLDVKTGSNLITWPVVEIESLRTRPRDFSGITVDAGSTFKLDVGGAAQLDIEAEFKISSEELEAVKEADVSYNCSSSGGAAERGVLGPFGLLVLANQDLTEQTATYFYVSRGMDGGLNTHFCQDEKRSSKASDIVKRIVGHSVPVLDGESFALRILVDHSIVESFAQGGRASATSRVYPTEAIYNNARVFVFNNATGAKVTAQSLKVWHMSTAINEIYDPATSVM

SEQ ID NO: 26062 - protein, 379 aa, Anabaena variabilis ATCC 29413
MNKVLINDTTLRDGEQAAGVAFSVEEKIAIAKFLDAIGVDEIEVGIPAMGKAEQEAIANIVKLNLSANLLGWNRAVISDIQASIACGLQRVHISIPVSAIQIAAKFHGQWQVVLQKLHDSISFAVDQGLFVSIGGEDSSRAEESFLLDVVLAAQEWGALRFRFCDTVGILDPFTTHAKIKQLVASLTIPVEMHTHNDFGLATANALAGIKAGALSVNTTVNGLGERAGNAALEEVVMALKHLYHHDLGIDTRRLLEISQLVVSASGHPVPPWKAIVGENTFAHESGIHAHGVLQNPQTYEPFAPEEVGRERRLVVGKHSGRPLGMSSILQQHDIILNHEETQSVLDAVRQESVRKKTQSHTSRTFTFSADKNYIFVPVE

SEQ ID NO: 26063 - protein, 597 aa, Zea mays
  misc_feature (254)..(254): Xaa can be any naturally occurring amino acid
MLSVEAHTYYYYPTARPRRKLCACRNVLQETAPRDAEANPCRHGERKSRRRGDGAYYIDKDGGGVARTFDRKKISRKRGGAIKGRGWKYGSGFVDGVFPVLSPMAQDVLELVQTRGTDAASVWESLDKIPQAHDLWDDIVNVAVQLRLNRQWEPIITVCEWVLRRSSFRPDIICYNLLIDAYGQKRQLSEAEAAYMALLEARCVPTEDTYALLLRAYCGSGQLHRAEGVISEMQRNGIPPTATVYNAYLDGLLXARCSEKAVEVYQRMKKERCRTNTETYTLMINVYGKANQPMSSLRVFREMKSVGCKPNICTYTALVNAFAREGLCEKAEEVFEEMQQAGHEPDVYAYNALMEAYSRAGLPQGASEIFSLMEHMGCEPDRASYNILVDAFGRAGLHQEAEAAFQELKQQGMRPTMKSHMLLLSAHARSGNVARCEEVMAQLHKSGLRPDTFALNAMLNAYGRAGRLDDMERLFAAMERGDGAIAGAPDTSTYNVMVNAYGRAGYLDRMEAAFRSLAARGLAADVVTWTSRIGAYARKKEYGQCLRVFEEMVDAGCYPDAGTAKVLLAACSDERQVEQVKAIVRSMHKDAKTLFAL

SEQ ID NO: 26064 - protein, 236 aa, Xylella fastidiosa Ann-1
MMEGAIAIADLTVGDVMVPRSQMVSLPVESDLQTITKQMVESGHSRFPVHGENKDEVLGILLAKDLLRGVSANHTITNVHELLRPVGMIPESKKLNVLLKEFRLSHNHMAIVVDEYGGVAGLVTIEDVLEQIVGDIDDEHDETEDQTNMIAIQADGCYIVDALTPIEDFNERFNAEFPDDDYDTIGGLVTEAIGHLPETGDELTIGRFAFRVAKANARRIHILHVTVLPPNEQNTA

SEQ ID NO: 26065 - protein, 381 aa, Anabaena variabilis ATCC 29413
MNKVLINDTTLRDGEQAAGVVFTLEEKVAIAKFLDTIGVPELEVGIPAMGEEEMRAICAISNLGLKANLLAWNRAVISDIKASVACGMERVHIAIPVSGIQIAAKFHGQWRVSLQRLKDCISFAVDQGLWVAVGGEDSSRADENFLLDVALYAQEWGASRFRFCDTVGVLDPFTTYGKVKLLVSALTIPVEVHTHNDFGMATANALAGIKAGAASVNTTVIGLGERAGNAALEEVVMAIKRIYGVDMGIDTPRLLELSQLVAAASGANVPPWKAIVGENTFAHESGIHAHGVLQNPDTYEPFAPEEVGWERRLVVGKHSGRHSVSNLLEQHGIFLNPEETQSVLDAVRQQSVKKKRSLTTEELLNLGQRTEVFSCSAMKTS

SEQ ID NO: 26066 - protein, 419 aa, Thermococcus profundus
MVEIDPFEMAVKQLERAAQYMDISEEALEWLKKPMRIVEVSVPIEMDDGSVKVFTGFRVQHNWARGPTKGGIRWHPAETLSTVKALATWMTWKVAVVDLPYGGGKGGIIVNPKELSEREQERLARAYIRAVYDVIGPWTDIPAPDVYTNPKIMGWMMDEYETIMRRKGPAFGVITGKPLSIGGSLGRGTATAQGAIFTIREAAKALGIDLKGKKIAVQGYGNAGYYTAKLAKEQLGMTVVAVSDSRGGIYNPDGLDPDEVLKWKREHGSVKDFPGATNITNEELLELEVDVLAPAAIEEVITEKNADNIKAKIVAEVANGPVTPEADDILREKGILQIPDFLCNAGGVTVSYFEWVQNINGYYWTEEEVREKLDKKMTKAFWEVYNTHKDKNIHMRDAAYVVAVSRVYQAMKDRGWVKK

SEQ ID NO: 26067 - protein, 326 aa, Kazachstania barnettii
SIVGRPRHQGIMVGMGQKDSYVGDEAQSKRGILTLRYPIEHGIVTNWDDMEKIWHHTFYNELRVAPEEHPVLLTEAPMNPKSNREKMTQIMFETFNVPAFYVSIQAVLSLYSSGRTTGIVLDSGDGVTHVVPIYAGFSLPHAILRIDLAGRDLTDYLMKILSERGYSFSTTAEREIVRDIKEKLCYVALDFEQEMQTAAQSSSIEKSYELPDGQVITIGNERFRAPEALFHPSVLGLESSGIDQTTYNSIMKCDVDVRKELYGNIVMSGGTTMFPGIAERMQKEITALAPSSMKVKIIAPPERKYSVWIGGSILASLTTFQQMWIS

SEQ ID NO: 26068 - protein, 258 aa, Vibrio parahaemolyticus RIMD 2210633
MTAQIKLEREAHIAKLTISNPPANTWTLESLNQLKELAIELSNDRSIYALVLTGEGEKFFSAGADLNNFASGDKSLAADMAFAFGEAFEALSAFDGVSIAAINGYAMGGGLEVAMACDIRIAEEQVQMALPEASVGLLPCAGGTQNLTALIGEGWAKRMILCGERVTAERAEKIGLVEEVVAKGQALEAAMELAQRVAGQSPKSVSACKTLIQGRRSQTHAAGLVLERELFLQLFNTQDQTEGVNAFLQKRKPQWTNS

SEQ ID NO: 26069 - protein, 497 aa, Vibrio parahaemolyticus RIMD 2210633
MTEQVKQYIGGEFAISDSKQWLDVTNPATNEVIAQVPCATESEMNAAIASATETFKRWKEVAAPERARLMLRYQHLLKEQHDELAILLSSETGKTLADAKGDIWRGIEVVEQAANICSSMMGETVENVATNIDGYSYIQPLGVCAGITPFNFPAMIPLWMFPMAIACGNTFILKPSEQVPLTAMKLAELFEQAGAPKGVLQIVHGTKEQVDRILTDPVVRAISFVGSVPVGEYIYKTGTDNLKRVQSFAGAKNHMVIMPDANKQQVINNLVGASVGAAGQRCMAISVAVFVGETKEWIPELKEALAQVQPGAWDDESAGYGPLISPQAKQRVVNLINEGKESGANCVLDGTDCQVPGFPNGNWVGPTLFTNVTTDMSIYQEEIFGPVLLTMEVDNLDEAIELINANRFGNGTSIFTANGAAARKYQHSIEVGNVGINVPIPVPLPFFSFTGWKGSFYGDLHAYGKQAVRFYTETKTVTARWFEDDIPSGPNMTIQLS

SEQ ID NO: 26070 - protein, 185 aa, Glycine max
MAAEPKESPSNNPGLHTTPDEATKGYIMQQTMFRIKDPKVSLDFYSRVLGMSLLKRLDFPEMKFSLYFMGYENTAEAPSNPIDKVVWTFSQKATIELTHNWGTESDPEFKGYHNGNSEPRGFGHIGVTVDDTYKACERFQNLGVEFVKKPEDGKMKGIAFIKDPDGYWIEIFDRKTIGNVTQTAA

SEQ ID NO: 26071 - protein, 871 aa, Streptomyces coelicolor A3(2)
MTATPGNPPTIVLVGHGMVGQRFLEALAERGLTGTHRVVVLCEEPRPAYDRVQLTSYFSGKTPEDLSMTDPAFIAEHGIELRVGDPAETIDREARRVTARSGLVVEYDVLVLATGSYPFVPPVPGKDAEGCFVYRTIEDLLAIEAYARTRATTGAVVGGGLLGLEAAGALNGLGLTSHIVEFAPRLMPVQVDEGGGAALLRTIEEMGLSVHTGVGTQEITTGEDGAVTGMKLSDGSELATDLVVFSAGVRPRDQLARDCGLAVGERGGISVDERCRTVTDERVFAIGECALAADGRVYGLVAPGYEQAETAAATIAAQEASFTGADLSTKLKLLGVDVASFGDAHGTTEDCLDVVYSDSRAGLYKKLVVGRDGTLLGGILVGDAEAYGTLRAFTGSVPPVSPESLVLPAGAGAPAQLGPAALPDDAVICSCHNVTKGTIRGAVTEHSCTTVPEVKKCTRAGTGCGSCVKVLGQLVTAELEASGVEVDKGLCGCFAQTREELYEIVGALRITSYRELLDRHGREGARGGEGCEVCKPAVGSIIASLAPSIGASGYVLEGEQAALQDTNDHFLANLQRNGSYSVVPRIPGGEIAPEKLIVIGEIARDFGLYTKITGGQRIDMFGARVEQLPLIWARLVDAGFESGHAYGKSLRTVKSCVGQTWCRYGVQDSVRMAIDLELRYRGLRSPHKLKSAVSGCARECAEAQSKDFGVIATSNGWNLYVGGNGGATPRHADLLAQDLSDAELVRLIDRFLMFYIRTADKLERTSTWLERIPGGLDHVRDVVVHDSLGICDELESLMRAHVSHYRDEWAETVNDPEKLARFVSFVNAPDVPDPVVGFVPERDQIKPDLPLLDIGRRPASADDLLEGSTRR

SEQ ID NO: 26072 - protein, 400 aa, Mycobacterium sp. KMS
MTVTANVAVGEELDPQHAEIITATLPLVGAHIDEITTVFYSRMFAARPELLRNLFNRGNQAQGAQQRALAASIATYATHLVDPNLPHPAELLSRIGHKHASLGITADQYEIVYEHLFAAIVEVLGADTVTAPVAEAWDAVYWMMARTLIELERHLYAEAGVDDGDVYRRARVVAREDDPSGAVLLTVRSTAQPFSGFRPGQYVSVGVTLPDGARQLRQYSLINTPGGNGDLTFAVRPLGEVSNWIRANVRAGDVLDVTVPFGDLPDPEQHHRPLVLVSAGIGITPMIGILEHLASVAPATSVQVWHADRSAATHPLKDRQQELVAALPDATLELWYEEADAHARPGLLNVADVELPEDAEVYLCGGNGFVQAVRAQLQERGVPNERLHCELFSPNDWLLA

SEQ ID NO: 26073 - protein, 484 aa, Oenococcus oeni PSU-1
MALKQYQMYINGEWVDSDNGEKITVYNPSNEEAISQVPSASLKQVKEAIDDAYAAQKDWKRVPAATRGSYLVRIAALIRKNADYLARTLSEEEGKILSLAMTEVTFSADYIDYMAAQGRTYEGEVIQSDNANENIALLKQPIGVAAGILPWNFPFFLITRKFAPALVTGNTIVIKPSSDTPNIALEFAKLANQVGLPKGVLNFVTGPGSVVGSELSKNEKIGIISLTGSVDSRKRVMADASNHVAKVSLELGGKAPAIVCKDADIDLAVDSIINSRIDNNGELCNNCERVYVQEDIAEEFTKKLVAKMAATTIGDPIEHENIGMGPLINKAAVEKVDAMVQRAVKAGAKVECGGKRPEGKGYFYPATVVTNVKQSDELVQEEIFGPVLPILTFKKLDQAIDMANDSKLGLTSSIFTENMDAAATAANELEDGETYINRFNFEAMQGFHAGWKESGLGGADGKHGLEEYVNTHVVYLQRHPEKAD

SEQ ID NO: 26074 - protein, 418 aa, Ralstonia solanacearum
MAIVDVKVPQFSESVEEGTLISWKKKPGEAVTVDEVLVEIETDKVVLEVPAPSAGVLAEVLVADGATVTSEQLLAKIDTEGKAGAAAPAAAAPAPAAAAPAPVAAAPAAAAATGGVAMPSAAKLMAEANLSAGQVAGTGRDGRITKGDVLGAVAGGAKPAPAAAPQAARPALQQVAAPVDFAVLGDRPEERVPMSRLRARIAERLVQSQSTNAILTTFNEVNMKPVMDLRAKFKDQFEKTHGVKLGFMSFFVKAAVHALKKYPVINASVDGNDIVYHGYFDIGIAVGSPRGLVVPILRNADQMSLADIEKKIAEFGQKARDGKLTLDDLTGGTFSISNGGTFGSMLSTPIINPPQSAILGVHATKDRAVVENGQVVVRPMNYLAMSYDHRIIDGREAVLGLVAMKEALEDPARLLLDL

SEQ ID NO: 26075 - protein, 343 aa, Glycine max
MAFKKVLFQYFTLALCLVFAFCAFEGNARTLEDAPMRERHEQWMAIHGKVYTHSYEKEQKYQTFKENVQRIEAFNHAGNKPYKLGINHFADLTNEEFKAINRFKGHVCSKITRTPTFRYENMTAVPATLDWRQEGAVTPIKDQGQCGCCWAFSAVAATEGITKLSTGKLISLSEQELVDCDTKGVDQGCEGGLMDDAFKFILQNKGLAAEAIYPYEGVDGTCNAKAEGNHATSIKGYEDVPANSESALLKAVANQPVSVAIEASGFEFQFYSGGVFTGSCGTNLDHGVTAVGYGVSDDGTKYWLVKNSWGVKWGDKGYIRMQRDVAAKEGLCGIAMLASYPNA

SEQ ID NO: 26076 - protein, 310 aa, Streptomyces coelicolor A3(2)
MTGWSTGDIPDLDGRVAVVTGANGGLGYVIARELARKGATVVLACRSEERGSAAVRRLMGEVPAAAVEPARLDLGDLASVREFAYGLPYERVDLLVNNAGVMALPHGTTVDGFETQFGVNHLGHFALTGLLLPSLLAAPGARIVTVSSVLHALARVDPRDLNSVRRYGRWTAYARSKSANLLFTHELARRLAGREGASDVRAVAAHPGYAETGLHGAGPRAEGRRLAERLARLGSRVVAQSPEAGALPVLYAATAPGVPSDSFTGPSFAMWRGTPAPSWRASWTIDDAMGERLWAASERLTGVIYEALLP

SEQ ID NO: 26077 - protein, 226 aa, Mesembryanthemum crystallinum
MNDTDVQNQIQQMVRFMRQEAEEKANEISVSAEEEFNIEKLQLVEAEKKKIRQEYERKAKQVDVRRKIEYSMQLNASRIKVLQAQDDLVNAMKEAASKELLLVSGDHHQYRNLLKELIVQSLLRLKEPAVLLRCREEDKHHVHRVLHSAREEYGEKACVSHPEVIVDDIHLPPAPTSYDSHELSCSGGVVMASRDGKIVFENTLDARLEVAFRKKLPQIRKQLFAV

SEQ ID NO: 26078 - protein, 441 aa, Medicago truncatula
MASFRRTLSPAYHDRHYINGDGTAFSPSSPSHKLPSSNTNYSAIASSFQRLIGGVFMRRYNRKGQWRKVAFRCVLCFFVGFLLGMFPFGNLIHEIPQQQRENNDNIIAFDINKTPQSDAKSILNNRVLKKHVSVGGGDADDEDEDKKGKGFMIEQVSLSSNMNAEKDNENLKERELGESEKIDIVARKQLIIVTPTYNRSFQSYFLNRLGQVLRLVPPPLLWVVVEMNSASMETAELLRKTGVMYRHLVCTKNSTDVKDRGVHQRNKALEHIEHHKLDGIVYFADDDNVYSLDLFQTIRDISRFGTWPVAMLAPSKNKAILEGPVCNGSQVLGWHTNEKSKRLRRFHVDMSGFAFNSTILWDPKRWRRPTSNPIRQLDSVKEGFQETTFIEQLVEDESQMEGSPPGCKKIMNWHLHLNVHNIVYPKGWMLEKNLDAVIHIK

SEQ ID NO: 26079 - protein, 548 aa, Erwinia carotovora subsp. atroseptica SCRI1043
MNGAQWVVQALRAQGVETVFGYPGGAIMPVYDALYDGGVKHLLCRHEQGAAMAAIGYARATGKVGVCIATSGPGATNLITGLADALLDSVPVVAITGQVGSALIGTDAFQEIDVLGLSLACTKHSFLVESLESLPEVMAEAFAIANSGRPGPVLVDIPKDIQLAVGDFIPNFAPVANDVDFPEQDITLAYALLAKAQKPVLYVGGGVGMANAVPALREFLNVTDIPSVSTLKGLGAVDANHPYYLGMIGMHGTKAANLIVQECDLLIAVGARFDDRVTGKLNAFAPHASVIHMDIDPAELSKLRHANVALQGDLKAVLPALQQPLNVSAWRQQSTMMKAEYPWRYDHPGQAIYAPALLKTISERMDADTVVTTDVGQHQMWAAQHMTFSRPENFITSSGLGTMGFGVPAAVGAQVARPDDMVICISGDGSFMMNVQELGTIKRKRLPLKIVLLDNQRLGMVRQWQQLFFDERYSETDLSDNPDFLTLASAFDIPGQRITRKDQIDVALDALFNSEGPYLLHVSIDEYENVWPLVPPGAGNETMLDKTK

SEQ ID NO: 26080 - protein, 133 aa, Aspergillus oryzae
MEVVIKIRKGFIRVAVETGADIVPVVAFGENEIFDRVDVTSRSVLRIAARVWEWFVGHKVAFSIGRFNIFCPYRKPLNVVVGNPIPVTQQRWDPDEKYIDQLHQQYMRELERLWDSWKDTFGTDKSVKFEVVE

SEQ ID NO: 26081 - protein, 123 aa, Narcissus pseudonarcissus
QPMSVFWLVPQFFLVGAGEAFCYIGQLDFFLRECPKGMKTMSTGMFLSTLSLGFFLSSALVTIVHKVTGESGQGAWLPDDLNRGKLYDFYWLLAVLSAVNLVAFLVSARWYVYKENRMATDDG

SEQ ID NO: 26082 - protein, 405 aa, marine gamma proteobacterium HTCC2207
MSLIVHKYGGTSVGSVERIKAVAEKIVAKHRAGDKIVVAVSAMSGETNRLIGLAKAIHEEPNLREMDVLVSTGEQVTIALLCMALEAAGVSARSYTGSQVRILTDDAHGKARIKEIDSHRIHSDLDAGRVVVVAGFQGADDAGNITTLGRGGSDTTAVALAAALKADECQIYTDVDGVYTTDPRVVADARRLDKITFEEMLEMASQGSKILQIRSVEFAGKYNVPLRVMSSFEDGPGTLISLEDDDQMEKPVVSGIAFNRDEAKLTIRGIPDQPGVAYKVLGAISEANIEIDVIVQNVAKDNSATITFTVHRNDLARASKLLEQIAADLGAEEVASDDRIVKVSIVGVGMRSHAGVAATMFEALAAEGINIQLITTSEIKITVVIEERYLELAVRSLHSAFGLEQ

SEQ ID NO: 26083 - protein, 375 aa, Puccinia graminis
MEEEVAALVLDNGSGMCKAGFAGDDAPRAVFPSICGGPRHQGVMVGMGQKDSYVGDEAQSKRGILTLKYPIEHGIVTNWDDMEKIWHHTFYNELRVAPEEHPVLLTEAPLNPKVNREKMTQIMFETFNAPAFYVAIQAVLSLYASGRTTGIVLDSGDGVTHTVPIYEGYALPHAILRLDLAGRDLTDYLIKILMERGYSFTTTAEREIRRDIKEKLCYVGLDFEQEMQTASQSSALEKSYELPDGQVITIGNERFRCPEALFQPSLLGLEASGIHETTYNSIMKCDLDIRKDLYGNVVMSGGTTMYSGISDRMQKEITALAPSSMKVKIVAPPERKYSVWIGGSILASLSTFQQMWISKQEYDESGPSIVHRKCF

SEQ ID NO: 26084 - protein, 489 aa, Bacillus anthracis str. A2012
MNMTVQTAQIVKNYIGGEWVESISTKMEAVYNPATGEVIAQVPLSTKVDVEQAVLAANEAFKSWSKTAVPRRARILFKYQQLLVDNWEELAKLITIENGKSYNEAYGEVLRGIECVEFAAGAPTLMMGKQLPDIATGIESGMYRYPIGVIGGITPFNFPMMVPCWMFPLAIACGNTFVLKPSERTPLLAARLAELAEEAGLPKGVLNIVNGAHDVVNGLLEHKLVKAISFVGSQPVAEYVYKKGTENLKRVQALAGAKNHSIVLNDANLELATKQIISAAFGSAGERCMAASVVTVEEEIADQLVERLVAEANKIVIGNGLDEDVFLGPVIRDNHKERTIGYIDSGVEQGATLVRDGREDTAVKGAGYFVGPTIFDHVTKEMKIWQDEIFAPVLSIVRVKSLDEAIEIANESRFANGACIYTDSGASVRQFRETIESGMLGVNVGVPAPMAFFPFSGWKDSFYGDLHANGTDGVEFYTRKKMLTSRWEK

SEQ ID NO: 26085 - protein, 323 aa, Idiomarina baltica OS145
MFKKFNAKSTADEVLSGVDLRGKRFLITGVSSGIGLETARSLAAHGASVVGTVRELQKGELTSAPIREAASQGNGNFELVQLDLASLQSVHACADNLLGNGQLFDAIIANAGVMATPFGRTVEGVEIQFGTNHLGHFALINRIEQLIADNGRLVVLSSQAHRAADVDLSDPNFEQQEYDPFVAYGRSKTANALFAVEFDKRHRHRGIRAASVMPGNSLTDLARHFSQEDLQGLFEFVGNARAEAGLPPSELKDVAQAAATSVWGAAVADKDEIGGRYLEDCTIAAVDDTPNPFVDGVRSYALDAKKAKELWTVSDELLAAACN

SEQ ID NO: 26086 - protein, 428 aa, Burkholderia sp. 383
MSSQLQSIPSYLHADDLGPWGNYLQQVDRVAPYLGSLSRWLETLKRPKRILIVDCPIELDNGTVAHFEGYRVQHNVSRGPGKGGVRYHQDVTLSEVMALSAWMSVKNAAVNVPYGGAKGGIRVDPRKLSRGELERVTRRYTSEIGIIIGPNTDIPAPDVNTNEQVMAWMMDTYSMNQGQTSTGVVTGKPIALGGSLGRKEATGRGVFVVGSEAAKKKGLEIEGARIAVQGFGNVGGIAAKLFQEAGAKVIAVQDHTGTIYQPAGLDSNKLLDHVARTGGVAGFEGAEPMPNDEFWTVETDILIPAALENQITEKNAGKIRTKIIVEGANGPTTTAADDILTANGVLVIPDVIANAGGVTVSYFEWVQDFSSFFWTEDEINHRLERVMREAFSGVWAVAEEHKVSVRTAAFIVACKRILMAREMRGLYP

SEQ ID NO: 26087 - protein, 161 aa, Brassica napus
VIQGKGNVENQKEAAIKSLCRLRGSAFVDSAAEQVNEILAELSFVGEDKEATFGELFQGKCKKALIIGGGLVLFQQITGQPSVLYYAPSILQTAGFSAAGDATRVSILLGLLKLIMTGVAVVVIDRLGRRPLLLGGGGGMVVSLFLLGSYHIFFSADQLLL

SEQ ID NO: 26088 - protein, 999 aa, Candida albicans SC5314
MFTKSTIRTVLRSLATKANTSSENFAKVLNPKVSFDNLDVFARRHIGPTPKEVQKMLSSLGYNDLDEFLSNVVPEHILIKRKLSVQPEKGFTESEMLDHLHKLANKNKIKKSFIGKGYAGTLLPPVIQRNLLESPEWYTSYTPYQPEISQGRLNSLLNYQTMICSLTGMAMANASLLDEGTAAGEAMALSFHNSKDKKKIYVVDANLHPQTVDVIKSRAENIGVEIVEIPLATKQGVEELSRIADKVCGALVQYPDTNGEITDFTEIGNILHSNKALFAMATDLLALTVLKPPSEFGADIALGTSQRFGVPFGYGGPHAAFFATSSKYARKIPGRIVGVSKDRLGNPALRLALQTREQHIKREKATSNICTAQALLANISANYAVYHGPQGLKNIANRVYGFTTLLANEISKKHQLVNNKWFDTLTVKLNGVSSDEILAKALNEYDINMFRVDESTVSLQLDETVQKQDLINLVNVFTGQENYSPDELPAIPQELLRSDEILTNEVFNAHHSETAMLRYLHSLQRMDLSLADSMIPLGSCTMKLNATVEMQTLSIPGFNSIHPFAPIDQAQGYKELIDEFEKDLNDITGFDGTTSMPNSGAQGEYTGLSLIREYHRSRGEHDQRNICLIPVSAHGTNPASAAMCGLKVVPVKCLSNGSIDLEDLEAKAAKHAKNLCSIMITYPSTYGLFEPGVKKAIDIVHANGGLVYLDGANMNAQVGLTSPGDLGADVCHLNIHKTFALSHGGGGPGQAPVCVKEHLKPFLPKHHFVNTPHSTSESIKAVNSAPYGSASVIPVSYSYIKMLGAQALPYVSAIAMLNANYILTKLEPHYKILFVDRDASSESGTKHCAHEFILDLREFQKIGIEAIDVAKRLQDYGFHAPTMSFPVAGTLMIEPTESENLGELDRFIDSLISIRKEIEAYQNKEPLGQVLKNAPHSLEDIVSSEDWDARGYTREQAAYPLPFLKKNKCWPTVSRLNDTYGDLNLICTCPSVEEVAAES

SEQ ID NO: 26089 - protein, 426 aa, Nocardioides sp. JS614
MSTEIRLDTVERAIADIAAGKAVVVVDDEDRENEGDIIFAASKATPDLMAFTIRYSSGVICVPMPARMLDRLEIPLMTPHNKDRLRTAYTISVDARDGVTTGISAADRAHTVRVLADSATEPWEITRPGHVFPLRYREGGVLVRRGHTEAAVDLAKLAGLTPAGVLVEVVNDDGTMKRGPELRAFADEHGLAMISIDDLVRYRRRHETLVERVAETQLPTRHGDFTAYGYRITVDGSEHIALVHGDISGPEPVLTRVHSECLTGDVFGSHRCDCGPQLEEALERIVAEGRGVVVYLRGHEGRGIGLVAKLQAYQLQDGGRDTVDANLDLGLPADARHYGTATQVLRDLGVGSVRLMTNNPDKVRNLEDYGVSVAARVPLTPHPNDHNIAYLLTKRDRMGHDLPNLADGVPDTRADGVPDTLAQNGA

SEQ ID NO: 26090 - protein, 405 aa, Helicobacter pylori J99
MLIVQKYGGTSMGSIERIHNVAQRVLESVKLGHQVVVVVSAMSGETDRLLEFGKNFSHNPNKREMDRIVSAGEWISSAALSMALERYGHRAISLSGKEAGILTSSHFQNAVIQSIDTQRITELLEKNYIVVIAGFQGADIQGETTTLGRGGSDLSAVALAGALKAHLCEIYTDVDGVYTTDPRIEEKAQKIAQISYDEMLELASMGAKVLLNRSVELAKKLSVKLVTRNSFNHSEGTLIVAEKDFKGERMETPIVSGIALDKNQARVSMEGVEDRPGIAAEIFGALAEYRINVDMIVQTIGRDGKTDLDFTIVKTQIEETKQALKPFLAQMDSIDYDENIAKVSIVGVGMKSHSGVASIAFKALAKDNINIMMISTSEIKISVLIDIKYAELAVRTLHAVYQLDQ

SEQ ID NO: 26091 - protein, 539 aa, Thiomicrospira crunogena XCL-2
MTPEKYRPTITPDLPNRQWPNQRLTQAPIWASVDLRDGNQALANPMTVEQKLKLWDQLVAIGFKTIEIGFPAASQLEFDFARRLIEENRIPDDVTVQVLVQAREHLIKRTYEALQGVKQAVVHVYNTTSTVQREKVFCKSKADIKAMAIQGAKWVQSYAKEHPESDWVFQYSPESFSQTETDYAVEVCQAVMDVWQPTPDNRCILNLPATVESTSPNRFADQVEYFITHLKNRESAIISIHTHNDRGCAVAAAELSLLAGADRVEGTLLGNGERTGNMDIVTLAMNLYSEGIDPELNLSDPDSWVPVIEEVTKIDTHVRHPWVGEAVYTAYSGSHQDAIRKCLMRQKDDEPWNVAYLPIDPKDLNRSYEAIIRVNSQSGKAGAAFVLTQEYDLNLPKWVQQDFAPVAQTIAEQAGGIVSHQMLYDAFIQHYRLDKSLAELNNYQLSRKEGKEHLSVEVNGETWQGQGNGTLSALCDAWQRRTGQQVDVLDYSEHALHEGKDSKAIAYVYVQQKNTKTIGIAMAEDTVSAMIQALLSTIR

SEQ ID NO: 26092 - protein, 411 aa, Arabidopsis thaliana
MNALAATNRNFKLASRLLGLDSKLEKSLLIPFREIKVECTIPKDDGTLASFVGFRVQHDNARGPMKGGIRYHPEVEPDEVNALAQLMTWKTAVAKIPYGGAKGGIGCDPSELSLSELERLTRVFTQKIHDLIGIHTDVPAPDMGTGPQTMAWILDEYSKFHGHSPAVVTGKPIDLGGSLGRDAATGRGVLFATEALLNEHGKTISGQRFAIQGFGNVGSWAAKLISDKGGKIVAVSDVTGAIKNNNGIDILSLLEHAEENRGIKGFDGADSIDPDSILVEDCDILVPAALGGVINRENANEIKAKFIIEGANHPTDPEADEILKKKGVMILPDIYANSGGVTVSYFEWVQNIQGFMWDEEKVNRELKTYMTRGFKDLKEMCQTHSCDLRMGAFTLGINRVAQATTIRGWGS

SEQ ID NO: 26093 - protein, 506 aa, Bacillus cereus G9241
MKQILFMDTTLRDGEQSPGVNLNEQEKLQIARQLERLGIHVMEAGFAAASEGDFQSVKRIANTIQNATVMSLARAKESDIRRAYEAVKGAVSPRLHVFLATSDIHMKYKLCMSKEDVLDSIYRSITLGKSLFPTVQFSAEDATRTSRDFLAEAVEVAIRAGANVINIPDTVGYTNPEEYYSLFKYLQESVPSYEKAIFSCHCHDDLGMAVANSLAAVEGGALQVEGTINGIGERAGNAALEEVAVALHIRKDFYQAEPSMTLKEIKATSTLVSRLTGMVVPKNKAIVGANAFAHESGIHQDGVLKEVTTYEIIEPALVGESQNLFVLGKHSGRHAFTEKMKELGYEFTTEERDAVFEAFKKLADRKKEITEEDLRALMLGEAAFAAQQYNITQLQVHFVSNSTQCATVVLKDEEGNVFEDAATGSGSIEAIYNAIQRILGLECELADYRIQSITQGQDALAHVHVELKEGTHQVSGFGVAQDVLEASARAYVHAAGKLKSFIQLVK

SEQ ID NO: 26094 - protein, 590 aa, Porphyra umbilicalis
MLSKQIIGSEKTGRFALLDSIVRHGVIHIFGYPGGAILPIYDELYAWEELSLIKNILVRHEQGASHAADAYSRSTGKVGVCFATSGPGATNLVSGIATAHIDSVPILAITGQVGRPFIGTDAFQEVDIFGITLPIVKHSYVVRDPRDMSRIVAEAFYICKHGRPGPVLIDVPKDVGLEKFNYFSVEPGQVKIPGCRPLSNLKSRQILMAAKMIQQSSQPLLYIGGGAIISDAHSIIKELVDLYKIPVTTTLMGKGIFNEDSEFCLGMLGMHGTAYANFAVSECDLLIALGARFDDRVTGKLDEFACNAQVIHVDIDPAEVGKNRIPQVAIVGDVTEVVTSLLNLLKNNFKPYPEQIISWQERIHRWRQQYPLLVPKKSTSISPQEILVTTNQLAQDAYFTTDVGQHQMWSAQFLKVKSKHWISSAGLGTMGYGLPAAIGAQVAHPNELVICVSGDSSFQMNMQELGTIAQYKLPIKIVIINNRWQGMVRQWQQAFYGERYSHSRMTEGAPNFQKLAEAFGIKAFTVNNRQNMESSLKDAMKYPGPVLLDCQVTENENCYPMVAPGKSNAQMIGIAKPQRGTASNYVSRNI

SEQ ID NO: 26095 - protein, 156 aa, Haemophilus influenzae
NRTNTPVLVDGKDVMPEVNAVLAKMKDFCQRIISGEWKGYTGKAITDVVNIGIGGSDLGPYMVTEALRSYKNHLNMHFVSNVDGTHIAETLKKVNPETTLFLVASKTFTTQETMTNAQSARDWLLKAAKDESAVAKHFAALSTNAKDVEKFGIDTN

SEQ ID NO: 26096 - protein, 354 aa, Aspergillus nidulans FGSC A4
MAPSINEIPISDSPSACRVGINGFGRIGRNVLRVALARNDIQIVAINHTCTSVQDLIYLIRYDSSMGKLSPDIPIHAISETQISVNGRPIALTSERDLKKLNWAALGAEYVVECTGKFTKRELAQDHITYGGAKRVVISAPSSDSPTYVYGVNADEYRANEETRVISCASCTTNCVTPVLKVLQREFGIAQGFLTTVHAATKSQTVLDGYSKKNRRLGRSVFDNIIPTTTGAAKAIASVLPELTGKVTGASIRVPTPNVSLIDLTVSTETPTSLAEILAAFRRAAKNELAGVLSVSDEVLVSSDYLGDSHSAIVDAAACSELNPTFFKIMAWYDNEWGYSSRLLDLTRHIAHNE

SEQ ID NO: 26097 - protein, 332 aa, Streptococcus pyogenes M1 GAS
MSETKLMALREAVNLAMTEEMRKDENIFLMGEDVGVYGGDFGTSVGMIEEFGPKRVKDTPISEAAISGAAIGAAITGLRPIVDVTFMDFLTIMMDAIVNNGAKNNYMFGGGLITPVTFRVASGSGIGSAAQHSQSLEAWLTHIPGIKVVAPGNANDAKGLLKSAIRDNNIVLFMEPKALYGKKEEVNQDPDFYIPLGKGDIKREGTDLTIVSYGRMLERVLQAAEEVAADGINVEVVDPRTLIPLDKELIIESVKKTGKLMLVNDAYKTGGFIGEIATMITESEAFDYLDHPIVRLASEDVPVPYARVLEQAILPDVEKIKAAIVKMANKGN

SEQ ID NO: 26098 - protein, 84 aa, Glycine max
  misc_feature (50)..(50): Xaa can be any naturally occurring amino acid
MASLIVAFLAAVLCMVVVSAPMAHATITCGQVTNSLINCICYLQNGGTPXSGCCNGLNSLNAAATDIADRQTACKCLKSAAIQI

SEQ ID NO: 26099 - protein, 112 aa, Vibrio angustum S14
MKKIEAIIKPFKLDDVREALAEVGITGMTVSEVKGFGRQKGHTELYRGAEYMVDFLPKVKIEIVVADEVAEQCIDTIVETAQTGKIGDGKIFMFDIERVVRIRTGEEDEDAI

SEQ ID NO: 26100 - protein, 588 aa, Arabidopsis thaliana
MGTNQTQISDEYVTGNSSGVGGGISDVYGEDSATLDQLVTPWVTSVASGYTLMRDPRYNKGLAFTDKERDAHYITGLLPPVVLSQDVQERKVMHNLRQYTVPLQRYMALMDLQERNERLFYKLLIDNVEELLPVVYTPTVGEACQKYGSIYRRPQGLYISLKEKGKILEVLKNWPQRGIQVIVVTDGERILGLGDLGCQGMGIPVGKLSLYTALGGIRPSACLPITIDVGTNNEKLLNNEFYIGLKQKRANGEEYAEFLQEFMCAVKQNYGEKVLVQFEDFANHHAFELLSKYCSSHLVFNDDIQGTASVVLAGLIAAQKVLGKSLADHTFLFLGAGEAGTGIAELIALKISKETGKPIDETRKKIWLVDSKGLIVSERKESLQHFKQPWAHDHKPVKELLAAVNAIKPTVLIGTSGVGKTFTKEVVEAMATLNEKPLILALSNPTSQAECTAEEAYTWTKGRAIFASGSPFDPVQYDGKKFTPGQANNCYIFPGLGLGLIMSGAIRVRDDMLLAASEALASQVTEENFANGLIYPPFANIRKISANIAASVGAKTYELGLASNLPRPKDLVKMAESCMYSPVYRNFR

SEQ ID NO: 26101 - protein, 123 aa, Brassica napus
MEGNSGGGAATGGGGGGSDVELVSKTLQVEHKLFYFDLKENPRGRYLKISEKTSATRSTIIVPSSGIPWFLDLFNYYVNSEEHELFSKELQLDSKVFYFDIGDNRRGRFLKVSEASVSRNRST

SEQ ID NO: 26102 - protein, 119 aa, Zea mays
MVFPSKITTCLLVLAVYMAAPSESTITCGTVTSTLARCIGYLTNSGSLPSDCCVGVKSLNQMAQTTPDRRQVCECLKSAAKDITGLNTDLVATLPTTCGVSVPYPIRFSTNCDTISTAV

SEQ ID NO: 26103 - protein, 113 aa, Triticum aestivum
IVDDHIWFRNYQISVPHNEIDKVDKGGLDKMTLVEVGPRFCLNPIKIFGGSFGGPTLFENPFYVSPNQIRALEKRKKAGKYAKKVKAKVRRKMHEMENTLEPDEFADLWKGED

SEQ ID NO: 26104 - protein, 235 aa, Rhodopirellula baltica SH 1
MSRAKLDSIRAAGPAILPSLLQCDFGDLRTEIEKLTVAGTRVLHLDVMDGHFVPNLTYGMPIVEGLRRHTDMPLDVHLMISDPIAYAQPMVDAGADLLTFHVEAVDDCVEVAGKIRDMGVGVGVAINPDTDFAKLDCCLDSVDMVLVMSVNAGFGGQQFNPVALDRLRSLKERKPDLLLEIDGGIKAETIGDARAAGCDLFVVGSAIFGQHDYETAINELTQAMHGSPPATGDQS

SEQ ID NO: 26105 - protein, 326 aa, Candida fennica
SIVGRPRHQGIMVGMGQKDSYVGDEAQSKRGILTLRYPIEHGIVTNWDDMEKIWHHTFYNELRVAPEEHPVLLTEAPMNPKSNREKMTQIMFETFNVPAFYVSIQAVLSLYSSGRTTGIVLDSGDGVTHVVPIYAGFSLPHGILRIDLAGRDLTDYLMKILSERGYTFSTTAEREIVRDIKEKLCYVALDFEQEMQTSSQSSAIEKSYELPDGQVITIGNERFRASEALFRPADLGLEAHGIDQTTYNSIMKCDVDVRKELYGNIVMSGGTTMFPGIAERMQKEITALAPSSMKVKIIAPPERKYSVWIGGSILASLSTFQQMWIS

SEQ ID NO: 26106 - protein, 336 aa, Pseudomonas putida
MTHKVATDFEDGVTRFIDANTGETVADAAYRQGINLPLDCRDGACGACKCFAESGRYSLGEEYIEDALSEAEAEQGYVLTCQMRAESDCVIRVPAASDVCKTQQAGYQAAISNVRQLSESTIALSIKSASLNQLAFLPGQYVNLQVPGSDQTRAYSFSSLQKDGEVSFLIRKLPGGLMSSFLTSLAKVGDSVSLAGPLGAFYLREIKRPLLLLAGGTGLAPFTAMLEKIAEQGGEHPLHLIYGVTHDHDLVEMDKLEAFAARIPNFSYSACVASPDSAYPQKGYVTQYIEPKQLNGGEVDIYLCGPPPMVEAVSQYIRAQGIQPANFYYEKFAASA

SEQ ID NO: 26107 - protein, 428 aa, Nostoc punctiforme PCC 73102
MHLLWFRRDLRLTDNEIVTSSSGNDARVLPFFIIDPWFYTWADVGTARVRFLFESLEKLNSNLQKLSSRLYLFEGNSTGIVQELTRQLTERGYKPKLFFNRDVQVEYGINRDKTIVDFYKQLNLDYHIGLNNFLQSAEQRDEWVNEYYTYQRQSQYKTPAIINTPQITLNLPQLTFEELKQKYHRFWAVEKVYFPGGETQAQAQLDSFLKKRYYGYHWKLSRPMLSQLGATSHLSPHLTFGTISTRTVYQSTKALAEQLKTQPKAEFSLKAFRDRLRWHDSFTQRLYFHPEIAYTNRYREFDKLYTPETLSGAKQELYQAWQQGMTGFPLVDASMRQLQTMGWMNFRMRAMCATFLTINCGVSWHHGAKHYMNYLVDGDLAIDNWQWQMQAGVTNPLSDTFRIYNPSKNIAEKDPLGVNIAKLSPGAR

SEQ ID NO: 26108 - protein, 326 aa, Oenococcus oeni PSU-1
MAVKSYIDAVKEAQDLALEHDKNVLILGEDVGKNGGVFRATDGLQDKYGEDRVFNTPLAESGIGGLAIGLTTQGYRPIMEIQFYGFIYEVLDSLAGQMARNRFRFNGTRQMPIVVRAPYGGGTKTPEMHSDNLEGLVAQTPGLRVVMPSNPSDAKGLLLSAIESNDPVIFLENLHLYRSIKGEVAEGYYTTPLDKAAVVRKGKDISIITYGGMTPVALNAAEELSKQGIDAEIIDLRTVSPLDIETIGESVKKTGRVVVAQETQRMAGIGASVMAEISERFILSLKAPVGRVAAPDSIYPFAQAENDWMVNADDIIDKVKEIVNYD

SEQ ID NO: 26109 - protein, 448 aa, Oenococcus oeni PSU-1
MTEIFKMPDIGEGMAEGEISDWLVKVGDQVKTDDSVAEVQNDKLLQEILSPYSGKVTKLFVEPGTTVKVGEPLIEFDGDGSGSAADDGQKGKTEAKEIEEPAESEKKTAVSSQASPAAPTSDSSNSSGAATASNGNILAMPSVRHYAHEHGIDLSQVTASGHHGHITMSDVENFSTSSAAPEKEPENQPSEAETTTKQTASESAPTKKAAAPDPLKEGRVSMTPVRKAIAKAMSLQNSTIPTVTNFDQTEVSKLVAHRKQFKPIAADQNIHLTYLAYAAKALAATAKKFPEINASLDMDKQEIVYHDDINLGIAVNAPSGLYVPVIAHADQKSIMAIAQEIEDLAAAVRDGSIKPDQMRGGTITISNIGSARGTWFTPIINAKEVAILGLGSIVKEPIISDDGTIVAGQMMKLSLSYDHRLIDGMLGQTSMNYLKSLLADPAYMLMEV

SEQ ID NO: 26110 - protein, 303 aa, Bacillus cereus ATCC 10987
MIYTVTLNPSIDYVVQVNSLDLGAVNRAEKDMKFPGGKGINVSRVLHRLGVENVALGFTGGFTGRFIKDVLQTEGVITNFIQVSEDTRINVKIKGREETELNGQGPSVTKEQFEQLMKQIESMEQGDCVVLAGSVPASIPTTFYESIAAFGAEKGIRVVVDASGSALQHVVKNKPFLIKPNHHELGELFGVEISTVEDVLPYGRKLVEQGVEHVIVSMAGDGALLFTAEGIYEATIPKGVVINSVGAGDSLVAGFVGRYEQTKDIEKAFQYGVATGSATAFSADLCEKEKVEELLSQVIVTKR

SEQ ID NO: 26111 - protein, 326 aa, Zygoascus hellenicus
SIVGRARHPGMMVGMNQKDSYVGDEAQSKRGILTLRYPIEHGVVTNWDDMEKIWHHTFYNELREAPEEHPVLLTEAPSNPKSNREKMTQIIFETFNVPAFYVSIQAVLSLYASGRTTGIVLDSGDGVTHVVPIYAGFSIPHAIMRINLAGRDLTDYLVKLLTERGYAFTTTAEREIVREIKEKLCYVALDFEQELQTASLSSSLEKSYELPDGHVITIGNERFRAPEALFHPSLLGREAAGIHETTFNSIMNCDLDVRKDLYLNIVMSGGTTMYPGIAERMQKEITALAPSSMKIKIVAPPERKFSVWIGGSILASLGTFQQMWIS

SEQ ID NO: 26112 - protein, 157 aa, Arabidopsis thaliana
MSDIFPGDFAAAETGIFWDIEDCKIPDDLNAGDALKNIKSALSSDGHHGTVSVRAYGDTTGLDFPSEGIKLNHFPAGERYARQTKMLEDIVSWSAEHPEPSTLFLIVGDTSRDFLDVVQLLKSKKNYNFIIYNFILYVYYQKTEHSYLAPIPSILLI

SEQ ID NO: 26113 - protein, 541 aa, Oenococcus oeni PSU-1
MTDPVSILNDPFINKGTAFTEAEREELGLNGLLPAKVQALQEQVDQTYAQFQSKVSNLEKRLFLMEIFNTNHVLFYKLFSQHVVEFMPIVYDPTIADTIENYSELFVEPQGAAFLDINHPENIQSTLKNAANGRDIKLLVVSDAEGILGIGDWGVQGVDIAVGKLMVYTVAAGIDPSTVLAVVIDAGTNNEKLLKDPMYLGNKFNRVRGDKYYDFIDKFVNHAESLFPNLYLHWEDFGRSNASNILNSYKDKIATFNDDIQGTGIVVLAGVLGALKISGQKLTDQTYMSFGAGTAGMGIVKQLHEEMVEQGLSDEEAKKHFFLVDKQGLLFDDDPDLTPEQKPFAAKRSDFKNANQLTNLQAAVEAVHPTILVGTSTHPNSFTEEIVKDMSGYTERPIIFPISNPTKLAEAKAEDVLKWSNGKALIGTGVPVDDIEYEGNAYQIGQANNALIYPGLGFGAIAAQSKLLTPEMISAAAHSLGGIVDTTKVGAAVLPPVSKLADFSRTVAVAVAKKAVEQGLNRQPIDDVEKAVDDLRWEPKY

SEQ ID NO: 26114 - protein, 326 aa, Candida fennica
SIVGRPRHQGIMVGMGQKDSYVGDEAQSKRGILTLRYPIEHGVVTNWDDMEKIWHHTFYNELRVAPEEHPVLLTEAPMNPKSNREKMTQIMFETFNVPAFYVSIQAVLSLYSSGRTTGIVLDSGDGVTHVVPIYAGFSLPHGILRIDLAGRDLTGYLMKILSERGYGFSTTAEREIVRDIKEKLCYVALDFEQEMQTSSQSSAIEKSYELPDGQVITIGNERFRAAEALFRPADLGLEANGIDQTTYNSIMKCDVDVRKELYGNIVMSGGTTMFPGIAERMQKEITALAPSSMKVKIIAPPERKYSVWIGGSILASLSTFQQMWIS

SEQ ID NO: 26115 - protein, 147 aa, Zea mays
MVLTSNISVQKTLYEVLSVSEDATYDEIRAAYSVQKAWEVLRHPTSRADYDKQLQSSRQSIEIIASEIQVGDMIVESAAGALELLYPCRCGDYFSITSGELSGMGIVVTRDGEEVEELQASDSASASVVLGCGSCSLKIRLVIDGSS

SEQ ID NO: 26116 - protein, 268 aa, Synechococcus elongatus PCC 6301
MTRPASAAIAVYDTTLRDGAQREGLSLSLEDKLRIAHCLDRLGVKFIEGGWPGANPKDVQFFWELQQRPLQQAEVVAFCSTRRPGQIAGEDELLKALLAAGTTWVTIFGKSWDLHVVEGLKTSLDENLVMISDSIAYLRTCDRRVIYDAEHWFDGYLANPDYALQTLAAAIEAGAEWIVLCDTNGGCLPHQISEIVAAVLDRFPSLAPDQTGPQLGIHTHNDSETAVANAIAAVQAGARMVHGTINGYGERCGNANLCSVIPNLQLKL

SEQ ID NO: 26117 - protein, 362 aa, Leptospira biflexa serovar Patoc
MITNKVKTLILVNLGGPRTPSEIEVFLRDLFSDPFVFDLPLPEFLRLRLARFIAKKRAPKVQKSYESMGFGGGSPLVEETAKQAHALELALNERSSEQWNVKVAMACGYPNMRDIEFGKPNQDTVYLPLYPQFSRSTVLSTLAILETKFGECPVGSGGYVPHFGLDPNFHSISAKFIYEFFTNQLPKDQYLHYPEEKPNCDWRNLDLVFSAHGVPMRLIHKGDRYMEEVELSVKGIADELSKFGFNGGVHISYQSKVGPAKWTEPSTIQMISSLAKQGKHIAVYPISFVSDHIETLEEIGEQFKDLTWEMGGKSFVRIPALGIYPSFIQFLAEKVMHSDRKIQHCICREKGGESLQHCRFKD

SEQ ID NO: 26118 - protein, 328 aa, Bacillus cereus G9241
MVERLYGHHFHLQDEYFGGSAIDLNGQPLPQRTLAACLASDAVLLGAVGGPRWDSAKERPEKGLLALRKGLGVFANVRPVTVESATAHLSPLKKADEIDFVVVRELTGGIYFSYPKERTDEVATDTLTYHRHEIERIVSYAFQLASKRKKKVTSIDKANVLESSKLWRTVTEEVALRYSDVELEHILVDAAAMELIRNPGRFDVIVTENLFGDILSDEASVLAGSLGMLPSASHAEKGPSLYEPIHGSAPDIAGKNKANPIAMMRSVAMMLGQSFGLTREGCAIEEAISAVLKSGKCTADIGGTETTTSFTKAVMQEMEEQALVGRGR

SEQ ID NO: 26119 - protein, 678 aa, Oryza sativa
MQAFVFIFAVLALLAGDVEGRQGCYPFSCGHLQNISHPFRRRGDPQRCGVPSYELDCRDSKATIRINTGTYYVTSINYTTSVFWVVDASLKDTNSSCPLPRSDQLPFVSGGIQGSHGGWDLALDPGPGATWVSFVNCSQAVRNNSVYVPVDCLSTSSSFVYVFGSWIMPPSVFPIIGNLETSCRYLAMIPLGGWDSPLPHNASFSDIVRSMRNGFAVHFPIIHRWSRIGHIKDCLMGSIRGFHEEPLSNQTIKDQIVDILFIDFSFWSCIIGGVGMKDYFDMPQYMMGMLRGKIEFYGGFIVQFALFVFKWIAVLCRFVIAPLTLLTFLAFKYWKTRIKIDAVEKFLQMQLMLGPTRYAYTDIIAMTSHFRDKLGQGGYGSVFKGVILPGDVHVAIKMLSNYNCNGEEFISEVSTIGSIHHVNVVRLVGYCAEEMRSALVYEYMPHGSLDRFIFSPDKSLSWDKLNEIALGIARGINYLHQGCDMQILHFDIKPHNILLDSNFVPKVADFGLAKLYPRDNSFMPVSAARGTVGYIAPEMISRSFGIISSKSDVYSFGMLLLEMAGGRRNSKQNMSSSSQSYYPSWVYNQLVQQKMGEIANAFNMHELEKKLCVVGLHCIQMKSHDRPTMSEVIEMLEGDVGGLQLPSRPFFCDDEPLPLLVDSCRFSSELTEISEEDE

SEQ ID NO: 26120 - protein, 287 aa, Chlamydophila abortus S26/3
MLLKGTPVAERVLEKIKQEISHSSTPPGLAVVLIGNDPASEVYVGMKVKKATDLGMVSKAHRLPSDATLTDILKLIERLNNDPTIHGILVQIPLPKHLDSHAIIQAISPEKDVDGLHPVNMGKLLLGQLGGFAPCTPAGIIELLHYYEIPLLGRHVAVVGRSNIVGKPLAAMLMQKHPSTNATVTLLHSQSQNLKEILKTADIIIAAVGVPLFIKESMVSSHAVIIDVGTSRVATNNAKGYILVGDVDFNNVVTKCKAISPVPGGVGPMTVAMLMKNTWESYQKFSS

SEQ ID NO: 26121 - protein, 230 aa, Oryza sativa
MNDADVAKQIQQMVRFIRQEAEEKASEISVSAEEEFNIEKLQLVEAEKKKIRQEYERKEKQVEVRKKIEYSMQLNASRIKVLQAQDDLVNSMKEDATKQLLRVSHNHHEYKNLLKELVVQGLLRLKEPAVLLRCRKEDHHHVESVLHSAKNEYASKAEVHHPEILVDHDVYLPPSPSSHDSHERFCSGGVVLASRDGKIVCENTLDARLEVVFRKKLPEIRKLLFGQVTA

SEQ ID NO: 26122 - protein, 394 aa, Pseudomonas aeruginosa PAO1
MFELVDNIAQTAVIKVIGVGGGGGNAVNHMAKNNVEGVEFICANTDAQALKNIAARTVLQLGPGVTKGLGAGANPEVGRQAALEDRERISEVLEGADMVFITTGMGGGTGTGAAPIIAEVAKEMGILTVAVVTRPFPFEGRKRMQIADEGIRALAESVDSLITIPNEKLLTILGKDASLLAAFAKADDVLAGAVRGISDIIKRPGMINVDFADVKTVMSEMGMAMMGTGCASGPNRAREATEAAIRNPLLEDVNLQGARGILVNITAGPDLSLGEYSDVGNIIEQFASEHATVKVGTVIDADMRDELHVTVVATGLGARLEKPVKVVDNTVQGSAAQAAAPAQREQQSVNYRDLDRPTVMRNQSHGSAATAAKLNPQDDLDYLDIPAFLRRQAD

SEQ ID NO: 26123 - protein, 394 aa, Photorhabdus luminescens subsp. laumondii TTO1
MRNQTFIIVGAGQAGAMAAATLRQQQFDGDIILIGKEYHAPYERPILSKDYLINPEEAPKYLFSEDFYLEKQIDLRIGQLVSQIMPSKHCVVLENGGKLRYDKLLLTMGARARRFPLLDQLGENIYTLRTLDDAQRLRQAVKKDKRILIVGGGVIGLELAATSCELGANVTVIEQADNIMGRCAPPLLQDYLLNRHQEKGVQFFLDTNIVSAQKQGSELVLILNTGEKVIGDIIIYGIGAEFRDQLAADAGLVTDGGIVIDSRCQTSEPDIFAAGDVCLQREPLTGDLQRRETWENANRQATIAAHAMMGLAPPQPGAPWFWTDQWGINIQMVGNMQAEEWHIQGDLQSDKAILFGTENEVLVGAVAINQGREMRNLRKLLANPAQVVSGVEWA

SEQ ID NO: 26124 - protein, 380 aa, Daucus carota
MVKELHTVCVTGASGFIGSWLVLRLLQRGYTVRATVRDPGNPQKVKHLLQLPKAETNLILCRADLNEEGSFDDAVKGCHAVFHMATPMDIESQDPENEVIKPTVQGVLDIITACAKAKTVKKLIYTSSAGTVNVREHQLPVYDESNWSDMDFIYSTKMTAWMYFVSKSLAEKAAWQAAEENNIQFISIIPTLVVGPFISPTFPPSLITALSPLTGNEAHYSIIKQCQYVHLDDLCESQIFLYEHPTAQGRYICSSHDATIHDVVKLIREKWPEYNVPTEFKGIEKDLPVISFSSKKLTDMGFTFKYNLEDMFKGAIETCREKGLLPNSTTLQENDQEKKYLFSATDDHHNGHEKDLFHHSIDKDAIGKEKRGETESLVAA

SEQ ID NO: 26125 - protein, 303 aa, Arabidopsis thaliana
MILLMDYNLYLISVVVDGDPYIECKDTRLVVWNPYWGLTRWIEPRYSHHLIGCARFSYALGYVGNISCRSHKLLRFIDYFFHGPELEWYEIYDFESGLWTTLDVTPHWCISLGSHGISIKGNTYWSAITRNSRSHGLTIYDHDHIICFDFTSERFGPLLPLPLNAEYYGDVILSSVKEEKLAVLQQQNRANPYMFDIWITINIEPGHVLWTKFLKVDMETVMETPFKSSESFFIDEKNKIVMSFDETLNPYTISIFGEAGYYRVVNLEQHANTWSRSQMCTYVPSLLQIKQLPLIQVEKCFII

SEQ ID NO: 26126 - protein, 356 aa, Enterococcus faecalis
MNNLFIFVCFCFMWLMIFGVILYYVGLVNHRYIHHTLILGLVTIISGTLCWLFVGYSLSFFGNIQYSIFYSPLASSEIVSILIQLLFCLYSVIMIIGSVLERGNWKYIVLFVPLWIVFVYAPICFSLWGHGNWLGKMGVLDYSGGLVVHTTAGIGSLVLAITSPIRLKNSLIFKSQEMIAFVGMLFITLGWFGFNMAPSGKIGEEAIQVWLNTLISILGGSISWTFTQWILIKKVSIYSIMNGIIGGLVGSTCSVGYVSPAFSLLISVIVCTLCPIVIHIMHLSIANFDDAADSFGMNAVGGIAGSILTGVMAEKGDFFLQLFGTFLISIWSLSLSLLIHYLLKKIVNDCYSQCIK

SEQ ID NO: 26127 - protein, 877 aa, Vibrio parahaemolyticus
MNEKYAALKSNVRMLGHLLGNTIRDAHGEEIFEKVETIRKLSKSAQAGNQADRESLIEEIKHLPDEQLTPVTRAFNQFLNLTNIAEQYHTISRHCEEHICEPDAINSLFSKLVQNDVSKLDTAQAVRDLNIELVLTAHPTEITRRTMINKLVKINECLSKLELSDLSSKERKKTERRLEQLIAQSWHSDVIRQQRPTPLDEAKWGFAVVENSLWEAVPDFLREMNDRLKSYLGEGLPIDARPVHFSSWMGGDRDGNPFVTHSVTREVLLLSRWKAADLYLNDINELISELSMTVSNDQVRELAGEDQHEPYRAILKQLRALLNETKDILDAKIHGQKLAVKAPLQKVEQLWDPLYACYQSLHECGMGVIADGSLLDTLRRVKAFGVHLVRLDIRQESTRHADVLSELTRYLGIGDYEQWSEQDKIAFLTNELASKRPLLPRDWEPSEPVKEVLDTCKIIALQPREAFGAYVISMARTASDVLAVHLLLQEAGCPYRMDVCPLFETLDDLNNAESVIKQLMSIDLYRGFIQNHQMVMIGYSDSAKDAGVMSAGWAQYHAMESLVKVAEDEGVELTLFHGRGGTVGRGGAPAHAALLSQPPKSLKGGLRVTEQGEMIRFKLGLPDVAVNSFNLYASAILEANLLPPPEPKQEWRDLMEVLSEVSCEAYRGVVRGEPDFVPYFRQATPELELGKLPLGSRPAKRNPNGGVESLRAIPWIFSWSQNRLVLPAWLGAGEAIQYSVDKGHQALLEEMCREWPFFSTRLGMLEMVYTKCNMEISRYYDQRLVEPQLQPLGDRLREQLQRDIKSVLNVENNENLMQSDPWGQESIRLRNIYVEPLNMLQAELLYRTRQTEEASANLEEALMVTIAGIAAGMRNTG

SEQ ID NO: 26128 - protein, 425 aa, Alkalilimnicola ehrlichei MLHE-1
MEHVIVGAGPAGVVAAERLRKLDPQADIRLLTGEPEPPYSRMAIPYYLVDQIPESGTWLRKQQDHFERQRIEVRQAMVTGLDPDQRRLSLADGQSLGFDRLLLATGSSPVIPPLPGMEREGVHTCWTLADARAILQRARQDARVVLIGAGFIGSIILEALVKRGTQLTVVEQGDRMVPRMMDAEAGDLIRRWCEQRGVSVRTSTTVTGVDDGPGDHPLAVVLDGGEQLPADLVIVSAGVRSNTAFLEGSGLEIDQGIRVDHRLCTNRAGIYAAGDVAQGPDFSTGGWSVHAVQPTSVDHGQVAASNMAGRDRRYHGSLLMNVLDTLGLISTSFGQWEGVDGGDSVALLDRERYRYLRLQFQDDLLVGANSLGLTEHVGVLRGLIEGQVRLGPWKKRLQTDPTRLMEAYLGSTQAIGRPNPRRAPA

SEQ ID NO: 26129 - protein, 332 aa, Daucus carota
ENKTVCVTGASGYIGSWLVKTLLERGYHVRATVRDPGNERKVKNLLELPNASTHLSLWKADLAEESSYDDAVQGCHGVFHVATPMELLYQDEPAENEEIESTTLNGILSIMRSCSKAKTVKRFIYTSTTATILMQRQPPVDEYTEEHWSDLDLCYEIKMYGWMYVVAKTTAERAAWKYAEENGIDMVTVHPSIVLGHFNTPHTSFSTEAATALYTKNEANMALLKKLHGSPAVHLDDVCNAHIYLFEHPLAKGRYICSSHTYNVFEIGHSLSLKYPERNIPTEFEGLDKSQRINPVSSKKLMSLGFEFAHKNKSVGDLCAETIESCREKGLL

SEQ ID NO: 26130 - protein, 428 aa, Thermoplasma acidophilum
MSEFDVIVIGAGPAGSSAAIKLAQGGMNVLLVERGDPPGTKNVSGAVLWGDELSKVVPDWERSAPIERYVTRKEVAFLTEKSKIAISYSSQELMEKKSGKIIVRGKFDQWLARKAKDAGAMLVTGITVDKLVIDGGKVIGVMQDGDVITSDAVIVAEGANPRVLINSGLRPKLSDHDVALGIKETIKLPENVINERFNVDSKGGYASEFVLGFLDDGLLSGGFLYTNRDTISLGIVTSLDRLRANGMTHSYDIMGKFEDHPFIKNLIKDGIPDEYAAHLVPEGGLASMPKLYGNGYLVAGDAAMFTFSNGMVLQGINYAITSGMLAAETILENKGKISEETLSTYVSKLRNSYVLSDLYTFNGIQNVTWSDFTQKTMPKILDSVMMSMFDERGMPKKHLMQVLTAAVRSNGMKYTDLISSGYRMMRKM

SEQ ID NO: 26131 - protein, 396 aa, Magnetococcus sp. MC-1
MAKEKFARTKPHVNIGTIGHVDHGKTTLTAAITKVMAAAGRAEFRAYDQIDGAPEERERGITISTAHVEYETEARHYAHVDCPGHADYVKNMITGAAQMDGGILVVSAADGPMPQTREHILLARQVGVPALVVFLNKVDQVDDEELLELVEMEVRELLSSYDFPGDDIPVIKGSALKALEGEESEMGVDAINRLMDAVDAYIPEPERPLDQAFLMPIEDVFTISGRGTVVTGRIERGIVKVGEQVAIIGIKDTVVTTCTGVEMFRKLLDQGQAGDNVGVLLRGTKREDVQRGQVLAAPNSIKPHTKFNAESYILTKEEGGRHTPFFSNYRPQFYFRTTDVTGVLKLPEGVEMVMPGDNITMEVELIAPIAMEKGLRFAIREGGRTVGAGVVAEVID

SEQ ID NO: 26132 - protein, 415 aa, Ashbya gossypii ATCC 10895
MQFYQMYAYRLNESRKRVLANCQRKWDDGFRIQGKPVVQKAKVLDIQAGEPCWCVGTIYCEMKYKPNVLEEVVNDTYGTKAPVKSYTDPEGTDEIMLEDESGRVLLVGDIITSTPFVTGTVVGVLGMEAEAGTFQVVDICYPQAIPQAPLVRAPGKSVALISGICAASNDPKLSLKLRLLQDLLSGDIGDTGSIASVARLIICGDSVGTCESNSIGGALDELGSFMANTLTSLPITILPGANDPSERSLPQQPLHKALFKQALKPYFAEVNSEVFESVTNPYWFDLEGIQVLVSSGQNVDDMCKYVIPYLGTEQLRDTIEHRLDLIEASLKWQNIAPTAPDTLWCYPYKDNDPFIMNEWPHVYIIGNQHAYGYRKVLLENEVEVVLITLPKFSSSGQFVILDLDTLNAEVITIDA

SEQ ID NO: 26133 - protein, 919 aa, Corynebacterium crenatum
MTDFLRDDIRFLGRILGEVIAEQEGQEVYELVEQARLTSFDIAKGNAEMDSLVQVFDGITPAKATPIARAFSHFALLANLAEDLHDEELREQALDAGDTPPDSTLDATWLKLNEGNVGAEAVADVLRNAEVAPVLTAHPTETRRRTVFDAQKWITTHMRERHALQSAEPTARTQSKLDEIEKNIRRRITILWQTALIRVARPRIEDEIEVGLRYYKLSLLEEIPRINRDVAVELRERFGEDVPLKPVVKPGSWIGGDHDGNPYVTAGTVEYSTRRAAETVLKYYARQLHSLEHELSLSDRMNEVTPQLLELADAGHNDVPSRVDEPYRRAVHGVRGRILATTAELIGEDAVEGVWFKVFTPYASPEEFLNDALTIDHSLRESNDVLIADDRLSVLISAIESFGFNLYSLDLRQNSESYEDVLTELFERAQVTANYRELSEEEKLEVLLKELRSPRPLIPHGSDEYSEVTDRELGIFRTASEAVKKFGPRMVPHCIISMASSVTDVLEPMVLLKEFGLIAANGDNPRGTVDVIPLFETIEDLRAGAGILGELWKIDLYRNYLLQRDNVQEVMLGYSDSNKDGGYFSANWALYDAELQLVELCRSAGVKLRLFHGRGGTVGRGGGPSYDAILAQPKGAVQGSVRITEQGEIISAKYGNPETARRNLEALVSATLEASLLDVSELTDHQRAYDIMSEISELSLKKYTSLVHEDQGFIDYFTQSTPLQEIGSLNIGSRPSSRKQTSSVEDLRAIPWVLSWSQSRVMLPGWFGVGTALEQWIGEGEQATQRIAELQTLNESWPFFTSVLDNMAQVMSKAELRLAKLYADLIPDREVAERVYSVIHEEYFLTKKMFCVITGSDDLLDDNPLLARSVQRRYPYLLPLNVIQVEMMRRYRKGDQSEQVSRNIQLTMNGLSTALRNSG

SEQ ID NO: 26134 - protein, 554 aa, Haemophilus influenzae R2866
MKGNTMKNINPTHTQAWKFLEAHKAELSNTTIQDLFKQEKNRFDDYSLTFNNQILVDFSKNNINQTTLSLLRQLAQECSLDSAKEAMFTGEKINRTENRAVLHTALRNRANTPVLVDGKDVMPEVNAVLAKMKDFCQRIISGEWKGYTGKAITDVVNIGIGGSDLGPYMVTEALRPYKNHLNMHFVSNVDGTHIAETLKKVNPETTLFLVASKTFTTQETMTNAQSARDWLLKAAKDESAVAKHFAALSTNAKDVEKFGIDTNNMFEFWDWVGGRYSLWSAIGLSIALSIGFENFEALLNGAHEMDKHFRSTPIEKNIPTTLALVGLWNTNFLGAQTEAILPYDQYLHRFAAYFQQGNMESNGKYVDRDGNVINNYQTGPIIWGEPGTNGQHAFYQLIHQGTTLIPCDFIAPAQSHNPLADHHNKLLSNFFAQTEALAFGKTKEEVEAEFVKAGKSLDDVKNIVPFKVFTGNKPTNSILVQKITPFTLGALIAMYEHKIFVQGVIFNIFSFDQWGVELGKQLANRILPELTDSEKVASHDSSTNGLINQFKAWR

SEQ ID NO: 26135 - protein, 367 aa, Vibrio angustum S14
MALSSAKEIIDDIRQGKMVILMDDEDRENEGDLIIASEKITPEAINFMATYGRGLICLTLSKARCQKLNLPLMVQENTEQFGTPFTVSIEAAEGVTTGISAADRSRTVQAAVAANATAADIVMPGHIFPLMAQEGGVLTRAGHTEAGCDVARLAGLEPSSVIVEILNEDGTMARRPQLEVFAEKHGLKLGTIADLIEYRNNHETTIERVAECRLPTEFGEFDMITYRDKIDNEVHYALRKGGIKAGEETLVRVHLQDTFKDILQSGATQWTLPAAMKRISEESGVLVILSKQESTDAIIHKVKNIAAEEAGQPKVKVTQKDPSRQVGVGSQILSDLGVSKMRLLSSSTQRYHSLSGFGLEVVEYICD

SEQ ID NO: 26136 - protein, 584 aa, Fusobacterium nucleatum subsp. vincentii ATCC 49256
MEINKRIEEARKVMGKYKVDAYIITSSDYHQSEYIDDYFKGREYLSGFTGSAGVLVIFKDEACLWTDGRYHIQAEKQLKGSEIKLFKQGNLGVPTYKEYVVSKLAENSKIGIDAKILLSSDINEILSKKKYKIVDFDLLDKVWNERKALPNGKIFILEDKYTGKSYKEKVKEIRKVLKEKGANYNIISSLDDIAWIYNFRGCDIIHNPVALSFTIISEKKSTLYINEKKLDKKAQKYFKDNKIEIKEYFEFFKDIKNLKGSILVDFNKISYAIYEAISKNTLINSMNPSTYLKAHKNRTEIANTKEIHIQDGVTIVKFMYWLKNNYKKENITEFSAEQKINSLRKEIEGYLDLSFHTISAFGKNAAMMHYSAPEKKSAKIEDGVYLLDSGGTYLKGTTDITRTFFLGKVGKQEKIDNTLVLKGMLALSRAKFLFGATGTNLDILARQFLWNVGIDYKCGTGHGVGHILNVHEGPHGIRFQYNPQRLEVGMIVTNEPGAYIEGSHGIRIENELLVKEFCETEHGKFLNFETITYAPIDLDGIVKTLLTKEEKQQLNEYHSEVYKKLSPYLNKKEKEFLKEYTKNI

SEQ ID NO: 26137 - protein, 316 aa, Prochlorococcus marinus subsp. pastoris str. CCMP1986
MTKFKLKIASRRSKLAMVQTLWVKEQLEKNIPDLEVSIEAMATQGDKILDVALAKIGDKGLFTKELEAQMLVGHADIAVHSLKDLPTNLPDGLTLGCITKREDPSDALVVNKKNKIYQLESLPPGSIVGTSSLRRLAQLRYKFPHLDFKDIRGNVITRIEKLDSGEFDCIILAAAGLKRLGFESRVHQIIPNEISLHAVGQGALGIECKSDDKEVLKIISVLEDKVSSQRCLAERSFLRELEGGCQVPIGVNSSIQNDEIALIGMVASIDGKRLIKNESIGNIKYPEEVGKKLAEKLKLQGADKILSEIFEQFRDK

SEQ ID NO: 26138 - protein, 133 aa, Prochlorococcus marinus subsp. marinus str. CCMP1375
MQLLHTMLRVKDLEESICFYTQILGMRLLRQKDYPSGRFTLAFVGYGAESEHSVLELTHNWDKNNYQLGDGFGHIAIGVKNIYKTCMNIRNNGGRVTREPGPMKHGQTIIAFIEDPNGYKIELIDISSREIKD

SEQ ID NO: 26139 - protein, 408 aa, Arabidopsis thaliana
MATANPGRGGGRRGGGAMDDDKLVFETTDGIEPITSFNDMGIKEDVLRGVYEYGFEKPSAIQQRAVMPILQGRDVIAQAQSGTGKTSMIALSVCQVVDTSSREVQALILSPTRELATQTEKTIQAIGLHANIQAHACIGGNSVGEDIRKLEHGVHVVSGTPGRVCDMIKRRSLRTRAIKLLILDESDEMLSRGFKDQIYDVYRYLPPDLQVCLVSATLPHEILEMTSKFMTEPVKILVKRDELTLEGIKQFFVAVEKEEWKFDTLCDLYDTLTITQAVIFCNTKRKVDYLSEKMRSHNFTVSSMHGDMPQKERDAIMNEFRSGDSRVLITTDVWARGIDVQQVSLVINYDLPNNRELYIHRIGRSGRFGRKGVAINFVKSDDIKILRDIEQYYSTQIDEMPMNVADLI

SEQ ID NO: 26140 - protein, 160 aa, Pseudomonas fluorescens PfO-1
MSAFHDLKLTALDGQELPLAPFKGQVVLVVNVASKCGLTPQYAALENLYQQYKGKGFSVLGLPCNQFAGQEPGSEQEIQEFCSLNYGVSFPLSKKLEVNGHDRHQLYRLLAGEGAEFPGDITWNFEKFLLGKDGRVLARFSPRTAPDDPSVITAIEKALS

SEQ ID NO: 26141 - protein, 617 aa, Oryza sativa (japonica cultivar-group)
MDSDYGVPRELSALQKARALYRPDLPPCLQGTTVKVEYGDAAIAADVAGAHVISHAFPHTYGQPLAHFLRKTAAVPDATVITEHPVVRVGVVFSGRQSPGGHNVIWGLHDAIKAHNANSKLIGFLGGTDGLFAQKTLEISDEVLSSYKNQGGYDLLGRTRDQIRTTEQVNAAMTACQALKLDALVIIGGVTSNTDAAQLAETFAESKCSTKVVGVPVTLNGDLKNQFVETTVGFDTICKVNSQLISNVCTDALSAEKYYYFVRLMGRKASHVALECALQSHPNMVILGEEVAASKLTIFDITKQICDAVQARAEKDKNHGVVLIPEGLVESIPELYALLQEIHGLHDKGVSVENISSHLSPWASALFEFLPPFIRKQLLLHPESDDSAQLSQIETEKLLAQLVEAEMNKRLKEGTYKGKKFNAICHFFGYQARGALPSKFDCDYAYVLGHVCYHILAAGLNGYMATVTNLRSPVNKWKCGAAPITSMMTVKRWSRGPAASQIGKPAVHMASIDLKGKPYELLRQNSSSFLMEDIYRNPGPLQFEGPGGETKPISLCVEDRDYMGRIKQLQEYLEKVKSIVKPGCSQDVLKAALSAMASVTEMLTIMSSPSFSGQATI

SEQ ID NO: 26142 - protein, 144 aa, Cryptococcus neoformans var. neoformans B-3501A
MALKRINKELIDLGRDPPSSCSAGPINDNLFQWQATIMGPADSPYSGGVFFLSLTFPTDYPFKPPKVQFTTKIYHPNINANGSICLDILRDQWSPALTISKVLLSICSMLTDPNPDDPLVPEIANTYKTDRARYEATAREWTRK

SEQ ID NO: 26143 - protein, 123 aa, Gloeobacter violaceus PCC 7421
MTVFVGNLPFSVTEQDITEAFSEYGTVKSVKIPTDRETGRPRGFAFVEMADEEEAKVIESLDGATWDNRQIRVNKAEPRPERSGGGGGGGGYRGGGAGGGGGGGGGGYRGGGAGGGGGQRPRY

SEQ ID NO: 26144 - protein, 318 aa, Prochlorococcus marinus subsp. marinus str. CCMP1375
METIEADVVIVGGGPAGCSCALYSSRADLKTVILDKNPAVGALAITHQIANYPGVPTDISGEDLLNLMRDQCIQYGTDYRRAQVFGVDVNGDWKTVYTPEGTFKGRALVLASGAMGRPASFKGEAEFLGRGVSYCATCDGAFYKGREVAVVGVNKEAIEEAQVLTKFASIVHWITSSDPKQEDVHAQTLINEPNVRHWSRTRLLQIEGADAGVTGITVKNRIQEDKQLLPVEGVFVYMAGSKPITDFLGDQIALKEDGGVVVDDFMSTTSEGVWAIGDIRNTPFKQAVVAASDGCIAAMAIDRFLNSRKSIRVDWVHS

SEQ ID NO: 26145 - protein, 145 aa, Oryza sativa (japonica cultivar-group)
MAAPLRRSLPSLGRTLLSPSPAPARMLSAAASDALVEIKPGEIGMVSGIPEEHLRRKVVIYSPARTASQQGSGKVGRWKINFVSTQKWENPLMGWTSTGDPYANVGEAGLTFDSADSAKAFAEKHGWDYVVRKRHTPLLKHIPDT

SEQ ID NO: 26146 - protein, 320 aa, Pseudomonas fluorescens PfO-1
MSEFRHSRVIILGSGPAGYSAAVYAARANLKPLLITGMQAGGQLTTTTEVDNWPGDVHGLTGPVLMERMREHAERFETEIVFDHINAVDFASKPYSLTGDSGTYTCDALIIATGASARYLGLPSEEAFMGKGVSACATCDGFFYRNKPVAVVGGGNTAVEEALYLANIASKVTLIHRRETFRAEKILIDKLNARVAEGKIELKLNATLDEVLGDNMGVTGARLKNNDGSFDEIKVDGVFIAIGHTPNTSLFEGQLELKDGYLVVQGGREGNATATSVEGIFAAGDVADHVYRQAITSAGAGCMAALDTERYLDGLQNASF

SEQ ID NO: 26147 - protein, 936 aa, Rhodopseudomonas palustris
MSSLNLSAGPEPVSERPDDAAAIEAETRLRNDIRLLGRILGDTVREQEGQTVFDLVENIRQTSIRFHRDDDKTARAELEAILDGMSIPDTMRIVRAFSYFSHLANIAEDQNNIRQMRAGSTAGSAPRAGLLAKTLAHARQEGISAAELRKFFATALVSPVLTAHPTEVRRKSTMDREMQIASLLDQRDRVQLTADEWADNEERLRRAVETLWKTNLLRRTKLTVLDEVTNGLSFYDYTFLREVPRLHSALEDRLADAAKAEGVNSDGELASFLRMGSWIGGDRDGNPFVTAEVLHGTLKLQSTRVLRYYLDELHELGSELSLASHLAGTTDTVKALAETSPDTSPHRKYEPYRLAVSGIYARLAATALKLEVENLRAPVGEAEPYASAQDFKADLDAIHLSLTQHNSGVIARGRLRQLRRAIDCFGFHLASLDMRQNSAVHERTITELMDAARPGTSYAMLDEEARIALLISELRSTRPLTSMFVKYSDETVGELAVFREAAKAHATYGAAAIPQCIISMTKGVSDLLEVAVLLKEVGLIDPSGRSAINVVPLFETIEDLQACAKIMDRLLSIPEYRRLVDSRGSVQEVMLGYSDSNKDGGFVTSGWELYKAEIGLIEIFEHHGVRLRLFHGRGGSVGRGGGPSYDAIVAQPGGAVNGQIRITEQGEIITRKYSNVEVGRNNLEILAAATLEASLLQPKRVAPHRDYLEAMEQLSALAFKAYRGLVYETDGFVDYFWASTVINEISTLNIGSRPASRKKTRAIEDLRAIPWVFSWAQCRLMLPGWYGFGSAVSAWVTAHPETGIAFLQKMYQEWPFFRTLLSNMDMVLSKSSIGIASRYAELVEDVDVRERIFGRIRAEWHSSIEYLFAIMQQDRLLQSNPLLERSIRHRFPYLDPLNHVQVQLLREHRTHDPDEQVLRGVQLTINGISAGLRNSG

SEQ ID NO: 26148 - protein, 847 aa, Salmonella typhimurium LT2
MSKVRLAIIGNGMVGHRFIEDLLDKSDASLFDITVFCEEPRKAYDRVHLSSYFSHHTAEELSLVREGFYEKHGVKVLVGERAITINRQEKVIHSSAGRTVYYDKLIMATGSYPWIPPIKGSETQDCFVYRTIEDLNAIEACARRSKRGAVVGGGLLGLEAAGALKNLGVETHVIEFAPMLMAEQLDQMGGEQLRRKIESMGVRVHTSKNTQEIVQQGNEARKTMRFADGSELEVDFIVFSTGIRPRDKLATQCGLAVAQRGGIVINDTCQTSDPDIYAIGECASWNNRVYGLVAPGYKMAQVAVDHILGSENAFEGADLSAKLKLLGVDVGGIGDAHGRTPGARSYVYLDESKEVYKRLIVSEDNKTLLGAVLVGDTSDYGNLLQLVLNAIELPENPDSLILPSHAGSGKPAIGVDKLPDSAQICSCFDVTKGDLIAAINKGCHTVAALKAETKAGTGCGGCIPLVTQVLNAELAKQGIEVNNNLCEHFAYSRQELFHLIRVEGIKTFEELLAKHGKGYGCEVCKPTVGSLLASCWNEYILKPQHTPLQDTNDNFLANIQKDGTYSVIPRSAGGEITPEGLVAVGRIAREFNLYTKITGSQRIGLFGAQKDDLPEIWRQLIEAGFETGHAYAKALRMAKTCVGSTWCRYGVGDSVGFGVELENRYKGIRTPHKMKFGVSGCTRECAEAQGKDVGIIATEKGWNLYVCGNGGMKPRHADLLAADLDRDTLIKYLDRFMMFYIRTADKLTRTAPWLDNLEGGIEYLKSVIIDDKLGLNEHLEEEMARLRAAVVCEWTETVNTPSAQVRFKHFINSDKRDPNVQVVPEREQHRPATPYERIPVTLVEENA

SEQ ID NO: 26149 - protein, 595 aa, Vibrio angustum S14
MQAVIAQRIEQIRQWLEAQQLDALLIPHEDEYLGEYIPDHNERLHWLTGFTGSAGAAVITRDRAAMFVDGRYVVQVRKQVPGDVFEYCHLIEQPPIHWALESLAAGSKVAIDNRLHSAAWLKNATTTLDGELELVPVNENPIDELWLDRPAPKLSDAELMGLEYVGQSSEEKREQIAALLKKQKANAAFLSQLDSIAWLLNVRGDDVHCLPVLLSAAVIHSDASVDFYIDHHRLPEGFATHVGNGVNIREPEQLAAGLAALSGKRVQFDSANSNAWAAQQLTEAGAQLIEAANPTLLPKAAKNATEIAGMKACHIRDGVAISKFLAWVDNQVASGNLLDEAALSDQLWQFRQQDPSCRDVSFDTISASAGNAAMCHYNHIDQPQPGKLQMDTVYLVDSGGQYPDGTTDITRTIAIGNPGDEVKQAFTLVLKGHISLASARFPKGTTGSQLDALARQHLWAYGFDYDHGTGHGVGHFLSVHEGPQRISKVANPTALLPGMVLSNEPGYYRADAFGIRIENLELVVDIETKGDMNVMGFESLTRAPIDKRLIDPALLTDVELAWLNNYHQTVFNVISPSLTGSDLEWLTQATSPLSR

SEQ ID NO: 26150 - protein, 366 aa, Aspergillus oryzae
MIPQMKKQHVLLTGANGFAASHILSNLLERGYAVTATVRSQEKAAAIIRSHPSWEGRVKFVIVPDFTKSQPFDEVFKSAEVPFAFVIHTASPVTLQAEDMQKLVIETAVLSVTKILGSAHRHGGMDLKRFVLLGSAVIVLNSFEDPARPGPPYTEEEWNPVRIWHRQFPAALECGDGVLGYMVSKVQAERAAWEFMKMNSPAFELTLMNPHIITGPMIHPISGMSSINATNYFVIAKFIDSVHKDELKDMRFPFYHFVDVRDVARSHVDALTNPAAAGRRVYLISELTTPQLVLNIIRKHFPSLRERVPEGNPAQTLPDGVHPTGWDTRISQDILAKGAVDGQWGYISLEKSVLDTVQFMIDNNLI

SEQ ID NO: 26151 - protein, 306 aa, Xanthomonas oryzae pv. oryzae KACC10331
MGIVAWRRRYRCGKANDDSADMAHGHCSLSETIWVRRQQRSCRQPQRPRHARRCARAAHSQCAFWAVAPGAVRVCATENGQHAAHDARRAHRSGNQETAGLRTAHIRAPPLPGCLRGASQVARTPPRPATMPALPRETAPMTWTTPDLCDRYPEVTIAEPPFRHFGGRTVFCGPMVTVRCFEDNSRMRELAATPGDARVLVVDGQGSLKHALLGDQIAANAVANGWAGVLIHGGVRDVEMLASLPLGVLALAACPRRTERRDLGDVDVPVSFAGVPFVPGHWLYADANGVLVSPQPLSLDGASGSI

SEQ ID NO: 26152 - protein, 197 aa, Methanosarcina mazei Go1
MVLGSKLLDNVKMHLCTCSAGLRPTPDMEAFLKMPMRELYVSLPIHMDDGSIKVFKGFRVQYNEALGPAKGGIRFHPDETMETIRALAALMTWKCALHRLPLGGAKGGIVCSPKELSHRELERLSRAYIRAVYQIIGPDRDIPAPDMYTNPQIMAWMMDEYSKLAGKMSSAQLQANPQVWEVLLAGLMQRLKVACMR

SEQ ID NO: 26153 - protein, 585 aa, Ustilago maydis 521
MSLSQHIDPEELIEQAADHPILGLLEHPAGKHARAYHSGAHAGRYVTEPIPKYKIPQKGTDAEATYELLSSELSLDGKPTLNLASFVHTWMPKEATKLMSETMMVNLCDQDEYPATMSFHNRAVSMLADLWKAPTEKDENGKRKPAMGVATTGSSEAIMLACLAAKKRWQHRMKAQGKSFKEPGPNMVFGSNAQVAIEKFARYFDVEERLVPVSHESRYCLDINKAIEMVDENTICVVVILGSTYTGHYEDVEGMSKLLDEYESKTGISIPIHVDGASGAMVAPFATPELKWSFEIARVASINTSGHKFGMVYPGLGWVLFRDNEQVPKELIFELHYLGSVEYSFGLNFSRPAHPVIGQLFNFINLGFEGYRRVMQSDLQNARLLSRALENSGLYQVLSEIHKPVSSPSAATGAAALIQQAGSKLTSSTQSHEQLNQHSAEMYRPGLPVVSFRWSEDFRKRNPNLEQRWMQTLLRAKGWIVPNYNLSPDLEHIDILRVVVRENLSETMIEQLVYDIITITQSLEKQANDGGFRHLAELTSSKHDDSTAAKDAEKSTGHHNAAHDKHRGGLPKDSGVQAKGYAKQC

SEQ ID NO: 26154 - protein, 324 aa, Haloferax volcanii
MTEEIVVIPGDGIGAEVIPAAVDVLKAVGDFEFVEADAGDHVKEETGEALPQETYDLAAEADATLFGAAGETAADVILPLRTAVDSFVNVRPAKAYPGVDALRPETDLVFLRENTEGVYSGHEDRLSEDLSTLTRVVTTSASERLAEYACDYVGGEGGSFQVAHKANVMRETDGRFRDAAVAVADERGVETEEVLMDAFATRVCLDPTQFDTIVCPNLAGDVLSDLAAGLVGGLGLLPSANIGPDAALFEPVHGSAPDIAGEGIANPAATILSAAMLLDYLDHEAEADRVRSAVEGVLADGPRTPDLGGDASTEDVTAAILDRL

SEQ ID NO: 26155 - protein, 556 aa, Oryza sativa (indica cultivar-group)
MRRRPFLDQRRPSSFKRRWQQRPWWFRLAVILLLALACLFLLLALRGSPDPDPVVLPSTDSSRSAATTSPLLHQRSYLDGVTDAFNMTDEMLSAHSFSRQLMDQISLAKTYLVVAKEANNLQFAAELSSQIRRAQSILAHAAAHGGTVTEQDAEKAIRDMSVLFFQAQQFRYDSAVTIMKLKGQIQSLEEKSKAEAEKSTKYGQIAAEELPKGLYCLGVRLTMEWFKTTELQRKFTERSPAVQSNLRDNSLYHYCVFSDNILAVSVVVNSTTLNSMHPEKIVFHLVTDEVNYAPMRAWFALNDYRGATVEIQKVEDFTWLNSSYVPVLKQLQDAATQNYYFSGSGNRGTPVKFRNPKYLSMLNHLRFYIPEIYPELRKVVFLDDDIVVQKDLSELFTINLNGNVMGAVETCMETFHRFHKYLNHSHPLIRAHFDPDACGWAFGMNVLDLVMWRNKNVTGIYHYWQERNADHTLWKLGSLPPGLLAFYGLVEPLDPKWHVLGLGYTTVDPATIKEGAVLHYNGNMKPWLKIGMEKYKGFWDNYVDYSHPLLQRCFTH

SEQ ID NO: 26156 - protein, 474 aa, Bacillus cereus G9241
MKKHLYINGDWKSVNTYKPLYAPYSEETLAEIAQGTEEDVKEAVTAAKNAMKEMNTLSAYDRATILEKVAQKMDERREEFAEIIAKEAAKPIRAARGEVDRTVQTYKFAAEEAKRIYGETLPLDAAPGADGRIAYTIRKPIGVIGAITPFNFPLNLVAHKVGPAIAAGNTVVLKPADQTPLSSYALVELFEEAGLPKGALNIISGPGSTVGEAIVTNDDVASITFTGSPKVGIGIKAKAGLKRVTLELGSNAAVIIDKDVELTDELIERVKWGAFVNNGQVCISVQRVFVHEERMDEFLSKLQKAMETLVVGDPLIEETDVSALISKKDVDRIDNWVQEAVKEGANVLYGGNKRDERIFEPTVLTNVPKHVSVQCQEVFGPLMTVNTFKEFDEAIEQANHSRYGLQAGVFTNNLFKAMRAIDELEVGGVMINDIPTFRVDHMPYGGVKESGTGREGIKYAIEEMTEMKLVCIKK

SEQ ID NO: 26157 - protein, 127 aa, Triticum aestivum
  misc_feature (52)..(52): Xaa can be any naturally occurring amino acid
MAVPLLTKKVVKKRSAKFIRPQSDRRITVKESWRRPKGIDSRVRRKFKGVTXMPNVGYGSDKKTRHYLPNGFKKFVVHNTSDLELLMMHNRTYCAEIAHNVSTKKRKAIVERASQLDIVVTNRLARL

SEQ ID NO: 26158 - protein, 466 aa, Moorella thermoacetica ATCC 39073
MASSILRKKDIATAMEMAAMDQYRLRRELKAMDLFFLVIGITIGGGIFVLPGVMAAEHAGPGVTISFLIGAVVAIFTGLCYVEFASMVPVAGSAYTYSYIALGEIFAWIIGWDVLLEFTLVCSAVAVGWSGYIVELLKDMGLSLPPAFTTDIAHGGIVNLPAVFILLVVAYIIYGGISLTGKVNDAIGIIKLLTVVFFIIVALPFVKPVNWQPFLPFGWQGVMTAAALGFFAYGGFDAVTTAAEETRNPNRDIPLGLILGLVVVASLYVLVSLVLTGVIPYTKLDTPAPVAFALSYLGKRWGGSLVAAGAICGLFTVMMGAMLGGSRILFALSRDGLLPPVFSRVHATRRTPYVATLIVLTVAVLTGGFLSLGELVELVNIGMLTAYLLTSISILVMRLRYPEIERPFRVPAVWLVAPVATLGVVALTFSLPGATLVRFAIWFIVGMLIYFGYGIRHSKLANRENN

SEQ ID NO: 26159 - protein, 266 aa, Rubrivivax gelatinosus PM1
MSDPTVLVAQTGSVRTLTLHRPAALNSFTTEMLGRLRGELDAAAGDAGVRCVVLTGAGRAFCAGQDLADPAVAVDPARGERKDLGAVIERWYRPLALRLRSMPVPVVAAVNGVAAGAGANLALNCDLVLAARSAVLIQAFTKIGLVPDTGGTWLLPRLAGRAKALGLALLGDKLPAAEAERLGLIWQCVDDEALRAEAQALADRLAAMPTRALAATREAIDAAQTLDFDTALQREQQLQRVQGHSNDYLEGVSAFLGKRAPRFTDR

SEQ ID NO: 26160 - protein, 339 aa, Magnetospirillum magnetotacticum MS-1
MIALLIDDNPTNLMLLKHRLIKIEGCEVVCMESAFDALAWCETNTPDIILTDYMMPGMDGLDFIRQVRQRDAMQDVPVVVVTTSDVREIRQQALDLGAADFLTKPVDGPELMARTRNLLALRKSRLALHDRAAEELVMRLSKAAEYRDPETGAHIERMARYSSLIARRMGMNPEDVERLELAAPMHDVGKVGIPDMILLKPDRLTETEFTVMKQHAMYGWEILKDSSSQLVRLAALIARTHHEKFDGSGYPEGLKGDQIPLEGRIVAVADVFDALTSTRPYKTPWPVDKAVAFLTEQKGRHFDPACIDAFLGDLTEVLRIKAQFLDHGEETPSHPLANY

SEQ ID NO: 26161 - protein, 219 aa, Gloeobacter violaceus PCC 7421
MALLVMVRHGQSIWNLENRFTGWTDVPLTEKGRAEARACGELIYCVPFAVAFTSKLTRAQDTLRLILEAADQPDVPVIEDQALNERHYGELQGLNKAETAAKYGEETVRQWRRSLEGRPPGGESLKDTALRSLRYFYEKIVPELEAGKNVLVSAHGNTIRAILMELDHLSPEQVEKVEIEYCVPVAFEHQADGTFSQVLMPRCDIIRPPQPPARSIARL

SEQ ID NO: 26162 - protein, 360 aa, Pseudomonas aeruginosa
MSKQILVLPGDGIGPEIMAEAVKVLELANDRFQLGFELAEDVIGGAAIDKHGVPLADQTLQRARQADAVLLGAVGGPKWDRIERDIRPERGLLKIRSQLGLFANLRPAILYPQLAAASSLKPEVVAGLDILIVRELTGGIYFGQPREQRVLENGERQAYDTLPYSESEIRRIARVGFDMARVRNNRLCSVDKANVLASSQLWREVVEEVAKDYPDVELSHMYVDNAAMQLVRAPKQFDVMVTDNMFGDILSDEASMLTGSIGMLPSASLDANNKGMYEPCHGSAPDIAGQGIANPLATILSVSMMLRYSFSQATAADAIEQAVSKVLDQGLRTGDIWSEGCRKVGTREMGDAVVAALKNL

SEQ ID NO: 26163 - protein, 389 aa, Arabidopsis thaliana
MTMMSDLTQDLVEEILSRVPITSLGAVRSTCKGWNALSKERILCIGEPKQQFLGFMMLDYRLCSMRFNLHGILNEDFVSISMYQVETSQVFYCAGLLLCVTREKSSRLIIWNPYLGQTRWINTKTTKTGYNTYALGCDNNKNHKILKVFCDDYQCYYEIYDVKSNSWSAFNVTDPNWHIDYDICALVNGNTYFLTKERILVEDSDEDEDEVETPEILICFDFTAERFGKFLHLPFQFDIDFGDTGGLSCVKEEKLAVLLKRYDQNVIEIWVTTKIEPNVVFWKPFLKVDIETVLGALLDFQLDSFFIDEEKKLAVVFSSNKSKCYKTAYIIGEDRYLKEVDLGECKPLRSPIVCFSSYVPSLVQINQIAVPKRRENKRKRKSKGKGREV

SEQ ID NO: 26164 - protein, 156 aa, Haemophilus influenzae
NRTNTPVLVDGKDVMPEVNAVLAKMKDFCQRIISGEWKGYTGKAITDVVNIGIGGSDLGPYMVTEALRPYKNHLNIHFVSNVDGTHIAETLKKVNPETTLFLVASKTFTTQETMTNAQSARDWLLKTAKDESAVAKHFAALSTNAKDVEKFGIDTN

SEQ ID NO: 26165 - protein, 127 aa, Saccharophagus degradans 2-40
MRLLHTMLRVGDLDASLHFYTQVLGMKLLRKQDFPTGKFTLAFVGYGEESDTAVIELTHNWETSSYELGNGYGHIALGVNDVYATCETIRAAGGKIVREAGPMMHGTTVIAFVEDPDGYKIELIGCE

SEQ ID NO: 26166 - protein, 156 aa, Halobacterium salinarum
MGISYSVDVDSEASAKAMLRERSISLKHSKAIAREISGETVADAKEYLQAVIDEERSVPFKQHNSGVGHRNDIDGWDAGRYPEKASKDFLKLLSNVSNNADQQGFDAVEMVIEHVAPHKVGESQGRKPRAMGRATTWNATLCDVEIVVTETEEVTA

SEQ ID NO: 26167 - protein, 462 aa, Xanthomonas campestris pv. vesicatoria str. 85-10
MPLPTDSVAETAAPAAPALRHALKPRQLMMMGLGTAIGAGLFLGSGVGIHAAGPAVLISYLIAGALVIIVMNALGEMAAAKPASGAFSVYAADAMGPTAGATVGWLWWFQVVVVIAAEAVGAAGLLATVWPALPVPLLALLFMATFTAINLLGVRNFGEFEFWFAILKVLAIVVFLLIGVALLAGWLPGVASPGLSNFTQNGGFAPKGLAGIGSALLVVVFAFGGTEIVAVAAAETADPGRSLARTIRTVAWRILVFYIGSISVIVAVVPWTSAALSSPFAAVLDVARIPGAATAITLVAVVALLSALNANLYGASRMIFSLAQRGEAPRLLARTSGEQVPLVAVIASVLFGFAAAALELLYPNKVLPMLLNIVGATCLLVWTISLVSQLILRARADRAGLALPFRMRGYPFLTVLALVILGVIFVLLASSADTRAQFLSMVALTAVIAAVSEVARRLRARM

SEQ ID NO: 26168 - protein, 340 aa, Oryza sativa (japonica cultivar-group)
MGANGNDVVAAAAAGESPMGAARVVAEGGATVFRGADYSLPRTTVALALWLGGIHFNVFLVLASLFLFPLRVAAMVVAFQLLFMLIPLNDKDKLGRKIARFICRYAMGYFPISLHVEDYKCFDPNRAYVFGFEPHSVLPIGVAALADLVGFMPLPKIKVLASSAVFYTPFLRQIWTWLGLIPATRKNFQSYLGAGYSCIIVPGGVQEILHMDHDSEIAFLKSRKGFVKIAMQSGCPLVPVFCFGQSYAYKWWRPKGKLFVKIARAIKFTPIVFWGRYGTPIPFPTPMHVVVGRPIEVEKNSQPTIDEINEVHEQFTVALQDLFDKYKTETGYPGLHLRVL

SEQ ID NO: 26169 - protein, 420 aa, Silicibacter sp. TM1040
MTVKQDTLPNGFRIVTEYMPGLQSAALGIWVSAGGRHERLEQNGVAHFLEHMAFKGTKRRSALQIAEAIEDVGGYINAYTSREVTAYYARILKDDVDLALDVIGDIVLNSVFDEREIEVERGVILQEIGQALDTPDDIIFDWLQEESYREQAIGRSILGPAERVRSFNKEDLTRFVAEHYGPGQMILSAAGAVDHDRLVKAATEMFGHLEPKQQDVIECARFTGGEARHDKALEQAHVALAFESPSYRADDIYAAQIYAAALGGGMSSRLFQEVREKRGLCYTIFAQAGAYEDTGMMTIYAGTSGAQVSDLLGITVDELKRSADDMSDAEVERARAQMKAGMLMGLESPSNRAERLARLVQIWDRVPSLEDTVAKIDAVTTADVRAMAARISREAPAALALYGPVAEAPRLEEIARRRAA

SEQ ID NO: 26170 - protein, 338 aa, Sclerotinia sclerotiorum
MAPTKVGINGFGRIGRIVFRNAIEHDDIDIVAVNDPFIETEYAAYMLKYDSTHGQFKGDIKVLSDGLEVNGKKVKFYTERDPANIPWAESEAYYVVESTGVFTTTEKAKAHLKGGAKKVVISAPSADAPMYVMGVNNETYNGEADVISNASCTTNCLAPLAKVINDEFTIIESLMTTIHSYTATQKTVDGPSAKDWRGGRTAAQNIIPSSTGAAKAVGKVIPELNGKLTGMSMRVPTATVSVVDLTVRIEKAASYDEIKEVIKKAANGPLKGILAYTEDDVVSTDMNGDNHSSIFDAKAGISLNKNFVKLVSWYDNEWGYSRRVLDLLHYISKVDNKQ

SEQ ID NO: 26171 - protein, 284 aa, Escherichia coli
AGKPTDKPNLVCGPVQISWHKFARYWDVELREIPMRPGQLFMDPKRMIEACDENTIGVVPNFGVTYTGNYEFPQPLHDALDKFQADTGIDIDMHIDAASGGFLAPFVAPDIVWDFRLPRVKSISASGHKFGLAPLGCGWVIWRDEEAVPQELVFNVDYLGGQIGTFAINFSRPAGQVIAQYYEFLRLGREGYTKVQNASYQVAAYLADEIAKLGPYEFICTGRPDEGIPAVCFKLKDGEDPGYTLYDLSERLRLRGWQVPAFTLGGEATDIVVMRIMCRRGFEM

SEQ ID NO: 26172 - protein, 544 aa, Listeria innocua
MAYSFKLPDIGEGIHEGEIVKWFVQPGDKIEEDESLFEVQNDKSVEEITSPVSGTIKEIKVAEGTVATVGQVLVTFDGVEGHEDDAEEESAAPKAESTESTPAPAQASGKGIFEFKLPDIGEGIHEGEIVKWFIQPGDKVEEDQSIFEVQNDKSVEEITSPVDGTVKDILVSEGTVATVGQVLVTFEGDFEGEASHESTPESPAEEAELTNNDATSAPATGGNGTPSSKKDPNGLVIAMPSVRKYAREKDVNIAEVAGSGKNNRVVKADIDAFLNGEQPAAATTTAQTEEKAAAPKAEKAAAKQPVASSDAYPETREKLTPTRRAIAKAMVNSKHTAPHVTLMDEIEVTALMAHRKRFKEVAAEKGIKLTFLPYMVKALVATLRDFPVLNTTLDDATEELVYKHYFNVGIAADTDHGLYVPVIKNADKKSVFQISDEINELAGKARDGKLTADEMRHGSATISNIGSAGGQWFTPVINYPEVAILGVGRIAQKPIVKDGEIVAAPVLALSLSFDHRVIDGATAQKAMNNIKRLLNDPELLLMEV

SEQ ID NO: 26173 - protein, 276 aa, Magnetospirillum magnetotacticum MS-1
MACNRLDFADAHREDRIPDEVVIQVLTQSREHFFARTYEAIKGAKQPIVHLYNSTSVLQREVVFRSDEDGIIAIAVDGARLCKKFEETVPETTVYYEYSPESYTGTELEFAARICNEVLEVFEPRPDRKVIINLPATVEMATPNVYADSIEWMNRHLHHRENVVLSLHPHNDRGTAVAAAELGYQAGADRIEGCLFGNGERTGNVCLVTLGMNLFSQGVDPQIDFSDIDHVRRTVEYCNQLGVPERHPYAGDLVFTAFSGSHQDAIKKGFDAMAVR

SEQ ID NO: 26174 - protein, 369 aa, Chlamydomonas incerta
QKSAFTGSAVSSKSGVRAKAARAVVDVRAEKKIRVAINGFGRIGRNFLRCWHGRQNTLLDVVAINDSGGVKQASHLLKYDSTLGTFAADVKIVDDSHISVDGKQIKIVSSRDPLQLPWKEMDIDLVIEGTGVFIDKVGAGKHIQAGAHKVLITAPAKDKDIPTFVVGVNDADYKHEYPIISNASCTTNCLAPFVKVLEQKFGIVKGTMTTTHSYTGDQRLLDASHRDLRRARAAALNIVPTTTGAAKAVALVLPSLKGKLNGIALRVPTPTVSVVDLVVQVEKKTFAEEVNAAFREAANGPMKGVLHVEDAPLVSIDFKCTDQSTSIDASLTMVMGDDMVKVVAWYDNEWGYSQRVVDLAEITAKKWVA

SEQ ID NO: 26175 - protein, 120 aa, Triticum aestivum
MARAAAANIVVVAVVAAMLLAAAHTADAAISCGQVNSALGPCLTYARGGAGPSAVCCSGVKRLAAATQTTVDRRAACNCLKMAIGRMSGFKAGNIASIPSKCGVSVPYAVGASVDCSRVS

SEQ ID NO: 26176 - protein, 165 aa, Aloe vera
SGYSLLRDPHHNKGLAFTDKERDAHYLRGLLPPVCISQELQEKKLMRSLRQYQVPLQRYMAMMDLQERNERLFYKLLIDNVEELLPVVYTPTVGEACQKYGCIFKRPQGLYISLKEKGKILEVLKNWPERSIQAIVVTDGERILGLGDLGSQGMGIPVGKLSLYT

SEQ ID NO: 26177 - protein, 536 aa, Petunia inflata
MGTCMSVQNASFLKRTRNRPVPIDQETCSKNTSRTSVPKSQKFSRPLNVVKDPSGDDINKRYEFGKELGRGEFGITYHCVDKVSGENVACKTIAKSKLRTEIDVEDVRREVVIMRHLPKHPNIVSYKEVYEDKEAVYLVMELCEGGELFDRIVARGHYTERAAARVTKTILEVVKVCHEHGVIHRDLKPENFLYANATENAQLKAIDFGLSIFFEPGQRFSEIVGSPYYMAPEVLRRNYGPEVDVWSAGVILYILLCGVPPFWAETEEGIAHAIVKGTIDFNRDPWPRVSEEAKDLVKGMLDPNPYNRLTVEEVLDHYWIQNAEKVSNICLGEGVRAKIKQFTLMNKFKKKVLRVVADNLPQDQVHGIKQMFYMMDTDKNGNLSFQELKDGLHLMGQAVADPEVQLLMDAADVDGNGMLNCEEFVTMAVHLKRLSNDDHLRKAFLHFDKNKSGYIEFEDLKDSLFDDHLGPKNDQVIHDIIFDADLDKDGRISYQDFKVMMSTGTDWKMGSRQYSKAMLNALSMRLFKDKSIQVKN

SEQ ID NO: 26178 - protein, 532 aa, Petunia inflata
MGNCCSRGQPNESNDHTESISTAKNGDGKVMQGGSVTPPKTPPPASPDPSSKPSKTSPIGPVLGRPMEDVRKTYSIGKELGRGQFGVTHLCTHKQSGEQFACKTIAKRKLVNKEDIEDVKREVQIMHHLTGQQNIVELKGAYEDKHSVHLVMELCAGGELFDRIIAKGHYTERAAATLLRTIVQIGHTCHSMGVIHRDLKPENFLLLNKDEDSPLKATDFGLSVFYKQGDVFKDIVGSAYYIAPEVLKRRYGPEVDIWSVGVMLYILLSGVPPFWAETEHGIFNAILRGHIDFSCDPWPAISHGAKDLVRKMLTIDPKQRLTAIQVLNHPWIKEDGDAPDTPLDNAVLSRLKQFRAMNNFKKVALRVIAGCLSEEEIMGLKQMFKSMDTDNSGAITLEELKTGLAKQGTKLSDYEIQQLMEAADADGNGTIDYEEFITATMHMNRMDKEEHLYTAFQYFDKDNSGYITVEELEQALREFGITDGKDIKDIVAEVDSNNDGRINYDEFVAMMKKGTPDTAANLKKRRESFDAK

SEQ ID NO: 26179 - protein, 225 aa, Salmonella typhimurium LT2
MKQYLIAPSILSADFARLGEDTAKALAAGADVVHFDVMDNHYVPNLTIGPMVLKSLRQYGITAPIDVHLMVKPVDRIVPDFAAAGASIITFHPEASEHVDRTLQLIKEHGCKAGLVFNPATPLSYLDYVMDKLDVILLMSVNPGFGGQSFIPQTLDKLREVRRRIDASGYDIRLEVDGGVKVNNIGEIAAAGADMFVAGSAIFDKPDYKKVIDEMRSELAKVTHG

SEQ ID NO: 26180 - protein, 557 aa, Cryptococcus neoformans var. neoformans JEC21
MALSQHVDADKLIEECKDHPIKRHLSHKAALYDIPYTSRYEVEDEVPRYRLPSKGVNGRATYQLLHDELMLDGNPNMNLASFVHTWVPDECNRLVQENINKNLVDQDEYPAAQQIHERCISMLSHLWHAPKEATAMGTATTGSSEAIMLGGLALKRRWQEKMKAAGKDIHNPGPNIVMGAEAQVALEKFARYFEVEARLVPIKPESSYVMDPKDVLKYVDENTIGVFVILGSTYTGAFESVKDVAQELDKYEAETGISVPIHVDAASGGFVAPFAYPHYQWDFQIPRVHSINASGHKYGMSTVGVGWIIWRSMEYLPKELIFELHYLGATDYSFNLNFSRPAHPILAQMFTFLNLGFEGYKRIMDKNLTVARLISRALEHSGYFICLSKIHHPKALTESSSSAEQSNILPAVADAANTVLHGKKTTVDDAEYYCEGLPVVSFMFTDEIKKKYPGVKQAWIQMQLRSIGWIVPNYPLAPDCEKTEILRVVVRESLSGDLARKLIHDILQVTEDLLNDAGPSYSMSTATRRHENLDHGKLDNIDAVHIKQHTSTYSKPC

SEQ ID NO: 26181 - protein, 417 aa, Microscilla sp. PRE1
MSQLDKTCVIIGASHAGVNCAFALRKEGWQGGIVLYDADPSLPYHRPPLSKAYLTSDAGIEKYLLKSAESYEKDNITLRLGIQVSAIDRTHKILTLNDGNTRSYDKLVIATGARPIIPPTKGIKTAKNLYPLRNAADVQNIRQALESNENKRVVIVGAGYIGLEIAASLKNRGAQVTVLEREDRVLARVTAPEMSAYFQQLHVSQGVEIVTNKNVVSIAPRNGFNTITCSDGTQYDADVIVMGVGIRVNLELAEDAGLNISNGICVNAAGQTNDEDIYAIGDCTLHYNPHYNRHIRLESVQNAVDQAKVTAAAICGKEVAYNAIPWFWSDQYDVKLQIVGLSSGYNELLIRREDDGRKFSSWYFKDDELLAVDAINNAKAYVIATKFIKERRKVDKIKLTDASVALSPLNLSAESHD

SEQ ID NO: 26182 - protein, 460 aa, Desulfitobacterium hafniense DCB-2
MLTVEKIGGTSMSQFEDVLKNIIGEPDSQRFSFGRVFVVSAYAGVTNKLLEDKKTKAPGIYRHFVNGEDCEEALNVLLQDLLKVNERFVNIGLDYEAAKEFLGSRIQQTKSYLHSMHEIIASGYVDRENIFSAARELLASLGEAHSAFNSVNIMQNRGIPARLVDLTGLRDSSQLTIDERIAKAFRGVDPFKEIVIVTGYTKGKEGIMRQFERGYSEITFSRIATHLHADEAIIHKEFHLSSADPKIVGVEKAIPVGRTNYDVADQLADIGMEAIHPNASKPLEMAGINLRLKNTFEPDHPGTLISKDYIGPEAKIEIIAGSDKVVVVEIHDSLMVGEAGYDKQIMEMFMNYSVSYIMKATNANSISLVIWEHDLNEELMAELKGAYQTVTILPAAIVCVIGSNIAVPNILARATSSLAKNHINVNCVSQSLRQVNMQFVIDRDKYTSAIYHLNEDLCVG

SEQ ID NO: 26183 - protein, 248 aa, Borrelia burgdorferi
MYKLVLVRHGESEWNKENLFTGWTDVKLSDKGIDEAVEAGLLLKQEGYSFDIAFSSLLSRANDTLNIILRELGQSYISVKKTWRLNERHYGALQGLNKSETAAKYGEDKVLIWRRSYDVPPMSLDESDDRHPIKDPRYKHIPKRELPSTECLKDTVARVIPYWTDEIAKEVLEGKKVIVAAHGNSLRALVKYFDNLSEEDVLKLNIPTGIPLVYELDKDLNPIKHYYLGDESKIKKAMESVASQGKLK

SEQ ID NO: 26184 - protein, 538 aa, marine gamma proteobacterium HTCC2207
MLTNEILKAVAGYTANMQKAVTFVLQTGEHSKRAELVAFLTDISKQSEHIQLEERDMDGLLRSPISFLMQADGVDTGIRFSGIPSGHEFNSLILAILHASGTPLKLDDSVKNIIAGVEENLHFEVFISLSCHNCPDVVQSLNQFALLNPNISTEMIDGGHYQALIKERDIQGVPSVYLNGELFANGKVDTAQLIDKLIQRAPSAAQDSSDQPALPLQDVTIIGGGPAGASAAIYSARKGLKVTLIADRIGGQLKDTMGIENFISVSKTTGPELSGALQSHMNEYEITFKEYLKVTKVEGGDIKSVTLSSGEKIFTKTVIIATGANWRELGVPGEKENVGNGVAYCPHCDGPFFKGKDVAVIGGGNSGIEAALDLAGMVKSVNVFEFMPDLKADQILIDKAVAKPNITIHKNVATKEISATNGKVSAIEYIDRATDTEHSLKLDGIFVQIGLIPNSGFLGDLVEKTRFGEIVINEKCQTSEAGIYACGDVTTVPYKQIIISMGEGSKASLSSFEYLLAEGDRLEEQFYSESADAIAIAS

SEQ ID NO: 26185 - protein, 439 aa, Bacillus anthracis str. 'Ames Ancestor'
MAVENITMPQLGESVTEGTISKWLVNVGDHVNKYDPLAEVMTDKVNAEVPSSFTGIVKELIAGEGDTLAVGEVVCVIQVEGADEVAATAVEEKTKEEPKAEVNTPEKAPKAKQPTDGKPRFSPAVLKLAGEHNVDLDLVEGTGANGRITRKDILKLVESGNIPQAGAVKKEEAVAAVVEARPEAPKAAPVAQKVEAAKPVSVPTMPGDIEIPVTGVRKAIAANMLRSKHEAPHAWMMIEVDVTNLVSYRNSIKGDFKKREGFNLTFFAFFVKAVAQALKEYPQINSMWAGDKIVQKKDINLSIAVATEDELFVPVIKHADEKTIKGIAREITELAGKVRTKSLKADEMQGGTFTINNTGSFGSVQSMGIINYPQAAILQVESIVKRPVIMENGMFGARDMVNLCLSLDHRVLDGLICGKFLGRVKEILENTSENNTSVY

SEQ ID NO: 26186 - protein, 991 aa, Candida glabrata CBS 138
MLHQDNCYGVAFRAIATADEELFKQTVRFYHSLGFSTIKDFNKFKHGENVVLASGTSDDSLREVWLESFKLSETDSLGFRVPQQEASNKAQSQGAFVKVRLVMHEPLKDVYSTAQTSHITYFSADLPAIAKEFGDKVTKVSDSVLQMNDPMGNQLSFTSFASPLDEKPTNMDAFLKPLEKEDDITASQSTDAVNQLKESLQSGSNLQKKKKIAVMTSGGDSPGMNAAVRAVVRTGIHYGCDVFAVYEGYEGLLRGGKYLKKMHWEDVRGWLSEGGTLIGTARSMEFKKREGRKRAAGNLISQGIDALVVCGGDGSLTGADLFRSEWPSLVEELVKDGTFTSEQVAPYRNLTIVGLVGSIDNDMAGTDSTIGAFSALERICEMVDYIDATAKSHSRAFVVEVMGRHCGWLALMAGIATGADYIFIPERAVPHGQWQDELKEVCQRHRNKGRRNNTIIVAEGALDDQLNPVTAEDVKDVLVDLGLDTKVTILGHVQRGGTAVAHDRWLATLQGVDAVKAVLEMTPETPSPLIGILENKIIRMPLVESVKLTKSVATAIENKDFDKAISMRDTEFIELYENFLSTTVKDDGSEMLPVTERLNIGIVHVGAPSAALNAATRAATLYCLSHGHKPYAIMNGFSGLIQTGEVQELSWIDVENWHNMGGSEIGTNRSVAAEDMGTIAYYFQKNKLDGLIILGGFEGFKSLKQLRDSREQYPIFNIPMVLLPCTISNNVPGTEYSLGVDTCLNALVNYTDDIKQSASATRRRVFVVEVQGGHSGYIASFTGLVTGAVSVYTPEDPISLKSIREDLSLLKENFRHDKGENRNGKLLVRNEQASSIYSTELIADIISESSKGRFGVRTAMPGHAQQGGAPSSKDRVIASRYAVKCIKFIEQWNKKNKATALDKDAKVLRFKFDKHGAKIPTVEHEDDSAAIICVNGSHISFKPIASLWENETNIELRKGHEVHWTEFNEISNILSGRLRLRAEVEASNNRV

SEQ ID NO: 26187 - protein, 294 aa, Lycopersicon esculentum
MTYMFKYDSVHEQWKHHELKVKDEKTLLFGEKAVTVFGIRNPEDIPWGEAGADFVVESTGVFTDKDKAAAHLKGGAKKVVISAPSKDAPMFVVGVNENEYKPELDIVSNASCTTNCLAPLAKVINDRFGIVEGLMTTVHAMTATQKTVDGPSMKDWRGGRAASFNIIPSSTGAAKAVGKVLPQLNGKLTGMAFRVPTADVSVVDLTVRLEKEASYEDIKAAIKEESEGKLKGILGYTEDDVVSTDFVGDSRSSIFDAKAGIALSKNFVKVVSWYDNEWGYSSRVIDLVCHMAKA

SEQ ID NO: 26188 - protein, 463 aa, Moorella thermoacetica ATCC 39073
MTLLFRRKSISEATELAELKEYKLRRDLNLLELFFLVIGATIGAGIFVLPGVAAAKYSGPAVSISFFLGGLVCICVGLCYVEFASMVPVAGSAYTYAYLALGEIFAWIVGWDLLFEFTAGTSTVSVGWSGYFVEFLRGFGIHLPKMITTDIAHGGFINAPAIIAILLVTYIVYSGIREAGKINAYLSLGKLCALALFLVLAIPFIKPVNWHPFLPFGWKGVMTGAALTFFAFTGFDGVTTVTEETKNPQRDVPIALVSGLGFITILYIVVSAVLTGVVPYTKLDVPDPAAFALVSIGKSWGGGIIAIAAIFGLFTVMMGNGLSATRILFAMSRDGLLPPIFARVHKTRRTPYIATLIIFSVALIGGGFLSIGELAELANIGGLTAFTLTAISTLVMRYSQPAARRPFKVPAIWVVAPLGTVGGIALISSLPPITFIRFGIWMVIGLVIYFSYGRKYSKADIGG

SEQ ID NO: 26189 - protein, 311 aa, Chlamydophila abortus S26/3
MTYAKVIIIGSGPAGYTAAIYASRALLSPILFEGFFSGVAGGQLMTTTEVENFPGFPEGILGPKLMENMKSQSSRFGTQILPKDVTSVDFTIRPFVVMSNEEKYTCDACIIATGASAKRLEIPGAADNEFWQKGVTACAVCDGASPIFKNKDLYVIGGGDSALEEAIFLTRYGKRVFVVHRRDTLRASKAMIKKAESNEKISFLWNSSIVKISGDTFVRSVDILNNVSKEVSTRDAGGVFFAIGHRPNTDFLGGQLALDEHGYIITEPGTCRTSIPGVFAAGDVQDKHYRQAIIAAGSGCMAALEAERFLN

SEQ ID NO: 26190 - protein, 125 aa, Triticum aestivum
  misc_feature (60)..(60): Xaa can be any naturally occurring amino acid
MASTLTNVGLSTPAAAASSLVRPVAGAGRVVFPRVGRGGFAAVRASGPATPPDISDKMSXESIDKAKEACAEDTASGKCAAAWDEVEELSAAASHARDKLKETSDPLEAYCKDNPETDECRTYDN

SEQ ID NO: 26191 - protein, 388 aa, Glycine max
MAMASAKLNTLSSQWIAHNSFSPRRGSSSRRVSLPIRASSYQHELVQTAKSIASPGRGILAIDESNATCGKRLASIGLDNTEVNRQAYRQLLLTTPGLGEYISGAILFEETLYQSTTDGNKFVDCLRDQNIVPGIKVDKGLVPLPGSNNESWCQGLDGLASRSAEYYKQGARFAKWRTVVSIPCGPSALAVKEAAWGLARYAAISQDNGLVPIVEPEILLDGDHPIERTLEVAEKVWSEVFFYLAENNVLFEGILLKPSMVTPGAEHKEKASPETIAKYTLTMLRRRVPPAVPGIMFLSGGQSEVEATLNLNAMNQSPNPWHVSFSYARALQNTVLKTWQGHPENVEAAQKSLLVRAKANSLAQLGRYSAEGESEEAKKGMFVKGYTY

SEQ ID NO: 26192 - protein, 463 aa, Arabidopsis thaliana
MRSDHYFSLRSPTEDFVGGYPSDEEWHGYINNNDRVLLKVISYSSPTSAGAECLDHDCSWVEQWIHRAGPREKIYFRPEEVKAAIITCGGLCPGLNDVIRHIVITLEIYGVKNIVGIPFGYRGFSDKDLTEMPLSRKVVQNIHLSGGSLLGVSRGGPSVSEIVDSMEERGINMLFVLGGNGTHAGANAIHNECRKRKIKVAVVGVPKTIDNDILHMDKTFGFDTAVEEAQRAINSAYIEAHSAYHGIGVVKLMGRNSGFIAMQASLASGQVDICLIPEVLLCYYFKFQNMIDELALRDPMHLKVPFNLHGPNGVLKHLKYLIETKGSAVICVAEGAGQNFLEKTNAKDASGNAVLGDFGVYIQQETKKYFKEISTPIDVKYIDPTYMIRAVRANASDGILCTVLGQNAVHGAFAGYSGITVGIINTHYAYLPITEVIAYPKSVDPNSRMWHRCLTSTGQPDFI

SEQ ID NO: 26193 - protein, 233 aa, Psychrobacter arcticus 273-4
MHHSIHDEAHLSNRNHWLRAAVLGANDGLISTASLLVGVAAASISSQTLLLTGMAALTAGALSMAAGEYISVSSQADTEKADLDKELHELTHNAEHELNELTKIYETRGLDHVLAHQVAVALTQHDALEAHARDEIGLTDLSQAKPIHASVASGLSFIAGAILPIIGILLLPVQSLVWSLSSLTIVGLALLGIISARLGGAPVIPATARVVIWGVLAMVATSLIGRLFGVAAL

SEQ ID NO: 26194 - protein, 290 aa, Gloeobacter violaceus PCC 7421
MSAAILDGKALAARIQAELTCEVQSLQERFGRPPGLSVLWVGDNPASAAYVRNKNKSGQAVGIDVAKSQHLKASLSETQLLALIDRLNADVTVDGILVQLPLPEHIDSGRVLNRIAPEKDVDGLHPVNLGRLVRGEPGLRSCTPAGVMRILSEAGVPLAGKTAVVIGRSILVGKPVALMLLEKDATVITTHSRTADLAAITQMADVLVVAAGRPELVTAAMVRPGAVVIDVGINRVTDYEGNSRLVGDVDFDSVRDVAAAITPVPRGVGPMTVTMLLANTVQSYKQRLIE

SEQ ID NO: 26195 - protein, 460 aa, Xanthomonas campestris pv. vesicatoria str. 85-10
MTDTPRRDDAATLQRFGYAQELKRQLTLKDLLIYGLVCMVPTAPFSIFGGVFDISAGMVPLTYLVGFVAMLFTALSYQQMSQAFPVAGSVYAYVGRGLSSGMGFLAGWAILLDYLLVPTLLYVVGANAMQTVLPAIPQPAWIGFFVVLNTVVNLRGIETTARANRFFLLAQLLVLAVFVVLATLAIQRGVNGAHWSWRPLYNPQAFSPQLIFSALSVAVVSFLGFDAISTMSEEARGGNRVVGRATLLALLIVAGLFILQTWLAALLQPTLQRYPSAQASNDAFFEIGRLIAGPWLQIVIALTVAISAAIANSLVAQAATSRLLFAMARDRQLPGFLRYIHPRTGVPQRAILLVAGLSLVLGEVFVGQIALLSSLCNVGALTAFVLLHIAVLWHFRTHGRRVLHGVVPLIGIVILAYVLLNADLHAQLGGAAWMAVGLTVLAFLKLSGRSTELRASDALE

SEQ ID NO: 26196 - protein, 433 aa, Arabidopsis thaliana
MRVIPEEGDVFSSSKSNGSSMGIELQPDLVSFGTLAAEMIPTTMDSPEVEDEEFDLDRPTDGFASIPQAIEDIRHGKMVVVVDDEDRENEGDLIMAASLATPEAMAFVVKHGTGIVCVSMKGEDLERLELPLMVTRKDNEEKLRTAFTVSVDAKKGTSTGVSARDRAQTILTLASKDSKPEDFNRPGHIFPLRYREGGVLKRAGHTEASVDLTVLAGLEPVSVLCEIVDDDGSMARLPRLRQFAQENNLKLISIADLIRYRRKRERLVEFTAVAPIPTMWGPFKAHCFKSLLDGVEHIAMVKGEIGDGKDILVRVHAECITDDIFGNSSGGKQLAIAMRLIEENGRGVFVYLRGPESKGIDLSHKPRTYNTNSDQAEGVSFPVASREYGIGAQILRDLGVREMKVMTNNPAHYVGLKGYGLSISGKVPLITTP

SEQ ID NO: 26197 - protein, 471 aa, Enterococcus faecalis
MFEFNNVSFSYKDVKEQALVDLNFSIKKGSLTLITGSSGSGKSTLLKLMNGLIPRLYDGKLVGEILFENNSLQSLTQESISKNIGYVSQDPRGQFFTTNTTSELVFSMENFGFTKEHMDKRINELAELLDLSNILDKNIFSLSSGERQKISIGCSLSLNSKLIILDEPSSNLDFQATKKLADLLCDLKNKGFTIVIAEHRFYYLKELIDQVLFVKNRTVKTTTIQLLKTENNNALRKFDIFNSSIEVPYIEKASADVLKVEEITYENILKDINFDVKVGDVIGLVGKNGVGKTTLLRILMKIIRPTKGKIIENKKNLSSPFLVMQEMDYQFFTESVRSELALGNEIVSKDQQEKILKKMELYKMKDQLPFDLSGGEKQRLLVSIASLSKTNLFLFDEPTSGLDYINMERIADLIKDLKEKGAVVIATHDPEFLYKICNRIIYLKNGGIKKDIKLRVEDSTLIEQIFNDITK

SEQ ID NO: 26198 - protein, 156 aa, Haemophilus influenzae
NRANTPVLVDGKDVMPEINAVLAKMKDFCQRIISGEWKGYTGKSISDVVNIGIGGSDLGPYMVTEALRPYKNHLNMHFVSNVDGTHIAETLKKVNPETTLFLVASKTFTTQETMTNAQSARDWLLKAAKDESAVAKHFAALSTNAKDVEKFGIDTN

SEQ ID NO: 26199 - protein, 328 aa, Chlamydophila abortus S26/3
MPKYVTLEIREAIREAIDEEMARDPNVCILGEEVAEYNGAYKVTKGLLDKWSSSRVIDTPISEAAFAGIGIGAALTGLRPIIEFMSWNFSLVAADQIISHAAKMHYMTGGMFSVPIVFRGPNGAAAQVSCQHSHCVEALYANIPGLIVISPSNSYDAKGLLKSAIRNDNPVLFLENELEYNLKCEVPVEEYLIPIGKSQIVEEGKDLTIITYGRMVSIVKQAVKVAKQRYGLSIEILDLRTIKPLDISGIFSSVKKTGNCIVVEEGHYFAGISAEIITEITEHVFDYLDSPPLRVCQRETPMPYNKTLEQATLPNANRILDTIEKIMR

SEQ ID NO: 26200 - protein, 160 aa, Alnus firma
MNTLEGRGFTEEQEAVVVKSWNAMKPNAGELGLKFFLKIFEIAPSAQKLFSFLRDSNVSLERNPKLKSHAMSVFLMTCESAVQLRKAGKVTVRESSLKKLGAVHFKHGVVDEHYEVTKFALLETIKEAVPEMWSPEMKIAWGEAYDQLVAAIKSAMKPSS

SEQ ID NO: 26201 - protein, 419 aa, Thermoplasma acidophilum
MTYMPENMDPFEMALQQLEKAAAVLKLDEQALEILKQPEKILQVSIPVRMDNGRIKVFTGFRVRYNTARGPGKGGIRYHTEETLSTVKALAAWMTWKCAIVDIPFGGAKGGVICDPKSMSQGELERLSRGYIRAIADFIGPEVDVPAPDVYTNPQIMAWMMDEYENVVRHSAPNVITGKPLEVGGSEGRGDATAKGGMYVLREGAKRIGLDLSKARVAVQGFGNAGQFAVKFVHEMFGSKVVAVSDTKGGIYVKDGIDYAALLEHKKKTGSVVGFPGSEPITNEELLESDVDVLIPAAIEEQITGKNADRIRAKIVLELANGPTTPEADEILYKRGILDLPDFLSNSGGVTVSYFEWVQNNYGEYWTADDVYKKLDQKMTKAAHDVFDAMDKYKVNPRTAAYVVSVKKVADAMKARGMY

SEQ ID NO: 26202 - protein, 182 aa, Brassica napus
  misc_feature (112)..(112): Xaa can be any naturally occurring amino acid
MAYSMLSSAAVVTSPAQATMVAPFTGLKSSSAFPVTRKANNDITSIVSNGGRVSCMKVWPPVGKKKFETLSYLPDLTEVELGKEVDYLLRNKWIPCVEFELEHGFVYREHGXSTPGYYDGRYWTMWKLPLFGCTDSAQVLKEVQECKTEYPNAFIRIIGFDNNRQVQCISFIAYKPPSFTGA

SEQ ID NO: 26203 - protein, 376 aa, Silicibacter sp. TM1040
MAAIALGETPKRFSFAPSRATKGAPRWRSWVSGPTKGTEAGRDWASGVWRLSVMAQDLAARAQAGKGRSGEIRSRSGKDPVRRALASGWKARPKRGKLHATLRRHPEGGAVMAEESARVSVEIRDHVAHVTLTRADKMNAVDKHMLAAVIAAAKEVAASDARAVVLSGAGKSFCAGLDVMSFAAMGQMQDTGWIMDRTEGEANDFQAVAMMWRALEIPVIAALQGATFGAGLQIALGADIRIAAPDAKLAVMEMKWGLVPDMGGMALLPQLVRSDVLRLLTYSATPIEATQAETWGLVTEVAEDPLARAEALAAEIAGKGPRAIRAAKRLIAYAESGASTADVLLRESEEQAALIGKPEQMEIVMANMQKRAPVFK

SEQ ID NO: 26204 - protein, 105 aa, Zea mays
MASRSSAMEGGAAIQRRNAVKRHLQQRQQEADFLDKKVIASTYFSIGAFLVLACLTVSLLILPLVLPPLPPPPSLLLWLPVCLLVLLVVLAFMPTDVRSMASSYL

SEQ ID NO: 26205 - protein, 401 aa, Rickettsia conorii str. Malish 7
MALIIQKFGGTSVANIDRIKKIVPIIKTEIAKNNQVIVVVSAMAGVTNQLVTLCNELSSLNNISQFAEYDVALSSGEIVTASLLALALQEEDIKARSFLAWQLPMLTDNNHSKALVESITTDLLEKYLQLNTIPIIAGFQGINKSNRLTTLGRGGSDTTAALIAAAMKADRCDIYTDVEGIFTADPRIIPNAKKIKEIDFLEMLELASSGAQVLHPRAGELVMRYKIDMRVLSTFSPDTEGTLITSKDKNMENGIINSITSNKNLLKISVKSMSLSFLQVANMITQNNNHIEFMQEIKNNEEYSFITNLTDKNNLQALLTNLKDDKQIQYFTFDTEIATISLIGYGIKNDCKLLETILSKLTNDNINVHMIQLSEVKITLFINDQDTEKTIFNLYNLFKIS

SEQ ID NO: 26206 - protein, 108 aa, Chlorobaculum thiosulfatiphilum
  misc_feature (24)..(24): Xaa can be any naturally occurring amino acid
  misc_feature (38)..(38): Xaa can be any naturally occurring amino acid
  misc_feature (58)..(58): Xaa can be any naturally occurring amino acid
  misc_feature (72)..(72): Xaa can be any naturally occurring amino acid
  misc_feature (81)..(81): Xaa can be any naturally occurring amino acid
AGKYFEATDKNFQTEILDSDKAVXVDFWASWCGPCMMXGPVIEQLADDYEGKAIIAKXNVDENPNIAGQYGXRSIPTMLIXKGGKVVDQMVGALPKNMIAKKIDEHIG

SEQ ID NO: 26207 - protein, 151 aa, Triticum aestivum
MESRKPQRSALVDSYVVPGDVILDLADMTNQTIKLGAGLRQDCDTIQATSAGRLRLSKPNKYWVENSQKRYVPSVEDTVLGIVVDTKPDNFLVDIKGPNLAFLPVLSFEGGTRRNIPKFEIGTLIYARVVKANSIMNPELSCMDGECSFAK

SEQ ID NO: 26208 - protein, 303 aa, Campylobacter jejuni subsp. jejuni NCTC 11168
MKLVLFLNMGGATNLQDCEVFLKNMFNDPYILGIKNRFLRKFVAWIITKARVKAMQENYKKMGGKSPLNELTQSLCDKLNLKQDEFKFDFVNLYVPPFATEILQKYTLNASDEIILFPLYPHHSCTTVTSSLEVLQNEISKQKIQAKVKTIDIFYKNELYNEMIVSHILAKKSKFDAKILIFSAHSLPQSIIDKGDLYEKHVNDHVEILKEKLKDHFDEFILAYQSKLGPVKWLEPNTSDVLANLNDKALIYPISFCIDCSETIFELGMEYKHLSKYNYDLISCPNDSDEFMEFILKYLSDLN

SEQ ID NO: 26209 - protein, 165 aa, Glycine max
MTAIAGTHVFGVVSFQLKQAEMPFACSCLIRKRIGDSPQRNVALRRRVNGTILPQIRAQNLPDYVPKSEFYKVEAILRPWRVPQVSSAMLKMGIRGVTVSDVKGFGSQGGSKERQGGSEFSEDNFVAKVKMEIVVRKDQVEAVIDKIIEEARTGEIGDGKIFCKT

SEQ ID NO: 26210 - protein, 310 aa, Vibrio angustum S14
MSNQPIRIATRKSPLAMWQAEFVKAELEQAHPGIIVELVPMITKGDIILDTPLAKVGGKGLFVKELEVAMLEGRADIAVHSMKDVPVEFPEGLGLVTICEREDPRDAFVSNKYNNIDELPQGAIVGTSSLRRQCQLRAQRPDLIVNDLRGNVNTRLRKMDEGQYDAIILACAGLKRLKMEDRIRSEIAPEVSLPAVGQGAVGIECRLDDTRVRQLLAALSDQATTTRVLCERAMNNYLQGGCQVPIGSYAELEGDQIWLRALVGEPDGSKIVRAEIRGPIEQAEQLGETLAEQLLNDGARDILDRLYGNA

SEQ ID NO: 26211 - protein, 521 aa, Salmonella enterica subsp. enterica serovar Typhi str. CT18
MLDTNMKTQLRAYLEKLTKPVELIATLDDSAKSAEIKELLAEIAELSDKVTFKEDNTLPVRKPSFLITNPGSQQGPRFAGSPLGHEFTSLVLALLWTGGHPSKEAQSLLEQIRDIDGDFEFETYYSLSCHNCPDVVQALNLMAVLNPRIKHTAIDGGTFQNEITERNVMGVPAVFVNGKEFGQGRMTLTEIVAKVDTGAEKRAAEALNKRDAYDVLIVGSGPAGAAAAVYSARKGIRTGLMGERFGGQVLDTVDIENYISVPKTEGQKLAGALKAHVSDYDVDVIDSQSASKLVPAATEGGLHQIETASGAVLKARSIIIATGAKWRNMNVPGEDQYRTKGVTYCPHCDGPLFKGKRVAVIGGGNSGVEAAIDLAGIVEHVTLLEFAPEMKADQVLQDKVRSLKNVDIILNAQTTEVKGDGSKVVGLEYRDRVSGDIHSVALAGIFVQIGLLPNTHWLEGVLERNRMGEIIIDAKCETSVKGVFAAGDCTTVPYKQIIIATGEGAKASLSAFDYLIRTKIA

SEQ ID NO: 26212 - protein, 364 aa, Oenococcus oeni PSU-1
MATSAVSVGFSSYLAGLLQTDHISGFNSILAGPMEGGIINLPAVVLLLVILGIQIIGLSTTRWVENVFVAIKLAILAIFIIVGLFFIKSNNYVPFYPKEFQTGAFGLSGIWMATSGIFFAFIGFDTLAAHTAEVKNPKKQVARGIIYTVIVAAVLYTLFAIVLTGMVNYTKLNVSDPASFAFTFVGQKGLASVIGIGSMIGMFTGVLALVFASSRLIYSFGRDGLLPNFIGKISGSQHVPFNALLIAGVVEIILAGFVPLSYLASLINAGTLAAFTFVNFGIIPLRHRTDLPNENGFRVPGYPIIPIIGGLTSFFFITQLETKTLVMFGVWTLVGLLIYFTYGVRHSMVKESKFDQSIIKENNA

SEQ ID NO: 26213 - protein, 486 aa, Microscilla sp. PRE1
MIMSTVKNYKLYIDGEWIDATTGESQEILSPTDETVVGTVQMGVEADAQIALEAAERAQKQWKKVPARKRADLLRTFAAEIKANKNQLAELLVREQGKLLAVAKMEVEVTASFIEYACDGARSIEGDIIPSDNPAEHIMIHKIPRGVVVAITAWNFPLALAGRKLGPALVAGNSVVLKPTQETPIATLELGNIANKVGLPKGLINILTGQGSVLGNALVANPITKMVSMTGSTPAGQQIFRTAAENLIHVQLELGGKAPCIVFDDADLEQAVEGAFHSRFDNCGQVCTSNERLYVHESIYNEFMERFMEKVKGLKLGNPMDAATTIGPKVNAKEVAHMEHLVTKSVEEGATVAIGGKKPQGKAFEKGHWFEPTILTDVKQNMTIVHEESFGPILPVIKFSEFNEVIGYANDCEYGLAAMVFTNDMNKIMRLNDELEFGEIYINRGHGEQHQGFHNGYKLSGTGGEDSKYGFEQYMEKKTFYIKYKA

SEQ ID NO: 26214 - protein, 966 aa, Flaveria pringlei
MANRNLEKLASIDAQLRLLVPGKVSEDDKLIEYDALLLDKFLDILQDLHGEDLKEAVQECYELSAEYEGKHDPKKLEELGSVLTSLDPGDSIVIAKAFSHMLNLANLAEEVQIAYRRRIKLKRGDFADEANATTESDIEETFKKLVLKLNKSPEEVFDALKNQTVDLVLTAHPTQSVRRSLLQKHGRIRNCLAQLYAKDITPDDKQELDEALHREIQAAFRTDEIRRTPPTPQDEMRAGMSYFHETIWKGVPKFLRRVDTALKNIGINERVPYNAPLIQFSSWMGGDRDGNPRVTPEVTRDVCLLARMMASNMYFSQIEDLMFEMSMWRCNSELRVRAEELYRTARRDVKHYIEFWKQVPPTEPYRVILGDVRDKLYNTRERSRHLLAHGISDIPEEAVYTNVEQFLEPLELCYRSLCDCGDRVIADGSLLDFLRQVSTFGLSLVKLDIRQESDRHTDVLDAITQHLEIGSYREWSEEKRQEWLLAELSGKRPLFGSDLPKTEEVKDVLDTFNVLAELPSDCFGAYIISMATSPSDVLAVELLQRECHVKHPLRVVPLFEKLADLEAAPAAMARLFSIDWYRNRIDGKQEVMIGYSDSGKDAGRFSAAWQLYKAQEEIIKVAKEFGVKLVIFHGRGGTVGRGGGPTHLAILSQPPDTIHGSLRVTVQGEVIEQSFGEEHLCFRTLQRFCAATLEHGMNPPISPRPEWRELMDQMAVVATEEYRSIVFKEPRFVEYFRLATPELEYGRMNIGSRPSKRKPSGGIESLRAIPWIFAWTQTRFHLPVWLGFGAAFKHAIKKDSKNLQMLQEMYKTWPFFRVTIDLVEMVFAKGDPGIAALNDKLLVSEDLWPFGESLRANYEETKDYLLKIAGHRDLLEGDPYLKQRIRLRDSYITTLNVCQAYTLKRIRDPNYHVTLRPHISKEYAAEPSKPADELIHLNPTSEYAPGLEDTLILTMKGIAAGMQNTG

SEQ ID NO: 26215 - protein, 421 aa, Rhodopseudomonas palustris CGA009
MRRVVVTGLGMVSPLGCGVEPTWSRVLAGESGARKIDTFDVSDLASQIACVIPRGDGTNGTFNPDQWMEPKDQRKVDDFIVYAMAAARQALDDAGWHPSTEEERCASGVLIGSGIGGLQGIAETALLLEQRGPRRISPFFIPGRLINLASGYVSIEFGLKGPNHSVVTACSTGAHAIGDASRLIALGDADVMVAGGTESPISRLAMAGFAAARALSTGFNDAPTKASRPYDKDRDGFVMGEGAGVVVLEEYEHAKARGARIYAEVIGYGLSGDAYHITAPSSDGDGAFRCMSAAIKRGGIAVSDIDYINAHGTSTPLGDEIELGAAQRLLGNAASRVSMSSTKSSIGHLLGAAGAVEAIFCVLAIRDNVAPPTINLDSPSVETAIDLVPWKPRAREINVALSNSFGFGGTNASLVLQRVPN

SEQ ID NO: 26216 - protein, 383 aa, Moorella thermoacetica ATCC 39073
MGGQIKIVDTTLRDGEQTAGVVFANSEKLRIAKMLDAIGVDQIEAGVPVMGGDEKKVIKEIVDAGLRASIMGWNRAVIDDVRHSIDCGCDAVAISISTSDIHIEHKLRSTREKVIESMSRACEFAKKHNLYVSVNAEDASRTDPDYLLQFARAAREAGADRLRFCDTVGIMDPFGTYEKIKWLIEEVGLDVEMHMHNDFGMATANTLAGIRAGAKYAGVTVVGLGERAGNAALEEVVMALKYLENIDLKFKTEQFRELAEYVSLAARRQLPAWKAVVGSNMFAHESGIHADGALKDPRTYEVMTPEEVGLERQIVIGKHSGTAAIKAKFAEYGVHLEEADAAAILARVRALAVELKRPLFDKELAHIYEDYQEARKKAAVTAV

SEQ ID NO: 26217 - protein, 565 aa, Photorhabdus luminescens subsp. laumondii TTO1
MELEHESKRPLYIPYSGPILLEFPLLNKGSAFTEEERRNFNLHGLLPEAVETIEEQAERAYRQYLDFKNDADKHIYLRNIQDTNETLFYRLLDAHLNEMMPIIYTPTVGEACEHFSDIYRRARGLFISHPNKAHIDDMLQNATKQNVKVIVVTDGERILGLGDQGIGGMGIPIGKLSLYTSCGGISPAYTLPVVLDVGTNNPQRLNDPLYMGWRHPRITGKEYDEFVDEFIQAVKRRWPNVLLQFEDFAQKNAMPLLNRYRHEICCFNDDIQGTAAVTLGSLIAASRAAGRQLKDQTVTFLGAGSAGCGIAEQIVAQMKSEGLSDEQARARIFMVDRFGLLTDKLPNLLDFQNKLVQKSSSLAKWDVNNDSISLLDVVRNAKPTVLIGVSGQAGLFTEEIIREMHKHCERPIVMPLSNPTSRVEARPEDIINWTDGAALVATGSPFNPVKYKDQEYPIAQCNNAYIFPGIGLGVIASGAKLVTDGMLMAASRTLANCSPLAQEGQGPLLPLIDDIQEVSRKIAKQVAKEAQIQGVATVTSDGALDEAIERNFWKPEYRVYKRTSF

SEQ ID NO: 26218 - protein, 129 aa, Burkholderia vietnamiensis G4
MRLLHTMLRVGDLDRSIKFYTELLGMKLLRRDDYPEGRFTLAFVGYEAESTGTVLELTHNWDTPSYDLGNGFGHLAVEVDDAYAACEKIKAQGGKVTREAGPMKHGTTVIAFVEDPDGYKIEFIQKKAH

SEQ ID NO: 26219 - protein, 359 aa, Phalaenopsis sp. SM9108
MKLFSLILVASFLASVAATAIDIADKDLETEDSLWNLYERWRSHHTVSRDLDEKQKRFNVFKENPRYIHDFNKRKDIPYKLRLNKFADLTNHEFRSTYAGSRINHHRSLRGSRRGGATNSFMYQSLDSRSLPASIDWRQKGAVTAVKDQGQCGSCWAFSTVAAVEGINQIKTKKLLSLSEQELIDCDTDENNGCNGGLMDYAFDFIKKNGGISSEAEYPYAAEDSYCATEKKSHVVSIDGHEDVPANDEDSLLKAVANQPVSIAIEASGYDFQFYSEGVFTGRSGTELDHGVAIVGYGKTQQGTKYWIVRNSWGAEWGEKGYIRISAASDSKRLCGLAMEASYPIKTSPNPSHKSRDEL

SEQ ID NO: 26220 - protein, 485 aa, Moorella thermoacetica ATCC 39073
MKTEPLLFELGAPGRQGYTLPECDVPGKVEDYLPEATRRRSDAALPELSEVEVVRHFTHLSTMNYGVDTGFYPLGSCTMKYNPKINEATANLPGFTGLHPLVPVEAAQGALELMYNLQEYLAEITGMDAITLQPAAGAHGEYTGLAVIAAYHQSRGDRERRQVLVPDSAHGTNPASAAMAGLEVVQIPSDEGGLVDLEALKAAVGPRTAALMLTNPNTLGLFESNIEAMAAIVHAAGGLLYYDGANLNAIMGLTRPGDMGFDVVHLNLHKTFSTPHGGGGPGSGPVGVKEHLAAFLPVPVVARREDGQYYLDYDRPQSIGQVRSFYGNFGVMVKAYTYIRSLGAPGLKRVSQQAVLNANYMLARLRPYFKVPFDRLCKHEFVIAPSQEVTDAGVHTLDIAKRLLDYGFHAPTIYFPLIVREAMMIEPTETEPRENLDAFCDALIAIAKEAVENPEALHQAPHNTPVRRLDEVGAARNPVLRWRGR

SEQ ID NO: 26221 - protein, 578 aa, Ustilago maydis 521
MVGVATTRDHSHVAQALADHRLSMVGATGAKGLVKNARTLAIAVFASMGGLIYGYNQGMFGQILSMHSFSEASGVKGITNPTLAGFITAILELGAWVGVLMNGYVSDAFGRRKCVVFGVVWFILGAIIQACTRDGSYNYIIAGRTITGVGIGSLSMIVPLYNAELAPPEIRGSLVALQQQAIVAGVMISYWFTYGTNYIGGTGAAQSRAAWLIPITVQILPALMLAIGIFFLPESPRWLINVGREQESLKVIADLRRLPENDLLVQLEFLEVKAQKLFEDRVSAHDHPDLQDGSRSSNFKLGVAQYKSLVTNPANLRRTIVAVVTMLFQQWCGINFVLYYSPFIFKQIGLEGNTISLLASGVVGIVLFLATIPAVLYIDTWGRKPTLYVGCAIMGACHLAVAIIIATCSDNWPAHRAAGWVACVFVWIFAAGFGFSFGPIGWIIVAEVFPLGLRAKGVSIGAASNWLNNFAVAMSTPDFISAAPYGVFIFLGVMCFLAIAYVKFFVPETKMKSLDELDAVFGDNSGRSKWEAGMMLQAQRDVGLLRLAGIDEGKISAVTADDASDKDEKSSDIITSTV

SEQ ID NO: 26222 - protein, 444 aa, Moorella thermoacetica ATCC 39073
MTYIPTTAAEQQQMLAACGAHRMEELFSDVPASVRLGRELNLPRPMAEAEVWRHLEELAGKNKKLVSFLGAGAYEHYIPSVVGHLLARSEFYTAYTPYQPEISQGTLQAIFEFQSLICELTGLDVATASHYDGATAMAEAALVACNATRRQKILVSRSVNPQYRTVLSTYAKGQGVELAEVPLQDGRTDLEALEKLAGKDVAGVILQNPNFFGQIEAMAEATDLAHKARALGIAVVDPVSLGLLAAPGEYGADLAVGEGQSLGNPLNFGGPYLGFIAAREKLVRRLPGRIVGQTKDVDGKRAYVLTLQAREQHIRREKATSNICSNEALCALAATIYLAAMGREGLKEVASQCLLKAHYAQKKLAALPGVTPVFNGPFFHEFVLQTKLSPATVARRLAENGFAAGFDLGRFYPELKNALLFTVTEVRTREEIDALVAAMRGILA

SEQ ID NO: 26223 - protein, 251 aa, Brassica napus
MNSVSTFSELLRSENESPVNTEGGDYILAASCPKKPAGRKKFQETRHPIYRGVRLRKSGKWVCEVREPNKKSRIWLGTFKTAEIAARAHDVAALALRGRGACLNFADSAWRLRIPETTCAKDIQKAAAEAALAFEAEKSDTTTNDHGMNMASQVEVNDTTDHDLDMEETIVEAVFREEQREGFYMAEETTVVGVVPEEQMSKGFYMDEEWMFGMPTLLADMAAGMLLPLPSVQWGHNDDFEGDADMNLWNY

SEQ ID NO: 26224 - protein, 297 aa, Triticum aestivum
  misc_feature (195)..(195): Xaa can be any naturally occurring amino acid
  misc_feature (226)..(226): Xaa can be any naturally occurring amino acid
  misc_feature (280)..(280): Xaa can be any naturally occurring amino acid
  misc_feature (287)..(287): Xaa can be any naturally occurring amino acid
  misc_feature (292)..(292): Xaa can be any naturally occurring amino acid
MDGGGGVGGGMGPVGGGVGGMVGPVGVGGGGGGSDVELVSKTLQFEHKLFYFDLKENPRGRYLKISEKTSTTRSTIIVPIAGVAWFLDLFDYYIRTDERDVFSKELRLDTKVFYFDIGENKRGRYLKVSEASVNRNRSTIIVPAGSSGEEGWEAFRNVLLEINDEASRLYVLPNHPSQQPLEPSRAPFLAFSDEXLGAGIYRLGHGQPNSAFWNPEVDMLMGPSYXRNFSGGGLSKVIRADQKRVFFDLGSNNRGHYLRISEVAGADRSSDILPLSGLSXHEMVGHXVDIMXDRLEG

SEQ ID NO: 26225 - protein, 582 aa, Oryza sativa
MEAEDDERAEAEAEARREKEAGNAAYRKLYLETAVRHYTRGALLDPRDISFLTNRAAAYLLMSKYKECVRDCDEAVEKGRELRADNKLVARALARKASALLKLAACAADYDPAIRALQQSLAEHYSEETLAKLGEAEEARKEIEERERLDQEAADHHRDRGNDFFKQKRYQEAAMHYTEAMKKNPKDPRVFSNRAQCHIYLGALPEGLEDADKCIALDPTFLKGYLRKAKVQLLMGNYEIALATYVEGLKCDPNNLEVLDGLRRCAACIKRANGGDSRAEDLREILIGEGGFGCVYKGILRNMTVAIKVLRPDSLQGQSQFEQEVSILSRVRHPHLVTLLGACSESSTLVYEFLPNGSLEDFLMCSDKRQTLTWQARIRIIAEICSALIFLHKNKPHPVVHGDLKPANILLGVNLVSKLSDFGISRLLIQSSTNNTTLYRTMHPVGTPLYMDPEFLSTGELTPQSDVYSFGIVVLRLLTGKPPVGIKNIVEDAMEKGDLNSVIDTSVGEWPHLHIEQLAYLALRCTELSRRCRPDLSGEVWAIVEAIRDAALSSPSSSRSAQDQNSPPSYFICPISQGYKIF

SEQ ID NO: 26226 - protein, 279 aa, Pisum sativum
AYKLIIKTCGTTKLLLSIPPILKLADSISLNVRSVRYTRGSFIFPGAQSFPHRHFSEEVAVLDGFFGKLGSGSMAYILGGSDEAQNWHIYCASSDSVSPEGSVYTLEMCMTGLDREKASVFFKEQTGSAAEMTVNSGIRKILPNSEICDFDFEPCGYSMNSVEGPAVSTIHITPEDGFSYASFETAGYDLKAINLNEMVMRVLACFQPTEFSVAVHVDNASKSFEQGCLLDVKGYCCEEKSHQGLGMSGSVVYQKFLKTSYCGSPRSTLKCWKDEDEEE

SEQ ID NO: 26227 - protein, 801 aa, Magnetococcus sp. MC-1
MTTISQPLRHTLIVAIIAIVALALLLDRLYEYQVVMAREIENQQLAEMHDSCYVLANDYSRYLLANKQSELRFSVASQGTRISLERLAVSNSEGIVIASSRSSDIDRKIAEIAPLFRLQDAQEARTHNQIVTRLSDDHNSVLGYVPVEMPSPTHSIRAQTRGLLFIHNTLHTLKAASWQNLTSPQSLLRWLVTFFLVTVLLLILLNRVLFRPLEHLEQMATRLAEGDWQATSTLSGKSELAHLGQVLNTMQRHILQERRSLQQSESRFRTLVETSPIPMLVTRAAPNQRVALMNRSFTDLFGYTVADVPDIHHWWPLAYPDPTYRQEIQQLWQARVEEMSLKKTQIMHPVTANVTCNNGNIRFIEVHMSVIDDHALVIFQDLTHRKQESEELRQAKEAAEAANQAKGDFLAVMSHEIRTPMNVMLGMVEVLQESTLDQEQQEQLHSVQKAGKNLLALINQILDLSKLDAGHLQLQPEALNLHELIKEVVGLVAVLASEKNLLLSHQIDTSVPQWILADELRLRQILFNLLGNAIKFTEKGSVNITLSMRDPQQLALVIRDTGIGVDPAHHHAIFEPFTQQDGTITRRFGGTGLGLTLSRRLVELMHGQIRMDSQLGCGTQFEILLPVERTQPPRSDQPQALSLGIIEAHPALAPTDTLCPRLDPALNLLLAEDSPDNQSLIKAYLKRTPHILTIVANGEEAVTAVGNGSYDLLLMDIQMPIMDGYTATRTIRQWEKAEARTPMLIVALTAHALVGDRERSLAEGCDLHLTKPIRKKDLLALLESIAQRLVRQDHQPPAETL

SEQ ID NO: 26228 - protein, 506 aa, Vibrio sp. Ex25
MTALHISHAEELKASHDMMAIMKDVRLVRGLAYVNGKWVSGDQFHPVDNPADGTVIGYITKLSQQQLYQAIDEADQAFRQWRKMQAEERAEILMRWHDLILESKQDLARLMVMEQGKTLGDALGEIDYGASFVRWFAEEARRSYGETIPSHIPNAQLSTVREPIGVAALITPWNFPNAMVTRKAAAALAIGCPVLIKPASETPFSALALAELADRAGFPPGVFNVITGDAVMVSQTLCHSDKVKALSFTGSTRVGKLLLRDAAQTVKKCSMELGGNAPFIVLPDMDVEQAAKAAVDAKFQTAGQDCLAANRIFVPDDKYEAFLEAFAKEMNHIVLGNGLDEKTTMGPLINRAAVDKAHDLVRDALDKGARLVAGYHQPVPGENFFAPTLLADVTPDMAVYREENFCPVAGVLPYQDLDTVIEMSNDTEYGLAAYVYGHDIHQIWRCMRGLEFGMVSVNSVKMTGHPIPFGGVKQSGLGREGSRHGFEEYSEIKYCCLGALPTVSGS

SEQ ID NO: 26229 - protein, 156 aa, Haemophilus influenzae
NRANTPVLVDGKDVMPEVNAVLAKMKDFCQRIISGEWKGYTGKAISDVVNIGIGGSDLGPYMVTEALRPYKNHLNMHFVSNVDGTHIAETLKKVNPETTLFLVASKTFTTQETMTNAQSARDWLLKAAKNESAVAKHFAALSTNAKDVEKFGIDTN

SEQ ID NO: 26230 - protein, 644 aa, Psychrobacter arcticus 273-4
MVAITLPDGSVKNFEGNTTVMEVAQSIGTGLAKATVAGRVDGHLVDAHDPIVADAKVEIVTPRDDDGVDIIRHSCAHLLGHAVKQLYPDVKMVIGPVIDDGFYYDIYSETPFTPEHMAAIEKRMMELIKQDYDVIKKITPRAEVIKIFEERGEDYKLKLINDMPGEEAFGLYHHQEYVDMCRGPHVPNTRFLKVFKLTKMSGAYWRGDAKNEQLQRIYGTAWADKKDLKTYIQRIEEAEKRDHRKIGKALNLFHMQEQAPGMVFWHANGWTIYQVLEQYMRKVQQDNGYEEIKTPQIVDRSLWERSGHWGNYATNMFTTSSEKRDYAVKPMNCPCHVQVFNQGLKSYRDLPLRMAEFGSCHRNEPSGSLHGLMRVRGFTQDDAHIFCTQSQIQQEVADFIKLTLAVYEDFGFNNIIMKLSTRPEKRVGSDESWDFAEKALADALDNSGLDWAYLPGEGAFYGPKIEFSLKDSLGRVWQCGTIQVDPNMPERLDAEFVNEQNEREVPIMLHRAILGSFERFIGILIENYAGWMPVWLAPQQVVVMNITDKQAEACENVVNELKKSGLRAISDLRNEKIGFKIREKTLERIPYMLVLGDKEVESGSVNVRTREGENLGVMSVAEFIILVETAVAEKGRQTPKIDQE

SEQ ID NO: 26231 - protein, 120 aa, Zea mays
MARTQQLAVVATAVVALVLLAAATSEAAISCGQVASAIAPCISYARGQGSGPSAGCCSGVRSLNNAARTTADRRAACNCLKNAAAGVSGLNAGNAASIPSKCGVSIPYTISTSTDCSRVN

SEQ ID NO: 26232 - protein, 170 aa, Zea mays
MDAADVWGRSSSSSSSSAAAARRLQARYDLYMGIDDADAGLDEVTEPRGGAESYNCPFCGEDFDFVGLCCHIDDEHAVEAKSGACPICATRVGMDLIGHLTMQHGSYFKMQRRRRVRKVSSGSHSLLSLLRKDLRNGSLQSFLGGSSYVSNPPAAAPDPFVSSNLITASQ

SEQ ID NO: 26233 - protein, 372 aa, Eremothecium gossypii
MAAVKRIVVLPGDHIGREVVEEAVKVLGAVEQSLSDVHFDFQYHLVGGAAIDATGSALPDEALGAAKEADAVLLGAVGGPKWQGGAVRPEQGLLKLRQELGVYANLRPCNFAADSLLELSPLRPEIARDTDIMVVRELLGGSYFGERHEDEGDGVAWDTDKYTVKEVQRIARMAGFLALQHDPPLPVWSLDKANVLASSRLWRKTVEETFQSEFPNVQLQHQLIDSAAMILVKNPRAFNGVVVTSNMFGDIISDEASVIPGSLGLLPSASLASLPDSKSAFGLYEPCHGSAPDLPAGKANPIGCILSAAMMLKLSLNMVAAGEAVEQAVQEVLDSGVRTGDLLGSSSTSEVGDAIALAVKEALRRQSAAGLS

SEQ ID NO: 26234 - protein, 109 aa, Bryopsis maxima
SVNLSILKFLAFEQTFKNSLTGLPMGGGKGGSDFNPKGKSENEVMRFCQSFMTELSRHVGPNTDVPAGDIGVGAREVGFLFGQYKRLMNRFEGVLTGKALEFGGSEIRN

SEQ ID NO: 26235 - protein, 123 aa, Triticum aestivum
  misc_feature (96)..(96): Xaa can be any naturally occurring amino acid
MYHHLGDMGQPSLISEYDLGAEGDLFKAPEPIIEEPLLALDPVAAAISMMSGSNNALNDTIEASDMSLSEALYKCEKELMEESAIEETISELLNVXIPMLQVEDVPRELRASADECSLQKSIS

SEQ ID NO: 26236 - protein, 249 aa, Escherichia coli
AVTKLVLVRHGESQWNKENRFTGWYDVDLSEKGVSEAKAAGKLLKEEGYSFDFAYTSVLKRAIHTLWNVLDELDQAWLPVEKSWKLNERHYGALQGLNKAETAEKYGDEQVKQWRRGFAVTPPELTKDDERYPGHDPRYAKLSEKELPLTESLALTIDRVIPYWNETILPRMKSGERVIIAAHGNSLRALVKYLDNMSEEEILELNIPTGVPLVYEFDENFKPLKRYYLGNADEIAAKAAAVANQGKAK

SEQ ID NO: 26237 - protein, 195 aa, Brassica napus
  misc_feature (13)..(13): Xaa can be any naturally occurring amino acid
  misc_feature (18)..(18): Xaa can be any naturally occurring amino acid
  misc_feature (26)..(26): Xaa can be any naturally occurring amino acid
  misc_feature (42)..(42): Xaa can be any naturally occurring amino acid
  misc_feature (65)..(65): Xaa can be any naturally occurring amino acid
CVSAVEGINGICXYTSSXFEQAGFPXRLGMIIYAVLQVVITXALNAPNRLTKLEESPLLLVSATXGLVIGCLITAVSFYLKAHDMAHKAVPVLAVVGIMVYIASFSAGMGAMPWVVMSEIFPINIKGVAGGMATLVNWFGAWAVSYTFNFLMSWSSYGTFIIYAVINALAIVFVIAVVPETKGKTLEQIQAVVNP

SEQ ID NO: 26238 - protein, 189 aa, Prochlorococcus marinus subsp. marinus str. CCMP1375
MESPSLIELTKIQRIYLLIASFVLACFLFLLRGGLGLNSEKSLNILALSSLQPEVALNNGHPTIFEFYADWCEACQEMAPSIKSIKEKYQDQIDIVLLNVDNEKWLDLIEKYEVNGIPQLNLFDQFGVIKGQSIGLKNIDQIDQIANSLLNNEQLPVFPGINNLDGKNIAISPLKEDIIVSKISPRSHS

SEQ ID NO: 26239 - protein, 868 aa, Oryza sativa (japonica cultivar-group); identical to SEQ ID NO: 535

SEQ ID NO: 26240 - protein, 109 aa, Desulfitobacterium hafniense DCB-2
MAGENVKTFTTANWNEEVLGSDKAVLVDFWAAWCGPCRMVAPIIEELADEMAGRVIIGKLNVDEEPAIAGQYQVMSIPTLAVFKNGQVVDKSVGFRGKADLVKMIEKHA

SEQ ID NO: 26241 - protein, 248 aa, Ralstonia solanacearum
MHKLVLIRHGESTWNLENRFTGWVDVDLTDTGIAQARQGGRLLREAGFTFDLAYTSVLKRAIRTLWHVQDEMDLMWIPTRTEWRLNERHYGGLSGLNKAETAAQYGDQQVLVWRRSYDTPPPALEAGDERDAYGNPRYAGLPREQVPLTECLKDTVARVLPLWETSIAPDIKSGKRVVIAAHGNSIRALVKYLDNISDDDIVGLNIPNGTPLVYELDANLKPIRHYYLGDQEAIAASLAAVAGQGKAK

SEQ ID NO: 26242 - protein, 206 aa, Brucella melitensis
MSRTLVLVRHGQSEWNLKNLFTGWRDPGLTEQGHAEAKAAGQRLKAAGLKFDIAYTSALSRAQVTCQHILDELGQPGLETIRDQALNERDYGDLSGLNKDDARAKWGEEQVHIWRRSYDVPPPGGESLKDTGARVWPYYLHTIQPHVLREETVLVAAHGNSLRALIMALEGLTPEQILKQELNTGVPIIYRLNADSTVASKEILSA

SEQ ID NO: 26243 - protein, 569 aa, Cyanidioschyzon merolae strain 10D
MMTTGSYALLDTLVSLGVRHVFGYPGGAILPIYDELYHWEKKGLIQHYLVRHEQAAAHAADAYARTTGQVGVCFATSGPGATNLVTGIATACMDSVPLLVITGQVSRAFIGTDAFQETDIFGITLPIVKHSYLVRDARDISRIIVEAFTIAKHGRPGPVLVDIPKDVGLEEIDYERCVKVNIPGCRPILPPTTKQIEQMLMMLQSSRQPLLYVGGGAQAASQELYQLATQFQIPVTTTLMGKGCFDETHPLYLGMLGMHGTAYANFAVSECDLLIALGARFDDRVTGKLDEFASSAQVIHIDIDAAEIGKNRIPQLAICSDVKLVLQHFLAATSIAPNLVANDETYAWRKRIARWKHDYPLLIPRPSSYLSAQEILNALAQLAPHAIYSTDVGQHQMWAAQLLRVQPRQWLSSSGLGTMGYGLPAAIGAAIAHQGNRSIICISGDASFQMNLQELATISQYKLKIKIFLLNNGWQGMVRQWQQAFYGERYSHSSMQEGQPDWMLLAQAYGIKGICLDSREHLIEQLESILHLDESVLVNCLIQPDENCYPMVAPGKSNSQMLGLLSSST

SEQ ID NO: 26244 - protein, 295 aa, Methanosarcina thermophila
MTVDELVREYAGCAFGAGRLAKAVDIYYEMLASEKTTKFFGLAGAMTPAGMRNIIADLIRDGYIDVLVTTGANMVHDTVEALGLHHYKGSDCTNDIQLRHECIDRIYDVYLPDQHFTDLEEFLQGVYAGLPQEKLSIRQVLTEIGKNLDDDSSILKTAAEMGVPVYCPALQDSVIGLQAWLYKEGNPLHVDAFADMHEFMEICFETESAGAMLLGGGVPKNYILQSMLVTPRSFDYAIQLTMDHPETGGLSGATLDEAQSWGKVGENAKSVTVYADSTITLPLIVSAVRTRLSKR

SEQ ID NO: 26245 - protein, 655 aa, Ustilago maydis 521
MTPKRKGADARTSRMHDEDDKVLDPKLAEHADEDECETSKPRLAKRQKRSTHSLRSAVVAGGAKVDKQYGSSAYAKSGQGWHRSDFNPNARGRTDSKTPLNQLEEALNAHAPNKANDANDGKNVVYWMRMHDLRIHDNRALAHASSLAAARRKNGKGGHLIALFVITPADYSAHDRGARRIDFVLRTLASLKSQFDKLDIPFVVYTYSGEDRAQVGEKVFSLCEQCDASQLTANIEYEVDELWRDLAMLEAKDKKGVSFSLLHDCYVVPPGRIKTNDGRPYSVFSPWNRRWTESISKDMSLIEASEDPEANPKSIRSHPKLGALFELSKLGTGYGIPEELSGFECKDREYMAKLWPATDQAAHQVLDNFIKGKGGETALDRAANEPSTAEVGANAKDSRLARYAEGRNLLSENGTSRISPYLAAGVVSARECLRRTKQLTKGKLHVGRDSGVAMWNTEISFRDFYAHVLAAWPKVCMGHAFITKYEDVVWETDSSTLDAWKQGRTGYPIVDAAQRQCIQQGYIHNRGRMISAMFLTKHLLHDWRHGERHFSLNFIDQDFASNNGGWQWSASTGTDPQPYFRIFNPLSQSEKCDPHGDYIRHFVPELKNVKGNAIHDPFHRLSKAEFEKLGYPKPIVEHAQARQRALKRYKNPGDQ

SEQ ID NO: 26246 - protein, 206 aa, Malus x domestica
HGSDVAVKILMEQDFHAERFKEFLSEVTIMKRLRHPNIVLFMGAVTKPPNLSIVTEYLSRGSLYRLLHKAGAREALDERRRLSMAYDVAKGMNYLHRRKPPIVHRDLKSPNLLVDKKYTVKVCDFGLSRLKANTFLSSKSAAGTPEWMAPEVLRDEPSNEKSDIYSFGVILWELATMQQPWGNLNPAQVVAAVGFKNKRLEIPRDL

SEQ ID NO: 26247 - protein, 286 aa, Bacillus anthracis str. 'Ames Ancestor'
MVAVIIKGNEVAEKKRAQLKEEVVKLKEQGIVPGLAVILVGEDPASRSYVKGKEKGCEQVGIYSELIEFPETITEERLLAEIDRLNGDDRINGILVQLPLPKHIEEKAIIERISPEKDVDGFHPISVGRMMTGQDTFLPCTPHGIVELVKETNLDISGKHVVVIGRSNIVGKPVGQLFLNENATVTYCHSKTQNMKELTKLADILIVAVGRPKMVTADYIKEGAVVIDVGVNRLETGKLCGDVDFDNVLDVASYITPVPKGVGPMTITMLLHNTVESAKRAGVVCK

SEQ ID NO: 26248 - protein, 85 aa, Cyanophora paradoxa
APKIQFGVFASADLSIQERIQKAISQARAVAEEKGATSKEARVAWDEVEELEAELSHQKAQPKADPLQEFCKENPETDECRLYED

SEQ ID NO: 26249 - protein, 588 aa, Zea mays
  misc_feature (173)..(173): Xaa can be any naturally occurring amino acid
  misc_feature (299)..(299): Xaa can be any naturally occurring amino acid
  misc_feature (559)..(559): Xaa can be any naturally occurring amino acid
  misc_feature (572)..(572): Xaa can be any naturally occurring amino acid
MCGILAVLGCSDWSQAKRARILACSRRLKHRGPDWSGLYQHEGNFLAQQRLAVVSPLSGDQPLFNEDRTVVVVANGEIYNHKNVRKQFTGTHNFSTGSDCEVIMPLYEKYGENFVDMLDGVFAFVLYDTRDRTYVAARDAIGVNPLYIGWGSDGSVWIASEMKALNEDCVRFXSSPPGHLYSSAGGGFRRWYTPHWFQEQVPRTPYQPLVLREAFEKAVIKRLMTDVPFGVLLSGGLDSSLVASVTKRHLVETEAAEKFGTELHSFVVGLEGSPDLKAAREVADYLGTIHHEFHFTVQXGIDAIEEVIYHDETYDVTTIRASTPMFLMARKIKSLGVKMVLSGEGSDELLGGYLYFHFAPNKEEFHRETCRKVKALHQYDCLRANKATSAWGLEVRVPFLDKEFINVAMGMDPEWKMYDKNLGRIEKWVMRKAFDDDEHPYLPKHILYRQKEQFSDGVGYNWIDGLKSFTEQQVTDEMMNNAAQMFPYNTPVNKEAYYYRMIFERLFPQDSARETVPWGPSIACSTPAAIEWVEQWKASNDPSGRFISSHDSAATDHTXAVSRRWPTAAATXANGTVNGKDVAVAIAV

SEQ ID NO: 26250 - protein, 333 aa, Triticum aestivum
MKVSRGAVACAALMLLSTAAALRSEPSRLSTSGAPKLRASAEAAQANATFCSKEEVFAWAKKDHRRLLHVVYRVGDIHKTIKFYTECLGMKLLRKRDIPEEKYTNAFLGYGREDAHFVVELTYNYGVDKYDIGAGFGHFGIATDDVAKTVKIIRAKGGKVTKEYGTVKGGKTVIAFIEDPDGYKFEILERPGTREPLCQVMLRVGDLDRAISFYEKAYGMELLRKRDNPRNKYTVAVMGYGPEDRNAVLELTYKYGVAKYDKGKAYGQIATGTDNVYKTAEVVKLSGGQVVREPGPLPGIGTKITSVLDPDGWKTVFVDNIDFAKELGGHAHH

SEQ ID NO: 26251 - protein, 480 aa, Thermoplasma volcanium GSS1
MEYHEVIEKLDFSKVTRFYWLLTLLATIGGFLFGYDTSNIGTALVFIPYPVQGFIEGYLVAGASLGAAVGALIAAGLTDRYGRKYLLIADAAIYAAGAILSAFTIDLAMLLLSRTLIGLAVGADSGIATAYISEYAPKDRRGSLGILQQWMITIGILGAYIVGMATLYAAPGLASVLDWRIMLGVAAIPALIGLGFRFMMPESPRWLMINGKYKEASEAFKKLGLNLSVDELKEVKFRQRAKITNGVKRAFLVVALFFVFQQITGINIPFYYGPIVIEKLHLFGSATQSLVFTQIYAVAAATILAVINVAATYIGFRYIDTVGRRKLALLGYSGMTFFGLLGGLLLYLKFDVGLLIAFAGFIIFFAFGVGGTGWMIQGEYFPTNMRGLYASLGAFVDWIANFAIIEIFPVLEALITIKNVMFVFGILSLIAVLIFYYIMPETKELSVEQISDLFENNGLSSLRKASMSYNKSSSGSSGKK

SEQ ID NO: 26252 - protein, 300 aa, Silicibacter sp. TM1040
MAAEIIDGKAFAAKVRGQVTEHVTRLKEEHGITPGLAVVLVGEDPASQVYVRSKGKQTVEVGMNSYEHKLDADTSEADLLALIDQLNKDSEVHGILVQLPLPKHLDEDLVINSIAPEKDVDGFHISNVGLLGTGQKSMVPCTPLGCLMMLRDYHGSLSGLDAVVIGRSNIVGKPMAQLLLGDSCTVTIAHSRTKDLPEVVRRADIVVAAVGRPEMVPGDWIKEGATVIDVGINRIDAPEKGEGKTRLVGDVHYESAAARAGAITPVPGGVGPMTIACLLANTVTACCRANNLSEPEGLTA

SEQ ID NO: 26253 - protein, 483 aa, Coccidioides immitis RS
MGSLYCRRSLSKALQARISSRILPAAPPVAGFNHRSRRRFHSTPVPWGIRSQILKDVGEGITEVQIIQWYVQEGARIEEWKPLCQYQSDKAVDDITSRYEGVIKKLHFQADDTVPTGMALCEIEVDDAKYPETNAPAPPKAESAPEPTTSASAVSQETAQEVLAENSQAQVETAPAAPKSKYATFATPAVRGLLKEHGLDITKITGTGKDGRVMKEDVFKYLAERDSQAAAPAAQPTATTPSVDTPQIETPTRLTPIQSQMFKTMTKSLSVPHFLYADDLSISALASIRQKILSHPTEPQKISFLPFIIKAVSLALQQYPLLNARVDTTTNPDKPSLVMRSSHNIGVAMDTPTGLLVPNIKNVQARSILDIAAEVTRLAAVARAGKLTPADLNGGTITVSNIGTIGGTYVAPVLVPNEVAILGVGRSRTVPVFDEQGNVVKDQKMTFNWSADHRVIDGATMARMAEKVRMYVESPETMMLALR

SEQ ID NO: 26254 - protein, 394 aa, Saccharomyces cerevisiae
  misc_feature (26)..(26): Xaa can be any naturally occurring amino acid
  misc_feature (53)..(53): Xaa can be any naturally occurring amino acid
  misc_feature (94)..(94): Xaa can be any naturally occurring amino acid
  misc_feature (110)..(110): Xaa can be any naturally occurring amino acid
  misc_feature (116)..(116): Xaa can be any naturally occurring amino acid
  misc_feature (165)..(165): Xaa can be any naturally occurring amino acid
  misc_feature (174)..(174): Xaa can be any naturally occurring amino acid
  misc_feature (203)..(203): Xaa can be any naturally occurring amino acid
  misc_feature (215)..(215): Xaa can be any naturally occurring amino acid
  misc_feature (302)..(302): Xaa can be any naturally occurring amino acid
  misc_feature (371)..(371): Xaa can be any naturally occurring amino acid
SEGITDIEESQIQTNYDKVVYKFDDXELDENLLRGVFGYGFEEPSAIQQRAIXPIIEGHDVLAQAQSGTGKTGTFSIAALQRIDTSVKAPQALXLAPTRELALQIQKVVXALAFHXDIKVHACIGGTSFVEDAEGLRDAQIVVGTPGRVFDNIQRRRFRTDKIKXFILDEADEXLSSGFKEQIYQIFTLLPPTTQVVLLSATXPNDVLEVTTKFXRNPVRILVKKDELTLEGIKQFYVNVEEEEYKYECLTDLYDSISVTQAVIFCNTRRKVEELTTKLRNDKFTVSAIYSDLPQQERDTIXKEFRSGSSRILISTDLLARGIDVQQVSLVINYDLPANKENYIHRIGRGGRFGRKGVAINFVTNEDVGAXRELEKFYSTQIEELPSDIATLLN

SEQ ID NO: 26255 - protein, 507 aa, Solenostemon scutellarioides
MTSLLAHPLLPPPRRRPLPPLLPPPVSHPAGPRPGRWWRNLYDVKPVRFRCFAEWAQLFGPTFSVWFGSTLNVIVSSSELAKEVLKEKDGQLADPPRSRSAVKLSRDGKDLIWADYGPHYVKVRKVCTVVLFSPKRLELLRPIREDEITVMVESIYQDSAASGKSVVIKKYLASMAFHNITRLVFGKRFVNSEGEVDKQGQEFKAIAINGLKLGASLAVSEHIPWLRWMFPLDEDAFTQHGVRMERLTREIMQEHTLARQKTGGAKQHFFDALLTLKDEYDLSEDTIIALLWDMIAAGMDTPAISVEWAMAELVRNPRVQEKVQEELDRVIGHERIMTELDIPNLPYLQCVVKESLRLHPPTPVMLPHRSNADVKIGGYDIPKGSNVHVNVWAIARDPKSWKVPLEFRPERFLEEDVDIKGHDFRLLRFGAGRRVCPGAQLGIDLATSMIGHLLHHFRWTPPTGVRAEDIDMGENPGTVTYMRTPVEAVPTPRLPANLYKRVAVVDI

SEQ ID NO: 26256 - protein, 156 aa, Haemophilus influenzae
NRSNTPVLVDGKDVMPEVNAVLAKMKDFCLRIISGEWKGYTGKAITDVVNIGIGGSDLGPYMVTEALRPYKNHLNMHFVSNVDGTHIAETLKKVNPETTLFLVASKTFTTQETMTNAQSARDWLLKAAKDENEVAKHFAALSTNAKDVEKFGIDTN

SEQ ID NO: 26257 - protein, 501 aa, Pseudomonas mucidolens
MDKVYYQEKFRPQFHFTPETNWMNDPNGLVYYEGEYHLFYQYHPFGNTWGPMHWGHAVSKDLIHWDHLPIALYPDHIGQIFSGSAVIDWQDTSGFFNGGAGMVALFTHADKFPDSGRPRQRQSLAYSTDRGRTWIKYEGNPFFADEAMTDFRDPKVFWHKASNKWIMILAAGNCVRIYHSSNLKQWKFASEFGANEGSHTGVWECPDLFELPVDGDRNRKKWVMVVSIGNSDEYLEGSRTQYFIGQFDGIRFTNENDPETVLWVDHGRDNYAGVTWSDIPEEDGRRLFIAWMSNWKYANHTPTEIWRSAMTIPRSLSLRSTPEGTRLFQTPVTELESLRLEKLEWKDLEVTTNGNVLSNISGDIFEIIAEFELNTALEFGFKVRKSADQETIVGYDAEQQMLFIDRTQSGVSDFCEHFPCKHGAVMIPNQNRIQMHIFVDRSSVEVFGNNGELTMTDLIFPDDSSTGIEVYAKEGNVKLVSLMLFPLMPIHSHLKSFVMNN

SEQ ID NO: 26258 - protein, 437 aa, Methylobacillus flagellatus KT
MESNLLLILLALFLVLLNGFFVAAEFGLVKLRQTRVKAIAKNNGWRGRILAKVHHQLDAYLSACQLGITLASLGLGWVGEPAFAKLLEPLLFNMGITTPELVHGISFFVAFFTISYLHIVLGELAPKSMAIRQPERIGLWTGAPLYVFYWLMYPAIWLLNASSNWILRKFGLSTGHATDAHYSADELKLILRSSRASEELTKDEWNILAHTLDFSDLEVADLMRPFNEAISLSAKNSFEENLKIIAQHRYSRYPFVEQDGKVKGVIHLKSLFLAKFEEDELQDLGRFVHPAPFVPPDLPAIELFRRFREGKVSHFAIVGRKGQEPLGFITLDNMLGALVGEIRDEFRQTQNDWTKLDDGTLIGKGSLPIFTLERALGIEIDNEDEVDSVGGLVLSKLGYIPKEGESIAFEQFDIVVKKMNGPRIILVRIHPKQKHDE

SEQ ID NO: 26259 - protein, 205 aa, Oryza sativa
MASRKLVLGLTAARRLRSRAPVLVSSSPFLEASTSTSDATAATATRGSGLGPWGLFLSSRALSSTRPVSLSAGDAPGSSAADHRSILPEDEYHKLADETIHDLLEKLEEYGDSLQMDGFDIDYGNQVLTLRLGELGTYVVNKQAPNRQIWLSSPVRLSTFVRSGPSRFDWDAPTNCWIYRRTGANLVELLEKEIGELCGTPVELS

SEQ ID NO: 26260 - protein, 624 aa, Arabidopsis thaliana
MDDMNLIQQAQRHQLVVSNLGEEIDLEIGPGEDDAAFANNSLIGGPPREPSTGEHDETKHMVLVSDLPSEDQDISKGTPAKRKKKVVKRWREEWADTYKWAYVDMKDGTARIFCSICREYGRKHRRNPYGNEGSRNMQMSALEEHNNSLLHKEALRLQTASKDKIVVDKPIYVKTVMSKSAGSIVEGALKRDPNEIEFVQSVQESVHALERVIAKNSHYVNIMERLLEPERMIVFRVPWIDDRGETHVNRGFRVQFNQALGPCRGGIRFHPSMNLSIAKFLGFQQTLKNALSPYKLGGASGGSDFDPKGKSDNEIMRFCQSFMNEMYRYMGPDKDLPSEEVGVGTREMGYLFGQYRRLAGQFQGSFTGPRIYWAASSLRTEASGYGVVYFARLILADMNKEIKGLRCVVSGCGKIAMHVVEKLIACGAHPVTVSDSKGYLVDDDGFDYMKLAFLRDIKSQQRSLRDYSKTYARAKYFDELKPWNERCDVAFPCASQNEVDQADAINLVNAGCRLLVEGSNMPCTAEAVDVFRKANVLIAPAIAAGAGGVAAGEIEVLRESNSMQWSAEDFESRLQEALKQTYEKALKAANDFGYQKESPEALLHGATIAAFLNIAQAMTDQGCV

SEQ ID NO: 26261 - protein, 151 aa, Brevibacillus brevis
MGKWKVGTRRSKLALTQTNWVVDKLKGFAPEADFELHEIVTKGDRILDVTLSKVGGKGLFVKEIEQSLFDKETDFAVHSLKDMPAELPEGLVIGAIPKRVDPRDVLLSKDGKTLDELPQGALVGTSTLRRSAQILAHRPDIQIESLRGNID

SEQ ID NO: 26262 - protein, 211 aa, Sinorhizobium meliloti
MSGTLVLVRHGQSDWNLKNLFTGWRDPDLTELGIEEAKAGGKALADYGIKFDIAFTSVLIRAQRTCQLVLDAVGQSSLETIRDQALNERDYGDLSGLNKDDARAKWGEEQVHIWRRSYDVPPPGGESLRDTGARVWPYYLTDILPRVLSGEKVLVAAHGNSLRSLVMVLDKLTKEQILKLNLATGVPMVYKLNADSTVASKEVLGDMSGAH

SEQ ID NO: 26263 - protein, 243 aa, Clostridium acetobutylicum
MRKLVLLRHGQSEWNKENRFTGWTDVDLSVDGVSEAAQAGRILKKNNYTFDAAYTSVLKRAIRTLQIVLYEMDLLWIPVYKSWKLNERHYGALQGLNKDETRDKYGEDQVHLWRRSVEVRPPALEKSDKRYPGNEKKYASLKEEELPVTENLEDTEKRVLQDWRELIAPNIKGGKNIIISAHGNTLRALVKYLDNIPSDGIANLNIPTGTPLVYELDENLEPITRYYLGMDGKIEDDKFPKKV

SEQ ID NO: 26264 - protein, 350 aa, Haloarcula marismortui ATCC 43049
MLQRAEPQDFERVLSSMCTVPHPSAREAAERFLATNPGDPGTYETIAGLEREAVEYLGDITGLSDPAGYVASGGTEANLQAIRIARNRADTDDPNVVAPVHAHFSFTKAADVLGVELRTAPAADYRVNMAAMAELVDEDTVCVVGVAGSTEYGYVDPIPAIADLAETVDALCHVDAAWGGFYLPFTDHDWHFGHADIDTMTIDPHKVGQAAVPAGGLLARDRTLLDELAVETPYLESTDQLTLTGTRSGAGVASAVAAMESLWPAGYRQQYETSMANADWLADQLSARGHDVVGPELPLVAADLSMPMTDELRDRGWRVSKTGAGEMRVVCMPHVTRSMLRSFVADLDWY

SEQ ID NO: 26265 - protein, 521 aa, Oenococcus oeni PSU-1
MKFEEFGLSPELLSAVKKHGYDEATPIQEKTIPLIIQGVDVIGQAQTGTGKTAAFGLPILEEVDPKNPQIQALVISPTRELAMQTEEELNKLGSDKHVKTQVVFGGYDIRRQIHALKEHPQILVGTPGRLIDHLNRHTIDFRGVKTLVIDEADEMLNMGFLEDIETIVHYTPDDRQTLLFSATMPDDIKKIGVKFMEDPEEVHIASKGLTIDLVDQYLVNTREYEKFDAMTRLFDVEQPELAIVFGRTKRRVDELTKALQLRGYKAAGIHGDLDQAARMRTLRSFKKGELQFLVATDVAARGLDISGVTHVYNYDVPQDPESYVHRIGRTGRAGHHGVSVTFVVRGEIDYLRAIEKLINKRMAALKPPSAEEAHIARLKNAKAETYAVLGKTTIDNVEDEATEIANQYDAKLIAAALLHALSKDDERTRPVDIAQEKPLPRRHSSSDHGHNFRSGRSNGNRGRNGHSNGNRGGRRGGFKEEFVIDRGHKPVDRRNQRIQARPKGVAKAAPKKREFKIVKKS

SEQ ID NO: 26266 - protein, 567 aa, Bacillus licheniformis ATCC 14580
MNNMRRTKEGHLETSLRGKDVLSIPTLNKGVAFSLEERKNLGLEGLLPPTVLSLDQQAERAYEQFSRQPDRLRQNVYLNDLQNRNEVLFYKLLQNHLREMLPVVYTPTVGEAIQEYSHEYRRPHGVYLSIDDMDGIETAFKNLQASADDIDLIVATDSESILGIGDWGVGGINIAIGKLAVYTAAAGIDPSRVIPVVLDVGTNNEKLLNDPLYIGNRHPRVEGERYEQFIDAYVETALKLFPNALLHWEDFGNKNARNIMSKYNHKIATFNDDIQGTGAITLAAILAAVKKTGTSLKDHRVVIFGPGSAGIGIADQIRDTMVLEGLSEEEANRAFWTVDYRGLLTTGMDQIMDFQEPYLRDTEEVKDWKRNEKGEISFEEVIRQVKPTILIGTSGVAGAFSEEIIKEMAAHTERPVILPMSNPTHLAEAVPEDLFKWTDGKALVATGSPFEAVEYNGVKHEIGQSNNAFVFPGLGLGTIVAKAKVITNGMFAASANAVANMVDHEKPGAGLLPKIDDLQDVSVQVAIDVVKAAIKDGVAQVQPEDVEKAVREAMWRPEYKTIVAKQD

SEQ ID NO: 26267 - protein, 661 aa, Mycobacterium sp. JLS
MHRRGRQGVDLIAGRRGRAGQRPGRVPGRKWVRDPGGRAVGGSAVGRRRDGAAADLRPGGWGVRRDRRGGRCAAPLIGDRPGGYAATMTDLVADALVARLRDWGADRVFGYAGDGVNTLLGALQRSGAPEFISTRHEELAAFMACGHAKYTGRVGVCMATQGPGAIHLLAGLYDAKLDKRPVVAVVGQVVSTALGSGYLQEVDLHTLFKDVCGQYVQTVFAPEQALMALDNAMRTAIATSTPTCLIIPHDVQQAEMPDELAHSHGVVPSAAVSAPTRITAPDDQIRSAADILNAGRRVALLVGRGAAGAADEIARVVETLGAGVTTSLLGKPVLDEGQPWHTGVMGHLGTTASAELMANCDTLLIVGSNDPWTEFYPAPGQAKAVQIDIQPRVIGAKYPVDAPVVGQAAQALSALSALLEPKPDRAWQEQVRQWREQWHAEAARRAAAETSDANPEAVVRALSDHLPADARVAVDTGSSTYWYARHLRLPPGVPAHLSGYLASMGCALPYGVAAKLDAPQRPVVALVGDGAMQMSGLLELVTIADRWRSWQDPRFVVLVLHNADLTEVSWEQREMEGNPRFAPSQDVPRFPYAGYAELLGLRGIRVTSSQEADDAWATAFSADRPTVIEAVVDAATPLLPPLMPDSKADKVRAALEQEART

SEQ ID NO: 26268 - protein, 325 aa, Prochlorococcus marinus subsp. pastoris str. CCMP1986
MEPNVYILILLIIIILVGSACCSGVEAAFLAVNSIRILELASKQKPKSSANQLLKLRKHLGRTLTVITITNNGFNIIGSLLLGVYGALIIKSSLGLTLFSIAFYVLVVLLGEVLPKALGTRFSLQIAMFSVPILRMLNSLMRPFLLLIEQLFPVITAENEISTDEAEIRQMAKIGSQKGFIEADEAEMILKVFQLNDLKAKDLMIPRVSAPSLDGSSNLDEISKLIISNNSPWWVVLGDKVDKIQGIAKRENLLTSLIKGENKKLISELCDPVDYIPEMIKVDKLLTRFDKDHKGVKVVVDEFGGFVGIIGSEAVLSVLAGWWKE

SEQ ID NO: 26269 - protein, 478 aa, Oryza sativa (japonica cultivar-group)
MELGVPLPRRPVPGSYGVPFVSAVRDRLDFYYLQGQDKYFESRAERYGSTVVRINVPPGPFMARDPRVVALLDAKSFPVLFDVAKVEKRDVFTGTFMPSTSLTGGYRVCAYLDPSEPNHAKIKQLLLSLLVSRKDAFVPVFRSNFGALLDTVESQLASGGGKSDFTALNDATSFEFIGEAYFGVRPSASSSLGTGGPTKAALWLLWQLAPLTTLGLPMIIEDPLLHTLPLPPFLISSDYKALYAYFAAAASQALDAAEGLGLSREEACHNLLFATVFNSYGGFKLLLPQILSRVAQAGEKLHERLAAEIRSAVADAGGNVTLAALEKMELTRSVVWEALRLDPPVRFQYGRAKADLEIESHDASFAIKKGEMLFGYQPCATRDPRVFGATAREFVGDRFVGEEGRKLLQYVYWSNGRETENPSVDNKQCPGKNLVVLVGRLLLVELFLRYDTFTAEAGKKVVITGVTKASTSAVNRTA

SEQ ID NO: 26270 - protein, 410 aa, Mycobacterium avium subsp. paratuberculosis K-10
MASATGFVIIGGGLAAAKAVDALRDNNFDGRIIVFADEEHLPYERPPLSKEFLAGKKSLTDFTVQNSDWYRDNDVDLRLNTRVCALDAAGHTVGLADGTTVAYDKLLLATGSAARRPPIPGSDCAGVHYLRTYEDAVALNSFLGEGKSLAVVGAGWIGLEVAAAARQRGVEVTVVEAARQPLTAALGETVGEVFATLHREHRVDLRLETQVREITRADGSATGLRTTDGSAIPADAVLVAVGAQPNIELAEAAGLSLADGGVLVDASLRTSDPDIYAVGDIAAAEHPLLRTRIRTEHWANALKQPAIAVAGMLSRPGEYDELPYFFTDQYDLGMEYVGHAPRFERVVFRGDVAAREFVAFWLDADDRVLAGMNVNIWDVLDDVKALIRSRAPIDADRLGDPGAPLGELLG

SEQ ID NO: 26271 - protein, 517 aa, Neisseria meningitidis MC58
MTQTNRVIIFDTTLRDGEQSPGAAMTKEEKIRVARQLEKLGVDIIEAGFAAASPGDFEAVNAIAKTITKSTVCSLSRAIERDIRQAGEAVAPAPKKRIHTFIATSPIHMEYKLKMKPKQVIEAAVKAVKIAREYTDDVEFSCEDALRSEIDFLAEICGAVIEAGATTINIPDTVGYSIPYKTEEFFRELIAKTPNGGKVVWSAHCHNDLGLAVANSLAALKGGARQVECTVNGLGERAGNASVEEIVMALKVRHDLFGLETGIDTTQIVPSSKLVSTITGYPVQPNKAIVGANAFSHESGIHQDGVLKHRETYEIMSAESVGWATNRLSLGKLSGRNAFKTKLADLGIELESEEALNAAFARFKELADKKREIFDEDLHALVSDEMGSMNAESYKFISQKISTETGEEPRADIVFSIKGEEKRASATGSGPVDAIFKAIESVAQSGAALQIYSVNAVTQGTESQGETSVRLARGNRVVNGQGADTDVLVATAKAYLSALSKLEFSAAKPKAQGSGTI

SEQ ID NO: 26272 - protein, 602 aa, Solanum tuberosum
MASAVLASRNESSWAQSGGAGGGFMGKTPFSHTQLNPNHNPNPKKKQKQFHHTSNGRHIDESPAVTQTASDDAYSFNQRPIESTTNVDGLNFGGYLTFNVVSYNKGEVNELRSRLLAEVEQIRNLKDRIESGQLSTTNPRSQGKSKKLSGNKRPTPSGSSKDPKKLPNGVENRNFGNPVGGGGVKAIGTESMMKECRQILAKLMKHKNGWIFNIPVDAEALGLHDYHQIIKRPIDLGTVKSNLAKNFYPSPFEFAADVRLTFNNALLYNPKTDQVNGFAEQLLGRFEDMFRPLQDKMNKLEGGRRDYHPVDELQGSSWNHIPTPERVKKPKATPVPHISKKQERMQNHSSASTPSLPVPPPNPPARQQSPLSTPSPVRAPPSKPESAAKVPAMGKQPKPRAKDPNKRVMNMEEKHKLGVGLQSLPQEKMPQLVQIIRKRNEHLAQDGDEIELDIEALDTETLWELDRFVTNWKKMVSKTKRQALMINNLGPPSASAAASAATTSVAEADGPTTSEKNDSFKKPKKGDVGEEDVEIEDDEPATHFPPVEIEKDEGGGRDQENGGGGSSSSSSSSSSSSGSSSSSDSDSGSSSGSDSDADDAHS

SEQ ID NO: 26273 - protein, 615 aa, Nicotiana benthamiana
MASAVLASRNESSWAQSGGAGGGFMGKTPYSHTHLNPNSNPKPKKKQKQFHHASNGRQNDESPAVTQTASDDAYSFNQRPIESSTNVDGLNLGGYMTYNVASYNKTELHELRSRLVAELEQIRSLKDRIESGQLSTSNPRSHGKSKKLSGNKRATPSGSSKDPKKLPNGVDNRNFGNPGGVGVKGIIGMENMMKECRQVLGKLMKHKSGWIFNTPVDAEALGLHDYHQIIKRPMDLGTVKSNLSNCFYPTPFEFAADVRLTFNNALLYNPKTDQVHGFAEQLLARFEDMFRPIQDKLNKLDGGSDRRDFHPTDELQGISWNHIPTPERVKKPKPTPAPHISKKQERMMQNHSSALTLPVQQPPDNTPVVRQQSLLSTPSPVRAPPAPKPQSSVAAKVPPMGKQPKPRAKDPNKREMSMEEKHKLGVGLQSLPQEKMPQLVQIIRKRNEHLAQDGDEIELDIEALDTETLWELDRFVTNWKKMVSKTKRQALINNLGQPPSASAAASAATTTSVAEADAPSTSEKNDSFKKPKKGGDAGDEDDVEIEDDEPATHFPPVEIDKDEGGGGGGVGQDRDNNASSSSSSSSSSSSDSSSSSDSDSGSSSGSDSDADDAHS

SEQ ID NO: 26274 - protein, 613 aa, Nicotiana benthamiana
MASAVLASRNESSWAQSGGAGGGFMGKTPYSHTHLNPNSNPNPKKKQKQFHHASNGCHNDELPAVTQTASDDAYSFNQRPIESSANVDGLNLGGYMTYNVASYSKTELHDLRSRLVAELEQIRNLKDRIESGQLSTSNPRSHGKSKKLSGNKRPTPSGSSKDPKKLPNGVDNRNFGNPGGGGVKGIIGMENMMKECRQVLGKLMKHKSGWIFNTPVDAEALGLHDYRQIIKRPMDLGTVKSNLSNNLYPTPFEFAADVRLTFNNALLYNPKTDQVHVFAELLLTRFEDMFRPFQDKLNKLDGGSGRRDFHAIDELQGSSWNHIPTPERVKKPKPTPAPHISKKQERMMQNHSSASTPSLPVQQPPDNPPVVQQQSPLSTPSPVRAPPAAKPQSSVAAKVPPMEKQPKPRAKDPNKREMSMEEKHKLGVGLQSLPQEKMPQLVQIIRKRNEHLAQDGDEIELDIEALDTETLWELDRFVTNWKKMVSKTKRQALINNLGQPPSASAAASAATTSVAEADGPSTSEKNDSFKKPKKGGDAGDEDDVEIEDDEPATQFPPVEIDKDEGGGGGRDPDNNASSSSSSSSSSSSDSSSSSDSDSGSSSGSDSDADDAHS

SEQ ID NO: 26275 - protein, 147 aa, Zea mays
QITVDGEVVTDPDMTLRDGSKLVYHRFPWQEPFAPYLLEVLYEDDDMVALNKPFGLQVLPKGLFQQRTVLAQLQLKDGKMASSCRFKRKDVQSHLVPVHHLGRGTIRFVSFFRAKSSLLKKSGSLTLTLVYHRYLFLLTWTLTIKNI

SEQ ID NO: 26276 - protein, 328 aa, Ashbya gossypii ATCC 10895
MMDKLDLDQLPYYDPRVERKVALVTGGNSGIGWYTVLHLYMHGFIVYVGGRNSSRVHKAIKEIKQEAENRLETARQDPHDELERCLGELRYLPIDLTDLRSVEKAAKKFRAQESTLDVLINNAGVMALPYELTHDGFEVQMQTNYVSHFLLTMRLLPYVKRSGGRVVTLSSIGHKIQFTYCPLDCHFDYRPNIFFTWLRYAMAKTAAIQFTKMLAIKHPDVMCIAVHPGLVMNTNLFSYWTRLPIVGIIFWIFFQIVGFCFGVSNEEGSIGTLKSALSPALTLERDNGKYFTTGGVESRPSSVANNLDNAASTWIWTVHQLRDRGYEI

SEQ ID NO: 26277 - protein, 999 aa, Candida albicans SC5314
MFTKSTIRTVLRSLATKANTSSENFAKVLNPKVSFDNLDVFARRHIGPTPKEVQKMLSSLGYNDLDEFLSNVVPEHILIKRKLSVQPEKGFTESEMLDHLHKLANKNKIKKSFIGKGYAGTLLPPVIQRNLLESPEWYTSYTPYQPEISQGRLNSLLNYQTMICSLTGMAMANASLLDEGTAAGEAMALSFHNSKDKKKIYVVDANLHPQTVDVIKSRAENIGVEIVEIPLATKQGVEELSRIADKVCGALVQYPDTNGEITDFTEIGNILHSNKALFAMATDLLALTVLKPPSEFGADIALGTSQRFGVPFGYGGPHAAFFATSSKYARKIPGRIVGVSKDRLGNPALRLALQTREQHIKREKATSNICTAQALLANISANYAVYHGPQGLKNIANRVYGFTTLLANEISKKHQLVNNKWFDTLTVKLNGVSSDEILAKALNEYDINMFRVDESTVSLQLDETVQKQDLINLVNVFTGQENYSPDELPAIPQELLRSDEILTNEVFNAHHSETAMLRYLHSLQRMDLSLADSMIPLGSCTMKLNATVEMQTLSIPGFNSIHPFAPIDQAQGYKELIDEFEKDLNDITGFDGTTSMPNSGAQGEYTGLSLIREYHRSRGEHDQRNICLIPVSAHGTNPASAAMCGLKVVPVKCLSNGSIDLEDLEAKAAKHAKNLCSIMITYPSTYGLFEPGVKKAIDIVHANGGLVYLDGANMNAQVGLTSPGDLGADVCHLNIHKTFALSHGGGGPGQAPVCVKEHLKPFLPKHHFVNTPHSTSESIKAVNSAPYGSASVIPVSYSYIKMLGAQALPYVSAIAMLNANYILTKLEPHYKILFVDRDASSESGTKHCAHEFILDLREFQKIGIEAIDVAKRLQDYGFHAPTMSFPVAGTLMIEPTESENLRELDRFIDSLISIRKEIEAYQNKEPLGQVLKNAPHSLEDIVSSEDWDARGYTREQAAYPLPFLKKNKCWPTVSRLNDTYGDLNLICTCPSVEEVAAES

SEQ ID NO: 26278 - protein, 295 aa, Magnetospirillum magnetotacticum MS-1
MTDAKLIDGNLFSGKLRETIAARVAEMKEKHRVTPGLAVVLVGEDPASQVYVRTKGKRTIEAGMRSFEHKLPADTPEDALLLLIESLNKDPDVHGILVQLPVPKHIDTQKVIEAIDPAKDVDGFHPVNVGRLAAGMDAMVPCTPLGSLLLLKDTLGKLGGLDAVVIGRSNIVGKPMAQLLIKESCTVTVAHSQTKDLPSVVRRADIVIAAVGRPEMIKGDWIKPGATVIDVGINRIELPEGKTKLVGDVDFASAVKVAGAITPVPGGVGPMTIACLLRNTVVACARLHHLPEVEF

SEQ ID NO: 26279 - protein, 113 aa, Zea mays
MKYLHSMVRVRDLDASLRFYCEGLGLREVRRKEVPEGKFTLIFLAADESPEAEVELTWNWGSTEDYGSARNFGHLAFRVEDIYATCARLQSMGYTIHRPPRDGHMAFVRSPDL

SEQ ID NO: 26280 - protein, 376 aa, Symbiodinium sp. CS-156
MGDEEVAALVVDNGSGMCKAGFAGDDAPRAVFPSIVGRPKMPGIMVGMDQKDSYVGDEAQSKRGVLTLKYPIEHGIVTNWDDMEKIWHHTFYNELRVAPEEHPVLLTEAPLNPKANRERMTQIMFETFNVPAMYVAIQAVLSLYASGRTTGIVMDSGDGVSHTVPIYEGYALPHAILRLDLAGRDLTEYMMKILTERGYSFTTTAEREIVRDVKEKLCYIALDFDSEMKAASESSDKEKTYELPDGNIITVGSERFRCPEVLFQPSFVGKEASGIHDTTFQSIMKCDVDIRKDLYANVVLSGGTTMFQGIGERMTKELTALAPSTMKIKVVAPPERKYSVWIGGSILSSLSTFQQMWISKGEYDESGPTIVHRKCF

SEQ ID NO: 26281 - protein, 493 aa, Thermoplasma acidophilum
MDTKLYIDGQWVNSSSGKTVDKYSPVTGQVIGRFEAATRDDVDRAIDAAEDAFWAWNDLGSVERSKIIYRAKELIEKNRAELENIIMEENGKPVKEAKEEVDGVIDQIQYYAEWARKLNGEVVEGTSSHRKIFQYKVPYGIVVALTPWNFPAGMVARKLAPALLTGNTVVLKPSSDTPGSAEWIVRKFVEAGVPKGVLNFITGRGSEIGDYIVEHKKVNLITMTGSTATGQRIMQKASANMAKLILELGGKAPFMVWKDADMDNALKTLLWAKYWNAGQSCIAAERLYVHEDIYDTFMSRFVELSRKLALGDPKNADMGPLINKGALQATSEIVEEAKESGAKILFGGSQPSLSGPYRNGYFFLPTIIGNADQKSKIFQEEIFAPVIGARKISSVEEMYDLANDSKYGLASYLFTKDPNIIFEASERIRFGELYVNMPGPEASQGYHTGFRMTGQAGEGSKYGISEYLKLKNIYVDYSGKPLHINTVRDDLFQ

SEQ ID NO: 26282 - protein, 808 aa, Sulfitobacter sp. EE-36
MKQKLVVIGAGMASGRVLEHLLEQDRDAYDITLFNAEARGNYNRIMLSPVLSGEKTYADIVTHDAGWYAENDITCRFGEKVLEIDRAAKTVTGENGTVSYDKLVLGTGSNPFMIPLPGHDLEGVIAYRDLEDTERMMGLGEGSKCVVIGGGLLGLEAAAGMAARGVDVTVVHIMGHLMERQLDEAAGYLLRRALTDKGITVKCAANSKEILGENGKVRALLLDDGTELPCDLLVMAVGIRPNVALGQGAGLAVGKGIHVDDQMVTSDADVLAVGECVEHNGALFGLVAPLYDQAKVAAQTLLGQSSTFVPKELSTKLKVTGCDLFSAGDFADGEGREDIVFRDPARGVYRRLVIKNNVVIGAVMYGDTADSNWFFGLIRDKTDIADMRDTLIFGPAYQGGTPLDPLAAVAALPRDAEICGCNGICKGQIEDAIAAGVSDLGAIKATTKASASCGTCTGLVEQVLAVTLGDDFVLPAAASICGCTDMTHEDVRRMIKSQRLTSMPAVWQECGWKTPDGCHVCRPALNFYLLADWPLEYRDDPQSRFINERKHANIQKDGTYSVVPRMWGGITTPDELRAIADAADKYMVPTVKVTGGQRIDLLGVKSEDLPDIWADLNAAGMVSGHAYSKGLRTVKTCVGTDHCRFGTQDSTGLGIQLEKELWGAWTPHKLKLGVSGCPRNCAEATCKDIGVICVDSGYQISIGGAAGMDVRETELLIQVPTEQEAINVIKAVTQLYRENAKYLDRIYKWMAKVGLDWIKERVAAEGDALVDRFELSQTIYRKDPWAEHVTQQAERYKPLATLSLEAAE

SEQ ID NO: 26283 - protein, 828 aa, Vibrio angustum S14
MKMTRRAFVKANAAASAAAVAGITLPASATNLIVSSDETKIKWDKAPCRFCGTGCSVLVGTQNGRVVATQGDPKAPVNKGLNCIKGYFLSKIMYGKDRLQTPMLRMKNGQYDKEGEFTSVSWDTAFDVMAEKWKLALKKQGPSGVGMFGSGQWTVMEGYAASKMMKAGFRSNNIDPNARHCMASAVVGFMRTFGIDEPMGCYDDLEHADVFVLWGSNMAEMHPILWTRITDRRLSHPHVKVNVLSTYQHRSFELADNGMIFEPQTDLAIANFIANYIIQNDAVNWDFVNKHTHFKRAQTDIGYGLRDDNPLQQQAANPNSGDIFPMNFEEYKASVADYTVEKASEMSGVAPEKLIQLAKYYADPKLKVMSLWTMGMNQHTRGVWMQSLVYNLHLLTGKIATPGNSPFSLTGQPSACGTAREVGTFAHRLPADMVVANPKHREIAEKIWKLPEGTIPPKPGYHAVLQDRMLKDGKLNAYWVMCNNNMQAGPNINEERLPGYRNPENFIVCSDPYPTVTAQASDLILPTAMWVEKEGAYGNAERRTQAWYQQVEAPGEAKSDLWQIMEFSKRFKVEEVWGEELINKMPQYRGKTMYDILFRNGQVDKFPLSEAQALNDDAKAQGFYVQKGLFEEYASFGRGHGHDLAPYDTYHQVRGLRWPVVDGKETLWRFKEGSDPYAKKGTDWDFYGKPDGKAWIISAPYEAPPEVPDSEYDMWLCTGRVLEHWHTGTMTRRVPELYKAVPDALCYLHPDDAKKRGLRRGDEVNVASRRGEVRCRIETRGRNRPPEGLIFIPFFDARILVNKLILDATDPLSKQTDFKKCPVKISKV

SEQ ID NO: 26284 - protein, 372 aa, Streptococcus pyogenes M49 591
SLTAAITTVLARRLPTSVNQPKDYASIDAAPEERERGITINTAHVEYETETRHYAHIDAPGHADYVKNMITGAAQMDGAILVVASTDGPMPQTREHILLSRQVGVKHLIVFMNKVDLVDDEELLELVEMEIRDLLSEYDFPGDDLPVIQGSALKALEGDSKYEDIIMELMSTVDEYIPEPERDTDKPLLLPVEDVFSITGRGTVASGRIDRGTVRVNDEIEIVGIKEETKKAVVTGVEMFRKQLDEGLAGDNVGILLRGVQRDEIERGQVIAKPGSINPHTKFKGEVYILSKDEGGRHTPFFNNYRPQFYFRTTDVTGSIELPAGTEMVMPGDNVTINVELIHPIAVEQGTTFSIREGGRTVGSGIVSEIEA

SEQ ID NO: 26285 - protein, 678 aa, Nostoc sp. PCC 7120
MPAPTINPTITAFPLTAVVGQEAIKLALLLAAVDPGLGGVAIAGRRGTAKSVMARAIHALLPPIEVVKGSLSNCDPNHPEEWDDYLLAEYADKNIQDVPTEIIPSPFVQIPLGVTEDRLLGSVDVEQSVKQGDTIFQPGLLATANRGVLYVDEINLLDDQISNQLLTVLSEGRNQIEREGISFQHPCKSLFIATYNPEEGALREHLLDRIAIALSADGVLGLDQRVEAVEQAIAYSKSPQDFLQQYNEDLDSLKTQIILAREWLKEVTITQEQITYLVDEAIRGVVQGHRAELFAVRVAKAAAALEGRTTVNAEDLRRAVELVIVPRATVIQTPPPDQPPPPPPPPPPQSQDESEEEQEEEQENNEDKPEEQEQQEPPDIPEEFIFDPEGVILDNSVLYFAQMAQRQGKSGSRSIIFSDDRGRYIKPMLPKGKVRRIAVDATLRAAAPYQKARRERQPDKKVIVEQGDIRSKRLVRKAGALVVFVVDASGSMALNRMQSAKGAVMQLLTEAYQNRDQVALIPFRGEQAEVLLPPTRSIALARNRLERLPCGGGSPLAHGLTQAVRVGVNAQMGGDIGQVVIVAITDGRGNIPLSRSLGEPQESGEKPDIKAELLDIAARIRALGMQLLVIDTESKFVSTGFAKELAKTSGGKYYHLPKATDKAIAAMTKGAIADLKSR

SEQ ID NO: 26286 - protein, 105 aa, Alicyclobacillus acidocaldarius
ATMTLTDANFQQAIQGDGPVLVDFWAAWCGPCRMMAPVLEEFAEAHADKVTVAKLNVDENPETTSQFGIMSIPTLILFKGGEPVKQLIGYQPKEQLEAQLADVLQ

SEQ ID NO: 26287 - protein, 92 aa, Arabidopsis thaliana
  misc_feature (2)..(2): Xaa can be any naturally occurring amino acid
  misc_feature (5)..(5): Xaa can be any naturally occurring amino acid
  misc_feature (7)..(7): Xaa can be any naturally occurring amino acid
  misc_feature (52)..(52): Xaa can be any naturally occurring amino acid
  misc_feature (62)..(62): Xaa can be any naturally occurring amino acid
  misc_feature (74)..(74): Xaa can be any naturally occurring amino acid
  misc_feature (81)..(82): Xaa can be any naturally occurring amino acid
  misc_feature (91)..(91): Xaa can be any naturally occurring amino acid
SXATXVXSPAQATMVAPLNGLKSSAAFPATRKANNDITSITSNGGRVNCMQXWPPIGKKKFXTLSYLPDLYRFXNWLRKFXXLIRNKWDPXF

SEQ ID NO: 26288 - protein, 112 aa, Methylobacillus flagellatus KT
MKLVSAIIKPFKLDEVREALSSIGVQGITVTEVKGFGRQKGHTELYRGAEYVVDFLPKIKLEVAVADELLDQVVEVIEKSASTGKIGDGKIFVFDLEQVYRIRTGETGADAL

SEQ ID NO: 26289 - protein, 322 aa, Beta vulgaris
MDENYIRTCFAQSGELVNVKIIRNKQTMQSECYGFIEFSTHAAAERILQTYNNTLMPNVEQNYRLNWAFYGSGEKRGEDASDYTIFVGDLAPDVTDYTLQETFRVRYPSVKGAKVVIDRLTSRSKGYGFVRFGDESEQARAMSEMNGMMCLGRAMRIGAAANKKSVGGTASYQNNQGTPNDSDPSNTTIFVGNLDSNVTDEHLRQTFSPYGELVHVKIPAGKQCGFVQFTNRSSAEEALRVLNGMQLGGRNVRLSWGRSPNNRQSQPDQNQWNNAAYYGYPQGYDSYGYVSAPQDPNMYYGGYPGYGGYAMPQQAQMPLQQQ

SEQ ID NO: 26290 - protein, 367 aa, Medicago truncatula
MGYATTDETENKSDRLQELKAFDETKAGVKGLVDQGILKIPALFHHPPDKYGKSTNSTNTEHIIPVIDFLNIGKDPNTRQEIITKIKEASETWGFFQVVNHGIPINVLEDMKDGVIRFFEQDTEVKKEMYTRDQTRPLVYNSNFDLYSSPALNWRDTLALKMAPNAPKPEDLPVVCRDIFLEYGEHVMKLGIVLFELLSEALGLHPNHLKDLDCSEGNLLLCHYYPACPEPHLTMGTAKHSDSSFLTVLLQDHIGGLQVLHKGKWIDVPPIPEALVINIGDVLQLITNDRFKSVEHRVLANTIGPRVSVASFFRAGPRAQEKLYGPIKEILSEDNPPRYRETTFTDFVAYYNAKGLDGISALEHFKL

SEQ ID NO: 26291 - protein, 498 aa, Bacillus licheniformis ATCC 14580
MRNEEAAFMSQTLFIDGKWVGAKKGETRQIINPYNQEHIETVSEGDREDAVRAIAAARRAFDDGEWANTPGLERGNIVLKIAELIRRDHEELAELESLDTGKTIEESRADMDDIANVFQYYAGLADKDGGEVISSPIPDSKSKIVREPVGVCGQITPWNYPLLQASWKIAPALAAGNTIVVKPSEITPLTTIKIFKLMEEAGVPEGVANLVLGPGATVGDELARNKDVDLISFTGGIETGKKIMQAASTNVKKIALELGGKNPNIVFKDADFDVAVDQALNAVFFHAGQVCSAGARLLVEESIQDEFVAELVKRAKKIKLGNGFHEETQSGPLISAEHRSKVEKYVEIGLQEGAKLETGGKRPEDPELANGFFYLPTIFSSCTSDMRIVKEEVFGPVLTVETFKTEEEVVSLANDTIYGLAGAVWSKDIEKAERVASKLRMGTVWINDFHPYFAQAPWGGYKQSGIGRELGRMGLEEYTEVKHVYRNTKPAAVNWFKA

SEQ ID NO: 26292 - protein, 669 aa, Haloarcula marismortui ATCC 43049
MRETLKPRPAVERYVMDFEDIDTIAVLGAGNMGHGITEVAALAGYDVRMRDIKDEFVEDGYDNIEWSLNKLAERDQLTQEEADAALDRVTPLVDVEEAVSDVDVVIEAVPEKMEIKKDVYTEVEEHAPENAIFATNTSSLSITELSEVTERPEQFCGMHFFNPPVRMQLVEVISGAHSGDDTLEAIEALAEDFGKTPVRVRKDSPGFIVNRILVPLMNEAAWLVHDDAATIAEVDSTTKFDMGLPMGSFELSDQVGNDVGLHVLEYMHEVLGEPYAPCPLLEEKVENEELGKKTGKGFYDYENGGVDIPTDAGREDVEHRLVAVMANEVGKLVENDVAPVADIDQAVQLGGGFPDGPAKIADKTGLETLIDTLEETHEETGADRYAVADGLREAAESGGFYGSDDDAPAEFDNVTVEYPGDMVGHIELDRPHRMNTVSPDLMDDLADAVDLLENDDEVRAILLTGAGDKAFSAGADVQAMASNATPLDAIELSRKGQQTFGKLEECSMPVVAGIDGYALGGGMELATCADLRVASERSELGQPEHNLGLLPGWGGTQRLARIVGEGRAKEIIFTGDRYDADEMAEYGFINEVVDNDALHERALEMAKDMAAGPPVAQKLTKRAMLAGRDDIDAGLEVESQAFGHLIGTDDVMEGINAFMGDGEPDFEGK

SEQ ID NO: 26293 - protein, 617 aa, Nicotiana tabacum
MAFAVLASRNESSWAQSGGAGGGFMGKTPYSHTHLNPNSNPNPKKKQKQFHHASNGRHNDESPAVTQTASDDAYSFNQRPIESSTNVDGLNLGGYMTYNVASYNKTELHELRSRLVAELEQIRNLKDRIESGQLSTSNPRSHGKSKKLSGNKRPTPSGSSKDRKKLLNGVDNRNFGNPGGGGGVKGIIGMENMMKECRQVLAKLMKHKSGWIFNTPVDAKAMGLHDYHQIIKRPMDLGTVKSNLINNFYPTPFEFAADVRLTFNNALLYNPKTDQVHGFAEQLLARFEDMFRPIQDKLNKLDGGTGRRDFRAIDELQGSSWNHIPTPERVKKPKPTPAPHISKKQERMMQNHSSASTPSLPVQQPPDNPPVVRQQSPLSTPSPVRAPPAAKPQSSVAAKVPPMGKQPKPRAKDPNKREMSMEEKHKLGVGLQSLPQEKMPQLVQIIRKRNEHLAQDGDEIELDIEALDTETLWELDRFVTNWKKMVSKTKRQALINNLGQPPSASAAASAATTTSVAEADGPSTSEKNDSFKKPKKGGDAGDEDDVEIEDDEPATHFPPVEIEIDKDEGGGGGQVRDNNASSSSSSSSSSSSDSSSSSDSDSGSSSGSDSDADDAHS

SEQ ID NO: 26294 - protein, 616 aa, Nicotiana tabacum
  misc_feature (100)..(100): Xaa can be any naturally occurring amino acid
  misc_feature (234)..(234): Xaa can be any naturally occurring amino acid
  misc_feature (239)..(239): Xaa can be any naturally occurring amino acid
MASAVLASRNESSWAQSGGAGGGFMGKTPYSHTQLNPNSNPNPKKKQKQFHHASNGRLTDESPAVTQTASDDAYSFNQRPIESSTNVDGLNLGGYMTYNXASYNKTELHELRSRLVAELEQIRNLKDRIESGQLSTSNPRSHGKSKKLSGNKRPTPSGSSKDPKKLPNGVDNRNFGNPGGGGVKGIIGKENMMKECTQVLGKLMKHKSGWIFNTPVDAEALGLHDYHQIIKRPXDLGTXKSNLSNNFYPTPFEFAADVRLTFNNALLYNPKTDQVHGFAEQLLARFEDMFRPIQDKLNKLDGGSGRRDFHAIDELQGSSWNHIPTPERVKKPKPTPAPHISKKQERMMQNHSSASTPSLPVQQPPDNPPVVRQQSPLSTPSPVRAPPAAKPQSSVAAKVPPMGKQPKPRAKDPNKREMSMEEKHKLGVGLQSLPQEKMPQLVQIIRKRNEHLAQDGDEIELDIEALDTETLWELDRFVTNWKKMVSKTKRQALINNLGQPPSASAAASAATTTSVAEADGPSTSEKNDSFKKPKKGGDAGDEDDVEIEDDEPATHFPPVEIEIDKDEGGGGGQVRDNNASSSSSSSSSSSSDSSSSSDSDSGSSSGSDSDADDAHS

SEQ ID NO: 26295 - protein, 571 aa, Wolbachia pipientis
VLESSEDEEDIPSNSDDSKLDDDDTSPNVTATLVQNDDPVRIYLQDMSSVKLLSRADEIEIAKKIESEKHNMLRAIIETSVTLKVIKVWRDDLSNGALLLREIIDLDAIYNSDFNVVPKEESEESEESAEDVEDSEDVSEDAEYCSDDEKDSKKSDDEKDGNNEDISSVNLNVSILEMESDLLPKVIVALDEIITLTNEALILRKNSKNFSNELENLYNQIWSIALQIKLSDAAVARITQELYKINRSITLEEANLIAEARKYDIDRESFYKVYDDVLLKHELKKISLLKINENQSSFTGELKNKFLRFIDDNSEHIASTLNGIKQHIQEDNVQEFKELIKRIQKHEREVSEAKQEMIKANLRLVVSIAKKYSKRGLDLLDLIQEGNIGLMKAVDKFDYKRGYKFSTYGTWWVRQSITRAIPEQSKVVRIPVHMVEIISKINRALRKMTHEMGREPTLEELSVELTMPLERIRKVMKIARDPVSLEAPTGKDDSSTFGDCIEDKRVSRPEDAAILADLRGITTNVLATLTPKEERILRMRFGLGKDGKEHTLEEVGKIFNVTRERIRQIEA

SEQ ID NO: 26296 - protein, 124 aa, Triticum aestivum
  misc_feature (87)..(87): Xaa can be any naturally occurring amino acid
MARLNSKAVVAAVVLAAVVLMMAGREASAALSCGQVDSKLAPCVAYVTGRASSISKECCSGVQGLNGMARSSSDRKIACKCLKSLAXTSIKSINMGKVSGVPGKCGSSVPFPINMSTNCELSTN

SEQ ID NO: 26297 - protein, 353 aa, Bacillus anthracis str. 'Ames Ancestor'
MEKIERLRSAFDEAGIDGILLTNEHSRRYMANFTGTAGVVLISKKRAQFITDFRYVEQASKQAVGYEIVQHAGLIIDEVAKQVKELGIQKLGFEQDTLTYSSYSAHKEAIDAEFIPTSGLVEKLRLIKTDSEIKILKEAAQIADAAFEHILSFIRPGVSEIEVSNELEFFMRKQGATSSSFDIIVASGLRSALPHGVASEKVIETGDFVTLDFGAYYKGYCSDITRTIAVGEPSDKLKEIYNIVLEAQLRGVNGIKAGLTGREADALTRDYITEKGYGEYFGHSTGHGIGLEIHEAPGLAFRSDTVLEPGMAVTVEPGIYIPGIGGVRIEDDIIVTSEGNEVITKSPKELIIL

SEQ ID NO: 26298 - protein, 288 aa, Frankia sp. CcI3
MSAVIIDGKAVARRVRENVAREVAEFRDRTGIQPGLATVLVGDDPASAVYVGGKRRACVEAGMADLHQHLPADTSQEKVAALLDDLAADPAVSGILLQLPVPEGLDGAALVGRIPPGKDVDGLTTASVGLLARGLPGLRPCTPSGIIELLDSYDVELSGTPTVVVGRSELVGRPVAALLVGRNATLTICHSRTRDLAAVCRGADVLVVAAGKQAIIGADAVKPGATVIDVGMHRTPQGLRGDVDFEAVREVAGKLTPVPGGVGPMTIAMLLRNTLLAAQAATGTDGPG

SEQ ID NO: 26299 - protein, 355 aa, Oryza sativa
HVQVTEALLREVFQSTGLVEGCKLIRKEKSSYGFVDYYDRRSAALSILTLNGKQIFGQLIRVNWAYASGQREDTTDHFNIFVGDLSPEVTDSALFAFFSGYSSCSDARVMWDQKTGRSRGYGFVSFRNQQDAQSAINDLNGQWLGSRQIRCNWATKGASNGEQQTSDSKNVADLTNNLTEDGKEKANEDAPENNPQYRTVYVGNLAHEVTQDVLHRLFHALGAGAIEEVRIQLGKGFGFVRYSNHAEAALAIQMGNGRILGGKPIKCSWGNKPTPPGTTSAPLPPPAAPSVTAADLLEYQRSLALSKMVSSQALMQAQAQQHLKQAMGMGAGVSQAMYDASFPNVGPSQQQLMYY

SEQ ID NO: 26300 - protein, 576 aa, Desulfitobacterium hafniense DCB-2
MAARSGDAQTQPGSGREAVSSMKELYDLIIIGSGSAGMAAGIYAGRSKLKTLVIDRDRAGGQIKITSEVENYPGILNISGEELSQAMRRQAEKFGVKFRQAAVESVDLAGDIKKIRTAEGDYEALAVIIATGSVPRKLGFIGEEEFRGRGIGYCATCDGEFFTGMDVFVIGGGLAAAEEGIFLTRYARKVTMIVRGDGFSCPQTISERVLAHPKIEVKFNTELREAGGDAVLRYAEFVNNRSGERWRYDVREQKQTFGVFVFVGYIPQSAEYAQEVRIDERGYIPTDESMGTNVEGVYAAGDIRPKELRQLVTAVADGAIAATSAEKYLVGKKERLGLGELGELGESGERDELSDEEKTPVTRQGTSLLDDSLKEQLVPILERLENRIGLLAFLEGSSGFSEELRSFLSEFAGLTDKVEVEFLNRGEDAVREKEAKITLFPAVAVLGPDGVYTGVQFHGIPGGHEINSFILALYNAAGPGQAVGEETLAKIRRVSRKVNFKIGVSLSCTLCPDVVTLAQLMALKNPLIEAEMIDVAHYPDFKNKYGIMSVPAIVVNDEKVVFGKKNLEELLELAGG

SEQ ID NO: 26301 - protein, 245 aa, Arabidopsis thaliana
MAKVSFKDSLKALEADIQHANTVALDYPREKDGARVQMRLSYTPAAQFLLFLVQWTDCHLAGTLGLLRVLIYMTYADGKTTMSVYERKTSIKDFYAVIFPSLLQLERGITDLDDRKQKEVCKIRYRNKDESEKVKLSEIDIEREEECGICMEMNNMVVLPNCTHSLCIKCYRDWHGRSESCPFCRDSLKRVNSGDLWMLMEKSDTVNMYTIERENKKRLFVYIEKLPLVVPDQVFASSPYDCHVK

SEQ ID NO: 26302 - protein, 348 aa, Magnaporthe grisea 70-15
MLKGTIIVTGANGGLGSAIANKLLLEAQYAEYHMIFTVRNVEKANVLQEVINSHRGKGLSSSNDVVPLDLTSLASGRKLADDINARVAAGSIPPIRALVLNAGWQEWTTESFTKDGFEMAFQSNYLTHWLLTVKLLQSMDKNKGRIVVLGSWSHDPDHPGNNYQGFYKGEQWRQLHPNTEAVAKGTFSKPESLPAGGHGFRRYGAAKLCQIMMVYELQARLDADPALSKIAVLGVDPGAMPTPLTRRANPFFVLVGRAIFPILIFLSGLFSKNPEFRSSKKSAKDVMAAALSEDEPYGHSPKAVYYNGDEISTSSAESRDKRKGLELWRSSVEYTGLTEGETCLRNWR

SEQ ID NO: 26303 - protein, 454 aa, Robiginitalea biformata HTCC2501
MRKAGQYFYICPGRHHCGNGWLHRRGFRKSRVPAPIADHSKSRIMLMKELLERYENKPPEIVFQWKDPETEAEGWAVINSLRGGAAGGGTRMREGLDQNEVLSLAKTMEVKFTVSGPPIGGAKSGINFNPDDPRKKGVLERWYRAVSPLLKNYYGTGGDLNVDEIHEVIPITEDAGVWHPQEGVFNGHFRPTEADKINRIGQLRMGVIKVLETDTYSPDTSRKYTVADMITGFGVAEAVRHFYDIHGESVVGKRAVVQGFGNVGGAAAFYLSKMGARVVGIIDRAGGVIKEEGFSFEEIRALFGKKKGNALVAEDLIPSAEMDRRIWSLPCEIFAPCAASRLVTREQISTLIDSGLEVISCGANVPFADREIFFGPIMEFTDQRVSLIPDFVSNCGMARVFAYFMEGRVSMEDADIFNDTSGTIRNAILNIFNQNPTRRNFSRTAFEIALKQLV

SEQ ID NO: 26304 - protein, 155 aa, Triticum aestivum
  misc_feature (2)..(4): Xaa can be any naturally occurring amino acid
  misc_feature (72)..(72): Xaa can be any naturally occurring amino acid
  misc_feature (123)..(123): Xaa can be any naturally occurring amino acid
VXXXVPYDPLALRKAFEKAVVKRLMTDVPFGVLLSGGLDSSLVAAVTVRHLAGTKAAKRWGTKLHSFCVGLXGMELGTMHHEFTFTVQDGIDAIEDVIYHTETYDVTTIRASTPMFLMSRTTXQVISGEGSDEIFGGYLYFHKAPNKEELHREPR

SEQ ID NO: 26305 - protein, 470 aa, Photobacterium sp. SKA34
MIQFGTGGWRAFIGEEFTQANVRLVAQGLANIMIKESVTENGFIIGYDRRFLSDKAAIWFAEVLAGNNIKCSFINKFVPTPVVMFKAKQTGATYSACITASHNPADYNGIKVFIEGGRDADEIITQKIEQQIAVLTDADVKLVDFEQAQNDKLVEIINPMNEFVDSIIDFIDMEAIKKANLRVLIDPMFGVAKNALQTVLISARCDVDVINDSENPGFGGLMPSPSAATLYRLKHLVAHEGYDIGIGTDGDADRLGIIDEKGNFIHPNEVLLLLYYYMLEYKGWKGSVVRNIATTHLLDKVAEAYGEKSFEVPVGFKHISSQMEADDSLIGGESSGGLTIRGHIKGKDGVFASSLLVEMISSTGKKLSELLYEIYGRFGYAYTAEGDCTFKAADRERLYNKIYIEKSLPDFNYEIEKVSYADGAKVYFKNGGWAIARFSGTEPLLRLFIEMEDQTQAEAVLAQFKAFLAV

SEQ ID NO: 26306 - protein, 364 aa, Kalanchoe blossfeldiana
SDSGKDAGRLSAAWQLYKAQEDLVKVAKEFGVKLTMFHGRGGTVGRGGGPTHLAILSQPPDTIHGSLRVTVQGEVIEQSFGEEHLCFRTLQRYTAATLEHSMCPPASPEPEWRELLDEMAVAATEEYRTIVFHEPRFVEYSASATPELEYGRMNIGSRPSKRKPSGGIESLRAIPWIFAWTQTRFHLPVWLGFGAAFKHVIDKDIKNLLMLQEMYNRWPFFRVTIDLVEMVFAKGDPGIAALYDKLLVSEDLWPFGEQLRNNYNETKNLLLQVAGHKDLLEGNPYLRQRLRLRDSYITTLNACQAYTLKRIREPNYHVTVRPRLSKEIMESNKAASELVKLNPTSEYAPGLEDTLILTMKGIAA

SEQ ID NO: 26307 - protein, 117 aa, Triticum aestivum
  misc_feature (80)..(80): Xaa can be any naturally occurring amino acid
MARAQVMLMAVALVLMLAAVPRAAVAIDCGHVDSLVRPCLSYVQGGPGPSGQCCGGVQSLHNQARSQSDRQAACNCLKGXIARGIHNLNEDNARSLPPKCGVNLPYPISLDIDCSRV

SEQ ID NO: 26308 - protein, 311 aa, Magnaporthe grisea 70-15
MASQKFDPDSDIPSLSGKVILVTGGNIGLGQESILQLAKHDPKRIYLAARSEEKARKAMEAIEQKIGAAKSSVITFLPLDLGSFDSVRKAADTVKSQTDELHILLNNAGIMMTPAAKTKDGYEEQFGVNHMGHALLTRLLLPLLEKTAKSGADVRIVNLSSSGEMLAATDCFKDMSRYKTTMEDVQTVKRYGAAKLANVYHAQMLAQKYPSIKAVSLHPGVVKTNLMSRMKESWPILGPIVSSIISNVFCTSVADGVRNQLWAAVSNDVVSGEFYHPVGLLGKGSPATKKVKEAENLWEWTEKELDAYLNK

SEQ ID NO: 26309 - protein, 365 aa, Kalanchoe blossfeldiana
SDSGKDAGRLSAAWHLYKAEEELIEVAKQHGVKLTMFHGRGGTVGRGGGPTHLAILSQPADTIQGSLRVTIQGEVIERSFGEAQLCFKTLQRYTAATLEHGMIPPSSPKQECRACLMDEMAVVTTERYRSIVFREPRFVEYFRLATPELEYGRMNIGSRPSKRKPSGGIESLRAIPWIFAWTQTRFHLPVWLGFGEAFRHVIDKDNKNLLMLQQMYNEWPFFRVTIDLVEMVFAKGDPGIAALYDKLLSEELWPLGEQLRTAYNDTKSYLLKITGHNEILEGDPFLKQRLKVRTAYITTLNVCQAYTLKRIRDPSYQVPVRPPIAKEIMEGSVSSANQLVKLNPTSEYAPGLEDTLILTMKGIAA

SEQ ID NO: 26310 - protein, 209 aa, Zea mays
  misc_feature (90)..(90): Xaa can be any naturally occurring amino acid
  misc_feature (97)..(97): Xaa can be any naturally occurring amino acid
  misc_feature (101)..(101): Xaa can be any naturally occurring amino acid
  misc_feature (121)..(121): Xaa can be any naturally occurring amino acid
  misc_feature (123)..(123): Xaa can be any naturally occurring amino acid
  misc_feature (134)..(134): Xaa can be any naturally occurring amino acid
  misc_feature (144)..(144): Xaa can be any naturally occurring amino acid
  misc_feature (149)..(149): Xaa can be any naturally occurring amino acid
  misc_feature (158)..(158): Xaa can be any naturally occurring amino acid
  misc_feature (163)..(163): Xaa can be any naturally occurring amino acid
  misc_feature (165)..(167): Xaa can be any naturally occurring amino acid
  misc_feature (173)..(173): Xaa can be any naturally occurring amino acid
  misc_feature (179)..(179): Xaa can be any naturally occurring amino acid
  misc_feature (183)..(185): Xaa can be any naturally occurring amino acid
  misc_feature (191)..(195): Xaa can be any naturally occurring amino acid
  misc_feature (198)..(199): Xaa can be any naturally occurring amino acid
GRRPTPRGGGRSRTPRSPGLQEFIAPPRRHHTFSARALAGCPPNTVLQLPAPHSQLRFTMNPSSSSSSSGGYHSRAAAFASPQPRGGGGXRRGGGRXQDGXDRIDALGRLLTRVLRHMAAXLXLDMRTDGYVRXHDLLKLNPSXFARSXQSHTVDEIXEAFMXDXXXKFSLLXEDGDCXPANXXXPCNTVXXXXXIPXXPFHVLQKLSG

SEQ ID NO: 26311 - protein, 406 aa, Thiomicrospira crunogena XCL-2
MKRVVITGLGVVSSLGNNKEEVTDSLRNGRSGIVYAPEYEENGLRSHVHGAVKNLDFAEHINRKSLRFMGDAAAYTYIAMDQAVKDAGLTEDQVSNVRTGLVAGSGGGSNSNSTQAVEVAREKGVKRVGPYMVTRTMGSTVSACLATPFKIKGINYSISSACSTSAHCIGTAVEQIQLGKQDIVFAGGGEELHWTMSVLFDAMGALSTKYNDTPAKASRAYDANRDGFVIAGGGGMVVVEELEHALARGAKIYAEITGYGANSDGYDMVAPSGEGAVRCMNLALSTVKGDVDYINPHGTSTPVGDTKEAAAIREVFGAKVPKISSTKSMSGHSLGAAGVHEFIYSLMMLENDFIAPSINIETMDPECEGMPIVTELEENAGLTRMMSNSFGFGGTNASLVFEKYKG

SEQ ID NO: 26312 - protein, 502 aa, Gibberella zeae PH-1
MVALEEVEGSLLQKPCDAAHEVPSRSASAYKPLNSFALDKQRSYKQQYGDMYFLRLTKIKPAVDQVAATAWDGTTVGDEEAQRVDRVLDVRQGELCYVTGTVYMEMPLKPNILEDVSKDRWISAPILTPKYFSDDDQIMLEDESGRIRLVGDILKTVQLVTGCIVGVMGTENSNGEFEIIDIKFPDLPPQPERWSLSKPVSDKSKTKDEDEEMTDVSDKKKGNKKIAIVSGLSFSGTDASYALELDLLLEYLLGEALGSSGQIDVSHISRLIIAGNSISTTDRQPAAADETLPEKKGQKKYGYDASTYNPLPSQLFDAFVAELLPSIPVTMLPGAQDPANASYPQQPVHPAMFPAARAYTRDPAAPVDQPGWFDTVTNPWEAELEGWRVLGTGGQNVDDVFKYVGSDDRLGMMEAMCRWRCCAPTAPDTLWSYPFQDDDPFVMQTCPHLYFVGNQPQFSTKVIHGPKGQSVRLVTVPSFSATKELVLIDTETLEVERIKISI

SEQ ID NO: 26313 - protein, 102 aa, Pseudomonas aeruginosa PAO1
MQVNISGHQLDVTDALRDYVGEKLSRLERHFDKITNVQVIMEVEKLKQKIEATLRIAGGEIVANAEHEDMYAAIDLLIDKLDRQLIKHKEKYLERQQGVGAR

SEQ ID NO: 26314 - protein, 365 aa, Kalanchoe blossfeldiana
SDSGKDAGRLSAAWQLYKAQEELIEVAKQHGVKLTMFHGRGGTVGRGGGPTHLAILSQPADTIQGSLRVTIQGEVIERSFGEAQLCFKTLQRYTAATLEHGMIPPSSPKQEWRACLMDEMAVVTTERYRSIVFREPRFVEYFRLATPELEYGRMNIGSRPSKRKPSGGIESLRAIPWIFAWTQTRFHLPVWLGFGEAFRHVIDKDNKNLLMLQQMYNEWPFFRATIDLVEMVFAKGDPGIAALYDKLLSEELWPLGEQLRTAYNDTKSYLLKITGHNEILEGDPFLKQRLKVRTAYITTLNVCQAYTLKRIRDPSYQVPVRPPIAKEIMEGSVSSANQLVKLNPTSEYAPGLEDTLILTMKGIAA

SEQ ID NO: 26315 - protein, 364 aa, Kalanchoe blossfeldiana
SDSGKDAGRLSAAWQLYKAQEDLVKVAKEFGVKLTMFHGRGGTVGRGGGPTHLAILSQPPDTIHGSLRVTVQGEVIEQSFGEEHLCFRTLQRYTAATLEHSMCPPASPEPEWRELLDEMAVAATEEYRTIVFHEPRFVEYSASATPELEYGRMNVGSRPSKRKPSGGIESLRAIPWIFAWTQTRFHLPVWLGFGAAFKHVIDKDIKNLLMLQEMYNRWPFFRVTIDLVEMVLAKGDPGIAALYDKLLVSEDLWPFGEQLRNNYNETKNLLLQVAGHKDLLEGNPYLRQRLRLRDSYITTLNGCQAYTLKRIRDPNYHVTVRPRLSKEIMESNKAAAELVKLNPTSEYAPGLEDTLILTMKGIAA

SEQ ID NO: 26316 - protein, 704 aa, Medicago sativa
MSSATHIITLATRFQFHDVLNKISQIAEKAQENQSSRRSLRLILRNLSPVVQDIKQYNDHLDHPREEINSLIEENDAEESACKCSSENDSNVVEKLKNETFEAGPPFKCPFDVPENPKFTVGLDIPFSKLKMELLRDGSSTLVLTGLGGLGKTTLATKLCWDQEVNGKFMENIIFVTFSKTPMLKTIVERIHEHCGYPVPEFQNDEDAVNRLGLLLKKVEGSPLLLVLDDVWPSSESLVEKLQFQISDFKILVTSRVAFPRFSTTCILKPLAHEDAVTLFHHYALMEKNSSDIIDKNLVEKVVRSCQGLPLTIKVIATSLKNRPHDLWRKIVKELSQGHSILDSNTELLTRLQKIFDVLEDNPTIIECFMDLALFPEDHRIPVAALVDMWAELYRLDDTGIQAMEIINKLGIMNLANVIIPRKDASDTDNNNYNNHFIMLHDILRELGIYRSTKEPFEQRKRLIIDMHKNKSGLTEKQQGLMIRILSKFMRLCVKQNPQQLAARILSVSTDETCALDWSQMEPAQVEVLILNLHTKQYSLPEWIGKMSKLKVLIITNYTVHPSELTNFELLSSLQNLEKIRLERISVPSFATVKNLKKLSLYMCNTRLAFEKGSILISDAFPNLEELNIDYCKDLLVLPTGICDIISLKKLSVTNCHKISSLPEDIGKLENLELLSLSSCTDLEAIPTSIEKLLNLKHLDISTA

SEQ ID NO: 26317 - protein, 847 aa, Arabidopsis lyrata
PNKHHYYSFSFVFLFFFLILFPDFSISTNTLSATESLTISSNKTIVSLGDVFELGFFTILGDSWYLGIWYKKIPEKTYVWVANRDNPISTSTGILKISNANLVLLNHFDTPVWSTNLTAEVKSPVVAELLDNGNFVLRDSKTNGSDEFLWQSFDFPTDTLLPQMKLGLDHKKRLNKFLRSWKSSFDMSSGDYLFKIETLGLPEFFIWMSDFRVFRSGPWNGIRFSGMLEMQKWDDIIYNLTENKEEVAFTFRPTDHNLYSRLTINYAGLLQQFTWDPIYKEWNMLWSTSTDNACETYNPCGPYAYCDMSTSPMCNCVEGFKPRNPQEWALGDVRGRCQRTTPLNCGRDGFTQLRKIKLPDTTAAILDKRIGFKDCKERCAKTCNCTAFANTDIRNGGSGCVIWIGRFVDIRNYAADGQDLYVRVAAANIGDRKHISGQIIGLIVGVSLLLLVSFIMYWFWKKKQKQARATAAPNVYRERTQHLTNGVVISSGRHLFGENKTEELELPLTEFEAVVMATDNFSDSNILGQGGFGVVYMGRLPDGQEIAVKRLSMVSLQGVNEFKNEVKLIARLQHINLVRLFSCCIYADEKILIYEYLENGSLDSHLFKKVQSSKLNWQKRFNIINGIARGLLYLHQDSRFKIIHRDLKASNVLLDKDMTPKISDFGMARIFEREETEASTKKVVGTYGYMSPEYAMDGIFSVKSDVFSFGVLVLEIVSGKRNRGFYNSNQDNNLLSYTWDHWKEGKWLEIADPIIVGTSSSSSTFRPHEVLRCLQIGLLCVQERAEDRPKMSSVVFMLGNEKGEIPQPKPPGYCIGRSFLETDSSSSTQRNESSTINQFTVSVINAR

SEQ ID NO: 26318 - protein, 361 aa, Alkalilimnicola ehrlichei MLHE-1
MTANILITPGDGIGPEIVAEARKLLEALRDDFGFDCTLEEAPIGGAGYEAHGKPLPEETLALAREADAILLGAVGGPRWEQLDRPLRPERGLLAIRAELGLFGNLRPAILYPQLAEASSLRHEIVAGLDIMIVRELTGGIYFGEPRGIRRLENGERQGYNTMVYSESEIDRVGRLAFDIASKRGSRVCSVDKANVLEVSELWREVMERVARDYPGVELSHMYVDNAAMQLVRAPKQFDVVVTSNLFGDVLSDCAAMLTGSIGMLPSASLDVNSKGLYEPVHGSAPDIAGKGLANPLATLLSVAMMLRYSLDQGALADRVQQAVGDVLNQGLRTPDIAARQSRTVSTAEMGDAVVAALRARG

SEQ ID NO: 26319 - protein, 853 aa, Arabidopsis lyrata
MRVVVPNCHHFYIFFVVLILIRSVFSSYVHTLSSTESLTISSKQTIVSPGEVFELGFFNPAATSRDGDRWYLGIWFKTNLERTYVWVANRDNPLYNSTGTLKISDTNLVLLDQFDTLVWSTNLTGVLRSPVVAELLSNGNLVLKDSKTNDKDGILWQSFDYPTDTLLPQMKMGWDVKKGLNRFLRSWKSQYDPSSGDFSYKLETRGFPEFFLLWRNSRVFRSGPWDGLRFSGIPEMQQWEYMVSNFTENREEVAYTFQITNHNIYSRFTMSSTGALKRFRWISSSEEWNQLWNKPNDHCDMYKRCGPYSYCDMNTSPICNCIGGFKPRNLHEWTLRNGSIGCVRKTRLNCGGDGFLCLRKMKLPDSSAAIVDRTIDLGECKKRCLNDCNCTAYASTDIQNGGLGCVIWIEELLDIRNYASGGQDLYVRLADVDIGDERNIRGKIIGLAVGASVILFLSSIMFCVWRRKQKLLRATEAPIVYPTINQGLLMNRLEISSGRHLSEDNQTEDLELPLVEFEAVVMATENFSNSNKLGEGGFGVVYKGRLLDGQEIAVKRLSTTSIQGICEFRNEVKLISKLQHINLVRLFGCCVDENEKMLIYEYLENLSLDSHLFNKSLSCKLNWQMRFDITNGIARGLLYLHQDSRFRIIHRDLKASNVLLDKDMTPKISDFGMARIFGRDETEANTRKVVGTYGYMSPEYAMDGIFSVKSDVFSFGVLVLEIVSGKKNRGFYNSNQDNNLLGYAWRNWKEGKGLEILDPFIVDSSSSPSAFRPHEVLRCIQIGLLCVQERAEDRPVMSSVVVMLRSETETIPQPKPPGYCVGRSPFETDSSTHEQRDESCTVNQITISAIDPR

SEQ ID NO: 26320 - protein, 548 aa, Thermoplasma acidophilum
MATSVANVIIDVLADLGVKRIYGLPGDSINPLVDAIRTQDRIKFVQVRHEEGAALEAAFEAKFTGELTVCMGTSGPGSIHLINGLYEAKMSRVPVIALTGQIETDLLYHDYFQEVNLDRLFDDVSVFNAQILNPESAAYIVERAYRESVSKRGVSHLTLSVDVLRMGADHRPVQHMAVESSHFSIDPGAAEKIINESKKPLLFVGRGIIGHSDEVLKFAERIGSPIIYSVNAKGLLDDDDPKVMGPLGLLGTKPSVEAMKRADLIVLLGTIFPYVTFMNEKAEVLQVDVDPSNLGKRVRADIAYQCTVADFLSQVKPDEKPEKFYSEMSRDRDDWISSMEKLESDTSKPIKPEFLARVISKKADRDAVFIVDTGNVTVWATRHIRASKERTFLLSPWLGTMGVGIPGAVGVSFATDRQVIAITGDGSAAMTMMELITAKKYSRPVKIAIFNNSKLGMIKFEEEVMGYPEWGVDLLNPDFSKIAEAVGIKGMRVEDPDKVEDAVEEFLRTEGPAVLDAVVDGDERPMPPKLTFAQVRGYVTSILREKLD

SEQ ID NO: 26321 - protein, 239 aa, Arabidopsis thaliana
MTESSLDLQESGWEELRREARKIEGDLDVKLSSYAKLGARFTQGGYVDTGSPTVGSGRSWKSMEMEIQSLLEKLLDINDSMSRCAASAAPTTSVTQKLARHRDILHEYTQEFRRIKGNINSLREHAELLSSVRDDISEYKASGSMSPGVQVLRERASIHGSISHIDDVIGQAQATRAVLGSQRSLFSDVQGKVKNLGDKFPVIRGLLGSIKRKRSRDTLILSAVIAACTLFLIIYWLSK

SEQ ID NO: 26322 - protein, 407 aa, Oceanospirillum sp. MED92
MAKEQFERSKPHVNVGTIGHVDHGKTTLTAALTRVCAEVWGGDAVAFDGIDNAPEERERGITIATSHVEYDSPDRHYAHVDCPGHADYVKNMITGAAQMDGAILVCGATDGPMPQTREHILLSRQVGVPYIVVFLNKADLLAEDCGGADSEEYAEMLELVEMELRELLDQYEFPGDDTPIIPGSALMALNGQDDNELGTTAVKTLVETLDSYIPEPERAIDGAFIMPIEDVFSIQGRGTVVTGRVERGIVNVGDDVEIVGIKETTTTTCTGVEMFRKLLDEGRAGENIGALLRGTKREDVERGQVLAAPGSITPHTRFEGEVYVLSKEEGGRHTPFFKGYRPQFYFRTTDITGACELPEGVEMVMPGDNVQMDVTLINPVAMEEGLRFAIREGGRTVGAGVVSKIVE

SEQ ID NO: 26323 - protein, 1037 aa, Saccharomyces cerevisiae
MTVANTETHSAAKPSSTIGPWKLGETLGFGSTGKVQLAQHERTGHRTAVKVISKSIFNNNGNHSNDDSVLPYNIEREIVIMKLLSHPNVLSLYDVWETNNNLYLILEYAEKGELFNLLVDHGPLPEREAINCFRQIIIGISYCHALGIVHRDLKPENLLLDSFYNIKIADFGMAALQTDADLLETSCGSPHYAAPEIVSGLPYEGFASDVWSCGVILFALLTGRLPFDEENGNVRDLLLKVQKGQFEMPNDTEISRDAQDLIGKILVVDPRQRIKIRDILSHPLLKKYQTIKDSKSIKDLPRENTYLYPLADSNNHTSASIDDSILQNLVVLWHGRHADDIVSKLKENGTNKEKILYALLYRFKLDSVRGSNKKNRNKIKKTKKNKRSSTLSSSSSLLLNNRSIQSTPRRRTSKRHSREFSSSRKRSSFLLSSNPTDSSPIPLRSSKRITHINVASANTQATPSGVPNPHKRNSKKRSSKRLSYMPNTKRSSLTSKSLSNFTNLIDDDDWEYIEKDAKRTSSNFATLIDEIFEPEKFELAKREKAELQRKVQEAKRQSVNAQKINEDEFGSEVSDGMKELKKINDKVSSPLINYEFSQQELLQDIDTLLTNRYQLSSYTRPISRLDPGLTPVTETLPNNLKEKTALLQDTEKKIIETIRRSKFLGSLLNVRGGLSPGKSELAPIEESPIVSTTPLIYNDRMEPRRISDVEVPHFTRKSKHFTTANNRRSVLSLYAKDSIKDLNEFLIKEDPDLPPQGSTDNESRSEDPEIAESITDSRNIQYDEDDSKDGDNVNNDNILSDFPQGVGISQEYDMKDKNPNQSPISKSAEPTLVVKLPSLSSFQGKNASGLGLYQREPSKVTLPSLTSNNSSVGENIEDGAEKGTESEKIAASLSDDDLKEDNDKKDNDTVNAPTTVKKPPNSVLLKKFSKGKILELEIHAKIPEKRLYEGLHKLLEGWKQYGLKNLVFNITNMIITGKLVNDSILFLRSTLFEIMVLPNGDGRSLIKFNKKTGSTKTLTKLATEIQIILQKEGVLDK

SEQ ID NO: 26324 - protein, 204 aa, Pichia pastoris
MASRGTSRQQYDLTMKLLLVGDSGVGKSCLLLRFVDDSFNPSFITTIGIDFKIRTVEINGKKVKLQIWDTAGQERFRTITTAYYRGAMGIILVYDVTDERSFNSVHNWYQTLNQHANEDAQLFLVGNKCDDEESRQVTKEQGEQLASELGVPFLEASAKSNKNVDAIFLELAKRFEEKMRNTQQGPGSAGIDVNSSNDTKSSCC

SEQ ID NO: 26325 - protein, 843 aa, Magnetococcus sp. MC-1
MGYDAKLPWGWAPLLVCLVVLAWPAQLLANRVPDPIIVGVYQNKPMIFLDEKGEVQGLYKDILGIIAERHGWQLEYRYGKWSALLEQLQRGEIDLLGAIAYSDERALSMDFGKQSFFVNWGQVYTREERKVASFLDLQGKRVGVLKGDIYGHRLAELVKKFGVSIEIVGYDSYSYVLHGIKQGEVDAGVVNRLTGGAEQQRFGLYGTPILFNPVEVTVAVPKGKNMALLSAIEHDLVVMKADKDSAFHKAFDRWLGIASKPEMPSWYRTGFWIIMVLMLLGVGWNLSLQRRVVLQAKRLEQEVAERQDAEQGLQHAHQELEQRVDERTQALEVSELRFRTLFHAALVPLFRSSLDGGRVLLANLALVELFGYSSVEEMVTLHDPLKSYADPLMREHFIDILVRDGRVECLDVELVRPDSSRFYAEISAIHYPEGGYLEGAIIDITHRKRTEHALIQAKQSAERANRAKSEFLATLSHEIRTPLNGMIGLLTALQASRLDAKQQEQVGLISRSSNLLLDLLNDILDFSKIEAGELVLEQIPFSPLQLVEDVCACLSERAQGKGVGLRLETHGWIPPGLKGDAVRIRQIMLNLTNNAIKFTQQGEVVLHLWGLEQQPVPLPSWVSMRFGVVDSGVGIAAKDMGRIFDPFCQADRVLDRRYKGTGLGLSICKRLVEAMGGEIWAESQEGQGSSFRFTLTLALVEHLPGQAMGRELVHEVLPMRILLVEDDPVNQMVAVELLESAGHKVEVADNGASGLVKAQECSYDLVLMDIRMPGMDGITATRMLRAFEQAEGRERVPVLGLTADTLKETLLACREAGMDDVLTKPVRVNVLTDRVARLGFENP

SEQ ID NO: 26326 - protein, 472 aa, Klebsiella oxytoca
MTTLSHDSTTMPRTQRDTRRMNQFVSIAAAVAGLLFGLDIGVIAGALPFITDHFVLSSRLQEWVVSSMMLGAAIGALFNGWLSFRLGRKYSLMVGAVLFVAGSVGSAFATSVEMLLVARIVLGVAVGIASYTAPLYLSEMASENVRGKMISMYQLMVTLGIVMAFLSDTAFSYSGNWRAMLGVLALPAVVLIILVIFLPNSPRWLAEKGRHVEAEEVLRMLRDTSEKARDELNEIRESLKLKQGGWALFKVNRNVRRAVFLGMLLQAMQQFTGMNIIMYYAPRIFKMAGFTTTEQQMVATLVVGLTFMFATFIAVFTVDKAGRKPALKIGFSVMAIGTLVLGYCLMQFDNGTASSGLSWLSVGMTMMCIAGYAMSAAPVVWILCSEIQPLKCRDFGITCSTTTNWVSNMIIGATFLTLLDAIGAAGTFWLYTALNVAFIGVTFWLIPETKNVTLEHIERRLMSGEKLRNIGN

SEQ ID NO: 26327 - protein, 502 aa, Prochlorococcus marinus subsp. marinus str. CCMP1375
MTTALQSPPRRRIARLQEVSLLEGPMLLLRSIRGFRSNQSLIWLATVPLALLGLGVFGFAARAGVGLSDLSGAQAASFLADNLWLFIATILVIFMNAGFAMVEAGMCRQKNAVNILAKNLFVFALAVTAYWFIGYSIMYGGTPIIGGVIFSNGFFFNPDPSDALSCAAGLGADGCSQLVPAVDFLFQAAFAGTAATIVSGLVAERVKFGEFVVFSLVLTAFIYPIAGSWQWNGAGWLSQLGFIDFAGSSIVHSVGGWAGLVGAMLLGPRIGKFVDGKPQAMPGHNMAIATLGALILWIGWYGFNPGSELAMDEYVAYVAVTTTLAAAGGAIAATLLSTLTSGKPDLTMIINGILAGLVSITAGCGNMTLSGSWLAGFVGGLIVVFAVSALDSAGIDDPVGAFSVHGVCGVWGTVVIGLWGVDGMDPGAAGIGLFNGGGLNTLLIQALGAGAYAIWTVVTCWLAWTVIGGFFGGIRVSEEEEIQGLDIGEHGMEAYPDFASSN

SEQ ID NO: 26328 - protein, 391 aa, Sulfitobacter sp. EE-36
MAKAKFERNKPHVNIGTIGHVDHGKTTLTAAITKYFGDFRAYDQIDGAPEEKARGITISTAHVEYETEGRHYAHVDCPGHADYVKNMITGAAQMDGAILVVNAADGPMPQTREHILLGRQVGIPAMVVYMNKVDQVDDEELLELVEMEIRELLSSYDYPGDDIPVIPGSALAAMEGRDENIGENSIRKLMEEVDNYIPTPERAVDQPFLMPVEDVFSISGRGTVVTGRVERGVINVGDEIEIVGIRDTKKTTCTGVEMFRKLLDRGEAGDNIGALLRGIDREGVERGQVLCKPGSVKPHTKFTAEAYILTKEEGGRHTPFFANYRPQFYFRTTDVTGTVQLPEGTEMVMPGDNLQFDVELIAPIAMEDGLRFAIREGGRTVGAGVVSKITE

SEQ ID NO: 26329 - protein, 358 aa, Medicago truncatula
MDSNRLHELKAFDDTKTGVKGLVDKGVVKIPTLFHHPLDKFGKATNSNNTQHIIPIIDFANFGNDPKTRHEITSKIREACETWGFFQVVNHGIPLNVLEDMRNGVIRFFEQDVEVKKELYSRDPMRPFSYNSNFNLYSSSALNWRDTFVCSLAPNAPKPQDLPLVCRDELLEYGEYVTKLGMTLFELLSEALGLHPNHLKDMGCAKGILSLSHYYPACPEPELTMGTTKHSDSCFLTLLLQDDHIGGLQVFHQNKWIDIPPIPDALVVNVGDLLQLVTNDKFKSVEHKVLANIIGPRVSVACFFNADLNSFSNQYGPIKEFLSEDNPPKYKEITISEYVAYYNTKGIDGISALQHFRV

SEQ ID NO: 26330 - protein, 368 aa, Sulfitobacter sp. EE-36
MANPTLLILAGDGIGPEVMGQVVRIIDWFGDKRDLAFDVDHDLVGGAAYDKHGTPLHDDTMAKALAADAVLLGAVGGPKYDALDFSVKPERGLLRLRKEMDLFSNLRPAQCFDALADFSSLKKDLVAGLDIMIVRELTSGVYFGEPRGIFEEGNERVGINTQRYTESEIDRVARSAFELARRRGNKVCSMEKANVMESGILWREVVQKVHDEDYPDVELSHMYADNGAMQLVRAPKQFDVIVTDNLFGDILSDCAAMLTGSLGMLPSASLGAPNADGRPKALYEPVHGSAPDIAGQGKANPIACILSFAMALRYSFDQGDEAARLEKAVEKVLADGARTADLMGPEGGSPISTSEMGDAILAALDASL

SEQ ID NO: 26331 - protein, 616 aa, Glycine max
  misc_feature (530)..(530): Xaa can be any naturally occurring amino acid
MASLSGICSSSPTLKKFPNQSPSLTDPLRKDHVSFPARLADRTLSLAPLRAVAREVSDGALAAAVKKGLEKDPRALWRRYVGWLYQHKELGIYLDVSRVGFSDEFVKEMEPRFQAAFRAMEELEKGAIANPDESRMVGHYWLRDPKRAPNSFLKTQIENTLDAVCKFANDVVSGKIKPPSSPEGRFTQILSVGIGGSALGPQFVAEALAPDNPPLKIRFVDNTDPAGIDHQIAQLGPELASTLVIVISKSGGTPETRNGLLEVQKAFREAGLDFPKQGVAITQENSLLDNTARIEGWLARFPMFDWVGGRTSEMSAVGLLPAALQGIDIREMLAGASLMDEANRSTVLRNNPAALLALCWYWATDGVGSKDMVILPYKDSLLLFSRYLQQLVMESLGKEFDLDGNRVNQGISVYGNKGSTDQHAYIQQLREGVHNFFVTFIEVLRDRPPGHDWELEPGVTCGDYLFGMLQGTRSALYANNRESITVTVQEVTPRTVGALIALYERAVGIYASLVNINAYHQPGVEAGKKXAAGEVLALQKRVLAVLNEASCKEPVEPLTLEEVADRCHAPEDIEMIYKIIAHMAANDRALIVEGSCGSPRSIKVFLGECNIDGLYA

SEQ ID NO: 26332 - protein, 326 aa, Cyanidioschyzon merolae strain 10D
MLHKLFMYEALREAIDEEMARDKRVFVLGEDVGHYGGSYKVTKQLHTKYGDLRVLDTPIAENSFTGMAIGAAMTGLKPVVEGMNLSFLLLAFNQISNNAGMLHYTSGGNWSIPLVIRGPGGIGKQLSAEHSQRIEAYFQAVPGLKIVACSTPYNAKGLLKAAIRDNNPVLFLEHVLLYNLKQEIPKQEYVLPLDKAQVVREGSDVTIITYSRMLHHVMQAVKQLVAQGMNPEVIDLISLKPIDLETLVTSVSKTHKAIIVEECMQTGGIAAEVMAQIYSHAFDELDAPIRRLSSKDVPTPYNGYLEQACLVQPTQIVEAVKTLMST

SEQ ID NO: 26333 - protein, 409 aa, Triticum aestivum
  misc_feature (149)..(149): Xaa can be any naturally occurring amino acid
NKFVQKSRLVPVRNSRDIVDPRVRRELVCGLYDMYGVTSVVGIEGGYKGFYSRNTVTLTPKSVNDIHKRGGTILGTSRGGHDTAKIVDSLQDRGINQVYIIGGDGTQQGASVIYEEVRRRGLKCAVVARPFAVDLAAPVIDKSFGFDTXVEEAQRAINAAHVEAESAENGIGVVKLMGRNSGFIAMYATLASRDVDCCLIPESPFYLEGKGGLLEFVEKRLKDSGHMVIVVAEGAGQDLIAQSMNFVDTQDASGNKLLLDVGLWLSQKIKDHFKKKTNFPITLKYIDPTYMIRAVRSNASDNVYCTLLAHSALHGAMAGYSGFTVAPVNGRHAYIPFYRITEKQNKVVITDRMWARVLCSTNQPCFLSHEDVENMKHDDDERHHLHNTQLLDGSPAKCSPNCNGSAGAE

SEQ ID NO: 26334 - protein, 168 aa, Zea mays
MAASSTATSVHDFIVKDASGKDVDLSTYKGKVLLIVNVASQCGLTNSNYTELAQLYEKYKDQGFEILAFPCNQFGGQEPGTNEEIVQFACTRFKAEYPIFDKVDVNGNNAAPIYKFLKSSKGGLFGDSIKWNFSKFLVDKEGRVVDRYAPTTSPLSIEKDIKKLLGSS

SEQ ID NO: 26335 - protein, 403 aa, Haloarcula marismortui ATCC 43049
MSTQVHANLTEAQVEQISDDLGEPEWLLETRKDALAALEELDMPDVIRTPGRTWTNLDALEYESLVDPLDYAQDKDRVDAEGVEVLSWSEALADHEDLVKEHFGSTVDPQRDYLTALSTALFSAGTVVYVPEGVDAEDVKIRTTMNSQSLFNYTLVLAEESSSVTILERQQTGETTDADQYYSGIVEVVAEENAYVQYGALQNLSEETYNFQVKRGHADTYATVNWIDGNIGSRLTKSNVETRLLGDSSESQILGAFFGHEDQHFDIASRVWHEAEHTIADLVTRGVLDDDARSVYEGVQDVGREAWDTSSYQRENTLMLSDDSEADASPKLIINNHDTEASHSATVGQVDAEDMFYMTSRGVDPESAKNMLVEGFFVPVLEEVEVDELREDLDQLIYERLRQ

SEQ ID NO: 26336 - protein, 476 aa, Haloarcula marismortui ATCC 43049
MSSDQDHLKETDTEKRFEFKKEEKSAFEAEKGLTEETIRVISEDKDEPEWMLERRLRALEQFHEMPMPDGWPGAPDLSEVDVDEIVPYIRPDIETRGGVDDWNDLPEEIQDTFDKLGIPEAEKNALSGVGAQYESEIVYQNMQERWEDKGVIFCDMDKAVQEHEDILKEYFMTKAVPPSDNKFAALHGAIWSGGSFVYVPEDTTVDMPVQAYFRMNSDGMGQFEHTLIIAEENSEVHYIEGCSAPKYSEFNLHSGGVEVFVKENAHVQYSTVQNWSKNTYNLNTKRAICEADGTMEWVSGSMGSKATMLYPSTVLKGPGATDNHITIAFAGEGQDIDTGAKVYHNAPETKSTIESKSISKDGGRTNYRGLVHIADGAEDSSTSVECDALMFDNESTSDTMPYMEIQESKVDVAHEATVGKIGDEDVFYLQSRGLDDDDAKQMIVAGFIEPITEELPIEYAVELNRLIELEMEGSLG

SEQ ID NO: 26337 - protein, 299 aa, Ehrlichia ruminantium str. Gardel
MNSMNVYLGTRGSILAIAQAMKVKKLLYNYFPDINVQIVHIVTSGDINDKISLSEIGGKGLFLKELEEALLTGTIDLAVHSMKDVPAFYCDSLVIPCILKRSSPYDVFISSKYQSLRSLPDNAVIGTSSIRRKVQLMRLLSSVQVVPIRGNVDTRILKLEAGQYDGIILAKAGLMRINKTHVIKEVLDPQVMLSAVGQGAIGIQCRANDYKMIDMIKILNCKKSYISVAAERSFMKTVNGSCDTPLAALAKYVNSDTLYMSCMLSNEEKTVFSDCYFNECDAEISGINMGNDLMDQLNN

SEQ ID NO: 26338 - protein, 249 aa, Gibberella zeae PH-1
MADKGLEDVPETQIETNYDDVRDDMKALADGPQVVVGTPGRVQDMIQRRFLKTDSMKMFVLDEADEMLSFMRDPVRILVKKDELTLEGIKQFYIAVEKEEWKLDTLSDLYETVTITQAVIFCNTRRKVDWLTDKLTARDFTVSAMHGDMDQAQRDLIMKEFRSGSSRVLIATDLLARGIDVQQVSLVINYDLPANRENYIHRIGRGGRFGRKGVAINFVTADDVRMLREIESFYSTQVDEMPMNVADLI

SEQ ID NO: 26339 - protein, 262 aa, Mycobacterium tuberculosis CDC1551
MSSESDAANTEPEVLVEQRDRILIITINRPKAKNAVNAAVSRGLADAMDQLDGDAGLSVAILTGGGGSFCAGMDLKAFARGENVVVEGRGLGFTERPPTKPLIAAVEGYALAGGTELALAADLIVAARDSAFGIPEVKRGLVAGGGGLLRLPERIPYAIAMELALTGDNLPAERAHELGLVNVLAEPGTALDAAIALAEKITANGPLAVVATKRIITESRGWSPDTMFAEQMKILVPVFTSNDAKEGAIAFAERRRPRWTGT

SEQ ID NO: 26340 - protein, 364 aa, Saccharomyces cerevisiae
MSAPKKIVVLPGDHVGQEITAEAIKVLKAISDVRSNVKFDFENHLIGGAAIDATGVPLPDEALEASKKADAVLLGAVGGPKWGTGSVRPEQGLLKIRKELQLYANLRPCNFASDSLLDLSPIKPQFAKGTDFVVVRELVGGIYFGKRKEDDGDGVAWDSEQYTVPEVQRITRMAAFMALQHEPPLPIWSLDKANVLASSRLWRKTVEETIKNEFPTLKVQHQLIDSAAMILVKNPTHLNGIIITSNMFGDIISDEASVIPGSLGLLPSASLASLPDKNTAFGLYEPCHGSAPDLPKNKVNPIATILSAAMMLKLSLNLPEEGKAIEDAVKKVLDAGIRTGDLGGSNSTTEVGDAVAEEVKKILA

SEQ ID NO: 26341 - protein, 340 aa, Zea mays
MRTLLPVAAGRGTVACAATPVPRRSLLLSTAAAGAALQPEQVAGTRPLRLTRSEASAVAKPRTLADEAISWAKKDNRRLLHVVYRVGDLDKTIKFYTECLGMKLLRKRDIPEEKYSNAFLGYGPEESHFVVELTYNYGVDKYDIGEGFGHFGIAVEDVAKTVELIRAKAGKVIREAGPVKGGETVIAFVEDPDGYKFEIIERPGTPEPLCQVMLRVGDLDRAISFYEKACGMELLRKRDSPEYKYTVAIVGFGPEDKDAVLELTYNYGVTEYAKGNAYAQIAIGTDDVYRTAEAAKLSGGQVVREPGPLPGINTKITAILDPDGWKLVFVDNMDFAKELE

SEQ ID NO: 26342 - protein, 129 aa, Triticum aestivum
MGMAEKGSAARKAGLITKTLDRCRSTTARNKPAEGCFSVYVGADRQRYVVRTECLNHPLFQALLEEAEEAFGYADAGPLELPCNTEAFAKVLEKIEMEKQMAAPRRHVLPRGNSYRSLGTGWPMIVGRS

SEQ ID NO: 26343 - protein, 405 aa, Methanosarcina acetivorans C2A
MSESEQYSRNTLMDFIEYRPLDIEICDVTLRDGEQTPGVVFTKEQKLAVASELDSMGIEVIEAGFPVVSAYEKEIVKEIANQGYDSRICCLSRAVKGDVDAALDCDVDIVSIFIAMSDMHLKYKYHRTLEDMLGCAKEAIEYATDHGLNVRFAAEDASRTPIDRLKQAFKEVENEYKVQYVSLADTIGILNPTTTHYLVSEIFKCVNTSICIHCHDDLGMATANTLAAAEAGAKQLHTTVNGIGERAGNASLEEMLVALRVQYGIERYDTTKLTALSRMISEYSNITPSVNKAVVGQNAFTHESGIHVAAILEEPRTYELFLPEMVGGKRNLVVGKHTGTKALKGIINSIGFCLEREELCALIEKVKVCTDEKRRSISREQLEKLIAQVRQEQKPSASEKEKFSI

SEQ ID NO: 26344 - protein, 495 aa, Glycine max
  misc_feature (204)..(204): Xaa can be any naturally occurring amino acid
  misc_feature (344)..(344): Xaa can be any naturally occurring amino acid
MYRNAASRLRVISARSCSSSRIPASARFASSVATQQSSSGLGGLFGWLTGDRSSSLPSLDFPLPGVTLPPSLPDFVAPGKTIITTLPNGLKVASETSPTPTASVGLYVDCGSIYETPISFGATHLLERMAFKTTRNRSHFRVVREVEAIGGNVQASASREQMGYTFDALKTYVPEMVELLVDCVRNPVFLDWEVNEQLLKVKAXVVKLSVLAGALANPLLASESALNRLNGTILEEFVAENYTAPRIVLAASGVEHEELLSVAEPLLSDLPSVPRLEEPKSVYTGGDYRCQSESGRTHFALAFELPGGWHKLKDAMVLTVLQMLLGGGGSFSAGGPGKGMYSRXYLNVLNEYPQVHSISAFNNIYNGTGIFGIQVTTGSDFVSKAIDIAANEILGVATPGQVDQAQLNRAKQATKSAILMNLESRMVVSEDIGRQILTYGERKPVEDFLKAVDEVTSKDITSISQKLISSPLTMASYGDVLYVPSYESVSLKFRS

SEQ ID NO: 26345 - protein, 341 aa, Amycolatopsis mediterranei
MRVGVLTGGGDCPGLNAVIRAVVRKGIEVHGWDFVGFRNGWNGPLTGDSRPLGLNDVEDILTRGGTILRSSRTNPYKVEGGVDKIKQVLADQGVDALIAIGGEDTLGVAKRLTDDGIGVVGVPKTIDNDLGATDYTFGFDTAVSIATEAIDRLHTTAESHHRALVVEVMGRHAGWIALHSGLAGGASVILVPERHFNVDQVVSWVERRFEKEFAPIIVVAEGALPEGGEEKLLTGEKDAFGHVRLGGIGTWLADEIAHRTGKESRAVVLGHVQRGGTPTAYDRVLATRFGLNAVDAVADGDFGVMVALKGTDIVRVKLSEATAELKTVPVERYQEAEVFFG

SEQ ID NO: 26346 - protein, 553 aa, Arabidopsis thaliana
MAPIDVGDFVPDGSISFFDDDDQLQTVSVHSLAAGKKVILFGVPGAFPPTCSMNHVNGFIEKAEELKSNGVDEIICLSGDDPFMITACSENKHVKFVEDGSGEYIQLLGLELEVKDKGLGVRSRGFALLLDNLKVIVVNVGSGGDCSLFQLMKMTTTTMSNLPTDLLEEIISRVPRKYMRAVRLTCKRWNGMFKSQSFTKMHIGKEEAATRELRQTRMIVMMDYNVYLMGIAVNEIPSIETLGKLTCLDDSEQVKISQVFCCEGLLLCILKDDDTKIVVWNPYLGQTRWIQTRLICCVSGWKKYALGYGNNSENRSCRSPKILRVTDNFNIFSENIPLQYEIYDFDSDVWTTLDVSPHWFIMSERGLSLKGNTYWGAKERHAYGSIDHIICFDFTRERFGPLLPLPFSAWGAQFASLSSVREDKITALFQNCRAYKLELWITTKIDVNNATWSKFFTMDTPYLHEILSLKTFFIDEENKIVVVSNKERDTKGDLTHDSIDIINGEARCLWKLGLGKPADKNCWPLVCPYVPSVVQIKQHKGGKTKEQSDYKRH

SEQ ID NO: 26347 - protein, 241 aa, Legionella pneumophila str. Lens
MENLEHGHSQKEIRDRLAQAPSQNYLRDWIYGGIDGVVTTFAIVSGVVGGQLSSLVILILGFANLLADGFSMAASNYLGTKSEVDQFQRYKTIEEKHIDFIPEGEKNEIKQIFQNKGLHGQTLDQVVEEITANRALWIKTMLQEEYGLPATLRFPLKSALYTFSAFLLFGIIPLIPYVLVMNNSFIWSCFFTAITFFVIGSIKSHWSTKSWLYSGFETLIIGTVTASLSYGIGLFLHYFLT

SEQ ID NO: 26348 - protein, 497 aa, Vibrio parahaemolyticus RIMD 2210633
MTRLVPLFIDGEFRESQTSDWVEVTNPATNDVIAYVPCSTNAEMKAAIESAQTAFQSWKEVAVSERARLMLRYQHLLKAHHDEIATLLSHETGKIFADAKGDVWRGIEVVEQAANIASNLMGETVENVATDIDSHSIIQPLGVCCGITPFNFPAMIPLWMFPIAIASGNTFVLKPSEQVPLTSIRLAELFEEAGAPKGVLQIVHGRKDQVDFLLAHPDIRAVSFVGSVPVAQYIYTTGTQYFKRVQAFAGAKNHMVVMPDANKEHVINNLVGSSVGAAGQRCMAISVAVFVGESKVWIADLKQEMAKIHPGAWDDEDAAYGPLISEQAKQRVLGLIELGKQQGAVCELDGSQCEVEGFPDGNWIGPTLFSGVTPNMSIYTQEIFGPVLVCIEVETLQEAIELVNRNPYGNGTSIFTANGAAARKYQHEIQVGQVGINVPIPVPLPFFSFTGWRGSFYGDLHAYGKQAVRFYTETKTVTARWFDDDIPTGPNLTIQLR

SEQ ID NO: 26349 - protein, 480 aa, Prochlorococcus marinus subsp. marinus str. CCMP1375
MKFQAAPIKFGTDGWRGVLGVDITIERLIRVAVASAQEMAYRAKNDSTNKVVIGYDRRFLASEFAEAIADAVRGCSLYPLLADVSVTTPSCSWAVVENNALGALVITASHNPPEWLGLKIKGPLGRSVEEDFTKAVEERLLTGGITAPILGETEKFSCRQNHLIGLKRKMDIPALLIGIRAMGLKVIVDSMHGSAAGCMTEILGNESHDFLKEIRTKRDPLFGGNAPEPLAKNLDQLIVNTQELALEGHPVLGLAFDGDGDRIAAIDETGRFCSTQLLIPLFIEHMAGVRNLPGCVIKTVSGSDCIRLIAKDFDREVIERPVGFKYIAQEMLSRKVLLGGEESGGIGFGDHLPERDALYAALLLLESIVYRRKPLGSLLDNLQKRLGTSFYDRFDLLLSDNDSRQRLEKSLKINPPLLVEGKKVKEVIELDGCKLRFDERHWLMFRFSGTEPLLRIYCEAPTYKEVEETLAWAKNFASQI

SEQ ID NO: 26350 - protein, 502 aa, Oryza sativa (japonica cultivar-group)
MASITSELLFFLPFILLALLTFYTTTVAKCHGGHWWRGGTTPAKRKRMNLPPGAAGWPLVGETFGYLRAHPATSVGRFMEQHIARYGKIYRSSLFGERTVVSADAGLNRYILQNEGRLFECSYPRSIGGILGKWSMLVLVGDPHREMRAISLNFLSSVRLRAVLLPEVERHTLLVLRAWPPSSTFSAQHQAKKFTFNLMAKNIMSMDPGEEETERLRREYITFMKGVVSAPLNLPGTPYWKALKSRAAILGVIERKMEERVEKLSKEDASVEQDDLLGWALKQSNLSKEQILDLLLSLLFAGHETSSMALALAIFFLEGCPKAVQELREEHLGIARRQRLRGECKLSWEDYKEMVFTQCVINETLRLGNVVRFLHRKVIKDVHYKGYDIPSGWKILPVLAAVHLDSSLYEDPQRFNPWRWKSSGSSGGLAQSSSFMPYGGGTRLCAGSELAKLEMAVFLHHLVLNFRWELAEPDQAFVFPFVDFPKGLPIRVHRIAQDDEQE

SEQ ID NO: 26351 - protein, 261 aa, Vibrio parahaemolyticus RIMD 2210633
MPSMPKAIEHTIQNHVAMITMNNPPANTWTADSLHALKALVCTLNQNKDVYALVITGSGDKFFSAGADLNLFADGDKARALEMARCFGEAFETLSEFRGVSIAAINGYAMGGGLEVALACDIRVVEEQAILALPEAKVGLLPCAGGTQNLTALVGEGWAKRMILCGEQISASLAKELGLAEELVPKGEALSKAIAMADSVANQSPSSVAACKILIQNMRSAPLKHGLMKERELFLDLFDTEDQTEGVRAFLEKRPPNWKNQ

SEQ ID NO: 26352 - protein, 370 aa, Legionella pneumophila str. Lens
MNIFNLPDLGEGLPDAEIHEWFVKEGDTVKADQPLVSMETAKAVVDVPCPQSGTIAKLYGKPGDVIKTGEPLVEFVSTTEKPADKGTVVGNLEESTDVSEDNFIIGSQRSSHRVKTTPAVRLLAKKLGVDLSSLKGSGDNGVITREDVQNQANINSQPPVGFEPLRGVRRAMLNSMVQSHAEIVPVSIFDEADIHSWKPNTDITVRLIRAIIHASKKEPALNAWFDTKHAARRCFKEVHLGIAMDNEEGLFVPVIHDAEKYSDSELRKIIDEFKESVRNRAVSADKLKGATITLSNFGKFSGRFASPIIVPPMVAILAVGRLYKAAVINDEDKIEAHKMLPLSLSFDHRAITGGEATRFLGAVIESLQQA

SEQ ID NO: 26353 - protein, 542 aa, Physcomitrella patens
MEAGGRPMGPATAEYYLPNYKLGKTLGIGSFGKVKVAEHSPTGHKVAIKILNRRKVKMMDMEEKVRREIKILRLFMHPHIIRLYEVIETPADIFVVMEYVKSGELFDYIVEKGRLGEHEARRFFQQIVSGVEYCHRNMVVHRDLKPENLLLDSKSNVKIADFGLSNVMRDGHFLKTSCGSPNYAAPEVISGKLYAGPEVDVWSCGVILYALLCGSLPFDDENIPNLFKKIKGGIYTLPSHLSPGARDLIPRMLLVDPMKRVTIPEIRQHPWFLNHLPRYLAVPPPDTTQQAKRIDEEILERVVALNFDRDLLIDSLLNRVQNKATVAYYLMLDNRRRLSNGYLCSEFNEGKEHLMSPMDAFNGTPRSGYPRTLTHMSSMDRRSASPSGLQHRVVAERKWVLGLQLRSHPKEIMNDVLKTLRDLGINWKKTGAYNLKCRWVAPGQNSNDTTAENHSLPDSPMAGSMPRASSCRWSSEQHGVSGSVAAGNRDNESGVESNVLKFELQLFKLREEKYLLDLQRVVGPTYLFLDLCAAFLAELRVL

SEQ ID NO: 26354 - protein, 149 aa, Oryza sativa
  misc_feature (41)..(41): Xaa can be any naturally occurring amino acid
MCVGTRCTQEFEVEEEIEMVPAARSGWPAAAAVLVVVLVLXSSPPGTITVVVARAALSCSTVYNTLLPCLPYVQSGGAVPGGCACGGIRSVVAAVRTTADRRAACTCLKNVAAGAAGGPYISRAAGLPGRCGVSVPFKISPNVNCNAVN

SEQ ID NO: 26355 - protein, 454 aa, Pseudotsuga menziesii
MGILLLFAVLALSAMAGSASRADFSIISYDSQDLIGDDAIMELYELWLAQHKKAYNGLDEKQKKFSVFKDNFLYIHQHNNQGNPSYKLGLNQFADLSHEEFKAAYLGTKLDAKKRLSRSPSPRYQYSVGEDLPESIDWREKGAVTAVKNQGSCGSCWAFSTVAAVEGINQIVTGNLTSLSEQELVDCDTSYNQGCNGGLMDYAFQFIISNGGLDSEDDYPYKANNGSCDAYRKNAHVVTIDDYEDVPENDEKSLKKAAANQPISVAIEASGRAFQFYESGVFTSNCGTQLDHGVTLVGYGSESGIDYWLVKNSWGNSWGEKGFIKLQRNLEGASTGMCGIAMEASYPVKKGANPPNPGPSPPSPVKPPTVCDNYYSCPESNTCCCMYDFGGYCYAWGCCPLNSATCCDDHYSCCPSDHPVCDLDAQTCLKSRKDPFGTKMLKRTPAKPYWSLSG

SEQ ID NO: 26356 - protein, 275 aa, Bacteroides fragilis
IDKVGDPFPEETYRVCKNADAVLFSAVGDPKFDNDPTAKVRPEQGLLAMRKKLGLFANIRPFQTFKCLVHKSPLRAELVEGADFLCIRELTGGMYFGEKYQDNDKAYDTNMYTRPEIERILKVGFEYAMKRRKHLTVVDKANVLASSRLWRQIAQEMAPQYPEVTTDYMFVDNAAMKMIQEPKFFSVMVTENTFGDILTDEGSVISGSMGLLPSASTGESTPVFEPIHGSWPQAKGLNIANPLAQILSVAMLFEYFDCKAEGALIRKAVDASLDA

SEQ ID NO: 26357 - protein, 143 aa, Brassica napus
IFSRPRPRAMQAANAMLQGNLSLTPSKLFVGGLSPTTDVDILKEVFGKFGKIVDVVVVSDRETGVSKGFGFVTYDSIDAANKAMQQMNDQELDGRIIGVNPADSGGGGGGFARRGGYGGGRGGFGRGGFGRGGFGRGGYNFVR

SEQ ID NO: 26358 - protein, 637 aa, Ustilago maydis 521
MAQTPSTSSHEDMYKNEKIDLKVVQADEVHVHQVQGYDAPEPSKMTRRAQILAITICVGGLLFGFDIGIISGCFIMDPFIKVFGDCGAQGCSIPEGRISIINSSLSIGTFVGALLQAPVSDFFGRKPSMITWATTFTVGAIIQTATISSWHQFAVGRAVAGLGIGALSGLCPLYLGETAPKHIRGTMVTFYQLLIIFGIFISYGVSWATQNFKTSNASWKIPVGLQLLWGVAMLSLMTLLPESPRYCLKNGQVDRAREIMAKMRDVVLQPINGQPRGDKWMEAELAEMKQGIDEENNIFAGRSYLGSYLVCFSAKNQMWKRTINGMMLQTLQQLNGQNFYYYYLPLLSSTLALPLDPFQIQFILGSASLVATLPALVAIEKLGRRPLLLIGAACEAACAFIVAFVGHYKTAPKDTPADLITASQHQAGAVFISFAIIHLLFYSCCWGPGPWLYLSESFNSPTRAKAISLGSASNWLFNFLLSFFSNKVAAQYGPFIMLIFGSVLVFAFVWVYFMVPETKGISLEDVEVLYSENVKPWKSAAWMAITRDCRRELSLFGKQEVGSQTVVRRPSCVFCALQLWRLYDPVEPSDTQRTIVTIKYACGFACVKDRSNPFNYATMCSLPTSVALVTVCSRHAC

SEQ ID NO: 26359 - protein, 181 aa, Brassica napus
  misc_feature (9)..(9): Xaa can be any naturally occurring amino acid
  misc_feature (12)..(12): Xaa can be any naturally occurring amino acid
  misc_feature (23)..(23): Xaa can be any naturally occurring amino acid
  misc_feature (37)..(37): Xaa can be any naturally occurring amino acid
  misc_feature (54)..(54): Xaa can be any naturally occurring amino acid
MAYSMLSSXAVXTSPAQATMVAXFTGLKSSSAFPVTXKANNDITSIVSNGGRVXCMKVWPPVGKKKFETLSYLPDLTEVELGKEVDYLLRNKWIPCVEFELEHGFVYREHGSTPGYYDGRYWTMWKLPLFGCTDSAQVLKEVQECKTEYPNAFIRIIGFDNNRQVQCISFIAYKPPSFTGA

SEQ ID NO: 26360 - protein, 275 aa, Bacteroides fragilis YCH46
IDKVGDPFPEETYRVCKNADAVLFSAVGDPKFDNDPTAKVRPEQGLLAMRKKLGLFANIRPVQTFKCLVHKSPLRAELVEGADFLCIRELTGGMYFGEKYQDNDKAYDTNMYTRPEIERILKVGFEYAMKRRKHLTVVDKANVLASSRLWRQIAQEMAPQYPEVTTDYMFVDNAAMKMIQEPKFFDVMVTENTFGDILTDEGSVISGSMGLLPSASTGESTPVFEPIHGSWPQAKGLNIANPLAQILSVAMLFEYFDCKAEGALIRKAVDASLDA

SEQ ID NO: 26361 - protein, 338 aa, Oryza sativa
MGAGNGEVRYGGGGAGAGEAAVMADDGTTVFRGTAQPPVRTTVALALWLGAIHFNAFLLLASLFLFPRRVAAMVLATQLFFMFAPVNDMSRLGRKIARFISKCVIGYFPVTLHVEDYKAFDPNRAYVFGYEPHSVLPIALGVLLELVGFMPLPKIKVLASSAVFYTPFLRQIWTWLGLVPASRKNFYSYLKAGYSCVIVPGGVQEMLHMDHDSEVAFLKSRKGFVKIAMETGSPLVPVFAFGQSYVYKWWRPGGKLIVKIARAIKFTPIMFWGNFGTPIPFATPMHVVVGRPIEVKKNAQPTFDEINEVHEQFVVALQELFEKYKTKAGYPNLHLRVL

SEQ ID NO: 26362 - protein, 335 aa, Vibrio cholerae
MSVSNTVTKVEEFDFEDEALEVLETDAELTSDEELVAVEGASEDVREEFDASAKSLDATQMYLSEIGFSPLLTAEEEVLYARRALRGDEAARKRMIESNLRLVVKISRRYSNRGLALLDLIEEGNLGLIRAVEKFDPERGFRFSTYTTWWIRQTIERALMNQTRTIRLPIHVVKELNIYLRTARELSQRLDHEPTPEEIALELDRPVDDVTKMLRLNERISSVDTPIGGDGDKALLDILPDSHNADPEFSTQDDDIRESLLNWLDELNPKQKEVLARRFGLLGYEPSTLEEVGREINLTRERVRQIQVEGLRRLREILVKQGLNMEALFNVEYDN

SEQ ID NO: 26363 - protein, 319 aa, Photorhabdus luminescens subsp. laumondii TTO1
MSAAKHHKLIILGSGPAGYTAAVYAARANLNPVLITGVERGGQLTTTTEVENWPGDPEGLTGPGLMERMHQHAEKFQTEIISDHIQKVDLQSRPLRLYGDEQEYTCDALIIATGASARYLGLPSEEAFKGRGISACATCDGFFYRNQKVAVVGGGNTAVEEALYLANIAAEVHLIHRRDTFRSEKILISRLMDKVKNGNIILHTDRILDEVLGDDMGVTGVRLRDTKSGATEELAVTGTFIAIGHTPNTAIFESQLELDNGYIKVQSGLQGNATQTSIPGVFAAGDVMDHTYRQAITSAGTGCMAALDAERFLDGLAAK

SEQ ID NO: 26364 - protein, 142 aa, Silicibacter sp. TM1040
MPLKYLHTMVRVKDLEKSMAFYALLGLKETRRYDSEAGRFSLIFMAPPGQEEAPVELTWNWDGDDELPSDSRHFGHLAYEVDNIYETCQHLMDNGVVINRPPRDGRMAFVRSPDNISIELLQAGDALPPAEPWSSMENTGHW

SEQ ID NO: 26365 - protein, 275 aa, Bacteroides ovatus
IDKVRDPFPEATYQVCKEADAVLFSAVGDPKFDNDPTAKVRPEQGLLAMRKKLGLFANIRPVQTFKCLIHKSPLRAELVENADFICIRELTGGMYFGEKYQDNDKAYDTNYYTRPEIERILKMAFEYAMKRRKHLTVVDKANVLASSRLWRQIAQEMAPNYPEVTTDYMFVDNAAMKMIQEPAFFDVMVTENTFGDILTDEGSVISGSMGLLPSASTGESTPVFEPIHGSWPQAKGLNIANPLAQILSVAMLFEYFDLKEEGALIRKAVDVALDE

SEQ ID NO: 26366 - protein, 451 aa, Gibberella zeae PH-1
MSHLPHEPEFEQAYGELASALENSSLFNEHPEYRTALAVAAIPERVIQFRIVWEDDKGNLQVNRGYRVQFNSALGPYKGGLRFHPSVNLSILKFLGFEQIFKNALTGLSMGGGKGGADFDPKGKSDAEIRRFCQSFMTELSKHIGAETDVPAGDIGVGGREIGYLFGAYRKLRNRWEGVLTGKGLSWGGSLIRPEATGYGLVYYVDYMLKHANRGSFEGKRVALSGSGNVAQYAALKIIELGGSVVSLSDSKGALVAKEGSSFTPEQIHNIAALKIKHQSLTAFEHQDKFTWIEGARPWVHVGKVDIALPSATQNEVSKEEAQALLEAGAFIVAEGSNMGCTADAIDVFEAHRKENGAQALWYAPGKASNCGGVAVSGLEMAQNSQRIQWSEKEVDDRLKAIMKDAFVAGLETAQKYVEAKEGELPSLVAGSNIAGFIKVAEAMHNQGDWY

SEQ ID NO: 26367 - protein, 458 aa, Silicibacter sp. TM1040
MATEILMPALSPTMEEGTLAKWLVKEGDTVNSGDILAEIETDKATMEFEAVDEGIVGKILIDEGSEGVKVNTPIAILVEEGESVEDAVSSAAAPAAEAPAAEAAAPAPVAAAAATPAAPEVDESPDYPEGTEMVSQTVREALRDAMAEEMRSSEDVFVMGEEVAEYEGAYKITQGLLDEFGSKRVIDTPITEHGFAGIATGAAFGGLRPVVEFMTFNFAMQAIDHIINSAAKTLYMSGGQMGAPMVFRGPNGAAARVAAQHSQDYAAWYMQIPGLKVAMPYSAADAKGLLKSAIRDPNPVIFLENEILYGKSFEVPKLDDYTVPFGKAKIWRKGDDVTIVSFGIGMTYALDAADKLAEDGINAEVIDLRTLRPMDLPTVIKSVMKTNRLVTVEEGWPQGSVGSYIASEVMQQAFDYLDAPVAVCTGKDVPMPYAANLEKHALITTDEVIEAVKQVTYR

SEQ ID NO: 26368 - protein, 188 aa, Oryza sativa
MRALDEKETKMVFEKLFKFTGPNLKHLLERPAVEGPDPQAGRYCLRLHKNRVYYASEALVRRATAVARPRLAGVGTPIGKFTHGGAFHLTVHALDLLAAHARRRVWLKPDTERSFLFGNSVPKSSLARITENTKANDGVVVMSMADVPLGFGIAARSAQDCRKADTNAVVVLHQSDAGEYLRREEELM

SEQ ID NO: 26369 - protein, 235 aa, Coccidioides immitis RS
MPSAITDEGLKFNTIEETIEAFRNGEFIVVLDSQNRENEGDLIIAADAVTPAKMAFMIRYTSGYICAPILPELAASLDLPQMVTDSTDPNRTAYTISIDSNDPSVSTGISARDRSLTCRNLASPDVKPTDFRRPGHILPLRARPGGVRERNGHTEATIDFCRLAGKREVGVICELVEDGDEVAPNVAERTDCSMMRRDGCLRFGKRWGLKVCTIEDLVDYLEKTEGSLPTLNGKH

SEQ ID NO: 26370 - protein, 328 aa, Escherichia coli
MDKKQVTDLRSELLDSRFGAKSISTIAESKRFPLHEMRDDVAFQIINDELYLDGNARQNLATFCQTWDDENVHKLMDLSINKNWIDKEEYPQSAAIDLRCVNMVADLWHAPAPKNGQAVGTNTIGSSEACMLGGMAMKWRWRKRMEAAGKPTDKPNLVCGPVQICWHKFARYWDVELREIPMRPGQLFMDPKRMIEACDENTIGVVPTFGVTYTGNYEFPQPLHDALDKFQADTGIDIDMHIDAASGGFLAPFVAPDIVWDFRLPRVKSISASGHKFGLAPLGCGWVIWRDEEALPQELVFNVDYLGGQIGTFAINFSAGGSGNCTVL

SEQ ID NO: 26371 - protein, 396 aa, Aspergillus nidulans FGSC A4
MDSQDQSISPDEIALYDRQIRLWGVKAQEKLRSANILIITFKALANEVAKNLVLAGIGSLTIIDDGIVTEEDLGAQFLVNQDCIGQNRAQAAAPAVRAYNKRVKVYADASGISSKPPEFFGQFDLTIATELDFAMYNVINSACRVAGRPFYAAGLHGFYGFVFSDLIEHDFVITREKSNVPSPINETSTRTILNITSKKENDKMIEMVTKREKYHPLLLANTSPLPDELTRLPRRRKQVTPLLSCLRALWEFQKINHGRLPTFSHQDLESFTKLARDAHQELKLDISTLDSAFLRTFLSNLGSELSPVAGFLGGALAQDVMNVLSAREQPLQNLLLVDGERSVAPIYSLHPFYSMDTPNAMAAVPPAPNPIPLNGHPGIENGQPSIGNGQPGVGLS

SEQ ID NO: 26372 - protein, 444 aa, Oryza sativa
LIDMQHQQRMKQAAAAAQQQQMMQQALLMQQQQAAAVAAAAQQQQAPLFPPHHPHPGLLAAPQIEPIVSGNLPPGFDSSTCRSVYVGNIHLQVTDSLLHEVFQSIGPVEGCKLIRKEKSSFGFVDYYDRRSAAIAIVSLNGRQLFGQPIKVNWAYASTQREDTSGHFNIFVGDLCPEVTDAALFAFFAGFTSCSDARVMWDQKTGRSRGFGFVSFRNQQDAQNAINELNGKWLGNRQVRCNWATKGANAGEEKQNTDSKGMIELTNGSSEGGKDNANEDGPENNPQYTTVYVGNLPHDVNSNDVHRFFHSLGVGSIEEVRVTRDKGFGFVRYSTHEEAALAIQTGNGQLIGGRQIKCSWGSKPTPPGTASAPLPPPAPAPFNPGMSATDLLAYERTLALSKMAANPALMSQHAALKQAAAMGMGAGASQAIYDGGYQSANAVFY

SEQ ID NO: 26373 - protein, 340 aa, Pseudomonas fluorescens
MTDHALLLVNLGSPASTSVADVRSYLNQFLMDPYVIDLPWPVRRLLVSLILIKRPAQSAHAYASIWWDEGSPLVVLSRRLQQQMTAQWTQGPVELAMRYGEPSIESVLTRLAGQGISKVTLAPLYPQFADSTVTTVIEEARRVVRDKQLDLQFSILQPFYDQPEYLDALVASARPHLQQDYDHLLFSFHGLPERHLNKLNPGHSLEGSGDCCANASPEVRTTCYRGQCFSVARDFAARMGLPDDKWSVAFQSRLGRAKWIEPYTEARLEALAQQGVKKLLVMCPAFVADCIETLEEIGDRGLEQFREAGGEELVLVPCLNDDPQWAVALNTLCERAPVSL

SEQ ID NO: 26374 - protein, 147 aa, Sesbania rostrata
GFTDKQEALVNASYEAFKKNLPGHSVLFYSFILEKEPAAKGLFSFLKDSDGVPQNNPSLQAHAEKVFGLVHDAAAQLRATGVVVLADASLGSVHVQKGVTDPHFVVVKEALLKTLKEAAGATWSDEVSIAWEVAYDGLAAAIKKAMS

SEQ ID NO: 26375 - protein, 545 aa, Physcomitrella patens
MDSGGRPVAPVAVEYYLPNYKMGKTLGIGSFGKVKVAEHTPTGHKVAIKILNRRKVKSMDMEEKVRREIKILRLFMHPHIIRLYEVIETPTDIFVVMEYVKSGELFDYIVEKQRLGEDEARRFFQQIVSGVEYCHRNMVVHRDLKPENLLLDSKWNVKIADFGLSNIMRDGHFLKTSCGSPNYAAPEVISGKLYAGPEVDVWSCGVILYALLCGSLPFDDENIPNLFRKIKGGIYTLPSHLSPGARDLIPRMLLVDPMKRVTIPEIRQHPWFLNHLPRYLAVPPPDTLQQAKRIDEEILERVVALNFDRVHLIESLLNRVQNKATVAYYLMLDNRRRLSNGYLGSEFDEGKEQSLSPMSPYGAHGGTPRSTYPRSLIRTPSMDRRGSSSSVLQHRVVAERKWALGVQLRSHPKEIMSDVLDTLRKCDINWKKTGAYNLKCRWVAPNQHLNDRASEHRGIPDSPMAGTTPRVSSGRWSSEQQGISGSVASGNKDDESGVESNVLKFELQLFKMREEKYLLDLQRVEGPTYLFLDLFSAFLIELRVA

SEQ ID NO: 26376 - protein, 491 aa, Sulfitobacter sp. EE-36
MTDAKTDLKSMLKDPSLLETRAYIGGEWVDGDDGTFDVVNPARGDVIAKVANLSRAQVAGAIAQAEKAQKEWASWTGKERAGVMRKWFDLMMENQDDLGAILTAEQGKPLGEAKGEIAYGASFIEFFGEEAKRVYGETIPGHQRDKRITVIKQPIGVAASITPWNFPNAMITRKAAPALAAGCAFVARPAAETPLSAIVMGVLAERAGIPAGVFNVLPSSSSSAVGKEFCENPAVRKLTFTGSTEVGRILLKQAADQVMKCSMELGGNAPFIVFDDADLDAAVEGAILCKFRNNGQTCVCANRIYVQAGVYDAFAEKLKARVEKMKVGDGFEDGVELGPLINGDASDKVKEHVEDAVSKGAEILLGSKEEKMEGNFLAPTIITGVTQDMKVSKEETFGPLAPLFKFDNEDDVIEMANDTIFGLASYFYAKDLSRVYKVAEALEYGIVGVNTGIISTEVAPFGGVKQSGLGREGSHHGIEDYLEMKYICMSV

SEQ ID NO: 26377 - protein, 707 aa, Prochlorococcus marinus subsp. marinus str. CCMP1375
MMVPSEKEPQSISSVLPSLEEANTSFPLAAVTGHGTLKLALMLAAVDPGLGGVIIAGGRGTGKSVLARGLHALLPPIEVLDLRFAGDLQGPRPFGRNLDPNFPEEWDDATNELIKQRESNNSANGKQDLQTRVVQAPFVQVPLGITEDRLVGAVDVASSLDSGSAVFQPGLLAEAHRGVLYIDELNLLDDGIVNLMLAAVGSGENQVEREGLSLSHPCRPLLIATYNPEEGAVRDHLLDRFAIVLSADQIISNEQRVEITESALAFGFSTKEFSKKWDEATQALATQLLLARQWLSDIALSQEQIEYLVKEAIRGGVEGHRSELYAARVAKAHAALCGRDKVEAEDLKVAVRLVIAPRSLQIPPEEEQMEPPPPDEQQPPPPKDESLDEDTEDEDTEDDDMPEDQSAPPIPEEFMLDPEACAIDPDLLLFSAAKSKSGSSGSRSAVFSDSRGRYVKPILPKGPVTRIAVDATLRAAAPYQKARREREPGRKVIVQEGDLRAKLLQKKAGSLVIFLVDASGSMALNRMQSAKGALIRLLTEAYESRDEVSLIPFRGEQAEVLLPPTRSITAAKRRLETMPCGGGSPLAHGLTQAARVGANALSTGDLGQVVVVAITDGRGNIPLGKSLGQPELDGDDSVDLKQEVLDIATRYRTLGIKLLVIDTERKFIASGIGKDLADAAGGKYVQLPKATDQALASIAMDAINTVK

SEQ ID NO: 26378 - protein, 484 aa, Agrobacterium tumefaciens str. C58
MIKLKNAALLRDACLVNGRWLKAADGKTIAVENPANSMIIGHVPSLSADEVKAAVESAGKAFSEWSRRSAKDRAAILRRWFDLMVANADDLGALMTAEQGKPFAEAKGEALYAASFVEWFAEEAKRVYGDTIPSPTTDKRITILKQPIGVCAAITPWNFPAAMITRKAAPALAAGCAMIVKPAEQTPLTALALGVLAEEAGVPAGVFQVVTGAARDIGKVFTESDTVRKISFTGSTEVGRLLMAQSAPTIKKLSLELGGNAPFIVFDDADLDAAVEGAIVSKYRNAGQTCVCSNRIYVQDGVYDAFAEKLVKRVESLSVGEGTEPGVLIGPLIDQEAVAKVEDHVADALGKGAKIVIGGKRHALGGTFYEPTVLTGATQAMKVAREETFGPVAPLFRFGTEDEAVAMANDTEFGLAAYFYTENVRRTWRVAEALEYGMVGHNTGLISNEVAPFGGVKQSGLGREGSHYGIDEYLEIKYLCSAIG

SEQ ID NO: 26379 - protein, 493 aa, Rhodopseudomonas palustris CGA009
MAAVQETVDRVRQIDVDQYRYGFETLIESEKAPKGLSEDIVRFISAKKNEPDWMLQWRLDAYRRWLTMTEPSWARVSYPKIDFQDLYYYSAPKPKKQVGSLDEIDPEILKTYEKLGIPLREVEVLEGVVRPEGERKIAVDAVFDSVSVATTFQAELKKAGVIFMPISEAIKHHPELVQKYLGSVVPTSDNFYATLNSAVFSDGSFVYVPPGVRCPMELSTYFRINERNTGQFERTLIIADKGSYVSYLEGCTAPQRDENQLHAAVVELVALDDAEIKYSTVQNWYPGNSEGKGGIYNFVTKRGDCRGANSKISWTQVETGSAITWKYPSCILRGDNSRGEFYSIAISNGYQQVDSGTKMIHLGSNTTSRIISKGIAAGKSQNTYRGLVTAHRKAKGARNFTACDSLLIGDQCGAHTVPYIEAKNASTLFEHEATTSKISEDVLFYCIQRGLSQEEAVGLVVNGFVKDVLQQLPMEFAVEAQKLISISLEGSVG

SEQ ID NO: 26380 - protein, 347 aa, Arabidopsis thaliana
MGLDYYDILKVNRNATEDDLKKSYRKLAMKWHPDKNPNTKTEAEAKFKQISEAYEAKYEVMFQVLSDPQKRAVYDQYGEEGLSDMPPPGSTGNNGRAGGFNPRNAEDIFAEFFGSSPFGFGSAGGPGRSMRFQSDGGGGMFGGFGGGNNGSENNIFRTYSEGTPAPKKPPPVESKLPCSLEELYSGSTRKMKISRSIVDANGRQAQETEILTIVVKPGWKKGTKIKFPDKGNEQVNQLPADLVFVIDEKPHDLFTRDGNDLITSRRVTLAEAIGGTTVNINTLDGRNLPVGVAEIVSPGYEFVVPGEGMPIAKEPRNKGDLKIKFDVQFPARLTTEQKSALKRVLAG

SEQ ID NO: 26381 - protein, 402 aa, Rhizobium sp. N33
MDRRVVITGIGGLCGLGTDAPSIWKEMREGRSAIGPIVTSELHGLTGTIGAEIKTLPEHDIDRKQLVTMDRFSLLAVLAAREAMRQAGLSCDERNAYRFGAIVGVGGSGWEAIEASYRALLLNGARRAGVMDVPKAMPSAAAGQVSMSLGLRGPVFGVTSACASANHAIASAVDQIRCGRADVMLAGGSDAPFVFCVVKAWEAMRVIAPDTCRPFSSDRRGLVLGEGAGMAVLESYEHATARGATIIAEIAGIGLSADAFNLVSPAVEGPEAAMRACLADAGLNVQDVDYINAHGTGTKANDRMETEAIKRVFGGHANSMSISSTKSMHAHCLGAASALEMIACVMAIQEGVVPPTANYREPDPDCDLDVTPNVARERKVRVALSNAFAMAGMNAVLAFRQV

SEQ ID NO: 26382 - protein, 447 aa, Bacillus anthracis str. 'Ames Ancestor'
MLHRYLPMTEEDKKEMLQTIGVQTIDELFSDIPESVRFKGDLKIKEAKSEPELLKELSQMASKNANLKEYASFLGAGVYDHYAPVIVDHVISRSEFYTAYTPYQPEISQGELQAIFEFQTMICELTGMDVANSSMYDGGTALAEAAMLAAGHTRKKKILVSSAVHPESRAVLETYAKGQHLEVVEINHKDGVTDLDVLQSEVDDTVACVIVQYPNFFGQVEKLADIEKIVHQQKSLFIVSSNPLSLGALTPPGKFGADIVIGDAQPFGIPTQFGGPHCGYFATTKAFMRKIPGRLVGQTVDSDGKRGFVLTLQAREQHIRRDKATSNICSNQALNALAASVAMTALGKQGVKEMARQNISKAQYAKRQFEAKGFTVTFAGPFFNEFVVDCKRPVKEVNDALLQKNIIGGYDLGRDYKEHENHMLVAVTELRTKEEIDTLVNEMGAIQ

SEQ ID NO: 26383 - protein, 167 aa, Citrus sinensis
MASQSKTSVHDFSVKDAKGQDVDLSIYKGKLLLIVNVASQCGLTNSNYTELSQLYDKYKNQGLEILAFPCNQFGAQEPGDNEQIQEFACTRFKAEFPIFDKVDVNGDNAAPLYKHLKSSKGGLFGDSIKWNFSKFLVDKEGNVVERYAPTTSPLSIEKDIKKLLETA

SEQ ID NO: 26384 - protein, 890 aa, Poncirus trifoliata
MGNICQISISCDGAFFNRCLDCFLGKAAYISNLQDNLVALDTELRKLIAAKNDLMRRVNDAERQQMRRLDQVQVWVSRVETVETEADAFIGDGTQEIEKLCLGGYCSKNCKSSYKFGKQVARKLRDIKTLMGEGVFEVVADKVPEPAVDERPTEPTVVGLQSQLEEVWRCLVEEPVGIVGLYGMGGVGKTTLLTHINNKFLGSPTNFDLVILVVVSKDLRLESIQEVIGEKIGLLNDAWKSRRIEQKALDIFRILRGKNFVVLLDDIWQRVDLAKVGIPLPNSQTSASKVVFTTRSEEVCGLMEAHKKFKVECLSGNDAWELFRQKVGEETLNCHHDILELAQTVTKECGGLPLALITIGRAMACKKTPEEWSYAIQVLRTSSSQFPGLGNEVYPLLKFSYDNLPNDTIRSCLLYCCLYPEDCCISKENLVDCWIGEGLLNGSVTLGSHEQGYHVVGILVHSCLLEEVDEDEVKMHDVIRDMALWLACDAEKEKENYLVYAGAGLREAPDVIEWEKLRRLSLMENQIENLSEVPTCPHLLTLFLNSDDILWRINSDFLQSMLRLKVLNLSRYMGLLVLPLGISKLVSLEYLDLSTSLISEIPEELKALVNLKCLNLEYTGRLLKIPLQLISNFSRLHVLRMFGNAYFSYGNYPIESVLFGGGELLVEELLGLKHLEVLSLTLGSSRALQSFLTSHMLRSCTRAMLLQDFQGSTSVDVSGLADLKRLKRLRISDCYELVELKIDYAGEVQRYGFHSLQSFEVNYCSKLKDLTLLVLIPNLKSIEVTDCEAMEEIISVGEFAGNPNAFAKLQYLGIGNLPNLKSIYWKPLPFPCLEELTVSDCYELKKLPLDSNSAKEHKIVIRGAANWWRNLQWEDEATQNAFLSCFQSLA

SEQ ID NO: 26385 - protein, 275 aa, Bacteroides caccae
IDEVGDPFPEETYQACKNADAVLFSAVGDPKFDNDPTAKVRPEQGLLAMRKKLGLFANIRPVQTFKVLIHKSPLRAELVENADFICIRELTGGMYFGEKYQDNDKAYDTNYYTRPEIERILKVAFEYAMKRRKHLTVVDKANVLASSRLWRQIAQEMAPQYPEVTTDYMFVDNAAMKMIQEPAFFDVMVTENTFGDILTDEGSVISGSMGLLPSASTGESTPVFEPIHGSWPQAKGLNIANPLAQILSVAMLFEYFDLKEEGALIRKAVDASLDE

SEQ ID NO: 26386 - protein, 548 aa, Burkholderia vietnamiensis G4
MKRNPQDKYRPFEPVRINGRRWPTRTIERAPVWMSTDLRDGNQSLIEPMSIEQKLEFFDMLVAIGFKEIEVGFPSASQTDFDFVRKLIDEKRIPDDVTIEVLVQSREDLIARTFDALDGVPRAIVHLYNAICPSFRRIVFGMSKDDVKALAVDGTRLIKEHAAARPDTHWTYQYSPETFSMTELTFAREVCDAVAQAWRPTRDHKMIVNLPATVEAATPNVFADQIEWMDRNLAYRDSIVLSVHPHNDRGTAVAAAELALLAGADRIEGCLFGNGERTGNVDLVTLALNLYTQGIDPGLDFSDIDAVRRVVERCNQIPVHPRHPYAGDLVFTAFSGSHQDAIRKGFAQQRPDAVWEVPYLPIDPADLGRSYDAVIRVNSQSGKGGATFLLERGMGFTPTRRVQIEFSHAVQTLADASGEEVTGDAICALFAREFFETDGPAARHGDTARWSNRDLAYAAPANAAPEEVVQQAAAAFAGAAGAPIEVASCEHTRTTDGRIAISVGCRVGDAPLRHGVGVHADVASAALDALVSAINRSAWHCADRRAAA

SEQ ID NO: 26387 - protein, 275 aa, Parabacteroides distasonis
IDKVGDPFPEETYRICKDADAVLFSAVGDPKFDNDPTAKVRPEQGLLAMRKKLGLFANIRPVQTFKCLLHKSPLRAELVDGADFLCIRELTGGMYFGEKYQDNDKAYDTNMYTRPEIERILKVGFEYAMKRNKHLTVVDKANVLASSRLWRQIAQEMAPSYPEVTTDYMYVDNAAMRMIQEPKFFDVMVTENTFGDILTDEGSCISGSMGLLPSASTGESTPVFEPIHGSWPQAKGLNIANPLAQILSVAMLFEYFDLKEEGALIREAVDASLDA

SEQ ID NO: 26388 - protein, 899 aa, Poncirus trifoliata
MGNILQISISCDGTCFNRCLDCFLGKAAYVRNLQKNVEALKNELPKLIAKKDDVMARVVNAERQQMMTRLNEVQLWLSRVDAVTAGADELIRIGSQEIEKLCLGGYCSKNCKSSKKFGKQVDKKLSDVKILLAEGSFAVVAQRAPESVADERPIEPAVGIQSQLEQVWRCLVEEPVGIVGLYGMGGVGKTTLLTHLNNKFLGQRDFHFDFLIWVVVSKDLQIEKIQEIIGKKVGLFNDSWMKKNLAERAVDIYNVLKEKKFVLLLDDVWQRVDFATVGVPIPPRDKSASKVVFTTRSTEVCGRMGAHKKIEVECLSANDAWELFRQNVGEETLNGQPKILELAERVAKECGCLPLALIVTGRAMACKKTPAEWRDAIKVLQTSASEFPGLENNVLRVLKFSYDSLPDDTTRSCLLYCCLFPEDYRIYKENLIDCWIGEGFLKVTGKYELQDRGHTILGNIVHACLLEEEGDDVVKMHDVIRDMTLWIACDTEKTEDTEKKKENYLVYEGAGLTEAPNVREWENAKRLSLMETQIRNLSEVPTCLHLLTLFLVFNEELEMITGDFFKSMPCLKVLNLSGARRMSSFPLGVSVLVSLQHLDLSGTAIQELPKELNALENLKSLNLDQTHYLITIPRQLISRFSCLVVLRMFGVGDWSPNGKRNDSDLFSGGDLLVEALRGLKHLEVLSLTLNNSQDLQCVLNSEKLRSCTQALYLHSFKRSEPLDVSALAGLEHLNRLWIHECEELEELKMARQPFVFQSLEKIQIYGCHRLKNLTFLLFAPNLKSIEVSSCFAMEEIISEVKFADFPEVMPIIKPFAQLYSLRLGGLTVLKSIYKRPLPFPCLRDLTVNSCDELRKLPLDSNSAKERKIVIRGYTKWWEQLQWEDQDTQNAFRPCFRSIN

SEQ ID NO: 26389 - protein, 322 aa, Streptomyces coelicolor A3(2)
MSDVRNVIIIGSGPAGYTAALYTARRSLKPLVFEGAVTAGGALMNTTEVENFPGFQDGIMGPELMDNMRAQADGFGAELIPDDVVAVDLSGEIKTVTDTAGTVHRAKAVIVTTGSQHRKLGLPNEDALSGRGVSWCATCDGFFFKDQDIAVIGGGDTAMEEATFLSRFAKSVTIVHRRDTLRASKAMQERAFADPKISFVWDSEVAEVQGDQKLAGLKLRNVKTGELSDLPVTGLFIAIGHDPRTELFKGQLDLDPEGYLKVDAPSTRTNLTGVFGAGDVVDHTYRQAITAAGTGCSAAVDAEPFLAALSDEDKAEPEKTAV

SEQ ID NO: 26390 - protein, 892 aa, Poncirus trifoliata
MGNIFQITCDGALFNRCLDCFLGKAAYIKNLKQNLADLETELGKLIDAKEDVMRRVNTAERHPMMKRLNKVQGWLSRVEAAKSDGDKLITCGSQEIKKLCLGGYCSKNCKSSYEFGKQVARKLGDVKTLMAEEAFEAVAEEVPQPAVDERPTEPTVVGLQSQFEQVCNCLEEESARIVGLYGMGGVGKTTLLTHIHNKFIQSPTNFNYVIWVVASKDLRLENIQETIGEQIGLLNDTWKNKRIEQKAQDIFRILKQKKFLLLLDDLWQRVDLTKVGVPLPGPQNNASKVVFTTRSEEVCGLMGAHTRFKVACLSNIDAWELFRQNVGEETMNSHPDILQLAQTAARECGGLPLALITIGRAMACKKTPEEWSYAIEVLRTSSSQFPGLGNEVYPLLKFSYDSLPSDTIRSCHLYCSLYPEDYCISKEKLIDCWIGERLLTERDRTGEQKEGYHILGILLHACLLEEGGDGEVKMHDVIRDMALWIACDIEREKENFFVYAGVGLVEAPDVRGWEKARRLSLMQNQIRNLSEIPTCPHLLTLLLNENNLRKIQNYFFQFMPSLKVLNLSHCELTKLPVGISELVSLQHLDLSESDIEEFPGELKALVNLKCLDLEYTRNLITIPRQLISNLSRLRVLRMFGASHNAFDEASENSILFGGGELIVEELLGLKHLEVITLTLRSSYGLQSFLNSHKLRSCTQALLLQHFKDSTSLEVSALADLKQLNRLQIANSVILEELKMDYAEEVQQFAFRSLNMVEICNCIQLKDLTFLVFAPNLKSIKVGICHAMEEIASEGKFAEVPEVMANLNPFEKLQNLEVAGARNLKSIYWKSLPFPHLKAMSFLHCKKLKKLPLDSNSAKERKIVISGERNWREQLQWEDEATRNAFLRCFRDV

SEQ ID NO: 26391 - protein, 890 aa, Poncirus trifoliata
MGNVFGVQIPWSNIFPRCLDWILNEAKYISQLEDNLDDLQTKLEQLIEAKDDVMNRVEIAERQQMSRLNQVQGWVSRVEAVKAEADQLIRVGSQEIERLCLWGYCSKNCKSSYDFGKKVTKKLQLVETLMGEGIFEVVAEKVPGAAATERPTEPTVIGLQSQLEQVWRCLVEEPAGIVGLYGMGGVGKTTLLTHINNKFLESTTNFNYVIWVVVSKDLRLENIQETIGEKIGLLNDTWKNRRIEQKALDIFKILKEKKFVLLLDDLWQRVDLVEVGVPLPGPQSSTSKVVFTSRSEEVCGLMEAHKKFKVACLSDIDAWELFQQKVGEETLKSPDIRQLAQTAAKECGGLPLALITIGRAMACKKTPEEWTYAIEVLRTSSSQFPGLGNEVYPLLKFSYDSLPSDTIRSCLLYCCLYPEDYCISKEILIDCWIGEGFLTERDRFGEQNQGYHILGILLHACLLEEGGDGEVKMHDVVRDMALWIACAIEKEKDNFLVYAGVGLIEAPDVSGWEKARRLSLMHNQITNLSEVATCPHLLTLFLNENELQMIHNDFFRFMPSLKVLNLADSSLTNLPEGISKLVSLQHLDLSKSSIEELPLELKALVNLKCLNLEYTWSLTTIPRQLISNLSRLHVLRMFAASHSAFDRASEDSILFGGGELIVEELLGLKYLEVISFTLRSSHGLQSFLSSHKLRSCTRALLLQCFNDSTSLEVSALADLKQLNRLWITECKKLEELKMDYTREVQQFVFHSLKKVEILACSKLKDLTFLVFAPNLESIELMGCPAMEEMVSMGKFAEVPEVVANLNPFAKLQNLKLFGATNLKSIYWKPLPFPHLKSMSFSHCYKLKKLPLDSNSARERNIVISGTRRWWEQLEWVDEATRNAFLPCFDS

SEQ ID NO: 26392 - protein, 424 aa, Staphylococcus aureus subsp. aureus MRSA252
MEITMPKLGESVHEGTIEQWLVSVGDHIDEYEPLCEVITDKVTAEVPSTISGTITEILVEAGQTVAIDTIICKIETADEKTNETTEEIQAKVDEHTQKSTKKASSTVEQTSTSKQNQPRNNGRFSPVVFKLASEHDIDLSQVVGSGFEGRVTKKDLMSVIENGGTTAQSDKQVQTQSTSVDRSSNQSSEDDSENSTIPVNGVRKAIAQNMVNSVTEIPHAWMMIEVDATNLVNTRNHYKNNFKNKEGYNLTFFAFFVKAVADALKAYPLLNSSWQGNEIVLHKDINISIAVADENKLYVPVIKHADEKSIKGIAREINTLATKARNKQLTTEDMQGGTFTVNNTGTFGSVSSMGIINHPQAAILQVESIVKKPVVINDMIAIRSMVNLCISIDHRILDGLQTGKFMNHIKQRIEQYTLENTNIY

SEQ ID NO: 26393 - protein, 327 aa, Staphylococcus aureus subsp. aureus MRSA252
MAKLSYLEAIRQAQDLALQQNKDVFILGEDVGKKGGVFGTTQGLQQQYGEDRVIDTPLAESNIVGTAIGAAMVGKRPIAEIQFADFILPATNQIISEAAKMRYRSNNDWQCPLTIRAPFGGGVHGGLYHSQSIESIFASSPGLTIVIPSTPYDAKGLLLSSIESNDPVLYFEHKKAYRFLKEEVPEEYYTVPLGKADVKREGEDLTVFCYGLMVNYCLQAADILAADGINVEVVDLRTVYPLDKETIIDRAKHTGKVLLVTEDNLEGSIMSEVSAIIAEHCLFDLDAPIMRLAAPDVPSMPFSPVLENEIMMNPEKILNKMRELAEF

SEQ ID NO: 26394 - protein, 335 aa, Chlamydia muridarum Nigg
MRIVINGFGRIGRLVLRQILKRNAPIEVVAINDLVSGDLLTYLFKYDSTHGSFASQATFSDGCLVVGERKIRFLAEKDVQKLPWKDLDVDVVVESTGLFVNKDDAAKHLDSGAKRVLITAPAKGDVPTFVMGVNHQKFDPANDVIISNASCTTNCLAPLAKVLLDNFGIEEGLMTTVHAATATQSVVDGPSRKDWRGGRGAFQNIIPASTGAAKAVGLCLPELKGKLTGMAFRVPVADVSVVDLTVKLSSATTYEAVCEAVKHAASTSMRNIMHYTEEAVVSSDFIGCEYSSVFDAQAGVALNDRFFKLIAWYDNEIGYATRIVDLLEYIQGNSK

SEQ ID NO: 26395 - protein, 826 aa, Triticum aestivum
MEKFLFEELAGDAVRELLRAVQGTFLCRSTAERLRRNVEPLLPLVQQNGRHALRSNAELGELAVQLREALDLARRAAAAPRWNVYRTAQLARRMEAADKGIERWLARHAPAHVLDGVRRLRDEAEARIGRLERRVEEVAALQAAPTIPPAMSLPVALPPPPSKGMAMAVEEESKDAGLVGSGVKVGKERVKEMVMSSGGGWEVVGICGMGGSGKTTLAMEIYKDQKIQGYFNNRVFFETVSQSANLETIKMKLWEQISSNIVLGAYNQIPEWQLKLGPRDRGPVLVILDDVWSLSQLEELVFKFPGCKTLVVSRLKFPTLVSRTYEMKLLGEEEALSVFCSAAFGQESVPQTADKKLVKQVAAECRGLPLALKVIGASLRDQPPMIWLSAKNRLSRGESISDSHETKLLERMAASVECLSGKVRECFLDLGCFPEDKKIPLDVLINIWMEIHDLDKPDAFAILMELSNKNLLTLVNDAQNKAGDLYSNYHDYSVTQHDVLRDLALHMSGRDSLNKRRRLVMPRREESLPRDWQRNKDLPFEAQIVSIHTGEMKESDWFQMSFPKAEVLILNFASSVYYLPSFIATMQNLKALVLINYGTTSATLDNLSAFTTLSDLRSLWLEKITLPPLPKSTIPLKNLRKISLVLCELNNSLRGSTMDLSMTFPRLSNLTIDHCVDLKELPPSVCEISSLESISLSNCHDLTELPYELGKLHCLSILRVYACPALWKLPPSVCSLKRLKYLDISQCINLTDLPEELGHLTNLEKIDMRECSRLRSLPRSSSSLKSLGHVVCDEETAMLWREAEQVIPDLRVQVAEECYNLDWLVD

SEQ ID NO: 26396 - protein, 112 aa, Methanocaldococcus jannaschii
MKKVEAIIRPEKLEIVKKALSDAGYVGMTVSEVKGRGVQGGIVERYRGREYIVDLIPKVKIELVVKEEDVDNVIDIICENARTGNPGDGKIFVIPVERVVRVRTKEEGRDVL

SEQ ID NO: 26397 - protein, 102 aa, Arabidopsis thaliana
  misc_feature (57)..(57): Xaa can be any naturally occurring amino acid
FIFFVSYIFSPKAWLAASDLLEWPNKDNGHYHYVVYRVGDHDRTIEFYTEVIGQKQXKREDNPDDKYSTAYLGFGPETSNIVVELTYYYGVISKDMRTGFAA

SEQ ID NO: 26398 - protein, 154 aa, Oryza sativa (japonica cultivar-group)
MATTAAAYGCPAAAAAAPFAASVSRRRAPLSCVSLASSSSRRRTAEFPGLRVSCLRRILAVSACSGEADSDAGSAPAESTFDLNLPRRSLLVQFTCNACGERTKRLINRVAYERGTIFLQCAGCQVYHKFVDNLGLVVEYDLREENGMNTDTET

SEQ ID NO: 26399 - protein, 397 aa, Thermoanaerobacter tengcongensis MB4
MGVKRVIVFDTTLRDGEQTPGVNFNSRDKLEIAYQLAKLGVDVIEAGFPAASNGDFEAVKNIADYVKGVTIAAMGRAVKEDIDRASSALKNAEKSRLHVFIATSDIHLQYKLKMTRDEVLKKAVEMVKYARGKFDEIEFSAEDASRTDWDFLVKVFSEVIDAGAHIINVPDTVGYAMPREYGELIRYIRNNVPNIDGVTISAHCHNDLGLAVANSLSAIENGATQVEVTVNGIGERAGNAAMEEVIMALNTRKDYFGLVHGINTKEIYNTSKLVSELTGIKLQPNKAIVGANAFRHQSGIHQHGVINNRLTYEIMRPEDIGVVPDTFALGKLSGRNAFELKVRQLGYNLSPGEISEAFRKFKDLADRKKTIVEEDIRFVVEETIEEFRGFREGEAWA

SEQ ID NO: 26400 - protein, 329 aa, Bdellovibrio bacteriovorus HD100
MAQFDKKIQKIGVYTSGGDAPGMNAAIRAVVRVGISQKLEVYGIHNGYVGMIENKIEPLQLRDMANIIQRGGTILKTGRSTEFMRPEGRARAAQNIKNLGLDALVCIGGDGSFRGAHALWEEHQIPVVGVPGTIDNDIFGSDKTIGFDTAVNTALEAIDRIRDTAASHDRLFIVEVMGRNSGFIASHVGLAGGAEEIFTPDANTTVEKAIDRINEAKSRGKTSSIIITAEGQKPGRAYDLADAIRKKSGMDAKVCILGHQQRGGSPTAADRILASRMGAAAVDALFKGYCDVMIGTEGERLIQVPLDLVYKNEKKNQLDLISLASVLAT

SEQ ID NO: 26401 - protein, 140 aa, Arabidopsis thaliana
  misc_feature (33)..(33): Xaa can be any naturally occurring amino acid
  misc_feature (70)..(70): Xaa can be any naturally occurring amino acid
  misc_feature (77)..(77): Xaa can be any naturally occurring amino acid
DIHEEKYSNAFLGFGPETSNFVVELTYNYGVCXYDIETGYEHFAISTDDVSKLVENVRAKGGYVTSKPGXAKGGGTXIAFVKDPDGYTFELIQRGTPAAPFWQDMLCVGEVDRAMKYYEKGLRMRLLRKIERPVYKNTIC

SEQ ID NO: 26402 - protein, 932 aa, Streptococcus pyogenes M49 591
MIEETSKEGDGHLPLKKLESSNNQAIIAEEVALLKEMLGNITRRMIGDDAFTVIESIMVLSEKQDYIELEKVIANISNQEMEVISRYFSILPLLINISEDVDLAYEINHQNNTDTDYLGKLALTIKDLAGKDNGKDILEQVNVVPVLTAHPTQVQRKTILELTTHIHKLLRKYRDAKAGVINLEKWRQELYRYIEMIMQTDIIREKKLQVKNEIKNVMQYYDGSLIQAVTKLTTEYKNLAQKHGLELDNPKPITMGMWIGGDRDGNPFVTAETLCLSATVQSEVILNYYIDKLAALYRTFSLSSTLVQPNSEVERLASLSQDQSIYRGNEPYRRAFHYIQSRLKQTQIQLTNQPAARMSSSVGLNTSAWPSPASLENPILAYDSPVDFKADLKAIEQSLLDNGNSALIEGDLREVMQAVDIFGFFLASIDMRQDSSVQEACVAELLKGANIVDDYSSLSETEKCDVLVQQLMEEPRTLSSAAVAKSDLLEKELAIYTTARELKDKLGEEVIKQHIISHTESVSDMFELAIMLKEVGLVDQQRARVQIVPLFETIEDLDNARDIMAAYISHDIVRSWIATNRDYQEIMLGYSDSNKDGGYLASGWTLYKAQNELTAIGEEHGVKITFFHGRGGTVGRGGGPSYDAITSQPFGSIKDRIRLTEQGEIIENKYGNKDVAYYHLEMLISASINRMVTQMITDPNEIDSFREIMDSIVADSNTIYRKLVFDNPHFYDYFFEASPIKEVSSLNIGSRPAARKTITEITGLRAIPWVFSWSQNRIMFPGWYGVGSAFKRYIDRAQGNLERLQHMYQTWPFFHSLLSNVDMVLSKSNMNIAFQYAQLAESQDVRDVFYEILDEWQLTKNVILAIQDHDDLLEDNPSLKHSLKSRLPYFNVLNYIQIELIKRWRNNQLDENDEKLIHTTINGIATGLRNSG

SEQ ID NO: 26403 - protein, 115 aa, Triticum aestivum
MARGAATQLVLVSMVAAMLLVACDAAISCGQVTSALSPCISYARGNGANPPAACCSGVRSLAGAARSTADKQAACKCIKSAAGGLNAGKAAGIPLKCGVSVPYAISSSMDCSKIR

SEQ ID NO: 26404 - protein, 404 aa, Desulfitobacterium hafniense DCB-2
MNGKWWTKDWWVSEYNYHEEVVKDLHLPQKIEIHDATLRDGEQTPGVVFSKEDKVRIAELLAEVGVERIEAGMPAVSKDDAQAIEEIAKRNLGPKIMVFCRAMREDVDRAVDCGADGIVLEAPSGYPKLKYQFASKWTEESLTEAVVNTINYAKEKGLFVNYFPFDTTRAELPFLKRLLTNVTTQAKPDSVTVVDTTGSITPTAMRFLVRQVRETIALPLEVHTHNDFGLGTATTFAAVEEGVQVVHSCINGLGERTGNTALEEIALGLKLLYGIELPKFNFQKLSELSQEVQRMSGKTLAQNKPVVGLLPFTREIGLGMKVLEDYPTAVFPFMPDFVGQKMKIVMGKKSGKESVLMKLEAAGLKANEEQVQEIVARTKAAGIAKRNWLEDEEFLVIARQVLDR

SEQ ID NO: 26405 - protein, 299 aa, Vitis vinifera
MATGISASLNSMSCRLGRNSFTATGPSSVISLSSFLTPVTHLKGNIFPLQRRRSLKVCLVLEKEIEDGIEIEDDSPESSNRASERLARKKAERYTYLVAAMMSSLGITSMAIVAVYYRLSWQMEGGEIPVLEMLGTFALSVGAAVGMEFWARWAHKALWHASLWHMHESHHRPREGPFELNDVFAIINAVPAISLLSYGLFNKGLVPGLCFGAGLGITVFGMAYMFVHDGLVHRRFPVGPIANVPYLRKVASAHQLHHSDKFNGVPYGLFLGPMELEEVGGMEELEKEISRRIKSSDSS

SEQ ID NO: 26406 - protein, 349 aa, Haloarcula marismortui ATCC 43049
MTESVEHRRLIVAGTGAAGLTAAIYAARSNNDPLVLEGDEPGGQLTLTSEVENFPGFPEGLSGPDLINNMKEQAERFGAELEHGIVADIDDSERPFRVELSNGDVYTCDAFIAASGASARTLGVPGEDELMGYGVSTCATCDGAFFRGEDMLVVGGGDAAMEEAHFLTKFADTVYIAHRREEFRAEDYWIDRVQQKVDEGEIEIMRNTELLEMHGSPEDGVDHVTLAQNDEGHPSEKLDADGTETFDFDVGAVFIAIGHTPNTDYLGDTGVELDDTGYIQTHGGTGGDQTATDVDGIFGAGDVVDYHYQQAVTAAGMGCKAAIDADEYLEAQAEATAEAESEAAAEADD

SEQ ID NO: 26407 - protein, 347 aa, Glycine max
  misc_feature (282)..(282): Xaa can be any naturally occurring amino acid
MSSSIRPSLSSFMLPSLASCNPSQKLSLFRLGSGIRQFHKFGLKASRFLRHDDKCMRVMAFGNMSTAATQENVLDWVKHDKRRMLHVVYRVGDLDKSIKFYRECLGMKLLRKRDMQEQKYTNAFLGYGPEDAHFVVELTYSYGIEKYDIGDGFGHFGIAIDDISRIVELVRAKGGKITREPSPVKGGNTTIAYIEDPDGYQFELLERVPSPEPLCKVMLRVGDLDRSIKFYEKAFGMELLRTQDDPESKSTIGILGYGPEEKNTVLELTYNYGVPDYDKGVXSDYDRRAIDTDDVYKTAEAIKLAGGKITREPGPIPVMKTKITSCVDPDGWKTVFVDNVDFRRELE

SEQ ID NO: 26408 - protein, 421 aa, Ehrlichia chaffeensis
MSLNICLPDQSLLRPRITVFGVGGAGGNAVNNMIQSNLHGVNFVVANTDAQALELSLSEKKIQLGIGLTKGLGAGSLPEVGRGAAEESINEIIEEISDSNMLFITAGMGGGTGTGAAPVIARVAKENKILTIGVVTKPFHFEGAHRMRTAEFGLEELQRYVDTLIVIPNQNLFRIANEKTTFADAFKLADTVLHTGVRGITDLMVMPGLINLDFADIRAIMSEMGKAMMGTGEAEGENRAIAAAEAAISNPLLDNISMKGAKGILINITGGLDMTLFEVDAAANRIREEVDSHANIIFGSTFNKESEGKIRVSVLATGIDNEEVVIQNKSALKDKEAHNDKLSETSSKPFNPLDNEIAYYKPSNPGEDMINSINHTKKQDHNIENQKSNNKIPESAYKMQFNKNEYWDEESFNIPTFLRKK

SEQ ID NO: 26409 - protein, 162 aa, Oceanobacter sp. RED65
MTNYVTPDLCDEYPEVEVLEPMFNNYGGRESFGGEVVTIKCHEDNSLVKENVDKPGQGKVMVVDGGGSLRNAMLGDMLAEKAAKNGWEGIIINGCIRDVDVIMETNLGVQALATNPRKTEKKGIGEMNIPVKFAGVHIKPGQFIYADNNGIIVSDKKLEMPA

SEQ ID NO: 26410 - protein, 593 aa, Pinus sylvestris
MCGILAVFGCLDASQAKRVRVLELSRRLRHRGPDWSGLYQSGHSFLAHQRLAIVDPASGDQPLYNEDRQIVVTVNGEIYNHEKLREQLKSHKFRTGSDCEIVAHLYEDYGEEFVNMLDGMFSFVLLDTRDQSFIAARDAFGITPLYIGWGFDGSVWFASEMKALHDDCESFESFPPGHIYSSKQGGLRRWYNPPWYSENVIPSSPYDPLVLRRAFEKAVIKRLMTDVPFGVLLSGGLDSSLVAAVASRYLAATKAGKQWGDKLHSFCVGLKGSPDLKAAKEVAEYLGTVHHEFHFTVQDGIDAIEDVIYHVETYDVTTIRASTPMFLMSRKIKSLGVKMVLSGEGSDEIFGGYLYFHKAPNKEEFHQETCRKIKALHMYDCLRANKSTSAWGVEARVPFLDKEFVNVAMDIDPERKMVKPDIGRIEKWVLRRAFDDEQNPYLPKHILYRQKGQFSDGVGYSWIDGLKSHAAEHVTDTMLRNAKYIFPHNTPTTKEAYYYRMIFERFYPQNAARLTVPGGPSVACSTAKAVEWDAAWAHNLDPSGRAALGVHASAYQECNAGANDGTGNGNVNTFSKMPGREASVDAREVLIKG

SEQ ID NO: 26411 - protein, 550 aa, Schizosaccharomyces pombe
MSFSLASTLPAWQAVQTHYESVGKHLVLKELFAKDSSRFEKFSFTFNGLKEEDGPILFDFSKNLITEETVELLVKLAKEANVEGLRDALFAGEHINFTEDRAVFHPALRNVSEKPMKVNGQDVMPGVRKVLRHMKEFSDAVRSGAWKGYTGKPIKSIVNVGIGGSDLGPVMVTEALKPYGQENLELHFVSNIDGTHLAEALKKCDPETTLFLIASKTFTTAETCTNAKSAKDWFLASAKDPSHVAKHFVALSTNEKEVTAFGISAQNMFEFSDWVGGRYSVWSAIGLSVALYIGYENFEAFLSGAHAMDEYFCSTPLEKNIPALAALISIWYSDFFGAQTHLVAPYDQYLHRFPAYLQQLSMESNGKAITRSGDMVNYTTGKILWGEPGTNSQHSFFQLIHQGTKLIPADFLIPIESHNPIDNNKHHRMLFSNFAAQTEALMLGKTPAEVKAEGTPDEIVPHKTFVGNRPSNSIIAKKITPASLGALIAFYEWVTFTEGAVWNINSFDQFGVELGKKLAKNVLAQLETKGDVENHDSSTNGLINLFKNGF

SEQ ID NO: 26412 - protein, 275 aa, Bacteroides thetaiotaomicron
IDKVGDPFPEETYEVCKNADAVLFSAVGDPKFDNDPTAKVRPEQGLLAMRKKLGLFANIRPVQTFKCLIHKSPLRAELVENADFICIRELTGGMYFGEKYQDNDKAYDTNYYTRPEIERILKVAFEYAMKRRKHLTVVDKANVLASSRLWRQIAQEMAPNYPEVTTDYMFVDNAAMKMIQEPAFFDVMVTENTFGDILTDEGSVISGSMGLLPSASTGESTPVFEPIHGSWPQAKGLNIANPLAQILSVAMLFEYFDCKEEGALIRKAVDASLDE

SEQ ID NO: 26413 - protein, 336 aa, Zea mays
MKGLFKSKPRTPVDIVRQTRECLVYLDLHSDSRSGDAKREEKMTELSKNIRDMKSILYGNGESEPVTEACVQLTQEFFRENTLRLLIIHLPKLNLETRKDATQVVANLQRQQVSSKIVASEYLESNKDLLDILILGYENMDIALHYGAMLRECIRHQSIARYVLESEHMKKFFDYIQLPNFDIASDASATFKELLTRHKATVAEFLSNNYDWFFEEFNSRLLSSTNYITKRQAIKLLGDMLLDRSNAAVMMRYVSSKDNLMILMNLLRDSSKNIQIEAFHVFKLFAANKNKPPEVVNILVTNRSKLLRFFAGFKIDKEDEQFEADKEQVIKEISAL

SEQ ID NO: 26414 - protein, 238 aa, Saccharomyces cerevisiae
MVKPIIAPSILASDFANLGCECHKVINAGADWLHIDVMDGHFVPNITLGQPIVTSLRRSVPRPGDASNTEKKPTAFFDCHMMVENPEKWVDDFAKCGADQFTFHYEATQDPLHLVKLIKSKGIKAACAIKPGTSVDVLFELAPHLDMALVMTVEPGFGGQKFMEDMMPKVETLRAKFPHLNIQVDGGLGKETIPKAAKAGANVIVAGTSVFTAADPHDVISFMKEEVSKELRSRDLLD

SEQ ID NO: 26415 - protein, 458 aa, Candida albicans SC5314
MASRQSRLEAEKLAIIQQSMTRGRSTSPRGGSHSRSSSLNREDFNKELKWSIVNHDPSERIIKSDKQQTDNDFWENEVSEEEHISDDDTNEKFQYDDTGNILPNYACQDEKINEISQILENSNLNDRATIKRLEELTASERAFAAARKAGSKIDQEILNKLASDKQKLTGTNLNLDESDQDALARRQKLENYQAYRKKIIDQENGLRNGSVSPTRPEEGEGSSEDFMAPYTSAVEDKLDSEFASQLNETIKEGPVDSNKSHSRVIQTITRGNFFQLINPKVKPKMFLLCMDFSPESIFALEWSLGTVLVDGSVLFIVCVIEDGDTNHHLKGNTSNETSREQTRLNMLNKAKQQVLNLLKLTKLQIHIVIEIIHHPIPRHLILEFIDNLQPTLVIVGSKGQSAIKGVLLGSLSNYLVTKSTVPVMVVREKLKKINRFKSGSSVFSNNVKPLTLSEARVD

SEQ ID NO: 26416 - protein, 275 aa, Bacteroides uniformis
IDKVGDPFPEATYEACKNADAVLFSAVGDPKFDNDPTAKVRPEQGLLAMRKKLGLFANIRPVQTFKVLLHKSPLRAELVDGADFLCIRELTGGMYFGEKYQDNDKAYDTNMYTRPEIERILKVGFEYAMKRSKHLTVVDKANVLASSRLWRQIAQEMAPQYPEVTTDYMFVDNAAMKMIQEPKFFDVMVTENTFGDILTDEGSCISGSMGLLPSASTGESTPVFEPIHGSWPQAKGLNIANPLAQILSVAMLFEYFDLKEEGGVIRKAVDASLDA

SEQ ID NO: 26417 - protein, 275 aa, Bacteroides vulgatus
IDKVGDPFPEATFQACKNADAVLFSAVGDPKFDNDPTAKVRPEQGLLAMRKKLGLFANIRPVQTFKCLVHKSPLRAELVENADFICIRELTGGMYFGEKYQDNDKAYDTNMYTRPEIERILKVAFEYAMKRRKHLTVVDKANVLASSRLWRQIAQEMAPQYPEVTTDYMFVDNAAMKMLQDPCFFDVMVTENTFGDILTDEGSVISGSMGLLPSASTGESTPVFEPIHGSWPQAKGLNIANPLAQILSVAMLFEYFDLKEEGTLIRKAVDASLDE

SEQ ID NO: 26418 - protein, 329 aa, Bacteroides fragilis YCH46
MIVMGTVKCVGILTSGGDAPGMNAAIRAVTRAAIYNGLQVKGIYRGYRGLVTGEIKEFKSQNVSNIIQLGGTILKTARCKEFTTPEGRKMAYDNMVKEGIDALVVIGGDGSLTGARIFAQEYDIPCIGLPGTIDNDLYGTDTTIGYDTALNTILDAVDKIRDTATSHERLFFVEVMGRDAGFLALNGAIASGAEAAIIPEFSTEVDQLEEFIKSGFRKSKNSSIVLVAESELTGGAMHYAERVKNEYPQYDVRVTILGHLQRGGSPTAHDRILASRLGAAAIDAIMEDQRNVMIGIEHDEIVYVPFSKAIKNDKPVKRDLVNVLRELSI

SEQ ID NO: 26419 - protein, 290 aa, Bacteroides fragilis YCH46
MMERKLAVITGADGGMGTEITRAVACAGYDVIMACYSSSKAETKCRELVKETGNEKIEVWQIDLASLASVRAFADRMLRQKTPVALLMNNAGTMETGLHITEDGLERTVSVNYVGPYLLTRLLLPLMGEGTRIVNMVSCTYAIGKLDFPDFFLRGRKGSFWRIPIYSNTKLALLLFTIELAERLRARGITVNAADPGIVSTNIIRMDQWFDPLTDIFFRPFIRTPLQGAATAIGLLLDAEVEGRTATFNLNNHCRLLPEKYTRPDRRAQLWEETERILSEKGFLPINDKR

SEQ ID NO: 26420 - protein, 275 aa, Bacteroides vulgatus
IDKVGDPFPEATFQACKNADAVLFSAVGDPKFDNDPTAKVRPEQGLLAMRKKLGLFANIRPVQTFKCLVHKSPLRAELVENADFICIRELTGGMYFGEKYQDNDKAYDTNMYTRPEIERILKVAFEYAMKRRKHLTVVDKANVLASSRLWRQIAQEMAPQYPEVTTDYMFVDNAAMKMLQDPCFFDVMVTENTFGDILTDEGSVISGSMGLLPSASTGESTPVFEPIHGSWPQAKGLNIANPLAQILSVAMLFEYFDLKEEGTLIREAVDASLDE

SEQ ID NO: 26421 - protein, 523 aa, Robiginitalea biformata HTCC2501
MVSGSRIVPLLSLLVLIASCGGEQKGVSPGSSSPTNAYNEPHRPQFHFTPREAWMNDPNGMFYLDGEYHLSYQFYPDSTVWGPMHWGHAVSTDLVRWKHLPVALAPDSLGYIFSGSAVVDHKNTSGFGNGSEPPVVAVYTYHNPILEAAGGDDFQYQGIAYSLDKGRTWTKYAGNPVLANDTGVRDFRDPKVFWHGESEKWIMVLAVYDRVRLYASSNLKEWEYLSEFGIEGDTRLWECPDLFRLRVPGTREAKWVLLVSIQQEGPSGGTGTSYFVGDFDGTVFTADPAGQKWLDHGADNYAFVTWDNAPTGWGSRLGIGWMSNWQYAQQVPTVAWRSAMTVPRMLSLAEDSGELVLSALPVPAVTGLRGAEVQLPMELRDSIRVEGDFSPTQCDISLLVDLENTTASSFGLVLKNAGGDRLTVTFDRSEETVTVDRTASGPQGFSDAFFKGPHKATVDLSQESLDIRVLLDAASIEIFADRGILNFTDIFFPESPFDELSIWAEGGTLVLFDGTVYPMDSIW

SEQ ID NO: 26422 - protein, 366 aa, Desulfotalea psychrophila LSv54
MNYAKRIKKIQKTLSRKNLDALLVSQPENRRYLSGYTGGDHGIGETSGVLIIPAKGKVHLLTDFRYQLQAEQDASWTKVLIYTKGLIPLLLKLLPELGIKTLAFESDYTLHSFAKSLREKLGTVGVTTTPSLNLIEKMRLIKDEDEIDAIRRSVLLNEAVFQEVYADLKPGITETELAIKIEATMRRRGAERPSFDTIVASGKNSALPHAVPGMDKIRKESPLTIDMGLILDGYCSDMTRTFVLGKPGKKYLKYHRLVRRAQLAGMKAVRAGVTGQEVDAVARKIISDAGYGEYFGHSLGHGVGLAVHENPRLSFSNNKKLREGMIVTVEPGIYIPGWGGIRLENMVVVRKDGCENLNQDTTFLDL

SEQ ID NO: 26423 - protein, 353 aa, Staphylococcus aureus subsp. aureus MRSA252
MSRITQVHRILEQKHLDAIIILSDYNRRYLSGFTGTSGALIISKDKQYLITDFRYIDQATKQAPNYEIINRKSTIIGEIKELLHQENFENVGFEGHHVSYDTYLELNKSRISLISISNTVDKIRDVKDADEIALIQKAADIVDETYEYILTVAKAGMTEKELKAILESKMLELGADGPSFDTIVASGHRGALPHGVASDKIIEKGDMITLDFGAYFNGYCSDITRTFAIGEPDPKLKEIYQIVLESQMKAINEIRPGMTGAEADAISRNYLESKGYGKEFGHSLGHGIGLEIHEGPMLARTIQDKLQVNNCVTVEPGVYIEGLGGIRIEDDILITENGCQVFTKCTKDLIVLT

SEQ ID NO: 26424 - protein, 121 aa, Zea mays
MARTQSAVAVAVVAEVLLLAAAATTSEAAITCGQVSSAIARCLYYARGTVSGPSASCCSGVRNLKSADSTAADRRAACNCLKNADRGRSGLNAGNADSIPFKCGDSIPYTINTCTDCSRVN

SEQ ID NO: 26425 - protein, 350 aa, Physcomitrella patens
MAATPAREWTGLQQFPVATQTALHNILGTLRQQNKESLTVLVVGKGGVGKSSTVNSIVGERVTIVSAFQSETLRPLQCARSRAGFTLNIIDTPGLVEGGCINDQALDIIKRFLLSKTIDVVLYVDRLDGYRVDNLDRQVIRGLARSFGPNFWRLAVIVLTHAQFSPSDGVNYTEFVEKRSAALQAAIRQEAGLKKDEKEVPYALVENSGRCNTNDGGEKILPNGTVWLPALVERIVEVATGTTDSVFVDKKLIDGPNANEWGKWWIPVLAVAQYFLVVMPIRKAIEKDLAEEKNQRPQWEIRAEEFRRNTSLYDDDQVDEQAISQALEQDDGLSGQPSSFVDEDDDDDEF

SEQ ID NO: 26426 - protein, 91 aa, Arabidopsis thaliana
  misc_feature (52)..(52): Xaa can be any naturally occurring amino acid
  misc_feature (72)..(72): Xaa can be any naturally occurring amino acid
MASSMLSSATIVASLDHATMVAPFSGLKSSAVFTVIRRANNDITSITINGGXVNFMHVWPPTGNNKFETLSXLPDLTDSELAMEVDYLIRD

SEQ ID NO: 26427 - protein, 413 aa, Arabidopsis thaliana
MARKKHRKLFPTLASETNKTLDCSNGVCDPICPYNCYPEPDYYTISPQLPPWSSSPQPSPCPSPSISAVYLPSQDSSSSLDAISIITITGAVLAILLTGFFLVAKFFSDSVNRVNQGTYQSDNEDNDTVMEEEFQDREQVDHPIWLIRTTGLQQSIINSITICNYKRGDGLIERTDCPVCLNEFEEDESLRLLPKCNHAFHISCIDTWLSSHTNCPLCRAGIAMISVTTPRYSGPVEVTPGGSGSHLENDGVDEEDHGEIENRVDSDFKESDDSDIRIEIYRFDSDGDGSETETKERVRVLKECMDPNGGDSVNSLSHTKTHVESVDFPGKSCENQSEEFTRHNGEDEASCSEENGGGSNQLRRSCDSGELNGETTGDEGKSQSDISSSTLKTNGSSSSVSCFNKNKSSVFPL

SEQ ID NO: 26428 - protein, 463 aa, Rubrobacter xylanophilus DSM 9941
PPGRMQEEGGGVRLVVVGGVAAGTKAAARARRVNPRLEITVYQEEPEPSISECGLPYLLSGTVSGRRRLVARTPEEFARDGIRVLVRHRVEEVRPEEGRLLVRDLAAGSVFEDRYDRLVLATGARAVPLGVPGSGLEGVFNLRFLTDADRILDHIRRHRPRRALVVGGGYVGLEVAENLRLLGMEVVLAQRPRRVATAYDPEISRRIEEHLRERGVELRTGAEVEELRGDGRVREARISGEAVEAGLVVAGVGIEPEVDLARRAGARIGTTGAVWTDRHQRTSLPEVWAAGDCAQTRNRITGGPAWVPLGDTANQTGRVAGTNAALGEDAEEFPGVLGTGIFKVFDLAAGKTGLSEAEAAGAGLEAVAATIESRSRAGYYPGAGRVLLKLVAERGSGRLLGAQALGPGADKLTDVCATALWGGLSCSDLINVDLAYAPPYGPVLSPVIQAATVLQRRLSQPPK

SEQ ID NO: 26429 - protein, 606 aa, Medicago truncatula
MGGGGTISEGIRRLFQRRSSTTSTSKQQQQQHQHSNDNNNNNNNINIDLVVRDLRSQLAVIPTTNDLDHDHDHQQSLFNLNHIKVPTNTVFFPSSMDPNKKGPPETEFFTEYGEASQYQVQEIIGKGSYGVVCSAIDTHTGQKVAIKKINHVFEHVSDATRILREIKLLRLLRHPDIVEIRHIMLPPSRREFRDIYVVFELMESDLHQVIKANHDLTPQHHQFFLYQLLRGLKFIHTANVFHRDLKPKNILANADCKLKICDFGLARVSFNDAPSTIFWTDYVATRWYRAPELCGSFFSKYTPGIDIWSIGCIFAEMLTGRPLFPGKNVVHQLDIMTDLLGTPPPESIARIRNEKARRYLNSMRKKQPVPFSQKFPNIDPLALRILERLLAFDPKNRPSAEEALSDPYFHGLSNIDREPSTHPISKLEFEFERRKVTKDDVRELIYREILEYHPQMLEEYIRGGDQTSFMYPSGVDRFKRQFAHLEEHYGKKGERISPLQRQHASLPRERVHTSKNENNENNDIEMPTGSDLQSPPGSNVTDAENSGAQNGLAKPNYSPRSLLKSASISASKCIDVKGSKDPEEPVIEVNDDAADELTDNIAAMHA

SEQ ID NO: 26430 - protein, 125 aa, Triticum aestivum
  misc_feature (73)..(73): Xaa can be any naturally occurring amino acid
  misc_feature (96)..(96): Xaa can be any naturally occurring amino acid
MTTVAATGINVATPRLVIRPAARLYAPVRLNYPWKFGSMNRMVTSVKATSEGGMISDKVEKSIQEAKETCADXPVSGECVAAWDEVEELSAAASHXRDKKKAGGSDPLEEYCSDNPETDECRTYD

SEQ ID NO: 26431 - protein, 386 aa, Vibrio parahaemolyticus RIMD 2210633
MEMKTFNLPDLGEGLAESEIVKWHVNVGDMVKLDQVILTVETAKATVDVPAPYAGRIVSRHGEEGDVINIGALLLEIDESGAENTVSAEKRQTADAATVVGSVSHQSHNVNVDDFWVGGSHNKSTDKLITALPSARLLAKKLGVDLKTMVGSGPSGLIVDADVYEEAGKQVPGTEVLKGARRTMVSTMAESHQNVAAVTITEEALLEDWLPNEDISIRLVQAIVYACQQEPALNAWFDAETMTRCVHPTVNLGVAVDSRHGLYVPVLRHADEYEPQDVRRWLDQTVKGIRDRKISREDLQHATITLSNFGAIGGIFATPVVSPPQVAIVGAGRIVDRVVIRNGQAVAVKAMPLSITFDHRACTGGEAARFTKVLAEHLQRPSVTKS

SEQ ID NO: 26432 - protein, 265 aa, Rosa hybrid cultivar
LVQFGAFIVLCGATHLINLWTFSVHSRTVAIVMATAKVFTAAVSCATALMLVHIIPDLLSVKTRELFLKNKAAELDREMGLIRTQEETGRHVRMLTHEIRSTLDRHTILKTTLVELGRILTLEECALWMPTRTGLELQLSYTLHQQNPVGYTVPIHLPVINQVFNNNGTVKISPNSPVARLRPIAGKHIPGEVVAVRVPLLHLSNFQINDWPELSTKRYALMVLMLPSDSARQWHVHELELVEVVADQVAVALSHAAILEESMRA

SEQ ID NO: 26433 - protein, 268 aa, Papaya dieback phytoplasma
AKSRAYDQIDNAPEERERGITIKTSHVEYETSKRHYAHVDCPGHADYVKNMITGAAQMDAAILVVSGADSVMPQTREHILLARQVGVPKIVVFLNKCDLCPDEEILELVEMEVRELLSKYDFPGDDTPIIRGSALKALEGDAHYVAQVNELIQTLDTYIEDPAREVDKPFLMPVEDVFTITGRGTVVTGRVERGQVKAGDEIEIVGLKETKKTIVTRVEMFKKDLDFAQAGDNIGALLRGINREDVQRGQVLAKPGSVKPHSKFVAQV

SEQ ID NO: 26434 - protein, 327 aa, Vibrio parahaemolyticus RIMD 2210633
MAELTLVEAVNLALHHEMEHDPNVVVLGEDVGDNGGVFRATVGLKQKYGLKRVIDTPLAEALIGGVAVGMATQGLRPVAEFQFQGFVFPAMEHLMCHAARMRNRTRGRLTCPAVFRAPFGGGIHAPEHHSESIEALFAHTAGFKVVIPSSPQRAYGLLLAAIRSNDPVMFFEPKRIYRTVKSEVIDNGEALPLDTCFTLRKGRDITLVTWGACVVESLQAAQTLSSQGIEVEVIDLASIKPIDTATIFRSLEKTGRLLVVHEASKTCGVGSELLARTAEHAMCLLKAPPKRVTGMDTIMPYYRNEDYFMVQEEDIVIAARELVEDWK

SEQ ID NO: 26435 - protein, 168 aa, Triticum aestivum
  misc_feature (52)..(52): Xaa can be any naturally occurring amino acid
  misc_feature (141)..(141): Xaa can be any naturally occurring amino acid
  misc_feature (163)..(163): Xaa can be any naturally occurring amino acid
ERAHQWSQVYSEETKKQSIPVITAWQLNERMYGELQGLNKQETADLFGKEQXVHEWRRSYDIPPPNGESLEMCAERAVSYFKEQIIPQLVSGKHVMIAAHGNSLRSIIMHLDKLTSQEVISLELSTGIPMLYIFKEGKFIXRGSPAGPSEAGVYAYTKIWQYXQNLTH

SEQ ID NO: 26436 - protein, 373 aa, Desulfitobacterium hafniense DCB-2
MEPIKGEQRDGQSEIRKLAILTGGGDCPGLNAVIRAAVKTACHRGIAVVGIQDGFRGAVEGDFRPLELKDVSGILPRGGTILGTTNRDNPFAYPTQVGEERQVQDRSAEVLDRFKAEGIDALIAIGGDGSLSIAWEFAKQGLKVVGVPKTIDNDLMCTDLTFGFQTAVATAQDALDRLHTTAESHHRIMILEVMGRYAGWIALYAGVAGGADVILIPEIPYQLESIAEAVQRRARLGKHFSIIVVAEGAKPLGGDMVVERTMSGRTDPIKLGGIGAKLAADLEKVTDMETRVTVLGHLQRGGSPIAVDRVLSTRYGVAAVEAALAGDFGMMVALQGQDIVRVPMAEAVHKLKQVEPDDPVLNAARSMGIEFGD

SEQ ID NO: 26437 - protein, 538 aa, Oryza sativa (japonica cultivar-group)
MSPPPAAARAPPVLRNELSRRTAVLGLRLWVLVGIAVGAAFLLLLAVISFHLAQARRRKPAAKRASSAAAAAAAPGGAAVPLSPATIPPVSKEIQEVAVHVGSLRHYLEAGATFLKEGGGVGGAVVDGDSLGGSTVYGSQRVHIEAGKGRRMVAYADGEVGPVASDLAASAQAAVGVGVGPEVSHLGWGHWYTLRELEEATAAFAPEHVVGEGGYGIVYRGVLADGCEVAVKNLLNNRGQAEREFKVEVEAIGRVRHKNLVRLLGYCAEGAHRILVYEYVDNGNLEQWLHGDVGPVSPLSWDIRMNIVLGTAKGITYLHEGLEPKVVHRDIKSSNILLDKRWNPKVSDFGLAKLLGSDNNYVTTRVMGTFGYVAPEYASTGMLNERSDVYSFGILIMEIISGRSPVDYARAPGEVNLVEWLKNMVSNRDYEAVLDPKLPEKPTSKALKKALLVALRCVDPDSQKRPKMGHVIHMLEVDDFPYREIILYVHGSSDSAGEPTGQNKNICEAGDGVGRRGQHHHSCQYAIQIARELEIGLT

SEQ ID NO: 26438 - protein, 668 aa, Arabidopsis thaliana
MASEKSTSKGQAWFCTTGLPSDIEIEVDDMTFHLHKFPLMSKSRKLHRLITEQETRSSSSMALITVIDPKVEETDKKGKGHEIEDDKEEEEVEEQEIEENGYPHIKLEDFPGSSESFEMVAKFCYGVKMDLSASTVVPLRCAAEHLEMTEEYSPDNLISKTERFLSHSVYKSLRESIKALKACESVSPLAGSLGITEQCIDSIVSRASSADPSLFGWPVNDGGGRGNISATDLQLIPGGAAKSRKKPSRDSNMELWFEDLTQLSLPIFKTVILSMRSGDLSSDIIESCLICYAKKHIPGILRSNRKPPSSSSTAVSENEQRELLETITSNLPLDKSSISSTTRFLFGLLRTAIILNAAEICRDLLERKIGSQLERATLDDLLVPSYSYLNETLYDVDLVERILGHFLDTLEQSNTAIVEVDGKSPSLMLVGKLIDGFLAEIASDANLKSDKFYNLAISLPDQARLYDDGLYRAVDVYLKAHPWVSEAEREKICGVMDCQKLTLEACTHAAQNERLPLRAVVQVLFFEQLQLRHAIAGTLLAAQSPSTSQSTEPRPSAAIRNLTITEEDGDEAEGERQVDAGKWKKTVRENQVLRLDMDTMRTRVHRLERECSNMKKVIAKIDKEGSSPATTTDRPRSWSITKKFGCKFKTQVCDSHEATMVDHRSRRS

SEQ ID NO: 26439 - protein, 275 aa, Bacteroides uniformis
IDKVGDPFPEATYEACKNADAVLFSAVGDPKFDNDPTAKVRPEQGLLAMRKKLGLFANIRPVQTFKCLLHKSPLRAELVDGADFLCIRELTGGMYFGEKYQDNDKAYDTNMYTRPEIERILKVGFEYAMKRSKHLTVVDKANVLASSRLWRQIAQEMAPQYPEVTTDYMFVDNAAMKMIQEPKFFDVMVTENTFGDILTDEGSCISGSMGLLPSASTGESTPVFEPIHGSWPQAKGLNIANPLAQILSVAMLFEYFDLKEEGALIRKAVDASLDA

SEQ ID NO: 26440 - protein, 118 aa, Oryza sativa (japonica cultivar-group)
MAALNGKVVVAVMVVAMVVAAPGASAAITCGQVGSAIAPCISYVTGRGGLTQGCCNGVKGLNNAARTTADRQAACRCLKTLAGTIKSLNLGAAAGIPGKCGVNVGFPISLSTDCSKVS

SEQ ID NO: 26441 - protein, 690 aa, Sorghum bicolor
MSASSSSLCGGDPAMRSVVWFRRDLRVEDNPALAAAARAGGEVVPAYVWSPEEEGPYYPGRVSRWWISQSLKRLDASLRRLGAGKLVTRRSADAVVALLQLVRDTGATHVYFNHLYDPISLVRDHRLKEMLAAEGIVVQSFNADLLYEPWEVVDDEGQPFTMFTAFWNRCLSMQYDPPAPLLPPKKINSGDLSMCPSEDLIFEDDSERGSNALLARAWTPGWQNADKALTAFLNGPLADYSVNRKKADSASTSLLSPHLHFGELSVRKVFHLVRMKQLVWSNEGNHAAEESCTLFLRSIGLREYSRYLSFNHPSSHERPLLAHLRFFPWVVNESYFKIWRQGRTGYPLVDAGMRELWATGWLHDRIRVVVSSFFVKVLQLPWRWGMKYFWDTLLDADLESDALGWQYITGSLPDSRELDRIDNPQFEGYKFDPHGEYVRRWIPELVRLPTEWIHHPWDAPVSVLQAAGIELGSNYPLPIVELDAAKARLQEALSEMWQLEAASRATMNNGMEEGLGDSSEVPFPEELQMEVDRATANVVMTVRRREDQMVPTMTSSLNRAETEVSADLGNSEDTRAQVPFHAHFHPRVEREDMIQNTEGPALRINGTHQHNIFQQPQNHRREALAPSVSEASSSWTGREGAVVPVWSPPAASGHSETFAADEADVSSRSYLDRHPRSYRLMNWSQLSQSL

SEQ ID NO: 26442 - protein, 114 aa, Triticum aestivum
GELGTSHAPGRHGRGSVAEVIDKVDKGGLDKMTLVEVGPRYCLNPIKIFGGSFGGPTLYENPFYVSPNQIRALEKRKKAGKYAKKVKAKVRRKMHEMENTLEPDEFTDLWKGED

SEQ ID NO: 26443 - protein, 221 aa, Arabidopsis thaliana
MKVSMSLILITFWALVTIAKAYDPSPLQDFCVAIDDPKNGVFVNGKFCKDPKQAKAEDFFSSGLNQAGITNNKVKSNVTTVNVDQIPGLNTLGISLVRIDYAPYGQNPPHTHPRATEILVLVEGTLYVGFVSSNQDNNRLFAKVLNPGDVFVFPIGMIHFQVNIGKTPAVAFAGLSSQNAGVITIADTVFGSTPPINPDILAQAFQLDVNVVKDLEAKFKN

SEQ ID NO: 26444 - protein, 296 aa, Physcomitrella patens
MATVSEKEWTGFQGLPAATQIILHTLLAKLRKQKVDKITIVLLGKGGVGKSSIVNSLFSERVAAVSAFRSETLRPRQYSRSKDGFKLTVIDTPGFVEAGRVDAALNSIRRYLLGKTINVVLYVDRLDGPREDKVDVKISRAISQAFGPQIWPHVIVVFTHAEIHLEDVTYSEFVSRRSAALRNIILKESRFKTVNTKVPFVLVENCSRCSENGEHEKILPDGTVWLPVLFEALVDLVLGSKKPILIDEKMIGIPKGNPLGSIWMPLVLLAQFVLIWRPIRKAIDRDLVEEAQRHSP

SEQ ID NO: 26445 - protein, 522 aa, Vibrio parahaemolyticus RIMD 2210633
MLDQAIQQQLKQYLANVKEDVRLVVSLDESKASNDILSLANQIAEMSDFITVERDDNASARKPVMTVTNPVKGTALRFAGLPMGHEFTSLVLALLHSGGHPIKLEPEVIEQIAALDKELDVEVFISLSCQNCPDVVQAFNMMAAINPKVKATMIDGALFQDEVKQRDIMAVPSVFVNGELFGQGRMSLTEILNKVDDGASEKAAKALSEKAPYDVLVVGGGPGGSAAALYAARKGIRTGVVAKRFGGQVMDTMAIENFISVKRTEGPKLATDLAEHLKEYDVDVVTEQQAQKLMGAAHTDDGLIHIQLESGATLKSKSVILSPGARWREMNVPGEQEYRNKGVAYCPHCDGPLFKGKKTAVIGGGNSGIEAAIDLAGIVEHVTVLEFADVLRADQVLIDKANSLPNIDIITMAQTTEVVGDGTRVTSLKYKDRNTDEIKEIELSGIFVQIGLVPNTEWLKDSEVALSERGEIEVGSRGETSLEGVFAAGDATTVPYKQIIIAMGEGAKASLGAFDYLIRKQG

SEQ ID NO: 26446 - protein, 490 aa, Staphylococcus aureus subsp. aureus MRSA252
MTSKSSPLIFERSREGRYAYSLPISDIKTNSVESLLDDKFIRKNKAEFPEVAELDLVRHYTELSNKNFGVDNGFYPLGSCTMKYNPKINEKVARIPGFSESHPLQDEDQVQGSLEIIYSLQEELKEITGMDEVTLQPAAGAHGEWTALMIFKAYHENNGEGHRDEVIVPDSAHGTNPASASFAGFKSVTVKSNERGEVDIDDLKRVVNENTAAIMLTNPNTLGIFEKNIMEIREIVHNAGGLLYYDGANLNAIMDKVRPGDMGFDAVHLNLHKTFTGPHGGGGPGSGPVGVVKELASYLPKPMVIKDGDKFKYDNDIKNSIGRVKPFYGNFGIYLRAYTYIRTMGATGLKEVSEAAVLNANYIKARLSEHFEIPYKQYCKHEFVLSGVRQKEFGVRTLDMAKRLLDFGVHPPTIYFPLNVEEGMMIEPTETESKETLDYFIDTLISIAEEAKNDPDKVLEAPYTTVIDRLDEATAARKPILKFENLKQEK

SEQ ID NO: 26447 - protein, 354 aa, Debaryomyces hansenii CBS767
MNMGGPSKTKDTYDFLLRLFSDQDLIPLGYFQNSLAKFIARRRTPSIEKNYDDIGGGSPIRYWSEYQCKKVCEILDKTNPETAPHKPYVAFRYANPLTEHTLKQMMDDGIKRAVAFSQYPQFSYSTSGSSMNELYRKTLELDSKRSINWSFIDRWPKQKGFINAFSKHINDKLQEFPEQDRDKVIVMFSAHSLPMEIVNRGDSYPAEVASTVYAIMENLKFKNPYRLVWQSQVGPKPWLGGQTAKIVEKLEKNEDVKGIVLVPVAFTSDHIETLHELDIELQEECTNPEKVKRAESLNGNEEFIEGLADLVQDHLKSGQLYSNQLELDCILGGEKATGTFKHPSELFGDHSKSQ

SEQ ID NO: 26448 - protein, 350 aa, Physcomitrella patens
MAATQAREWTGLLQFPVATQTALHNILGKLRQQKKESLTVLVVGKGGVGKSSTVNSIIGERVTVVSAFQSETLRPLQCARTRAGFTLNVIDTPGLIEGGCINDQALDIIKRFLLNKTIDVVLYVDRLDGYRVDNLDKQVIRALARSFGPNFWRIAIIALTHAQLSPPDGVDYTEFVNNRSAALRAAIRQEAGFKKSEGEISYMLVENSGRCNTNSEGEKVLPNGSVWLPALVDRIAEVATGATPSIHVDQKLIDGPNANGKGKWWIPLIILAQYFLIVRPIRSAIEKDLIEEEKQRPQWQIRAEEFVRPIASLYEDDQVDEQAIRQALKQGALNDQMDSFVEDDEDDDEY

SEQ ID NO: 26449 - protein, 853 aa, Mycobacterium tuberculosis CDC1551
MPTAGSSRAPAAAREIVVVGHGMVGHRLVEAVRARDADGSLRITVLAEEGDAAYDRVGLTSYTESWDRALLALPGNDYAGDQRVRLLLNTRVTQIDRATKSVVTAAGQRHRYDTLVLATGSYAFVPPVPGHDLPACHVYRTFDDLDAIRAGAQRTLDGGHTDGGVVIGGGLLGLEAANALRQFGLQTHVVEMMPRLMAQQIDEAGGALLARMIADLGIAVHVGTGTESIESVKHSDGSVWARVRLSDGEVIDAGVVIFAAGIRPRDELARAAGLAIGDRGGVLTDLSCRTSDPDIYAVGEVAAIDGRCYGLVGPGYTSAEVVADRLLDGSAEFPEADLSTKLKLLGVDVASFGDAMGATENCLEVVINDAVKRTYAKLVLSDDATTLLGGVLVGDASSYGVLRPMVGAELPGDPLALIAPAGSGAGAGALGVGALPDSAQICSCNNVTKGELKCAIADGCGDVPALKSCTAAGTSCGSCVPLLKQLLEAEGVEQSKALCEHFSQSRAELFEIITATEVRTFSGLLDRFGRGKGCDICKPVVASILASTGSDHILDGEQASLQDSNDHFLANIQKNGSYSVVPRVPGGDIKPEHLILIGQIAQDFVLYTKITGGQRIDLFGARVDQLPLIWQRLVDGGMESGHAYGKAVRTVKSCVGSDWCRYGQQDSVQLAIDLELRYRGLRAPHKIKLGVSGCARECAEARGKDVGVIATEKGWNLYVAGNGGMTPKHAQLLASDLDKETLIRYIDRFLIYYIRTADRLQRTAPWVESLGLDHVREVVCEDSLGLAEEFEAAMQRHVANYKCEWKGVLEDPDKLSRFVSFVNAPDAVDSTVTFTERAGRKVPVSIGIPRVRS

SEQ ID NO: 26450 - protein, 451 aa, Staphylococcus aureus subsp. aureus MRSA252
MCIVSHRYIPLTEKDKQEMLQTIGAKSIGELFGDVPSDILLNRDLNIAESEAETTLLRRLNRIASKNITKETHTSFLGAGVYDHYAPSVVDAMISRSEFYTAYTPYQPEISQGELQAIFEFQTLICELTDMDVANSSMYDGMTSFAEACILAFSQTKKNKIVVSKGLHYQALQVLHTYAKTRKEFEVVEIDLDGTVTDLKKLEAAVDDDTAAVAVQYPNFYGSIEDLEKIHSFIEDKKALFIVYANPLALGLLTPPGSFGADIVVGDTQPFGIPAQFGGPHCGYFATTKKLMRKVPGRLVGQTQDDEGNRGFVLTLQAREQHIRRDKATSNICSNQALNALASSIAMSALGKQGIYDIAVQNIEHANYAKQQFIKKGFEVLDGTSFNEFVVKFDKPIQQVNEELVKYNIIGGFDLGVVSDDFKNHMLIAVTELRTKDEIDTFVEKAGELND

SEQ ID NO: 26451 - protein, 442 aa, Saccharomyces cerevisiae
MSRRVVITGLGCVTPLGRSLSESWGNLLSSKNGLTPITSLPNYNEDYKLREKSIPSTITVGKIPENFQNENSAINKLLFTSQDERRTSSFIKLALRTTYEALHNAGLLNPNDITINTSLCNLDHFGCLIGSGIGSIQDIYQTSLQFHNDNKRINPYFVPKILTNMAAGNVSIKFNLRGLSHSVSTACATGNNSIGDAFNFIRLGMQDICVAGASETSLHPLSLAGFIRAKSITTNGISRPFDTQRSGFVLGEGCGMIVMESLEHAQKRNANIISELVGYGLSSDACHITSPPADGNGAKRAIEMALKMARLEPTDVDYVNAHATSTLLGDKAECLAVASALLPGRSKSKPLYISSNKGAIGHLLGAAGAVESIFTICSLKDDKMPHTLNLDNVLTLENNEADKLHFIRDKPIVGANPKYALCNSFGFGGVNTSLLFKKWEGS

SEQ ID NO: 26452 - protein, 410 aa, Alcanivorax borkumensis
MENEKQDATVIVGGGHAAGALMTALIQKKYPHEVVLVGEEPYPPYQRPPLSKTYLSGEVNEESLYLKPRSVYEGAGHQLRLGVRVENIDRDNKTLTLSDQSTLKYGRLILATGSHVRRLNAPGSELKGIHYLHDIADTDTLRDQLSPGARLVIVGGGYIGLEVAASASKKGVNVTVLEGAERLMQRVTGVEMSSFLYAKHSGSGVDVRLNTAVTGFKAGDQGRVAGVTLANGETVDADVVLVSIGVIPETALAEAAGLSCEDGILVDEYVRTSDPSILAIGDCTRHRNLFFEKMQRLESVANAVDQARTAAATLMGEDKPYDSAPWFWSNQYDVRLQMVGLSQDHDERVMRGSTEDKAFAVFYLREGCVIAVDAVNMPIAFMVGKQLVQHRKSISADVLSDLDVELKSLI

SEQ ID NO: 26453 - protein, 499 aa, Silicibacter sp. TM1040
MQELTHYVNGEKVAGTSGRFADVLNPATGEVQAKVPLATKAEMDAIIAKAAEAQVEWAATNPQKRARVMMKFGQLINEHMDTLAELVAREHGKTLPDARGDVQRGLEVVEVCMGTPSLLKGEFTDSGGPGIDLYSMRQPLGVVAGITPFNFPAMIPLWKMAPALSCGNAMILKPSERVPSTSLYLAELLKEAGLPDGVLQVVNGDKEAVDAILDNETIQAVGFVGSTPIAQYIYGRAATNGKRAQCFGGAKNHMLIMPDADLDKAADALVGAGFGAAGERCMAISVAVPVGKETADGLIERLVPRIEKLKVGPYTAGEDIDYGPVITPQAKARIEGLIDSGVEQGATLVTDGRGLTLQGYENGYFVGPTLFDNVTAEMDIYKEEIFGPVLSTVRMDNYEDALNLVKDNAYGNGTAIYTADGDTARDFANRVNVGMVGINFPIPVPLSYHTFGGWKKSAFGDLNQYGPDAFRFYTRTKTVTQRWFSGIKEGGEFNFKAMD

SEQ ID NO: 26454 - protein, 458 aa, Streptomyces cattleya
MAGFLLRCRPEGAVPQHLGAGTGLATEVTRDGADVLVVHGDPLTPGGQAPIHAPLDELIAWTVRAYSRFCAVLVRDDRAVLWSDNGATCPLHYARGADDTLLVATSAGALLPLLGTAPVLGEGDRAVLPGGRFAGVTAVPAGTAVTLAVAGFDTEPLLTRRYHRLPARPTETDPERAVTAVRDALTHAVGRLATGLTEAGVMLSGGVDSSSVAALAAREVTSLSTYTVGTPFGDEFAQAAWFAERLGSKHHELVFEPEQLTALLPEMIRSLETWDLLTLQIAAPACFLLGHIATGARQVMLSGYGADLIFAGLGGTGTETRIERSVAAQTAATAVSNEFNPAYADARDVVVRYPYWTREVMSTALGIRGRLKVRPDTAKWVLRSAVTGILPDEVAWRPKRGIHEGTAMSRMFAAALGSDDRHTQARRLYEMATEVFRDTAAGTDELEGSDEGLAGVAS

SEQ ID NO: 26455 - protein, 477 aa, Saccharophagus degradans 2-40
MLTVEKIGGTSMSDYLTVRDNVVLGPNGENPTTGRILVVSAYGGMTDQLLEHKKSGKAGVFAYFSSDEDAGSWREALNNVRQNMFQKNAELFNSADAISKANVFIGERLDTAERCLEDLQRLCGHGHFSLEAHLSTVREMLASLGEAHSARNMAELLKEEGVNARFVDLTGWNADKSLGMDEHILEQFKDVDLGNELPVVTGYAHCESGIMSTFDRGYSEMTFSRIAVLVQADEALIHKEYHLSSADPKVVGVDAAVPIGRTNYDVADQLANLGMEAIHPKAAKGLRQSNIPLRVKNTFEPDHNGTLITTDYVSEKPCVEIIAGKQAVYAVECFNQDMVGDLLNFEQKIMQICQRFRCTHVTKDVNANTVTHYLSSNMKKIKRVQRELEEMFPESEINVKKVSIVSAIGSDMQVPGILAKTVGALADAGISVLAVHQSMRQVDMQFIVEEAAYEAAVRALHKCLVEVHDHGIAICAA

SEQ ID NO: 26456 - protein, 323 aa, Pisum sativum var. macrocarpon
MENFPIVDMGKLNTEDRKSTMELIKDACENWGFFECVNHGISIEMMDTVEKLTKEHYKKCMEQRFKEMVATKGLECVQSEIDDLDWESTFFLRHLPVSSISEIPDLDDDYRKVMKEFALKLEELAEELLDLLCENLGLEKGYLKKAFYGSKGPNFGTKVSNYPPCPKPALIKALRAHTDAGGIILLFQDDKVSGLQLLKDEQWIDVPPMRHSIVINLGDPLEVITNGKYKSVMHRVIAQTDGARMSIPSFYNQGGDAVISPASTLLKEHEPSEVHPKFVFDAYMKISMGLKFQATEPRFELAEIMSIVKVGPVVRLWICVWLS

SEQ ID NO: 26457 - protein, 102 aa, Arabidopsis thaliana
MAKRISAQLFVSRLSAYTTDQSLRQLFSPFGQIKEARLIRDSETQRPKGFGFITFDSEDDARKALKSLDGKIVDGRLIFVEVAKNAEEVRAGINSNKAEDRG

SEQ ID NO: 26458 - protein, 422 aa, Rubrobacter xylanophilus DSM 9941
MERRHRQRERPLGIVVQKYGGSSVATAEHIKAVAGKIQRARKAGLDLVVVASAMGKTTDRLLRLAGEVSSDPSPREIDQLLATGEEQSVALLAMALHDRGVPAVSLTGPQAGMRATGRYGSGVISEIRPGRIRRLLGEGRVVIVAGFQGMNALGDVMTLGRGGSDTTAVALAAALGADRCEIYTDVDGVYTADPRIVPGARRIPVISYAEMSEMAWRGAKVMHPRAVELGALYGVEIHVLSSFDEESPGTIITGGEKVEHLETRETVAGIVHDTDVARITLNGVRTGPGTLSKVFTPLAERGISVDVIVESGIKEGVADIAFTVSRADFAEARSAAGEVARALGGSVEGEEGLAKVSVVGTGMLNRPGYAARMFSALGSEGIPIRMVSTSEIQVTCVIPAERVQEAVRRLHRDFELEEREDV

SEQ ID NO: 26459 - protein, 112 aa, Thiomicrospira crunogena XCL-2
MKLIKAIINPYKLDSVRESLSELSDFGLTVTDVKGYGRQKGQQEIYRGAEYEISFVPKVSLEVAVSDDIVDRVVELIVEQAKTGNIGDGKIFILPLEEVIRIRTSETGEDAL

SEQ ID NO: 26460 - protein, 184 aa, Triticum aestivum
  misc_feature (18)..(18): Xaa can be any naturally occurring amino acid
  misc_feature (45)..(45): Xaa can be any naturally occurring amino acid
  misc_feature (81)..(81): Xaa can be any naturally occurring amino acid
  misc_feature (90)..(90): Xaa can be any naturally occurring amino acid
  misc_feature (132)..(132): Xaa can be any naturally occurring amino acid
MATILENIQKARFLPTRXPLRDDLPTFQGGKEEESHLMGLRKRLXSFSGKIQPISSASAEWAFRRTRSAPSLAAEFAGGPXLKRWWDWGXGWLLSKKLGFAGDLEMNEEEAAALGRQSRGTWAHVLYKVRSXGVRRLVASDHSLPTTHHRKASLPPSSSAHQHCKPAPQFAYTQSFQYGQAMAH

SEQ ID NO: 26461 - protein, 384 aa, Emericella nidulans
MAFFFNRGRSRQPSDVVRSIKDLLLRLREPSTASKVEDELAKQLSQMKLMVQGTQELEASTDQVHALVQAMLHEDLLYELAVALHNLPFEARKDTQTIFSHILRFKPPHGNSPDPPVISYIVHNRPEIIIELCRGYEHSQSAMPCGTILREALKFDVIAAIILYDQSKEGEPAIRLTEVQPNVPQRGTGVFWRFFHWIDRGTFELSADAFTTFREILTRHKSLVTGYLATNFDYFFAQFNTFLVQSESYVTKRQSIKLLGEILLDRANYSVMMRYVESGENLKLCMKLLRDDRKMVQYEGFHVFKVFVANPDKSVAVQRILINNRDRLLRFLPKFLEDRTDDDQFTDEKSFLVRQIELLPKEPIEPSRSAREPSRSTANTTTVA

SEQ ID NO: 26462 - protein, 401 aa, Chlorobium tepidum TLS
MKKIGILTSGGDCGGLNAVIKGAALMALNKGLELYVIPNGYAGLYNLLNQDRLVRLDEARLDQFQASFAGSEAGHSRVKIKAISNPDKYNRIKVGMKKFDLDALIISGGDDSGSVMIDLNHNGIQCIHCPKTMDLDLQTYSVGGDSTINRIAQFVEDLKTTGRTHNRVLVTEVFGRYAGHTAFRSGVAAEADCILIPEIPVDWDVVYEHIVERFTRRIRQSDVHSGTYTIVVAEGMKNADGTDIVDESAGIDAFGHKKLAGAGKYVCQEIKKRFKTDPRMPQFMKDTGMFVEGIYEIPEVREVHPGHLVRAGHSSAYDINFGFEAGAAAVLLLLEGKTGVTISKVKGRKIEYIEASKAIEQRYVDLDQVAMYESIGTCFGRTPAAYEPILREVDGVYERIY

SEQ ID NO: 26463 - protein, 236 aa, Zymomonas mobilis
MVDSDEISTPVQHYVIRQMGWLRASVLGANDGILSTSSLMIGVASAHGSSGNILLAGMSGLIAGALSMAAGEYVSVSSQHDMEQADVAREHAELKANPHAEKHELAEIYVERGLDRELALQVAEQLMAHNALEAHLRDELGLTDSLIARPVQAALASAISFSGGAIVPFLTALFSPPEIINITISLISILCLAVLGMVGAHLGGANVPKAALRVTFCGALAMIGTAAIGSFFGTQV

SEQ ID NO: 26464 - protein, 359 aa, Zea mays
  misc_feature (78)..(78): Xaa can be any naturally occurring amino acid
  misc_feature (128)..(128): Xaa can be any naturally occurring amino acid
  misc_feature (276)..(276): Xaa can be any naturally occurring amino acid
FIWKGRNEVNGGSCIVSWDIITRPLNLGGLGISNLYFQSWALQAKWLWLEKTDPNRPWYGLKFPIQQHVRKFFASSVXTLIGNGSNTLLWTDRWLDGACIKDFAPAVAASVGKRAVSSRTVAQALENXQWVSDIETPFSLVGLQQYLHLWDAIGVVLTQEADRHVWIHTSSGQFYSKSCYKALFMGSVNFESWNRLWKSWAPPTCIFFLWLAIRNRCWTTDRLQKRGLDHPEVCPLCDQEPENIQHLLYTCIFARQFWHCILSPMGLVNLSPAINXSFAEWWRKVCKQVHKTKRRGTNSVIIMGAWYLWLHLNKVVFHGDNPSISGIQRVFLDELVCWGQAGAKHLESLGLGVALIRSR

SEQ ID NO: 26465 - protein, 446 aa, Burkholderia vietnamiensis G4
MRVTRIEVPDIGDYKNIPVIEVLVGVGQRVEREQSLVVLESDKATMDVPSPAAGVIREMKVAVGETVSQGTLIALLDSDSDGERQDDAAPVPAAASAARDLACPSANVATGLVPALAPAPELKSASAPLHSAPAREGEPSRASHASPSVRKFARELGVDVARVPGSGPKGRITKDDITGFVKGVMSGQCAAPGAAAAPAGGGELNLLPWPKVDFAKFGPFEAKPLSRIKKISGANLHRNWVMIPHVTNNDEADITELEALRVQLNKEHEKAGVKFTMLAFVIKAVVAALKKFTTFNASLDGDNLVFKQYYHIGFAADTPNGLVVPVIRDADKKGLVDIAKEMAELSKAARDGKLKPDQMQGGCFSISSLGGIGGTHFTPIINAPEVAILGLSRGQMKPVWDGKQFVPRLTLPLSLAFDHRVIDGAEAARFNAYLGALLGDFRRIVL

SEQ ID NO: 26466 - protein, 155 aa, Triticum aestivum
  misc_feature (58)..(58): Xaa can be any naturally occurring amino acid
  misc_feature (69)..(69): Xaa can be any naturally occurring amino acid
  misc_feature (89)..(89): Xaa can be any naturally occurring amino acid
  misc_feature (93)..(93): Xaa can be any naturally occurring amino acid
  misc_feature (102)..(102): Xaa can be any naturally occurring amino acid
  misc_feature (142)..(142): Xaa can be any naturally occurring amino acid
MVKYSQEPGNPTKSAKAMGRDLRVHFKNTRETAFALRKLPLTKAKRYLEDVIAHKQAXPFRRYCGGVGXRTAQANLRHSQMGQGPWPVXSASXILGLAGRMXDYADVKALDVGQLYVSHIQVNQAQEQERRTTVLNGRINLXFSPCFTDPSEGNL

SEQ ID NO: 26467 - protein, 337 aa, Pseudomonas fluorescens Pf-5
MARKISYQQAINEALAQEMRRDPSVFIMGEDVAGGAGAPGDNDAWGGVLGVTKGLYHQFPGRVLDTPLSEIGYVGAAVGAATRGVRPVCELMFVDFAGCCLDQILNQAAKFRYMFGGKAQTPLVIRTMVGAGLRAAAQHSQMLTSLWTHIPGLKVVCPSSPYDAKGLLIQAIRDNDPVIFCEHKLLYSLQGEVPEESYAIPFGEANFLRDGKDVTLVSYGRTVNTALDAARSLAGRGIDCEVIDLRTTSPLDEDSILESVEKTGRLVVIDEANPRCSMATDISALVAQKAFASLKAPIEMVTAPHTPVPFSDALEDLYIPDAAKIEKAVLTVIEWSR

SEQ ID NO: 26468 - protein, 136 aa, Rosa hybrid cultivar 'Pavarotti'
MLPLTGQQYSEKVSENCVAIWKKFGIYTDAEAKAIEKFVEVFKDQTFPPGASILFTQSPNGSLTIGFSKDGSIPAVGNAVIENKLLSESVLESIIGKQGVSPEARKCVATRLSELLKESDDCVAGNGEVKEAEVKA

SEQ ID NO: 26469 - protein, 274 aa, Glycine max
MAFFGRIGNLLRQTASRQVSSELRSSPSFFQAIRSMSSAPSTKLFIGGVSYSTDEQSLREAFSKYGEVVDARIIMDRETGRSRGFGFITYTSVEEASSAIQALDGQDLHGRPIRVNYANERPRGYGGGGFGSYGAVGGGGYEGGSSYRGGYGGDNYSRNDGSGYGYGGGRYGSGGNYGDSGSGNNYSGGYAGNAGGVGNHESSTGFASNGYDGSVVDGGVGAGSGTSFADGYDGSAGSEFGSSGQLDSKASSKGDEDFGDYRDDNDADDFAKRA

SEQ ID NO: 26470 - protein, 382 aa, Burkholderia vietnamiensis G4
MSNAMSAGRPADSRADIATALEIIEEARAGRMFILVDDEDRENEGDLVIPAQFATPDAVNFMATHARGLICLAMTRSRCESLGLHLMSRINGSRHETAFTVSIEARDGVSTGISAADRSRTISLAINPETGRDELVSPGHVFPLMARDGGTLVRAGHTEAAVDIARLAGLAPAGAICEIMNDDGTMARLPDLIAFSRRHQLKLGTIADLIAYRRRTERLVEAVEHGSFTEPNGRHWRIVVYRNRIDQVEHIAFVMGDLRGADPVLVRMHAMDTMNDVIGGHHLASLRGAARLLENENRGVIVVIRESRLTAVSERVRAMMHPKPAEPELRDYGIGAQILTELGVKNMILLSNHERTIVGLEGYGLNMVEQRKIERIHDYQEV

SEQ ID NO: 26471 - protein, 633 aa, Bacillus thuringiensis serovar konkukian str. 97-27
MCGFVGCLCENPREFSETEKHQFENMNTMIFHRGPDDEGYFRDEHVQFGFRRLSIIDLEAGHQPLTYENDRYVIIFNGEIYNYVELREMLLEKGATFATQSDTEVIIALYAHMKEKCVDYLRGMFAFMIWDREEKKLFGARDHFGIKPLYIAQQGDTTFFASEKKSIMHVMEDKGVNPTSLQHYFTYQYGPEPETLTIDVNKIEPGHYFVKEIGKEMEIHRYWKPYFNASSATKEEHIQAIRDVLYDSVKVHMRSDVPVGSFLSGGIDSSIIASIAREMNPNLLTFSVGFEQRGFSEVDVAKETAEKLGVKNHNVFISAKEFMDEFPKIIWHMDDPLADPAAVPLYFVAKEARKHVTVVLSGEGADELFGGYNIYREPNSLKMFSYIPSPGKSVLKALSGALKEGFKGKSFLERGCTPIEERYYGNAKIFREEEKAELMKYYNESVNYMDITKPLYNEIKDYDDVSKMQYIDMFTWLRGDILLKADKMTMANSLELRVPFLDKEVFDVASKIPTEFKIANGTTKAILREAARGIVPDHVLDRKKLGFPVPIRHWLKDEMHDWAINIINESKTEHLIDKQYVLNLLEAHCADKGDYSRKIWTVLAFMVWHQIYVEHKYDTNKFHEETKRAYSLV

SEQ ID NO: 26472 - protein, 847 aa, Brassica oleracea
MLCGDMRGVLFSVLLLFPAFSFSSNTLSATESLTISSNKTISSPGNIFELGFFKPSSSSRWYLGIWYKAISKRTYVWVANRDHPLSTSTGTLKISDSNLVVVDGSDTAVWSTNLTGGGDVRSPVVAELLDNGNFVLRDSNNNDPDIVLWQSFDFPTDTLLPEMKLGWDLKTGFNWFLRSWKSPDDPSSGDYSFKLKTRGFPEAFLWNKASQVYRSGPWNGIRFSGVPEMQPFDYIEFNFTTSNQEVTYSFHITKDNMYSRLSLSSTGSLQRFTWIEAIQNWNQFWYAPKDQCDDYKECGTYGYCDSNTYPVCNCMRGFEPRNPQAWGLRDGSDGCVRKTALSCNGGDGFVRLKKMKLPDTAATSVDRGIGIKECEEKCKSDCNCTAFANTDIRGGGSGCVVWTGDILDTRNYAKGGQDLYVRLAATDLEDTTNRNAKIIGSCIGVSVLLLLCFIFYRFWKRKQKRSIAIETSFVDQVRSQDLLMNEVVIPPNRRHISRENKTDDLELPLMDFEAVAIATDNFSNANKLGQGGFGIVYKGRLLDGQEIAVKRLSKMSVQGTDEFKNEVKLIARLQHINLVRLLGCCVDEGEKMLIYEYLENLSLDSHLFDKTRSCKLNWQKRFVITNGIARGLLYLHQDSRFRIIHRDLKASNVLLDKDMTPKISDFGMARIFGRDETEANTRKVVGTYGYMSPEYAMDGIFSTKSDVFSFGVLLLEIISGKRNKGFYNSDHDLNLLGCVWRNWKKGKGLDIVDPIILDSSPSTYRPLEILRCIKIGLLCVQERANDRPTMSSVVMMLGSETAAIPQPEQPGYCVGRSPLDTDSSSSNQRHDESWSVNQMTVSVIDPR

SEQ ID NO: 26473 - protein, 402 aa, Thermoplasma volcanium GSS1
MFLYEFKLPDIGEGVTEGEIVKWDVAEGDEVKKDQDLVEVMTDKVTVKIPSPVNGKISKILYKEGQVVPVGSTLVQIDTGEETSQQTMAEEHAELKPQTTAAQQIAIETVPAGKVLASPAVRRIARENGIDLAKVKGTGDNGRVTLDDLDAYMRGETKAKAPEKPIEAAKPAEVPPVQRSPGREEILEMHGLRRIIFDKMTKAKQIMPHFTVVEKVDVTGMISIIESAKSSGKKVTITGYIARIVPIVLKQYPYLNAIYDEANRRYLIKKYYNIGIAVDTPDGLNVFVVKDADRKSMYEITAEITDKAERARNNQLKIDEVQDSTFTITNVGTIGGVLSTPIINYPEVAILGVHRVMDENGKKIMYLSLSCDHRLIDGAVATRFIMDLKKIIEDPNSLIYEM

SEQ ID NO: 26474 - protein, 590 aa, Triticum monococcum
MARLSLAACAVAFHLCLLVSSSASLRWLSDKAAAVTTAGGVRTRSAYHFQPAKNWQNDPNGPMYHNGLYHFFYQYNPDGVTWGNGNLSWGHSVSVDLVNWFALDAALQPSRPFDANGCWSGSATILPDGSPVMLYTGIDARGDQVQNVAYPKNASDPLLVDWVKPEYNPVIPVPADIKRDDFRDPSTAWLGADGLWRIAVAARVHDVGGATLIYRSKDFLRWERNADPLYLAHAAGMVECPDLFPVSEPGVEVGLPASGAGARHVLKMSVMDTVQDYYVVGRYDDAADTFVPEDDEDCRSWRRLDYGHVYASKSFFDPARTGACSGAGPTSPTACPTTSSGDGPVFKLFPRKIWLDEDGKQLRQWPVEEIETLRSKRVNLLIPEVNAGGVNEIIGVMGAQADVEVVFEVPALEHADVLEPNWLLDPQSLCGEKGASVPGSVGPFGLLVMASGDMQEHTAVFFRVFRQNDKYKVLMCTDLSRSSTRDGVYKPPYGAFVDMDIEAHGGIISLRTLVDHSVVESFGGGGRACITARVYPDHVVNGNSHLYVFNNGTGAVKVSSLDAWEMATATVNVLPDELIAASSVSRAQAY

SEQ ID NO: 26475 - protein, 417 aa, Thiomicrospira crunogena XCL-2
MEGNFLQLSYALDTFYFLMSAVLVMWMAAGFAMLEAGLVRSKNTVEILTKNALLYSVACSMYLIVGYNVMYPGDPISAYLPNLSFFLGADNTVEAVIAGGDGAPYYSGMSDFIFQAVFAAATMSIVSGAIAERMKLWPFLVFAVVMTSFIYPMEGYWKWGGGWLDQLGFQDFAGSVVVHMAGAAAALAAVIMVGARKGKYGPNGEVHPIPGANLPMATLGMFILWMGWFGFNGGSELMVSNVEEANAVATIFVNTNAAAAAGMIAAALLSKYMFGKTDLTMVLNGALAGLVSITAEPLAPTPGLAMFIGAVGGLIVVLSVVFMDKLKLDDPVGAISVHGTAGIWGIFAVLFSNADATFFGQFVGTVATFAWMFITSIIVLYIIDKTMGLRPTEEEEMEGMDMKECGMEAYPEFDHKS

SEQ ID NO: 26476 - protein, 333 aa, Silicibacter sp. TM1040
MTIKVGINGFGRIGRCTLAHIAGSFRNDIEVIKVNATGPIETAAHLIKYDSVHGRFPGQVDFSEGRLNLGRGDMQVFSTYDMDTLDWEGCDVVLECTGKFNDGLKAKKHLERGAGKVLLSAPGKNVDRTVVYGVNDEDLLSTDKMVSNGSCTTNCLAPLAKVLDEAFGIEHGIMTTIHAYTGDQPTLDRRHDDLYRARAAAMSMIPTSTGAAKALGEVLPNLKGRLDGSAIRVPTPNVSAVDLTFRAGREVTAEEVNAAVAEASKGHMSRVLGYEPAPLVSTDFNHTEESSIFAPDQTRVVDGRMVRVLAWYDNEWGFSVRMADVATAMGRLN

SEQ ID NO: 26477 - protein, 560 aa, Methylococcus capsulatus str. Bath
MNSIPKRILIVGGVAGGATCAARARRLCETCEIVVFERGPHVSFANCGLPYFVGDVIPSEANLLVASPDLFARRFNIEVHTETEVIGLDRHARRIEVRDLRTGAVRPEPYDALVLATGAQPVRPPLPGIDLPGIHVLRTIPDSRGIKAAVAHAKRVVLVGGGFIGLEMAENLVGLGLEVTLLELADQVLPPLDPEMATYAAERLKTHGVSLRLGEGVEAFDKHPEHGLNLRTSKGGTIAADLVILGIGVRPESGLAAAAGLELGAFGGIRVDEYMRTSDAAIWAVGDVVEVKNRVTGEWQLVPLAGPANRQGRVAATAILHHFECSDGTPPPLKFEGVLGTAVCEVFGLTIACTGANEKVLRRAGMDYDKVYLHPGHHASYFPGAKPIHIKLLFSRTDGRILGAQAVGELDVARRIDVIATAMMQGATVFDLEDLELCYAPQFGAAKDPVNLAGMIAANHLRGDLSLAAWEALTETTALLVDVRSEAEFAAGHIPHARNLPLETLRDRLSELPRDREIWLVCGVGQRAYYAYRLLYRAGFNVKVLSGGMQTYRAWMRARD

SEQ ID NO: 26478 - protein, 173 aa, Triticum aestivum
  misc_feature (149)..(149): Xaa can be any naturally occurring amino acid
MATMMAMSSFAGAAVLPRGSAGRLGARSLPALGRRALVVRAQTEGPSAPPPNKPKASTSIWDALAFSGPAPERINGRLAMVGFVTALAVEAGRGDGLLSQLSSGTGQAWFAYSVAVLSVASLVPLLQGESAEGRAGTIMNANAELWNGXRFAMLGLVALAATEIITGAPFINV

SEQ ID NO: 26479 - protein, 287 aa, Thiomicrospira crunogena XCL-2
MSAQVINGKVVAKTVIDRVKQRVQLRKSQGLRAPGLAVILIGDDPASSVYVNNKKKACEEAGLVSKSWNWPSKATQYELLELIKQLNEDTSIDGILVQLPLPDHIDAETIIEAIHPDKDVDGFHPYNIGRLTVRMPTLRPCTPYGCMNLLNHYDLSVKGKHAVIVGASNIVGRPMSLELLLAGATTTVCHRFTADLQTHVSMADILVTAVGKPNFIPADWIKPGAIVVDVGINRLPDGSLTGDVDPRAREVAAYVTPVPGGVGPMTIATLLENTLKACEIHQLGAVS

SEQ ID NO: 26480 - protein, 396 aa, Salmonella enterica subsp. enterica serovar Paratyphi A str.
MLDAQTIATVKATIPLLVETGPKLTAHFYDRMFTHNPELKEIFNMSNQRNGDQREALFNAIAAYASNIENLPALLPAVEKIAQKHTSFQIKPEQYNIVGTHLLATLDEMFNPGQEVLDAWGKAYGVLANVFIHREAEIYHENASKDGGWEGTRPFRIVAKTPRSALITSFEFEPVDGGTVAEYRPGQYLGVWLKPEGFAHQEIRQYSLTRKPDGKGYRIAVKREDGGQVSNWLHHHASVGDVVHLAAPAGDFFMNVAADTPVSLISAGVGQTPMLAMLDTLAKEQHTAQVNWFHAAENGDVHAFADEVSELGRTLPRFTAHTWYREPTEADRAQRVFDSEGLMDLSQLEAAISDPAMQFYLCGPVGFMQFAAKQLVSLGVNNENIHYECFGPHKVL

SEQ ID NO: 26481 - protein, 426 aa, Saccharophagus degradans 2-40
MDAVSTQLLVVILVGLIICSAFFSSSETGMLSLNRYRLRHLVKKEHKGATLASNLLARPERLIGVILIGNNLVNILIAMVGTAIAERYLSEWAVIVVAPIALTLILLVFAEVTPKSIAAIFPERIAFPASYVLQPLLLLLYPFVLVVNAISNGLARLAGIDLAKAKLSDHLRPEELRTVVDEAGELIPDHHQGMLLNVLDLEKATVEDIMIPRNEVIGIDLDDDIEDIMELIRSTEYTRLPVFEGDINNVVGVLHLRNAARFIQGDNSTVTHDSIREHCSEPYFIPESTPLPTQLMNFQQQKRRTAIVVDEYGEVQGIATLVDLLEEIVGDFSTDTAEDSEPDITECEDDWFLIDGSTSIRDINRQLGWTLSTDGPKTLNGIIVEYLESIPDALVSFEVGNYRFEIVELTETRIEKAKVLEISLQA

SEQ ID NO: 26482 - protein, 181 aa, Brassica napus
MAYSMLSSAAVVTSPAQATMVAPFTGLKSSSAFPVTRKANNDITSIVSNGGRVSCMQVWPPIGKKKFETLSYLPDLTEVELGKEVDYLLRNKWIPCVEFELEHGFVYREHGSTPGYYDARYWTMWKLPLFGCTDSAQVLKEVQECKTEYPNAFIRIIGFDNNRQVQCISFIAYKPPSFTGA

SEQ ID NO: 26483 - protein, 178 aa, Brassica napus
MAITPLAQLNELTISSSSSSLHANSISNSLHSSFASTRISGFTKRRSDSKSKSLRLRCSFSPMETAKIKVVGVGGGGNNAVNRMISSGLQSVDFYAINTDSQALLQSSAQTPLQIGELLTRGLGTGGNPLLGEQAAEESKDAIAAAEESKDAIANAPKGSDLVFITAGMGGPPPSTLI

SEQ ID NO: 26484 - protein, 1478 aa, Saccharomyces cerevisiae
MPFLRKIAGTAHTHSRSDSNSSVKFGHQPTSSVASTKSSSKSPRATSRKSIYDDIRSQFPNLTPNSTSSQFYESTPVIEQSFNWTTDDHISAGTLENPTSFTNSSYKNDNGPSSLSDSRKSSGGNSVNSLSFDKLILSWDPTDPDEWTMHRVTSWFKFHDFPESWILFFKKHQLFGHRFIKLLAYDNFAVYEKYLPQTKTASYTRFQQLLKKTMTKNVTNSHIRQKSASKLKSSRSSSESIKSKLKNSKSQEDISNSRSTSESALSPTKSGPSKTDEKNFLHSTSTHQKTKSASSLYRRSFISLRGSSSSNASSAKSPSNIKLSIPARPHSIIESNSTLTKSASPPASPSYPSIFRRHHKSSSSESSLLNSLFGSGIGEEAPTKPNPQGHSLSSENLAKGKSKHYETNVSSPLKQSSLPTSDDKGNLWNKFKRKSQIGVPSPNTVAYVTSQETPSLKSNSSTATLTVQTADVNIPSPSSSPPPIPKTANRSLEVISTEDTPKISSTTASFKETYPDCINPDKTVPVPVNNQKYSVKNFLLDQKFYPLKKTGLNDSENKYILVTKDNVSFVPLNLKSVAKLSSFKESALTKLGINHKNVTFHMTDFDCDIGAAIPDDTLEFLKKSLFLNTSGKIYIKDQMKLQQKPKPAPLTSENNVPLKSVKSKSSMRSGTSSLIASTDDVSIVTSSSDITSFDEHASGSGRRYPQTPSYYYDRVSNTNPTEELNYWNIKEVLSHEENAPKMVFKTSPKLELNLPDKGSKLNIPTPITENESKSSFQVLRKDEGTEIDFNHRRESPYTKPELAPKREAPKPPANTSPQRTLSTSKQNKPIRLVRASTKISRSKRSKPLPPQLLSSPIEASSSSPDSLTSSYTPASTHVLIPQPYKGANDVMRRLKTDQDSTSTSPSLKMKQKVNRSNSTVSTSNSIFYSPSPLLKRGNSKRVVSSTSAADIFEENDITFADAPPMFDSDDSDDDSSSSDDIIWSKKKTAPETNNENKKDEKSDNSSTHSDEIFYDSQTQDKMERKMTFRPSPEVVYQNLEKFFPRANLDKPITEGIASPTSPKSLDSLLSPKNVASSRTEPSTPSRPVPPDSSYEFIQDGLNGKNKPLNQAKTPKRTKTIRTIAHEASLARKNSVKLKRQNTKMWGTRMVEVTENHMVSINKAKNSKGEYKEFAWMKGEMIGKGSFGAVYLCLNVTTGEMMAVKQVEVPKYSSQNEAILSTVEALRSEVSTLKDLDHLNIVQYLGFENKNNIYSLFLEYVAGGSVGSLIRMYGRFDEPLIKHLTTQVLKGLAYLHSKGILHRDMKADNLLLDQDGICKISDFGISRKSKDIYSNSDMTMRGTVFWMAPEMVDTKQGYSAKVDIWSLGCIVLEMFAGKRPWSNLEVVAAMFKIGKSKSAPPIPEDTLPLISQIGRNFLDACFEINPEKRPTANELLSHPFSEVNETFNFKSTRLAKFIKSNDKLNSSKLRITSQENKTE

SEQ ID NO: 26485 - protein, 560 aa, delta proteobacterium MLMS-1
MAGLATTFGSGAMTNSVNEIEAADVILLSGSNTTEAHPQVARRIISAQDRGARLIVIDPRRTEMAARADVHLGLKPGSDIPLLNAIQRIILDENLADELFIEMRTENFATLRDQLFRLELSATIASCGLEPAAVRQAALLYGRARKAVICYCLGVTQHVCGTANVEALANLAMLTGNVEKQECGVDPLRGQNNVQGACDMGGLPAMLPGYQPVADEECRRRFEQAWGVEIPTRPGKTLLEMTHGRLPPDHRRPAAGRQQPATPLRGLFIMGENPLLSDPDLTRVRKNLAGLELLAVSDIFLTETAARAHVVLPAACFAEKDGTFTNTERRVQLIRQAVAPPGQARPDGEIIAALARRLGYEMAGSPAHEIMEEIALLTPIYGGIYHDRLASGAGLQWPCWDRRHPGTPYLHKYYFTRGKGRFVVAAQEEPAEAPDADYPLLLNSGRLYHHYHTGAMSRKSPLLEREAGVARLQVNPADAESRGIRDGERVRLRSRRGQVELAAELTTMVPPGMVYGTFHFQEAPINRLTIAACDQRAKCPEYKICAVELSRADAQGRGNE

SEQ ID NO: 26486 - protein, 115 aa, Triticum aestivum
MARTAATKLVLVALVAAMILAASDAAISCGQVSSALTPCVAYAKGSGTSPSGACCSGVRKLAGLPRSTADKQATCRCLKSVAGGLNPNKAAGIPSKCGVSVPYTISASVDCSKIH

SEQ ID NO: 26487 - protein, 421 aa, Streptomyces clavuligerus
MALVVQKYGGSSLESADRIKRVAERIVATKKAGNEVVVVCSAMGDTTDELLDLAQQVNPVPPEREMDMLLTAGERISNALVAMAISAQGAQAWSFTGSQAGVVTTAVHGNARIIDVTPSRVSEALEQGYVALVAGFQGVAQDTKDITTLGRGGSDTTAVALAAALNADVCEIYSDVDGVYSADPRIVPDARKLDSVPYEEMLELAASGSKILHLRSVEYARRYGVPIRVRSSYSDKPGTTVTGSIEEIPVEQALITGVAHDRSEAKITVTGVPDHAGAAARIFRVIADAEIDIDMVLQNVSNTSSGRTDITFTLSKANGPKAVASLEKIKEELGFSSVLYDDHVGKVSLVGAGMRSHPGVTATFCEALSKVGVNIEIINTSEIRISVLIRDAQLDDAVRAIHDAFELGGDEEAVVYAGSGR

SEQ ID NO: 26488 - protein, 103 aa, Glycine max
MLTRLARRRSIRFRLSDFVYLCPPEALKLFSALKMADWGPVVIAVVLFVLLSPGLLFQMPARGRVAEFGNMQTSGASILVHAIIYFGLITIFLIAIGVHIYTG

SEQ ID NO: 26489 - protein, 930 aa, Yersinia pestis CO92
MTKYSLRARMMILILAPTLLLGLLLSTSFMVNRYNELQNQIVSAGTNIIEPLAVASEYGMSFRNRDTVRQLINLLHRRHSNIVRSISVFDVDNKLFVTSNYNYNSSQLRLPPGEPVPDSLMLSYRGDSLILRMPIVSESNLSSEQASGQGESDQILGYIAIDLDLQSVRLKQYKEIFISTLLLLFCMCVAILFAYRLMRDVTGPIRNMVNTVDRIRRGQLDSRVEGHMLGELDILKNGINSMAMSLAAYHEEMQQNIDQATSDLRETLEQMEIQNVELGLAKKRAQEASRIKSEFLANMSHELRTPLNGVIGFTRQTLKTSLTPTQTDYLQTIQRSANNLLCIINDVLDFSKLEADKLILEHIPFSLRETLDEVIILLAHTAHEKGLELTLHINNDVPDQVLGDAMRLQQIVTNLLGNAIKFTEEGNIDILVVVKAIASQQVTLMVEIHDTGIGISESQQAQLFQAFRQADASTSRRHGGTGLGLVITERLVKEMGGNISFQSQMSCGSIFRFHLTLELNESIPYRQPDMAHLEGKQLAYIERNSTAARATINILNTTPLQVTHRQSLAQLPEQHYDFLLVGVPIPFRNNMAIHQDKLLTALKIADHVILALPSQSQVEAEQLKQIGAKDCLLKPISSIRLIPLLLAEDTHSKVPSEEQPRKQPKLPFRVMAVDDNPANLKLIGTLLEEQIEETVLCDSGAMAITYAREHTLDIILMDIQMPEIDGIRASEIIHQIPHHQETPIIAVTAHAVKGQQEQLLRLGMADYLAKPIDEARLLQVLSRYQSDNPPLSTASTASTASTASTAESLPLPVPKGAGVIDWAQAVRQAANKEDLARDLLTMLLEFMPQITARVQAILAGADDGDILNLVHKFHGSCACSGVPRLRQLCMTIELQLRQQVNLQDLEPEWLELLDEIENVSEAAKTYLRTE

SEQ ID NO: 26490 - protein, 581 aa, Oryza sativa
  misc_feature (573)..(573): Xaa can be any naturally occurring amino acid
MSSKFLAIYLLLAFLSHGTCSYMATTASGWDDHDFFRHCPPSRCSKDGPEIRFPHRLESSNTSSACRASCARLACSGQDTILHHPILGPCKVTSIDYKEAVINIIHLLPFPCPLQKLMVDSLPPDDYHGCNLYRRIPAKIVSCSKEFTPSGTSPVPYELDHLQNAAENIFGPISCLSGTGQYFSYLVHAQLYMYLLPLDCRIVSRGSIPIPGSDSCSGPTFKEKAEKFINFAETTVSWGSFQDGVLDNCMACERQKQLCAFSSRRNQTFCTSHGNHHATSSVAAFVVFSFIMATALYLSLKSRYDEEVHLKVEMFLRTYGTSKPTRYSFSDVKKITRRFKEQLGQGGFGSVYKGRLPNGVPVAVKMIEHSTGNGEEFINEVATIGQIHHINIARLLGFCSEGTRHILIYEFMPNESLEKCIFLHDPNTSQELLAPKKMLDVALGIARGMEYLHQGCNQRILHFDIKPNNILLDYNFNPKISDFGLAKLCARDQSIVTLTKARGTMGYIAPELYSRNFGEISYKSDVYSFGMLVLEMVSGRRNSDPSIENQNEVYFPEWIYEKVITEQDFVLSXGNDRRSRL

SEQ ID NO: 26491 - protein, 238 aa, Glycine max
MNDADVSKQIQQMVRFIRQEAEEKANEISVSAEEEFNIEKLQLVEAEKKKTRQEYERKERQVEIRKKIEYSMQLNASRIKVLQAQDDVISSMKEAASKELLHVSHHHHLTLTHHDHVYRNLLKDLIIQCLLRLKEPSVLLRCRKDDLHLVEHVLDSAAQEYAEKVNVDPPEIIVDNQVYLPPGPHHHNSHDLYCSGGVVLASRDGKIVCENTLDARLDVVFRKKLPEIRNQLFGQVVA

SEQ ID NO: 26492 - protein, 255 aa, Methanocaldococcus jannaschii
MKFLLIASNKDLASKNIANHIKEYFDVFETDKELLSLTAEDLEYADYYIFLSKHKSIANKPSLTVHTPGNLTEDNTFGGNPKEVCPCDAVLNTLLLKNIYKNYKTYYEDGKIGEFDVSFEVVHHSPTGLKAPTVFVEIGSSEKEWILKEAGEIIAKSVLETIDAMKSKNYDKKVRAIGFGGGHYAPKFTKLALEDKYYFGYLVPKYASVSEDVLNQLISKMEVDKALIDWKGCRGDDKRRYIEFFENNGIEWERV

SEQ ID NO: 26493 - protein, 1065 aa, Bacillus cereus E33L
MDKKVSAIPQPKTYGPLGNLPLIDKDKPTLSFIKIAEEYGPIFRMQTLSDAIIVVSGHELVAEVCDETRFDKSIEGALAKVRAFAGDGLFTSETDEPNWKKAHNILMPTFSQRAMKDYHAMMVDIAVQLVQKWARLNPNENVDVPGDMTRLTLDTIGLCGFNYRFNSFYRETPHPFITSMTRALDEAMHQLQRLDIEDKLMWRTKRQFQHDIQSMFSLVDNIIAERKSSGNQEENDLLSRMLNVQDPETGEKLDDENIRFQIITFLIAGHETTSGLLSFTIYFLLKNPDKLKKAYEEVDRVLTDPTPTYQQVMKLKYIRMILNESLRLWPTAPAFSLYAKEDTVIGGKYPIKKGEDRISVLIPQLHRDKDAWGDNVEEFQPERFEELDKVPHHAYKPFGNGQRACIGMQFALHEATLVMGMLLQHFEFIDYEDYQLGVKQTLTLKPGDFKIRIVPRNQTISHNTVLAPTEEKLKNHEIKQKVQKIPSIIGADNLSLLVLYGSDTGVAEGIARELADTASLEGVQTEVAALNDRIGSLPKEGAVLIVTSSYNGKPPSNAGQFVQWLEELKGDELKGVQYAVFGCGDHNWASTYQRIPRYIDEQMAQKGATRFSTRGEADASGDFEEQLEQWKESMWSDAMKAFGLELNKNIEKERSTLSLQFVSRLGGSPLARTYEAVYASILENRELQSSSSERSTRHIEISLPEGATYKEGDHLGVLPINSEKNVNRILKRFGLNGKDQVILSASGRSVNHIPLDSPVRLYDLLSYSVEVQEAATRAQIREMVTFTACPPHKKELESLLEDGVYHEQILKKRISMLDLLEKYEACEIRFERFLELLPALKPRYYSISSSPLVAQNRLSITVGVVNAPAWSGEGTYEGVASNYLAQLHNKDEIICFIRTPQSNFQLPENPETPIIMVGPGTGIAPFRGFLQARRVQKQKGMKVGEAHLYFGCRHPEKDYLYRTELENDERDGLISLHTAFSRLEGHPKTYVQHVIKQDRIHLISLLDNGAHFYICGDGSKMAPDVEDTLCQAYQEIHEVSEQEARNWLDRLQEEGRYGKDVWAGI

SEQ ID NO: 26494 - protein, 850 aa, Brassica oleracea
MRIFRKTLVSFPLFIFLFLYESSTAQDTIRRGGFLRDGSTHKPLVSPQKTFELGFFSPGSSPGRYLGIWYGNIEDKAVVWVANRENPISDRSGVLTISNDGNLVLLNGQNITVWSSNITSTNNDNNRVGSILDTGNFELIEVSSERVIWESFNHPTDTFLPHMRVRVNPQTGDNLAFVSWRSENDPSPGNFSLGVDPSGAPEIVLWGRNNTRRWRSGQWNSAIFTGIPNMALLTNYLYGFKLSSPPDETGSVYFTYVPSDPSVLLRFKVLHNGTEEELRWNETSKRWTKFQAAPESECDKYNRCGSFGICDMRGDNGICSCVKGYEPVSLGNWSRGCRRRTPLRCERNVSNVGEDEFLTLKSVKLPDFETPEHSLADPEDCKDRCLKNCSCTAFTFVNGIGCMIWNQDLVDLQQFEAGGSSLHVRLADSEIGESKKTKIVVIVAVLVGVLLLGIFALLLWRFKRKKDVSGTYCGHDADTSVVVVDMTKAKDTTTAFTGSVDIMIEGKAVNTSELPVFCLKVIVKATNDFSRENELGRGGFGPVYKGVLEDGQEIAVKRLSGKSGQGVDEFKNEIILIAKLQHRNLVRLLGCCFEGEEKMLVYEYMPNKSLDFFIFDEMKQELVDWKLRFAIIEGIARGLLYLHRDSRLRIIHRDLKVSNVLLDGEMNPKISDFGMARIFGGNQNEANTVRVVGTYGYMSPEYAMEGLFSVKSDVYSFGVLLLEIISGKRNTSLRASEHGSLIGYAWFLYTHGRSEELVDPKIRATCNKREALRCIHVAMLCVQDSAAERPNMAAVLLMLESDTATLPVPRQPTFTTSTRRNSMDVNFALDSSQQYIVSSNEITSTVVLGR

SEQ ID NO: 26495 - protein, 410 aa, Ralstonia eutropha JMP134
MSRRRVVVTGLGLVSPVGNTVAEGWANLVAGKSGIATVTKFDHSALSVHFAGEVKGFNAEDYIPAKEARNMDTFIHYGIAAGAQALKDSGYEVTDANAERIGVLVGSGIGGLPMIEDTHATLTERGPRRISPFFVPGSIINMISGHLSIMHGLKGPNLAAVTACTTGLHSIGLAARLIQAGDADAMLAGGAESTVSPLGIGGFAAARALSTRNDDPAAASRPWDKDRDGFVLGEGAGVMMLEEYESAKARGARIYAELVGFGMSGDAFHMTAPNMDGPRRCMVNALRDAGINADEVQYLNAHGTSTPLGDKNETDAIKAAFGDHAYKMVVNSTKSMTGHLLGGAGGLESVFTVLALHNQVSPPTINIDNQDPECDLDYVANTAREMKIDVAVKNNFGFGGTNGTLVFRRA

SEQ ID NO: 26496 - protein, 495 aa, Catharanthus roseus
FFIFLFFVFLLINGRRKSTRTKTINLPPGPWKLPILGNLHNMMMGSVPHRLLRDLAKKHGDLMLLKLGEFNAIVVSSPRMAKEVLKTHDLSFLNRPIIQAPKILCYDNSDLVFSQYGDSWREMRKIFVLELLSTKRVRSFQPIRQDEGSRLVSLIKESVGKSIDLSEKINSYTTSMVARAAFGKVNDAGVTFLKLVKEASEVAGGFDPADIFPSYKFLNVFFNSRSKLLKIHGKTDMILEEMIDEHIKNHEMGKKANGENGKEDVIDILLSIKDSGELQFPFQMNNVKALIFDMFAAGTETSSSTVEWAMSELIRNPDVMAKAQNEVRQVLKGKQIVDESVLQELEYLKLIVKEVLRLHPSSPLLIPRECGEDCQIDGYDIPVKTRVFVNIWAIARDDKYWKDPESFIPERFENTCFDFTGNNFEYLPFGSGRRMCPGMTFGLANVDLVLALLLYHFNWKLPPGVNDIDMTERVGLGATKKHSLVLIPTLYDPSF

SEQ ID NO: 26497 - protein, 386 aa, Zymomonas mobilis
MPAKSDKHLIINDTTLRDGEQAPGVAFTLSEKLHIAKALDKAGVDEIEAGIPAMGASEIEAIRQIVQQSQTARVIPWCRMKISDVDKALETGAKTVHLSISSSPFQMAAKFPDLSAADILGLCQKVISYAKDRGLEVSVGAEDASRAEISFLTDLLGVIEEAGAFRIRFADTLGILDPFATYEIISQLHQISPLDIEFHGHDDLGLATANSLAAIKAGAKGASVTVLGLGERAGNASLEQVVIAASHIAGKETRIRPEKLYNLAQYVAQAAGRTIPPDKAIVGEAVFQHESGIHVAGLLRNPASYEALNPEKLGRQREIVLGKHSGRAAIRHALSLLGIKAQEDMIQNLLAAVKMQASHQKRAIGLSEIALIHQNFTHTQPNAGLR

SEQ ID NO: 26498 - protein, 181 aa, Solanum tuberosum
MASSVISSAAVATRTNVTQAGSMIAPFTGLKSAATFPVSRKQNLDITSIASNGGRVRCMQVWPPINMKKYETLSYLPDLTDEQLLKEVEYLLKNGWVPCLEFETEHGFVYRENHKSPGYYDGRYWTMWKLPMFGCTDATQVLAEVQECKKSYPQAWIRIIGFDNVRQVQCISFIAYKPEGY

SEQ ID NO: 26499 - protein, 248 aa, Burkholderia vietnamiensis G4
MYKLVLIRHGESTWNKENRFTGWVDVDLTEQGRNEAYQAGALLKEAGYTFDIAYTSVLKRAIRTLWHVQDKMDLMYLPVVHSWRLNERHYGALSGLNKAETAAKFGDDQVLVWRRSYDTPPPALEPTDERAPFSDPRYAKVPREQLPLTECLKDTVARVLPLWNESIAPAVRAGKQVLIAAHGNSLRALIKYLDGISDSDIVGLNIPNGVPLVYELDENLKPIQHYYLGDQDAIAKAQAAVAKQGKAG

SEQ ID NO: 26500 - protein, 180 aa, Solanum tuberosum
MASSVMSSAAVATRGNGAQASMVAPFTGLKSAASFPVSRKQNLDITSIASNGGRVRCMQVWPPINMKKYETLSYLPDLSDEQLLKEVEYLLKNGWVPCLEFETEHGFVYRENNKSPGYYDGRYWTMWKLPMFGCTDATQVLAEVEEAKKAYPQAWIRIIGFDNVRQVQCISFIAYKPEGY

SEQ ID NO: 26501 - protein, 172 aa, Arabidopsis thaliana
  misc_feature (6)..(6): Xaa can be any naturally occurring amino acid
  misc_feature (94)..(94): Xaa can be any naturally occurring amino acid
  misc_feature (101)..(101): Xaa can be any naturally occurring amino acid
  misc_feature (106)..(106): Xaa can be any naturally occurring amino acid
  misc_feature (113)..(113): Xaa can be any naturally occurring amino acid
  misc_feature (118)..(119): Xaa can be any naturally occurring amino acid
  misc_feature (121)..(121): Xaa can be any naturally occurring amino acid
  misc_feature (123)..(123): Xaa can be any naturally occurring amino acid
  misc_feature (126)..(126): Xaa can be any naturally occurring amino acid
  misc_feature (131)..(131): Xaa can be any naturally occurring amino acid
  misc_feature (133)..(134): Xaa can be any naturally occurring amino acid
  misc_feature (139)..(139): Xaa can be any naturally occurring amino acid
  misc_feature (142)..(142): Xaa can be any naturally occurring amino acid
  misc_feature (144)..(144): Xaa can be any naturally occurring amino acid
  misc_feature (155)..(156): Xaa can be any naturally occurring amino acid
MASSMXSSTAVVTSPAQATMVAPFTGLKSSASFPVTRKANNDITSITSNGGRVSCMKVWPPIGKKKFETLSYLPDLSDVELAKEVDYLFRNKWXPCVEFEXEHGFXYREHGNXSGYYXXTXYXQFXRFPFXGXXDSVKXFKXVXDSKKGSLGLIXXPGLENGHDFSLSPSFR

SEQ ID NO: 26502 - protein, 115 aa, Glycine max
  misc_feature (35)..(35): Xaa can be any naturally occurring amino acid
  misc_feature (64)..(64): Xaa can be any naturally occurring amino acid
  misc_feature (72)..(72): Xaa can be any naturally occurring amino acid
GRALFPKKLTKAFLTGDFAFVAHSLKNVLPSYLIXTILPFHLPREDVRDAFIFLSAASLPDLPXESMVVLLXLKQRYKSLQFPFFNGEENFPGHGPTRVKKLNEGLGPTYLMALT

SEQ ID NO: 26503 - protein, 229 aa, Bordetella bronchiseptica RB50
MPARSHHRIFRSGWLRAAVLGANDGIVSTASLIAGVAAAQASHAAILTSGLAGLVAGALSMAAGEYVSVKSQADIEAADLRLEQSSLKRNSREELEELTGIYVERGLSPDLAGQVARQLTRHNALDAHARDELGISVHNRAQPVQAALASAASFAVGAALPLAIAMAAPLAQLMPVVIAGSVAGLGILGAVAARAGGAPVGPAAVRVVLLGAAAMALTAGVGALFGVAV

SEQ ID NO: 26504 - protein, 180 aa, Solanum tuberosum
MASSIVSSAAVATRANGAQASMVGPFTGLKSTASFPVSRKQNLDITSIASNGGRVRCMQVWPPINMKKYETLSYLPDLSDEQLLKEVEYLLKNGWVPCLEFETEHGFVYRENNKSPGYYDGRYWTMWKLPMFGCTDATQVLAEVEEAKKAYPQAWIRIIGFDNVRQVQCISFIAYKPEGY

SEQ ID NO: 26505 - protein, 230 aa, Citrus limon
MNDADVSKQIQQMVRFIRQEAEEKANEISVSAEEEFNIEKLQLVEAEKKKIRQEYERKEKQVEIRKKIEYSMQLNASRIKVLQAQDDLVSNMMEAASKEVLNVSRDHNSYKKLLKDLIVQSLLRLKEPAVLLRCRKDDHHLVESVLESAKEEYAQKLQVHPPEIIVDHHIYLPPGPGHHNAHGPSCSGGVVVASRDGKIVCENTLDARLDVVFRKKLPEIRKQLVSQVAA

SEQ ID NO: 26506 - protein, 173 aa, Zea mays
MAFLLAVAVSVAAPASWPSPVATVAPPRLALRRGLPPTWRAVRALPRSRGAVVVCQAQGGQDTAIQVPDVSKSTWQSLVVESELPVLVEFWASWCGPCKMIDPIVGKLSKEYEGKLKCYKLNTDENPDIATQFGIRSIPTMMIFKNGEKKDSVIGAVPESTLVTCIDKYVGGR

SEQ ID NO: 26507 - protein, 180 aa, Solanum tuberosum
MASSVMSSAAVATRGNGAQASMVAPFTGLKSTASFPVSRKQNLDITSIASNGGRVRCMQVWPPINMKKYETLSYLPDLSDEQLLKEVEYLLKNGWVPCLEFETEHGFVYRENNKSPGYYDGRYWTMWKLPMFGCTDATQVLAEVEEAKKAYPQAWIRIIGFDNVRQVQCISFIAYKPEGY

SEQ ID NO: 26508 - protein, 305 aa, Saccharomyces cerevisiae
MVEENSRVLIVLPYTPPSATLQRIIGQTIPFLRECQSQLDIVIVPEFKTSFQLDSALGKMYSITRDVLLGYGMINSGINIIFNNIHFVESNLQWKVVLLPQESTFETWKLELGQGQYHSIEHYALHDNIMEEIEGPKDANKFHVTALGGTFDHIHDGHKILLSVSTFITSQRLICGITCDELLQNKKYKELIEPYDTRCRHVHQFIKLLKPDLSVELVPLRDVCGPTGKVPEIECLVVSRETVSGAETVNKTRIEKGMSPLAVHVVNVLGGREEDGWSEKLSSTEIRRLLKSSASPTCTPQNPCV

SEQ ID NO: 26509 - protein, 436 aa, Methylococcus capsulatus str. Bath
MAQEQTVVVPDIGDFKDVEIIEVLVKPGDKVAANDSLITLESDKAAMEIPSPYSGTVTELHVRVGSKVSMGTPILQLREDEGTDASGAASAPVEPAPAEPVSPPPAAAAPAAGDTQAVPASAPTPPAPMPVAEEGSGPAHASPAVRRFARELGVDVAKVRGTGPKGRILKTDVQSFVKQAVATAERTGGGGFAVPAMPEIDFAQFGPIERQPLSRIQKLSSANLHRTWLTVPHVTQHDEADITELEAFRNALKAESAKRGVKLTLLPFIIKAAVAALKDFPRFNASVAPNGEELILKRYYHVGFAVDTPDGLVVPVIRDADTKGIWDIAAELAAIGDKARGKKLRTADLQGGTFTVSSLGGIGGIAFTPIINAPEVAILGVSKAQLRPVFQDGQFVPRLMLPLSLSYDHRVIDGADGVRFVTHVSSLLADMRRVLL

SEQ ID NO: 26510 - protein, 279 aa, Triticum aestivum
MSAVVCGKRSSIFADELIPSSPPSPPHHHPSKRARCSPTRAFDDAAAAHRREALLHHLRSLFPHMDPQLLERALEASGDDLDFAIRSLNDLRLESAEAIFSAAVGEPENGLSTALKLSAEGNGQLDAISGNPPATDNCQTNHHSSEWVELFVREMMSASDINDARARASRALEVIEKSIMERTGAEAVQNLHKENKMLKEQLAIALRENAVLKRGVAIQHERQKEFDDKTQEVHNLKQLILQYQEQLKTLEINNYALRVHLQQAQQNSSMPGRFHPDVC

SEQ ID NO: 26511 - protein, 385 aa, Magnetospirillum magnetotacticum MS-1
MPAPVVMPPLVVMNDTTLRDGEQTAGVAFRLDEKLDIARALDIAGVPEIEVGIPAMGPEEQAAIRKVASLGLKARLISWCRMMDEDLEAAALCDVSTINLSIPVSDLQLAAKMGRDRAWALDHIRVMVAKACAMGFEVLVGGEDSSRADPAFLAEVVRACEATGAQRFRFADTLGIMDPFAVHDAFKALRAATSMELEIHAHDDLGLATANSLAAVRGGATHVSTTVNGLGERAGNAPLEEVVVALGHLYGRETGIDKRQLGRVSKLVAEASGRPVPVDKSIVGENIFTHESGIHVSGLLRDPRTYQALDPAELGRGHRLVLGKHSGLTSVLHACREIGLEVDAPVARAMLAQVRRHASATKTIPTADDLRRFAGTATAITGVPS

SEQ ID NO: 26512 - protein, 185 aa, Arabidopsis thaliana
MASEARESPANNPGLSTNRDEATKGYIMQQTMFRIKDPKASLDFYSRVLGMSLLKRLDFSEMKFSLYFLGYEDTTTAPTDPTERTVWTFGQPATIELTHNWGTESDPEFKGYHNGNSEPRGFGHIGVTVDDVHKACERFEELGVEFAKKPNDGKMKNIAFIKDPDGYWIEIFDLKTIGTTTVNAA

SEQ ID NO: 26513 - protein, 264 aa, uncultured archaeon GZfos27B6
MQEENKYENILCAKKEKVATITLNRQKSLNALNTALLTELRDALDDAETDAAVRAIVITGSGEKAFCAGADITELGEKSPEEASEWSSWAQGITTYMEKLSKPIIAKINGFCLGGGLELAMACDFRIASEKAIFGLPEINLAIIPGGGGTQRLPRLIGKTIAMEMLMCGEHINAAEAFRLTLVNKTVPADELDGEVDELIKKLLSKSAVTLGILKDAVNSGLEMDLEHALQYEAECFGSALATEDAREGLKGFLEKRKPEYKSR

SEQ ID NO: 26514 - protein, 255 aa, Rhodococcus fascians
MKESTMAQTQARFDRVRWEPGVYAIVGATGIGKSAEASKLALSHSAPIVVADRIQCYSDLLVTSGRAFDAKVEGLNRVWLDNRTIHQGNFDPDEAFDRLIKVLTSYVDRGEAVVMEGGSISLILRFAQTISNLPFPAVVNVMPIPDRQHYFAQQCARARQMLRGDSTGRNLLTELAEAWVLGDQHNFIASVAGLDCVLDWCATHSVTPEELANRDLTTEVLDELAASMGGRYVEHGVLQQEIFLRTFGAPGVTAR

SEQ ID NO: 26515 - protein, 690 aa, Caulobacter crescentus CB15
MRRTTAHRAFRRTMNLIAGGKPLASALKAIVQAVEAEDPTILCGILLLDADRRRLLMGAAPSLPTFYNQAIEGVEIGPSVGSCGTAAYLGRRVMVDDIQSSPLWVGYQELAAQAGLAACWSEPIKTSDGAVAGTFAIYHREVSKPNKEDIAFIEAAAQLAAFAIDRRRAEEELAASEARARLLAEQALETSRNLSNFFDVSADLLSISNMQGRFVKVNRAWETALGYPIEALEGVPFLPLLHPEDQQSTRVQINRIEVDDEVNGFVNRYRRADGSYCQLEWRARRCDDLVFGVARDVTERLRIQAEMAEARDAAEAANRAKNDFLANMSHEIRTPLNGVIALAAALDETPLTSKQAEMVAMIRRSGETLERLVSDILDVSKIEAGQMTLQPQAFDLGALVDGLLDVTRLRAKEKGVAVRLERSPTAAGGFLGDSVRIGQVLSNLFSNAVKFTDQGEVIVRVDVEEAGNGQAARLFVEVEDTGVGFDAEKAEMIFQRFNQADSTITRRFGGSGLGLSISKTLVEMMGGEITAQSSPGAGSLFRVTLPLSRTQMGPDAEIDAPRSAAPGEGLKVLLAEDHPINQRVVQLILEPCGAAVTVVENGAQAVEAMASGAFDVVLMDMQMPVMDGLAATRAIRAREGEGQRTPIIMLSANAMDVHRREALQAGADLHVPKPITIAALLDSIGQVMAR

SEQ ID NO: 26516 - protein, 310 aa, Exiguobacterium sibiricum 255-15
MKTLGLLVMAYGTPYKPEDIERYYTHIRRGRKPSPEALAELTERYEAIGGVSPLAQVTIDQAEELHRQLTEKYAGEIEFKLYLGLKHIEPFVEDAVEQMAKDGITEAVTVVLAPHYSTFSIRSYNGRAKEVADKHGIHLASVESWYKEEAFIDWWGTEIRKTFDALPVPEDRAVLVVSAHSLPEKIIANGDPYPEQLKETADLIAARAGVKHMITGWQSAGQTPEPWLGPDVQDLTRDVYEAEGYEAFVYVPVGFVADHLEVLFDNDYECKVVCDELGIHYARPIMPNADPAFMKAVTEAVSKQVGSYVK

SEQ ID NO: 26517 - protein, 734 aa, Bdellovibrio bacteriovorus HD100
MAFKMNRTLTLLLFSTGVAATLTVFILKFLALKEYRETIALYEKTEALISMIQNVEKSTLDLETGQRGYVLTQNEQFLKPYLDANDAIEKEFELLEKSAPATLKASPEYQSMSALVRQKMEISENVINQVRVGKLSSAIALVKSGQGKGVMDQLREAVNTVITNERARVLALKKESEITAQRNQLWQVLGTAMAFLLIIVAYVMTEFEGRQRRQLEKQLVEARNEALQASHMKSSFLANMSHEIRTPMNGILGMTEVLLDQNPESGIKKKIQIIRESALNLLSLINGILDLSKIESGKLELEESYFEPRKLVQEVINTVEYSAKSKGLDLHASVSEQTPAAFSGDVLRLRQILINLLGNAIKFSSEGTVSLIVNSFRSDQSRTMLQIQVKDQGLGMDEATLKKIFSPFEQADKSTTRKFGGTGLGLSITKQLVELMNGKIEVESKPNEGSIFWVTLPLEAINVMPENQRPRESQSYSSSQAPLKILVAEDNMTNQEVVRVMLNRLGHKFDIVNNGKEALEKTLSGTYDIILMDCHMPVMDGYVAAQKITERFPQWCQGPAVIAVTANAIRGDKEACLAAGMCDYLSKPLTLAELDEKLALWSRHLKYAATQVVDPKAMENLRQISPDMADDLMKQILQAWGKEAPAYVVEMIEAEKRGDLKDLADRAHYLKSSCVNAGLRVMGQLCSDIEKQARAGTKEELRYLLLQLRSEYKMACTHLWRSEMLEVPQQGIST

SEQ ID NO: 26518 - protein, 488 aa, Borrelia garinii PBi
MSDFIASKEDDYSKWYLDIVQKAKLADYSPVKGCMVIMPYGYSIWSKIQSILDKKFKETGHENAYFPMLIPYGFLEKEKDHIEGFSPEFAIIKDAGGESLAEPLVLRPTSETIIWNMYSKWIKSYRDLPLKINQWANVVRWEKRTRPFLRTTEFLWQEGHTAHATEEEAVEETLLILDLYKRFMEDYLAIPVFCGKKSEKEKFAGAVSTYSIEALMQDKKALQAATSHYLGLNFAKAFDVKFQDKDGKMRHVFASSWGISTRLIGALIMVHSDEKGLILPPRIAPIEIIVIPIFKKEDEINKKILDYSDCVVHALKKAEFRVEIDKDVRSSPGFRFSSAEFKGIPIRIEVGINDVLLNSVTIMRRDKDRKFKYQISLDSLASKVKVELDSMQKDLFKKALNFRTLNTKEIFRIGKDSYELFKAYMNDHSGFVLSCWCGGLDCENIIKNETKATIRCIPDDFKAKDLTGMACIYCASRAKYFVLFAKSY

SEQ ID NO: 26519 - protein, 615 aa, Legionella pneumophila subsp. pneumophila str. Philadelphia 1
MKSTDPIKIAVLPGDGIGIEVTEATLPVFEVLDVPVILNYGDIGWEFWKKEGAAIPSRTWQLIASSDTVLLGAITSKPQREAKQELSNALKKSNPYYVSPVIQLRQGLDLFANVRPCFSIDDQSKPFNFCIIRENSEGLYCGFDYFPLPKAIHSLLAESQHWQTIPADEASCALRLQSKSGLTRLFDFAFKHAMQTGMPRVTLADKPNVLRESGEFTRKIFESTAQRYPKIQADILNVDAVALWLIKSPEKFGVIVAENMFGDILSDVGAGVMGGLGLAPSANIGDKGSYFEPVHGSGPRIRKNCANPSAMFLTISMLLNHFGYPDRAKKIVNAVMQVIKEKRFITYDLGGHATTTDMANAVIEHCARLNASCLSKDFNPTPKENLIESDTMPNLLQQLINCNSAEISDALDACGIEGGLLSIKPLSQGMKIIGPAYTIQYLPREKKGTAFHNAANYIDKVPKHSVIVIDNNGQIDCTVWGDLLTHTALRNNIMGTVVHGAVRDVESIRSTNYPVFCTGIYMCSGKNRVYKANEQCPLSINGVTINPGDIIFADDNGVLVIPNDRLQEVVNKTIAIRLTEERIKTAIASGSTLEQAREDYCYEQPWLGINKKRES

SEQ ID NO: 26520 - protein, 511 aa, Rhodobacter sphaeroides 2.4.1
MHSARPSGQPQIHCPREDQMLDSVTDLRSLLKDPSLLETRAFVAGEWVDADDGATFEVTNPARGDVICTVPDLGRAETARAIAAAEEAMKEWAARTGKERAQVMRKWFDLMMANQDDLGAILTAEMGKPLAEAKGEIAYGASFIEWFGEEAKRIYGETIPGHMRDKRITVLKQPIGVVGSITPWNFPNAMITRKCGPALAAGCGFVARPAAETPLSALALAVLGERAGLPKGILSVITSSRSSDIGKEMCENPIVRKLTFTGSTEVGRILLRQAADQVMKCSMELGGNAPFIVFDDADLDAAVQGAMASKFRNNGQTCVCANRIYVQSGVYDAFAEKLAAAVKKLKVGDGLVEGTEAGPLINEKAVAKVEEHIRDVLDGGGQVLTGGKRHALGGTFFEPTVVTGVKQEMKVSTEETFGPLAPLFRFETEDEAVGYANDTIFGLASYFYARDVGRITRVQEALEYGIVGVNTGIISTEVAPFGGVKQSGLGREGSRHGIEDYLEMKYICLSI

SEQ ID NO: 26521 - protein, 444 aa, Chlorobium tepidum TLS
MPFIVNTDAERAEMLREIGVENFEALIADIPEEIRLKKALDLFPAMGEPEVKSLLEKMASGNAATCDHVSFLGAGAYDHFIPSAVKTIASRSEFYTAYTPYQAEVSQGTLQAIYEYQSVMCRLYGMDVANASMYDGASALAEAALIALNVTGRNGIVVAGKLHPYTSQVLETYLEAAGDRSIVQNGLENGIGSVEALEALVSSETAAVIVQQPNFYGCLEEVEAIGEIARKNGALFIVSADPVSLGVLEAPGNYGADIAVGEGQSVGNAQSFGGPYLGILTVKQAHVRKIPGRLVGMTKDKDGNDGFILTLQTREQHIRREKATSNICSNQALCALQSVVHLSLLGKEGIRDVANRSMQKAHYLADRIAELPGYSMKFSAPFFREFVVETPVPSATIIEKMLEKKVFAGVDLSAWGEDGLLVAVTEKRTKEELDSFVSELAALG

SEQ ID NO: 26522 - protein, 612 aa, Arabidopsis thaliana
MGFQTASFFLILLFLFYHLPCVPSQQERSRLCKPFQCGDITVGFPFWGENRQSDCGHFSLKLNCNKPSNTTSLTISGHNYSVLHIDNKSNILSLSRQDFSGPFCSASFSSTPLRSDLFQNLQPYRNLTVFYMCDPRRHFFGNFTCPVKGLGSVVQNSTYRKLCDKSFSVTVPTSYVPEEEALNLTHLESVLRKGLEVKLKISEMSGQECVTTDGNSGFTRFCCTNVSGPEISCLTSITTMNNGTYSDNRPFLVTIGTGSILCVCVVLFLAFYLNERRIAKAARIQHLEALGTLRGYNYKQIKKITKSFTEVVGRGGFGTVYRGRLRDGRKVAVKVLKDSKGNCEDFINEVASMSQTSHVNIVTLLGFCYEGSKRAIIYEFLENGSLDQSLNLDVSTLYGIALGVARGLEYLHYGCKTRIVHFDIKPQNVLLDENLRPKVADFGLAKLCEKQESILSLLDTRGTIGYIAPELFSRMYGSVSHKSDVYSYGMLVLEMIGARNKERVQNADPNNSSAYFPDWIYKDLENFDNTRLLGDGLTREEEKNAKKMILVGLWCIQFRPSDRPSMNKVVEMMEGSLDSLDPPPKPLLHMPMQNNNAESSQLSVESSIYSEV

SEQ ID NO: 26523 - protein, 431 aa, Exiguobacterium sibiricum 255-15
MKLEEMLVSVDTFYVLFATLLVFTMQIGFLLLETGMLRAKNAGHVAVKQLISFSVAALAFWAIGFGLTFGDGPGLIGTEGFFLHGGFSSLDWSNVTIDVKFLFQLSFVAVSLAIAWGGFAERAKLSVYLLFGTFFVAVIYPIIARSVWAGGFLGSLGMQDFAGSTVVHLQGGIAALVAALILKKRIGAEKTPLLGHNVIYSVVGAFILWLCWFGFNAGSTLTIADGFFSYVALTTLLATAAGALGALAISFWHRRVADIPSIINGVLAALVAITAACAFVEPWGAVVIGFLAGVITYATSILLARRVDDPLCAFSVHGVAGIWGTLATGFFASPRLVEITGIGQAGLFYGGGFTQLGVQALGVVFAVVVVSVLSYVFLKLLDVTIGLRITREDELRGLDVAEHGQASYDLPAPVSKESHPTYEEESTEKVN

SEQ ID NO: 26524 - protein, 589 aa, Triticum aestivum
MAMAMAVQASWLGGLACIFSTSLLFQILVRPCSNGGGLFFCPQSPNAPSILSSKDRTAYHFQPPKNWINDPCGPMYYNGIYHEFYQYNPDGSFNPNTSYNIVWGHSVSTDLVNWITLEPAIEPDTPNDIKGCWSGSATIVSGDQPVIIYTGVIDIEKHQVQNIALPKNRSDPYLREWTKAGNNPVIQSGVPGLNSGQFRDPTTGWIGPDGLWRIAVGAQLNGYGAALLYKSEDFLNWTRVDHPLYSSNASIMFECLDFFAVLPGSNNGLDMSSAIPNGAKHVLKMGMNFGEDVYVIGVYDLKRDAFVPDTDDSRLWPRIDYGNFYASKTFFDSKHGRRIIWAWTTETDSSSDDIAKGWAGIYSFPRTIWLDNDGKRLLQWPVEEIESLRINEINHQELELKKGDLFEIKGIDTLQADVEIDFELTSIDDADPFNPSWLFDTEKHCREADASVHGGIGPFGLVILASDNMEEQTVVHFRVYRSQKNYMILMCSDLRRSSLTPGLDTPAYGGFFEFDLEKERKISLRTLIDRSAVESFGGGGRVCIMARVYPVSLVDDDHQPHMYAFNNGSATVRVPHLMAWSMRRAQVSV

SEQ ID NO: 26525 - protein, 544 aa, Legionella pneumophila str. Lens
MTKESEIKIPDIGGANQVDVIEILVKEGDQIEVDTPLITLESEKASMDIPSPISGTVTQILVKVGDKVSEGDLIVKAKSDTTANISSSQEQKAEPEKQNLQTRAEEQSVDTKATASTPGSKDIEITIPDIGGANDVDVIDILVKPGMEVEKDQALITLEGDKATMDIPSPYAGKVIEMKIKLGDKVSQGTPILTLKTPGKSETPDIEKSQIKNISEQSIKEIEKPYEEVKSEPISINSLEIAESKSILISAGPAVRRLAREFGVDLSLVQGSGRKSRITKEDLQNYIKVRLSEKTTSGGFSLPSNPAIDFSKFGSIETKPLNKIKKLTGTNVHRSWITIPHVTQFDEADITDLEAFRKSESESAKNQDYKLTLLAFVCSVVCKALHAYPQFNASLDASGENLIYKKYYNIGIAVDTPNGLVVPVIKNVDKLSVIDIAKEMSRLSTKAREKGLTPIDMSGGCFTISSLGGIGGTAFTPIVNSPEVAILGLSRSIIKPIYDNKEFKPRLMLPISLSYDHRVIDGAEAARFTRFLCDCLGDIRRVLL

SEQ ID NO: 26526 - protein, 474 aa, Bacillus thuringiensis serovar konkukian str. 97-27
MKKHLYINGDWKSVNTYKPLYAPYSEETLAEIAQGTEEDVKEAVAAAKNAMKEMNTLSAYDRATILEKVAQKMDERREEFAEIIAKEAAKPIRAARGEVDRTVQTYKFAAEEAKRIYGETLPLDAAPGADGRIAYTIRKPIGVIGAITPFNFPLNLVAHKVGPAIAAGNTVVLKPADQTPLSSYALIELFEEAGLPKGALNIISGPGSTVGEAIVTNDDVASITFTGSPKVGIGIKAKAGLKRVTLELGSNAAVIIDEDVELTDELIERVKWGAFVNNGQVCISVQRVFVHEERMDDFLSKLRKAMETVVVGDPLIEETDVSALISKKDVERIDNWVQEAVKEGANVLYGGNKRDERVFEPTVLTNVPEHVSVQCQEVFGPLMTVNTFKEFDEAIEQVNNSRYGLQAGVFTNNLFKAMRAIDELEVGGVMINDIPTFRVDHMPYGGVKESGTGREGIKYAIEEMTEMKLVCIKK

SEQ ID NO: 26527 - protein, 387 aa, Zea mays
  misc_feature (67)..(67): Xaa can be any naturally occurring amino acid
  misc_feature (95)..(95): Xaa can be any naturally occurring amino acid
RGPAGGTFSRPAGKTLNPSDLPLAPPPPCRRRSHHTRVPRETVASAVASLTTWMKKRAAEARPDLLXADERDDIVVLQLSLRRIPASRSTKPRLXLPMPHPVVGHDGASVCVISDDRTKSRSPSASDLHASMSLHRFPVSEVIPLSTLRTDYRPYESRRRLAASHDLFVADRAILPLLPRVLGKAFYSTKKAPIGVDFTRIGWPEQVRRVLGSAFLYLRSGTCSGIKVGRLDMEEEDIVDNVMAAVEEAVEKVPKKWGNVRALHLKAVDSVALPIYQVVPELGMKIEVPEPDIVGSGEVIEKKANAGADGREVFANVSSKRKRNKKEQIEEGVVMQEEVQVDTEKKKKTKSIMVDDSQEVGKKGRVKGKRATEEGKKRKKSIKGDRL

SEQ ID NO: 26528 - protein, 408 aa, Frankia sp. CcI3
MAIIVQKYGGSSLATIEKIRGVARRVVDTAAAGKQVVVVVSARGRTTDELLGEARALGGHWRSRESDQLVSTGEVVSAATTALALRELGQPAVSMTGGQAGIQVSGEFGSAAVHSVTPDRLRTSLEEGKVVVVAGFQGVDASGDVRTLGRGGSDTTAVALAAALGATCEIYTDVDGVYTADPRLVPRARLLPTVPAPLMHEMAHTGAGILHPRAVDLAATRRIPVQVRNSLGTNPGTVVEVVPGNPLESDGVVAAVTQDEDTTLVMMRGRGEPLDSWAALARMASAKVAPADLFALADSTHGSTLGFTSSPARQIDLAHIARQAGGTVELRDDLGRLSLVGTRMNLCGAVIETLAEILSTHGIRSPWIAISERRISILVPRGGMRRLALTIHDALVLGRGLEAHSSDR

SEQ ID NO: 26529 - protein, 554 aa, Spirochaeta thermophila
MTRISPLQKARYGYVPKLPPVLQDEIARIQAELGQPTEAVADREDLKRLFANTYGKPIATLTRGSNPEAGRRRTVGVILSGGPAPGGHNVICGLFDALKKANRESTLIGFKGGPSGILDDEWIEFTDSLINQYRNTGGFDIIGSGRTKIETPEQFAKALENAKKHGLDALVIIGGDDSNTNAALLAEYFVQQGAPIQVIGIPKTIDGDLKNEYIEASFGFDTATKVYAELIGNIARDAISSRKYWHFIRLMGRSASHIALECALQTHPNVCIVSEEVREKNMTLSQIVDQIVDAVVKRAAKGENFGVVLVPEGLIEFIPEVGALIDELNTLLAKEAEVFNRIDDPRERISWVKGKLSGNNQHVFSSLPETIQAQLLMDRDPHGNVQVSRIETEKLLIEMVSSRLKALKEEGAYKGKFSALNHFFGYEARCAFPSNFDADYCYALGFTAFVLIANGLTGYIAAIKNLARPAVEWKPMGIPLTMMMNMEKRHGKMKPVIRKALVDLEGAPFKRFATQRDAWATESAYVFPGAIQYYGPDDVCNQPTMTLKLEQGLE

SEQ ID NO: 26530 - protein, 123 aa, Prunus persica
MASSGQLLKLVCLVAVMCCMAVGGPKAMAAVSCGQVVNNLTPCINYVANGGALNPSCCTGVRSLYSLAQTTADRQSICNCLKQAVNGIPYPNANAGLAAGLPGKCGVNIPYKISPSTDCKSIK

SEQ ID NO: 26531 - protein, 411 aa, Brassica napus
MNALAATNRNFRHASRILGLDSKIEKSLMIPFREIKVECTIPKDDGTLVSYVGFRVQHDNARGPMKGGIRYHPEVDPDEVNALAQLMTWKTAVADIPYGGAKGGIGCNPRDLSLSELERLTHVFTQKIHDLIGIHTDVPAPDMGTNAQTMAWILDEYSKFHGHSPAVVTGKPIDLGGSLGREAATGRGVVYATEALLAEYGKSIKGLTFVVQGFGNVGTWAAKLIHEKGGKVVAVSDITGAVRNPEGLDIDALLSHKEATGSLVDFSGGDAMDSNELLIHECDVLIPCALGGVLNKENAGDVKAKFIIEAANHPTDPDADEILSKKGVIILPDIYANAGGVTVSYFEWVQNIQGFMWEEEKVNLELQKYMTRAFHNIKSMCHTHSCNLRMGAFTLGVNRVARATQLRGWEA

SEQ ID NO: 26532 - protein, 545 aa, Staphylococcus aureus subsp. aureus Mu50
MNKDKQLHNDKINLSQLVLLGLGSLIGSGWLFGAWEASSIAGPVAIISWVLGFLVIGTIAYNYIEIGTMFPQSGGMSNYAQYTHGSLLGFIAAWANWVSLVTIIPIEAVSAVQYMSSWPWHWAKPMRYLMENGSISTYGLLAVYLIIVIFSLLNYWSVKLLTSFTSLISVFKLGVPMLTIIMLMLSGFDTSNYGHSASTFMPYGSAPIFAATTASGIIFSFNSFQTIINMGSEIKNPEKNIARGIAISLSISAVLYIILQSTFITSMPQSMLQHSGWNGINFNSPFADLAILLGINWLAILLYIEAFVSPFGTGVSFVAVTGRVLRAMEKNGHIPKFLGKMNEKYHIPRVAIIFNAIISMIMVTLFRDWGTLAAVISTATLVAYLTGPTTVIALRKMGPTMTRPFRAKILKVMAPLSFVLASLAIYWAMWPTTAEVILIIILGLPIYFFYEYRMNWRNTKKQIGGSLWIIVYLIVLSILSFIGSKEFKGLNMIHYPFDFIVIIVVALIFYYIGTTSSFESVYFRRATRINTKMRESLNNESKSSH

SEQ ID NO: 26533 - protein, 181 aa, Solanum tuberosum
MASSIVSSAAVATRSNVAQASMVAPFTGLKSAASFPVTKKNNNVDITSLASNGGRVRCMQVWPPINMKKYETLSYLPDLSDEQLLKEVEYLLKNGWVPCLEFETEHGFVYRENHKSPGYYDGRYWTMWKLPMFGCTDATQVLAEVQEAKKAYPQAWIRIIGFDNVRQVQCISFIAYKPEGY

SEQ ID NO: 26534 - protein, 424 aa, Novosphingobium aromaticivorans DSM 12444
MAQDIVARARQLIEDRIISRAALARAAGLHPNTLRDALSPDWNPTVDTLTKLERAMDDSEDDDFALASVEEIIAEVRNGRMVVLVDDEDRENEGDLLIPAQMATPETINFMATHGRGLICLCLTSDRASNLGLELMSRHNGTRHGTAFTVSIEAREGVDTGISAADRARTIAVAVDATKTRDDLVTPGHVFPLIARDGGVLVRAGHTEAAVDLPRLAGLNPSGVICEIMNDDGTMARLDDLIPFARKHGLKIGTIRDLIEYRRRHDHLVECANQAPFHTDYGGEWTIKTYRNKVDGSAHLVLQKGAVVPGKPTLVRMHAISVLSDVLGQPGPRKRILQRAMTAIGEAGSGVIVLLMPTDPQQLMNEVAGTAGHDMELRSYGIGAQILADLGVHDMVLLTNSHHNLVALEGYGLSIVGEQAIPEA

SEQ ID NO: 26535 - protein, 107 aa, Synechococcus elongatus PCC 6301
MSIYVGNLSYEVTEADLTAVFTEYGAVKRVQLPIDRETGRMRGFGFVEMSADAEEDAAIAALGGAEWMGRGLRVNKAKPREERSGGGSFGGGGGRRGGGGGGGYRNY

SEQ ID NO: 26536 - protein, 445 aa, Geobacillus stearothermophilus
MKSETEREKIEQAYREIEKYRDKVEKDYYRLQYHLMPPVGLMNDPNGLIHWNGVYHVFYQWMPFHTGHGAKFWGHYTSCDLIHWKQEKIALAPSEWYDKDGCYSGSAIDHDGVLTLFYTGNVKDEHGNRQTYQCMAMSKNGIDFEKKGIVVTLPDGYTAHFRDPKVWKKGDKWYMIVGAQSESLDGKAVLFRSQNLRDWEHLGPITGGNSRQLGKFGYMWECPDLFELDGQEVLIVCPQGLEAEAMRYQNVHQSGYFVGRLDYEPAQFLHGPFAELDRGFEFYAPQTMLDAKGRRILIAWMGVPDQDEDKHPTITHRWVHALTLPRELKLKDRKLYQTPVEELQMLRKDKIAYSNVTIANEEMILEGISGDVIELNLENIRLSGGIMEIAIRNTARIIYHSDERVLTLERKSFANGLTEKRQCPFGTFALAAYVFRHVLDGGICE

SEQ ID NO: 26537 - protein, 242 aa, Glycine max
  misc_feature (11)..(11): Xaa can be any naturally occurring amino acid
MAATLEPEKKXLLRHHSEKHFTAGEIVRDIIIGVSDGLTVPFALAAGLSGANATSSIVLTAGIAEVAAGAISMGLGGYLAAKSESDHYARELKREQEEIIAVPDTEAAEVAEIMAQYGIEAHEYAPVVSALRKNPQAWLDFMMKFELGLEKPDPRRALHSAMTIAIAYILGGVVPLLPYMFIPEAAEAVVFSVLVTLGALLNFGYAKGHFTGNKPFRSALETALIGAIASAAAFGLAKAFHP

SEQ ID NO: 26538 - protein, 352 aa, Brucella suis 1330
MSGTDKVRVNVSQTAQTPLHTSAKLPKVGVLLVNLGTPDGTSYGPMRRYLAEFLSDRRVIEWSRLIWYPILYGIVLNTRPRRSGRLYDRIWNHENNESPLRTYTRAQGEKLAKALSDQPNVVVDWAMRYGQPSIESITDRLLQQGCERIVIFPLYPQYSATTTATVNDKFFEALMKKRFMPAIRTVPSYEAEPVYIDALARSVEKHLATLSFKPEVILTSYHGIPKSYSDKGDPYRQQCLETTRLLRERLGLGEDEMRATFQSRFGPEEWLQPYTDETVKELAKNGVKSVAVLNPGFVADCLETVDEIGNEAAEEFLENGGENFSHIPCLNDSEEGMKVIETLVRRELLGWV

SEQ ID NO: 26539 - protein, 149 aa, Rhodopseudomonas palustris CGA009
MRYLHTMLRVRNLDTALEFFVGALGLKEVRRIDNDKGKFTLLFLCAPEDEELVKQSKGRPAPTIELTHNWDEESYGEDRFFGHLAFEVDDIYATCERLMKLGITINRPPRDGQMAFVRSPDLQSVELLQKGEALPPQEPWASMPNTGHW

SEQ ID NO: 26540 - protein, 242 aa, Zea mays
MRKAYRDSIKVLEADIQHANTLASEFPRDYDGACLQMRLSYSPAAHIFLFLVQWTDCSLAGALGLLRILIYKVYVDGTTTMSTHERKASIKEFYAVIFPSLLQLQRGITDVEDKKQKAVCMEKYRKKDEDGRDTLSDIDVEREEECGICMEMNSKVVLPNCTHAMCIRCYQDWSSRSQSCPFCRDNLKKTCPSDLWIYVEDQDVVDMETVSSENLRRLFMYISKLPLIVPDVIFSVYDSHIK

SEQ ID NO: 26541 - protein, 357 aa, Glycine max
  misc_feature (208)..(208): Xaa can be any naturally occurring amino acid
LEGISTALTICCVLYMLVAAVLVGLVPYYELNSDTPISSAFSSYGMQWAVYIITTGAVTALFASLLGSILPQPRVFMAMARDGLLPHFFSDIHKGTQIPLKSTIVTGVFAATLAFFMDVSQLAGMVSVGTLLAFTTVAVSVLIIRYVPPDEVPVLSSLLTSVDPLLRHSGGDIGEDGAIIYVDSFSYCENRYPVIGDPLIFKEPVLGXDNGKARRKLASWTIALLCIGILIVTSAASADWCPRILRLTLCGMGGILLLCSIIVLACIKQDDNRHSFGHSGGFACPFVPFLPAACILINTYLLIDLGVGTWLRVSVWMLIGVLVYLFYGRSHSSLLHAIYVPSAYADEIHRSQAIHLA

SEQ ID NO: 26542 - protein, 415 aa, Vibrio harveyi
MSKRRVVVTGMGMLSPVGNTVESSWKALLEGQSGIVNIEHFDATNFSTRFAGLVKDFDCTEYMSKKDARKMDLFIQYGIAAGIQALDDSGLEITEENAARVGVAIGSGIGGLDLIEAGHSALVEKGPRKVSPFFVPSTIVNMVAGNLSIMRGLRGPNIAISTACTTGLHNIGHAARMIAYGDAEAMVAGGAEKASTPLGMAGFGAAKALSTRNDEPQKASRPWDKGRDGFVLGDGAGVMVLEEYEHAKARGAKIYAELVGFGMSGDAYHMTSPSEDGSGGALAMEAAMRDANITGTQVGYVNAHGTSTPAGDVAEIKGVKRALGEEGSKQVLVSSTKSMTGHLLGAAGSVEAIITVLSLVDQIVPPTINLDDPEEGLDIDLVPHTARKVDMEYAICNSFGFGGTNGSLVFKKIAE

SEQ ID NO: 26543 - protein, 510 aa, Mycobacterium tuberculosis CDC1551
MATQISHFIDGQRTAGQSTRSADVFDPNTGQIQAKVPMAGKSDIDAAVASAVEAQKGWAAWNPQRRARVLMRFIELVNDTIDELAELLSREHGKTLADARGDVQRGIEVIEFCLGIPHLLKGEYTEGAGPGIDVYSLRQPLGVVAGITPFNFPAMIPLWKAGPALACGNAFVLKPSERDPSVPVRLAELFIEAGLPAGVFQVVHGDKEAVDAILHHPDIKAVGFVGSSDIAQYIYAGAAATGKRAQCFGGAKNHMIVMPDADLDQAVDALIGAGYGSAGERCMAISVAVPVGDQTAERLRARLIERINNLRVGHSLDPKADYGPLVTGAALARVRDYIGQGVAAGAELVVDGRDRASDDLTFGLPEGDANLEGGFFIGPTLFDHVAAHMSIYTDEIFGPVLCMVRARDYEEALRLPSEHEYGNGVAIFTRDGDAARDFVSRVQVGMVGVNVPIPVPVAYHTFGGWKRSGFGDLNQHGPAAIQFYTKVKTVTSRWPSGIKDGAEFVIPTMS

SEQ ID NO: 26544 - protein, 104 aa, Arabidopsis thaliana
  misc_feature (93)..(93): Xaa can be any naturally occurring amino acid
GTQPSGPWVSFMLFSVLLVASPAKATRGVLLNGLKSSVAFQATRRVNTNFPSLTGNGGGVNCLQGWPPIGKKNLETFFNLPDLTDSKWVKEVXYLIRNRWFPWL

SEQ ID NO: 26545 - protein, 478 aa, Methylococcus capsulatus str. Bath
MQCRDHSTHLVSLPNSQGPAVPFTMRRPVRPPSVPMSRYRTAPLATTELPPGIPFIIGNELAERFSYYGMRAILVVFMTRYLVDAAGNPAPMQEGEAKGYFHLFVSLTYFTPFLGALLADGVLGKYRTIIALSLVYCLGHFALALDDTRTGLLLGQSLIALGAGGIKPCVSAHVGDQFGQSNRHLLSQIYGWFYLAINLGAFVSMLLIPWLLERHGASVAFAVPGLLMLIATLVFWAGRHRFVHIPPGGMRFIREAWSSEGRRGVGRLIGVFLFITMFWALFDQTGSSWVLQSQRMDRVLFGHAILPSQIQAANPLLIVLLTPFFHHLLYPALARLIPMTALNKIALGLSFTVLAFALAAWIQMRIDTGLKPSIGWQLLAYLLLTSAEVMVSITSLEFAYTQAPLTMKSFVMALYLGAVALGNLFTALVNFWIERSKTPWLDGAGYFWFFTGLMLATALGFFAYSRNYREELHLQTER

SEQ ID NO: 26546 - protein, 310 aa, Physcomitrella patens
MMAMAVGELGLSLKSAATPVAAAAATAREKSSVQTGPSKASASAHFRTRISQKADHRSSNYFGRVLGFGVEAPNTSTSSFSIRASSAAAEKAKARYPGEKKGFVEEMRFVAMKLHTKDQSKEGEKEADVQPIGQWQPTIEGYLKFLVDSKEVYDTMETIVQKAAHPSYELFRNTGLERSERLAKDLEWFASQGHAIPKAGVDGTTYAKYLTELSETDVPAFICHFYNVYFAHSAGGYFIGKKVAKMILDGRELEFYKWDGELFQLLGAVKENLNKVAEEWSRDEKNNCLKETENSFKYSGKILRLIASPQ

SEQ ID NO: 26547 - protein, 523 aa, Bradyrhizobium sp. BTAi1
MSSTTPSDKDRVVIFDTTLRDGEQCPGATMTFEEKLNIAAMLDGMGVDVIEAGFPIASDGDFEAVNEIAKRTQNAVVCGLSRAGAKDIDRCAEAIRPAKRGRIHTFLSTSPVHMKYKLQMEPQAVFELVVSSVTRARNHTDDVEWSSEDGTRTEFDFLCRCVEAAIKAGATTINIPDTVGYAVPEEYYDLFKRVRETVPNSDKAVFSVHCHNDLGMAVANSMAGIRAGARQIECTINGIGERAGNAALEEVVMAMRVRNDKLPFWNKIDTTQLTHASKVVSAATSFPVQYNKAIVGRNAFAHESGIHQDGMLKNAQTYEIMLPETVGVKQTSLVMGKHSGRHAFIHKLEEMGHKLAGNQVEDAFVRFKALADRKKHIYDEDIEALIDEGMVSAHDRIKLLSLSVIAGTRGPQRATMKLDVDGVTKIEESEGNGPVDAVFNCIKSLVPHEAKLELYQVHAVTEGTDAQAEVSVRLSQDGRSMTARAADPDTLVASAKAYLGALNKLVMKRQRDVAQGAAAAAAS

SEQ ID NO: 26548 - protein, 381 aa, Streptococcus pyogenes M49 591
  misc_feature (81)..(81): Xaa can be any naturally occurring amino acid
MYGDLMTCFEQLLTQLKDWTDVYFNYDESGYGRLRDQKAAQFFKKNGIAVHTYQDHYLHGSQEIINQSGQPYKVFTPYYRXWQNYPKETPIKVELSQGRWLNLETPDDVLRTVESFKDEKYQDVATFDEASKQLNRFIQDQLAAYHANRDFPAQLGTSRLSPFLRIGAIGIRTVYHAVRQAPNSLGQATFLKELAWRDFYNMVYVAYPDQKTQPIQKAFSQIEWVNNPDWFQLWKEGKTGYPIVDAAMLQLQKTGWMHNRLRMIVASFLTKDLLCDWRLGEQYFQQQLIDYDAASNIGGWQWAASTGTDAVPYFRIFNPVTQGKRFDPKGEFIKAYLPQLEHVPEKYLHEPWKMPKNLQESVSCIIGTDYAQPIVDHAKQR

SEQ ID NO: 26549 - protein, 479 aa, Bacillus thuringiensis serovar konkukian str. 97-27
MTTSNTYKFYLNGEWRESSSGETIEIPSPYLHEVIGQVQAITRGEVDEAIASAKEAQKSWAEASLQDRAKYLYKWADELVNMQDEIAEIIMKEVGKGYKDAKKEVVRTADFIRYTIEEALHMHGESMMGDSFPGGTKSKLAIIQRAPLGVVLAIAPFNYPVNLSAAKLAPALIMGNAVIFKPATQGAISGIKMVEALHKAGLPKGLVNVATGRGSVIGDYLVEHEGINMVSFTGGTNTGKHLAKKASMIPLVLELGGKDPGIVREDADLQDAANHIVSGAFSYSGQRCTAIKRVLVHENVADELVSLVKEQVAKLSVGSPEQDSTIVPLIDDKSADFVQGLVDDAVEKGATIVIGNKRERNLIYPTLIDHVTEEMKVAWEEPFGPILPIIRVSSDEQAIEIANKSEFGLQASVFTKDINKAFAIANKIETGSVQINGRTERGPDHFPFIGVKGSGMGAQGIRKSLESMTREKVTVLNLV

SEQ ID NO: 26550 - protein, 317 aa, Clostridium acetobutylicum ATCC 824
MKIFRKKSLDKMMVSAEKTHLKKTLKTKDIAALGIGAVVGVGIFVATGTGAHKAGPGIIISFLLAGIVACLCGLCYSELATMFPVSGSTYSYAYITFGEIVAMIVGWCLTSEYLVACSAVASGWSGTFIGILKNAGIVLPKVITASPSKGGIVDLPAVLITLILTYILYYGMKESSRVNNIIVIVKIAIIVMFLVLGATHIKMTNYKPFAPFGFKGIFAGASVIFFSYIGFDAISTTAEEAENPGRDVSRGLIICLAVVSILYISVAFVLTGMVHYDKIVTEDAVPAALASVGIRWGSALVGIGAILGMISTMIAVL

SEQ ID NO: 26551 - protein, 377 aa, Striga asiatica
MAEAEDIQPLVCDNGTGMVKAGFAGDDAPRAVFPSIVGRPRHTGVMVGMGQKDAYVGDEAQSKRGILTLKYPIEHGIVSNWDDMEKIWHHTFYNELRVAPEEHPVLLTEAPLNPKANREKMTQIMFETFNSPAMYVAIQAVLSLYASGRTTGIVLDSGDGVSHTVPIYEGYALPHAILRLDLAGRDLTDHLMKILTERGYSFTTTAEREIVRDIKEKLAYIALDYEQELETAKTSSAVEKNYELPDGQVITIGAERFRCPEVLFQPSMIGMEAAGIHETTYNSIMKCDVDIRKDLYGNIVLSGGTTMFPGIADRMSKEITALAPSSMKIKVVAPPERKYSVWIGGSILASLSTFQQMWIAKAEYDESGPSIVHRKCF

SEQ ID NO: 26552 - protein, 377 aa, Striga asiatica
MAEAEDIQPLVCDNGTGMVKAGFAGDDAPRAVFPSIVGRPRHTGVMVGMGQKDAYVGDEAQSKRGILTLKYPIEHGIVSNWDDMEKIWHHTFYNELRVAPEEHPILLTEAPLNPKANREKMTQIMFETFNAPAMYVAIQAVLSLYASGRTTGIVLDSGDGVSHTVPIYEGYALPHAILRLDLAGRDLTDHLMKILTERGYSFTTTAEREIVRDIKEKLAYIALDYEQEMETAKTSSAVEKNYELPDGQVITIGAERFRCPEVLFQPSMIGMEAAGIHETTYNSIMKCDVDIRKDLYGNIVLSGGSTMFPGIADRMSKEITALAPSSMKIKVVAPPERKYSVWIGGSILASLSTFQQMWIAKAEYDESGPSIVHRKCF

SEQ ID NO: 26553 - protein, 337 aa, Phanerochaete chrysosporium
MPVKAGINGFGRIGRIVLRNALLHGDIDVVAVNDPFIDLEYMVYMFKYDSVHGRFKGSVEAKDGKLYVEGKPIHVFAEKDPANIPWGSVGAEYIVESTGVFTTTEKASAHLKGVCKKVIISAPSADAPMFVCGVNLDAYDSKYKVISNASCTTNCLAPLAKVIHDKFGIVQGLMTSVHATTATQKTVDGPSNKDWLGGRSVGNNIIPSSTGAAKAVGKVIPSLNGKLNGLAFRVPTVDVSVVDLVVRLEKPASYDEIKQAIKEASETTHKGILGYTEEKVVSTDFTGNDNSSIFDRDAGIALNKTFVKLISWYDNEWGYSRRCCDLLGYAAKVDGAL

SEQ ID NO: 26554 - protein, 180 aa, Lycopersicon esculentum
MASSVISSAAVATRSNVTQASMVAPFTGLKSSATFPVTKKQNLDITSIASNGGRVSCMQVWPPINMKKYETLSYLPDLSDEQLLSEIEYLLKNGWVPCLEFETEHGFVYRENNKSPGYYDGRYWTMWKLPMFGCTDATQVLAEVQEAKKAYPQAWVRIIGFDNVRQVQCISFIAYKPEGY

SEQ ID NO: 26555 - protein, 429 aa, Bordetella bronchiseptica RB50
MSQAPAHSLPSYLDAEHLGPWGIYLQQVDRVTPYLGPLARWVETLKRPKRALIVDVPIEMDNGSIAHFEGYRVQHNTSRGPGKGGVRFHQDVTLSEVMALAAWMSIKNAAVNLPYGGAKGGVRVDPRTLSHSELERMTRRYTSEIGVIIGPSKDIPAPDVNTNAQTMAWMMDTYSMNEGATATGVVTGKPIALGGSLGRVEATGRGVFVVGCEAARDLNLDVSKARIVVQGFGNVGGTAARLFHEAGAKVIAVQDHTGTIHNDGGLDVHKLLAHVGNQGGVAGFTGAQQLADDDFWGLETDFLIPAALEGQINENNAARVRAKVVVEGANGPTTPEADDILRENGVYVVPDVLANAGGVTVSYFEWVQDFSSFFWSEEEINQRLERLMREAYSAVSQVAKEHKVTLRTAAFIVACTRILQARQVRGLYP

SEQ ID NO: 26556 - protein, 385 aa, Triticum aestivum
IRHEALQMGEYVSNVSHGIDTFSIREPLGVCAGICPFNFPAMIPLWMFPIAVTCGNTFVLKPSEKDPGAAMMLAELAMEAGLPKGVLNIVHGTHDVVNNICDDEAIKAVSFVGSNTAGMHIYSRASASGKRVQCNMGAKNHAIILPDADRDATLNALIAAGFGAAGQRCMALSTAVFVGGSEPWEDELVKRASSLVVNTGTANDADLGPVISRQAKDRICKLVQSGADSGARLVLDGREIVVPQFEDGNFIGPTVLADVKSDMECYQEEIFGPVLLLMKAESLDDAIQIVNRNKYGNGASIFTTSGVSARKFQTDIEAGQVGINVPIPVPLPFFSFTGSKASFAGDLNFYGKAGVQFFTQIKTITQQWKESSPQRVSLSMPTSQK

SEQ ID NO: 26557 - protein, 106 aa, Flavobacteria bacterium BBFL7
MALEITDANFEETVLNSEKPVLVDFWAAWCGPCRMVGPIIDEVATDYDGKAVVGKMDVDANQEFAAKYGVRNIPTVLVFQNGEVVGRQVGVAPKNAYTDAIDALLN

SEQ ID NO: 26558 - protein, 418 aa, Glycine max
MAMLHPLTNPNANELLSLSCSSIFHHNALTTSVSLNPRTTKIAPQRLSRRFGSVRCSYAYVDNAKIKVVGIGGGGNNAVNRMIGSGLQGVDFYAINTDAQALLNSAAENPIKIGEVLTRGLGTGGNPLLGEQAAEESRDAIADALKGSDLVFITAGMGGGTGSGAAPVVAQISKEAGYLTVGVVTYPFSFEGRKRSLQAFEAIERLQKNVDTLIVIPNDRLLDIADEQMPLQDAFRLADDVLRQGVQGISDIITVPGLVNVDFADVKAVMKDSGTAMLGVGVSSGKNRAEEAAEQATLAPLIGSSIQSATGVVYNITGGKDITLQEVNRVSQVVTSLADPSANIIFGAVVDDRYTGEIHVTIIATGFSQSFQKKLLTDPRAAKLLDKVAEGQESKAVPPPLKSSNKVESRPSPRKLFL

SEQ ID NO: 26559 - protein, 530 aa, Arabidopsis thaliana
MAEEAKSKGNAAFSSGDYATAITHFTEAINLSPTNHILYSNRSASYASLHRYEEALSDAKKTIELKPDWSKGYSRLGAAFIGLSKFDEAVDSYKKGLEIDPSNEMLKSGLADASRSRVSSKSNPFVDAFQGKEMWEKLTADPGTRVYLEQDDFVKTMKEIQRNPNNLNLYMKDKRVMKALGVLLNVKFGGSSGEDTEMKEADERKEPEPEMEPMELTEEERQKKERKEKALKEKGEGNVAYKKKDFGRAVEHYTKAMELDDEDISYLTNRAAVYLEMGKYEECIEDCDKAVERGRELRSDFKMIARALTRKGSALVKMARCSKDFEPAIETFQKALTEHRNPDTLKKLNDAEKVKKELEQQEYFDPTIAEEERKKGNGFFKEQKYPEAVKHYSEAIKRNPNDVRAYSNRAACYTKLGALPEGLKDAEKCIELDPSFTKGYSRKGAIQFFMKEYDKAMETYQEGLKHDPKNQEFLDGVRRCVEQINKASRGDLTPEELKERQAKAMQDPEVQNILSDPVMRQVKAVASIVF

SEQ ID NO: 26560 - protein, 479 aa, Shigella flexneri 2a str. 301
MSVPVQHPMYIDGQFVTWRGDAWIDVVNPATEAVISRIPDGQAEDARKAIDAAERAQPEWEALPAIERASWLCKISAGIRERASEISALIVEEGGKIQQLAEVEVAFTADYIDYMAEWARRYEGEIIQSDRPGENILLFKRALGVTTGILPWNFPFFLIARKMAPALLTGNTIVIKPSEFTPNNAIAFAKIVDEIGLPRGVFNLVLGRGETVGQELAGNPKVAMVSMTGSVSAGEKIMATAAKNITKVCLELGGKAPAIVMDDADLELAVKAIVDSRVINSGQVCNCAERVYVQKGIYDQFVNLLGEALQAVQFGNPAERNDIAMGPLINAAALERVEQKVARAVEEGARVALGGKAVEGKGYYYPPTLLLDVRQEMSIMHEETFGPVLPVVAFDTLEDAISMANDSDYGLTSSIYTQNLNVAMKAIKGLKFGETYINRENFEAMQGFHAGWRKSGIGGADGKHGLHEYLQTQVVYLQS

SEQ ID NO: 26561 - protein, 108 aa, Brassica napus
MQDQLVCHGCRNTLMYPRGATNVRCALCHIVNMVPLHPHPPPPPPPHHAHAGMDLAHIVCGGCRTMLMYTRGASSVRCSCCQTVNLVPGPPPSNQVAHINCGNCRTTL

SEQ ID NO: 26562 - protein, 340 aa, Corynebacterium glutamicum
MKLAVIGGDGIGPEVTAEALKVLNAVRDDIETTDYDLGARRYLKNGELLTDEDLASLREHDAILLGAIGAPGSVPPGILERGLLLKMRFALDHHVNLRPSKLYDGVESPLRNPGKIDFVVVREGTEGAYTGNGGAIRVGTPHEIANETSVNTRYGAERVIRYAFELAQSRRKKLTLVHKTNVLVHGGGLWQRTVDEVAKEYPEVAVDYNHIDAATIYLVTDPSRFDVIVTDNLFGDILTDEAGAVSGGIGLAASGNIDATGTNPSMFEPVHGSAPDIAGQGIADPTAAILSAAMLLRHLGDEDNAVRIETAIAADVAGRDNSQPISTTEVGDRIVKALQS

SEQ ID NO: 26563 - protein, 450 aa, Methanosarcina mazei Go1
MTFTGVLTSQFLIQASELFFRAVNTNIIKNNHKFLKPKKSRETATMSESEQYSRNTLMDFIDYRPLDIEICDVTLRDGEQTPGVVFSKEQKLAVASELDSMGIEVIEAGFPVVSADEKEIVKEIANQGFNSRICCLSRAVKGDVDAALECDVDIVSIFIAMSDMHLKYKYHRSLEDMLGCAKEAIEYATDHGLKVRFAAEDASRTPVERLKQAFKEVENEYKVQYVSLADTVGILNPTTTNYLVSEIFKSVNTAICIHCHDDLGMATANTLAAAEAGAKQLHTTVNAIGERAGNASLEEVLVALRVQYGIERYDTTKLNSLSEMVSEYSGITPSVNKAVVGKNAFTHESGIHVAAILEEPRTYELFLPEMVGGKRNLVVGKHTGKKALKGIINSIGFCLEREELCALIEKVKVCTEEKHKSISRDQLERLITQVKQEQKPSGSEKEKFSI

SEQ ID NO: 26564 - protein, 131 aa, uncultured archaeon GZfos27E6
MHEKNRTIEIFDTTLRDGEQTPGISFTTEQKRTIARQLDALGVDIIEAGTPITSKEEKEVVQLICDEGLSAKICGLARILTQDIDACVDCGVDMIHIFVPSSEIQREHTTKMSEEEVKEQAYKMTRYVKER

SEQ ID NO: 26565 - protein, 309 aa, Oryza sativa
MATGLSGGAMTSFAVKKPLLAAAVRRRSWPPPSGRALPFSPLTRTPRSRGLGTVTCFVPQGTESQQAPAPSPPPTVPVPVPSLEEEAAAAAARRIAERKARKLSERRTYLVAAVMSSLGFTSMAVAAVYYRFHWQLEGGDVPMTEMFGTFALSVGAAVGMEFWAQWAHRSLWHASLWHMHESHHRAREGPFELNDVFAITNAVPAISLLAYGFFHRGIVPGLCFGAGLGITLFGMAYMFVHDGLVHRRFPVGPIANVPYFRRVAAAHKIHHTDKFEGVPYGLFLGPKELEEVGGLEELEKELARINRSL

SEQ ID NO: 26566 - protein, 366 aa, Arabidopsis thaliana
MALSAIGFEGYEKRLEVTFFEPSIFQDSKGLGLRALTKSQLDEILTPAACTIVSSLSNDQLDSYVLSESSFFVYPYKVIIKTCGTTKLLLSIPPLLKLAGELSLSVKSVKYTRGSFLCPGGQPFPHRSFSEEVSVLDGHFTQLGLNSVAYLMGNDDETKKWHVYAASAQDSSNCNNNVYTLEMCMTGLDREKAAVFYKDEADKTGSMTDNSGIRKILPKSEICDFEFEPCGYSMNSIEGDAISTIHVTPEDGFSYASFEAVGYDFNTLDLSQLVTRVLSCFEPKQFSVAVHSSVGANSYKPEITVDLEDYGCRERTFESLGEESGTVMYHTFEKLGKYCGSPRSTLKCEWSSNNSCSSEDEKDEGI

SEQ ID NO: 26567 - protein, 932 aa, Brucella suis 1330
MTEFLPFVARHIGPRHEDERAMLAALGLPSMETLITQAVPASIRLNRALNLPAALSEADALAELGTIMGRNVVKKSFIGAGYHGVHTPPVIQRNLFENPAWYTAYTPYQSEISQGRLELLFHFQTLVAELTGLPVACASLLDEATAVAEAIGVACRHHRDKRSRILLAGELHPQTVDVVNTRAEPLGWEIATGSDVDDNTAAIVVPWPDTRGVYGDFAKVIADAKAKGALVIAVADPLALTIMEAPARWGADMAVGSMQRYGVPMGFGGPHAAYLAVSEALTRIIPGRIVGQSVDAHGRAAYRLALQTREQHIRRDKATSNICTAQALLANMAAAFAIWHGPAGLQAIATRVAALAARFAAALKAAGVEIAGESLFDTVTAKVPGKAAAIAAEADKGGRLIRIIDADTVGVTFDETSTEEDLTALASLFGAKPVGGDTVLVPGKERGEGFLTQEVFHSHRSETEMMRFLRRLADKDLALDRAMIPLGSCTMKLNAAAEMMPVSWNTVANLHPFAPAEQVQGYAKMTSDLEAWLCEITGFAGVSLQPNAGSQGEYAGLMAIRHYHQAWGQGHRNICLIPSSAHGTNPASASMAGMSVVVVNCRPDGDIDIDDLKAKAEKHRDNLAAFMITYPSTYGVFEEGIKAFCEIVHDNGGQVYFDGANLNALVGLARPADIGADVCHMNLHKTFCIPHGGGGPGVGPIGVAKHLVPYLPGHVEAGSEHAVAAAQFGSASILVITWMYIRMMGGAGLKKATEAAILNANYIAHRLKGVYPILYTGAHDRVAHECIVDTRVLKDSAGITVEDVAKRLIDYGFHAPTMSWPVAGTLMIEPTESEPKLEIDRLCDAMIAIAGEAKKVADGVWPADDNPLANAPHTASDTLATEWKHPYTREEAVFPGGAFDPTAKYWPPVSRVDNVGGDRNLICSCPPVAAYG

SEQ ID NO: 26568 - protein, 516 aa, Aspergillus ficuum
MLNPKVAYMVWMTCLGLTLPSQAQSNDYRPSYHFTPDQYWMNEPNGLIKIGSTWHLFFQHNPTANVWGNICWGHATSTDLMHWAHKPTAIADENGVEAFTGTAYYDPNNTSGLGDSANPPYLAWFTGYTTSSQTQDQRLAFSVDNGATWTKFQGNPIISTSQEAPHDITGGLESRDPKVFFHRQSGNWIMVLAHGGQDKLSFWTSADTINWTWQSDLKSTSINGLSSDITGWEVPDMFELPVEGTEETTWVVMMTPAEGSPAGGNGVLAITGSFDGKSFTADPVDASTMWLDNGRDFDGALSWVNVPASDGRRIIAAVMNSYGSNPPTTTWKGMLSFPRTLSLKKVGTQQHFVQQPITELDTISTSLQILANQTITPGQTLLSSIRGTALDVRVAFYPDAGSVLSLAVRKGASEQTVIKYTQSDATLSVDRTESGDISYDPAAGGVHTAKLEEDGTGLVSIRVLVDTCSVEVFGGQGEAVISDLIFPSDSSDGLALEVTGGNAVLQSVDVRSVSLE

SEQ ID NO: 26569 - protein, 142 aa, Brassica napus
MILRKVWGSVWSRSSSGKDSASHSAIQVPLSPSSSSSLGAFDHLPMDILIQILMLVEPRDAVKLSLTCKAWRCLGGDNRLWIFYLQCSQESWDSIFFAETSLRSGYPLRMLSSQSGELSFMRIYGQRARVPGSIIIDGGSGL

SEQ ID NO: 26570 - protein, 356 aa, Chlamydia muridarum Nigg
MNQNPITRLQHLLSGYALDAFLIEKDEDISYFLQDQAKSGALLVSSDEVVFFVSPLDRDLYAHIQDVSLVFCSKNIDQHLFAYIEEKGLKTIGFDSEYTSYGTAQKRMRSGLTFSPQSLVTEKLRCVKSPNEIQKMMRAAEIGSAGYDFVLAALRPGITEKELVRLLHVFWANLGIEKLSFPPIIAFGENAAFPHAIPTNRSLKKGDVVLIDIGVCYEGYCSDMTRTVAFGEAPEQQLLDGYLAVAEAQRRSIELCREGVSCRAVHEEAVRVLREYGMEKAFIHGLGHGVGREVHEYPRLSLFSDAELQLNMAVTVEPGVYFPGVGGIRIEDTIVIGINENLNLTNRKVSPEIIII

SEQ ID NO: 26571 - protein, 914 aa, Chlorobium tepidum TLS
MITSTTSVVDFDKALLDFRYLLDCFIEVLENLGQEALARHIGGDSKTPIREFDCAERAIQAWSIVFQLLNMAEENSAAQYRRRIESSEGVESLSGLWGEALRHLKNLGVTEAEIAAELPQIEVEPTLTAHPTEAKRRTVLEQHRELYLLLVKRENRMWTPAERDKIRTDIKVVLERLWRTGEILLQKPEVSAERQNVLHYLHTIFPDILPILDNRLEKAWAVAGFDPAITADPRNLPRLSFGSWVGGDRDGHPLVTAETTQETLQEMRRHAIELVHRQLERLASMLSLSGRLQSPSRAMEERMETLRHKLGKAGALAFERNLHEPWRQFVNLMIAALPAGTTENEHYCYRRHTELLKDLELLMSSLTAINASTIARGDVAPVYRIVQTFGFHLGRLDIRQNSRFHDLALSQLMMAAGLDGKGFPEWSEEARLEFLERELLSPRPFTHPDMHAGPEAETVIACYRVLFDHYRQFGPDGIGSLIVSMTRNLSDLLVIYLFAREVGLMVRHGDGDACPIPVVPLFETIDDLERSHDILDRFLAHPVTRRSIALQQELHGRQKPVQQVMVGYSDSNKDGGIVTSLWSLYRSEERLIETGRKHGVDILFFHGRGGSISRGAGPTHRFIRAQPHGSLDAGLRVTEQGETISQKYANRISAAYNLELFLAGVTEARLVHRKEGYRPHPLEKVMDTLARSSNKAYRQLIEADGLLEFFRQATPIDIIESSRIGSRPARRTGSQSLEDLRAIPWVFSWNQARFGISGWYGAGSALEELRATDPETFEVMRKSDFSWAPFHYIINNIATSILSVDPWIMEQYASLVENKNIRENLLGMIQAEYLRTMRLLDLLYGGPLREKHFNVARFIETRQEGLSKLHRLQIDLLKSWRSAKASGNEQQADALLPELFLTVNAISSGLRTTG

SEQ ID NO: 26572 - protein, 648 aa, Triticum aestivum
MESSRGILIPGTPPLPYAYEPLPSSSADANGQEDRRITGGVRWRAWAAVLAVGALVVAAAVFGASRVDRDAVASSVPATAEHGVLEKASGPYSASGGFPWSNAMLQWQRTGYHFQPEKNYQNDPNGPVYYKGWYHFFYQHNPGGTGWGNISWGHAVSRDMVHWRHLPLAMVPEHWYDIEGVLTGSITVLPDSRVILLYTGNTETFAQVTCLAEAADPSDPLLREWVKHPANPVVYPPPGIGMKDYRDPTTAWFDNSDNTWRIIIGSKNDTDHSGIVFTYKTKDFVSYEMIPGYLYRGPAGTGMYECIDLYAVGGGRKASDMYNSTAKDVLYVLKESSDDDRRDYYALGRFDAAANTWTPIDTEQELGVALRYDYGRYDASKSFYDPVKQRRIVWGYVVETDSWSADAAKGWANLQSIPRTVELDEKTRTNLIQWPVEELDTLRINTTDFSGITVGAGSVVSLPLHQTSQLDIEASFRINASAIEALNEVDVGYNCTLTSGAATRGALGPFGILVLANVALTERTAVYFYVSKGLDGGLRTHFCHDELRSTHATDVAKEVVGSTVPVLDGEDFSVRVLVDHSIVQSFVMGGRMTATSRAYPTEAIYAAAGVYLFNNATGASITAEKLVVHDMDSSYNRIFTDEDLLVLD

SEQ ID NO: 26573 - protein, 601 aa, Alvinella pompejana epibiont 7G3
MERLFTKDTQAIFWNNNKTAIQRMLDYDYVIKRDKPSVAGIVAPTSSNKFEKFFWGADEIMVPIYRNTADAKKAQPQADVLLNFASFRTAYNVTNEALDIGGFRVIMITAEGIPERLARAMNQKARDLGVTVIGPATVGAIAPGAFKIANIGGTIQNIIKSKLHRAGSCGLVTRSGGLFNELSNIISLNADGIAEGVAIGGDRFVGSTFIDNLLRMEKNPDVKYMVLLGEVGGIEEYKVIEAVKSGEITKPIIAWCIGTIAKYYDSGVQFGHAGASANSDMETAEAKNKAMKEAGIHVPSSFNDLPATIKEVYESLNLEPIPEPEMNKIPSYRRPKQFICTISDDRGEEATYAGYPISSVALPSTGKSIGDVISLLWFKKVYPKWATDFIETVLKTVADHGPAVSGAHNAKVTARAGKSVVESLVTGLLTIGPRFGGAIDGAAEYFKYADDNNLSPKEFLSYMKKKGIPIPGIGHRIKSLKNPDLRVKGLMDYAKENFPATPLLDYARTVEALTTSKKENLILNVDGTIGILMVDMWRALGYSEKEIDEFISSGTLNAFFIVGRSIGFIGHVLDEKRLAMPMYRTPWDDILYQVDEAEEIK

SEQ ID NO: 26574 - protein, 278 aa, Archaeoglobus fulgidus
MKLVVCSESDTAGQNIKDNLLTFADFEEKDVGEFKLYLSDEFYIAETKERLIYADHIDEKLAKYIDFEEILFASRHSSKDGRKIFTVHVSGNVGTADFGGKPYSLAKPSPQTMKNYVLALRERLDRKPEFEFTMEVTHHGPSEISKPSAFYEIGSTEEEWKDREAAEVVAEAMLDAIRAEKMDWNVAVGVGGTHYAPRQTEIMLTTTFTFGHNFAKYTFEHLTAEFLVKAVKLSEAEYIIIDEKSVNSAVKKIVNEAAEVAGVEVLKSKKVKKDFRLV

SEQ ID NO: 26575 - protein, 123 aa, Zea mays
MAAPKLATLALAVLLAATVVAPPAAVRAAMSCSTVYSTLMPCLPFVQMGGAMPPQPCCGGIRSLLQQANNTPDRRTICGCLKNVANGANGSGTYISRAAALPSKCGVALPYKISTNVNCNTIN

SEQ ID NO: 26576 - protein, 462 aa, Mannheimia succiniciproducens MBEL55E
MQTLTILLIRGKLMSSTVSSLEDFLSLVAQRDGNQPEFLQAVREVFTSIWPFLEANPQYRSQALLERLVEPERAFQFRVAWTDDKGQVQVNRAFRVQFSSAIGPYKGGMRFHPSVNLSILKFLGFEQIFKNALTTLPMGGGKGGSDFDPKGKSDAEVMRFCQALVAELYRHIGPDTDVPAGDIGVGGREVGYLAGYMKKLSNQAACVFTGRGLSFGGSLIRPEATGYGLVYFAQAMLAEKGDSFQGKTVSVSGSGNVAQYAIEKALQLGAKVVTCSDSAGYVYDEAGFTTEKLAALLDIKNVKRGRVKDYAEQFGLQYFPGERPWGVKVDIALPCATQNELELTDAQKLIANGVQLVAEGANMPTTIEATEALQAAGVLFAPGKAANAGGVATSGLEMAQSSQRLFWSAEEVDQKLHNIMLDIHANCKKYGTDANGNINYVAGANIAGFVKVADAMLAQGVY

SEQ ID NO: 26577 - protein, 644 aa, Triticum aestivum
MESSRGILIPGTPPLPYAYEPLPSSSADANGQEDRRTSGGVRWRSWATVLAVVALVVVAAVFGASRVDRDAVVSSASATAVHGVSGAYSSHGGFPWSNAMLGWQRTGYHFQPEKNYQNDPNGPVYYKGWYHFFYQHNPGGTGWGNISWGHAVSRDMVHWRHLPLAMVPEHWYDIEGVLTGSITVLPDGRVILLYTGNTETFAQVTCLAEAADPSDPLLREWVKHPANPVVYPPPGIGMKDYRDPTTAWFDNSDNTWRIIIGSKNDTDHSGIVFTYKTKDFVSYELIPGYLYRGPAGTGMYECIDMFAVGGGRKASDMYNSTAKDVLYVLKESSDDDRRDYYALGRFDAAANTWTPIDTERELGVALRYDYGRYDASKSFYDPVKERRIVWGYVVETDSWSADAAKGWANLQSIPRTVELDEKTRTNLIQWPVEELDTLRINTTDLSGITVGAGSVVSLPLHQTSQLDIEASFRINASVIEALNEVDVSYNCTMTSGAATRGALGPFGILVLANAALIEQTAVYFYVSKGLDGVLRTHFCHDELRSTHATDVAKEVVGSTVPVLDGEDFSVRVLVDHSIVQSFVMGGRMTATSRAYPTEAIYAAAGVYLFNNATSATITAEKLIVHDMDSSYNRIFTDADLVVLD

SEQ ID NO: 26578 - protein, 1063 aa, Coccidioides immitis RS
MVAPFSVVRLGARQLVSSSLRNASLRPSRVSPLTACRQCLQLVRYQQTQSHRRAVHLSSSGDTENLLPRDLHSPLDTFPRRHIGPGADATEQMLAVLDPPAKNLDEFVKQVLPADILTAKNLSVSEPQAAAELRKDGVLGGLGEKDMVKLLESYKNKIDATGKSFIGCGYYSTVVPPVIQRNVLENPAWYTSYTPYQAEISQGRLESLLNFQTLTADLTGLPVGNASVLDEGTAAAEAMTMSWATLPMNKQKQDGKVFVVSHLCHPQTIAVMRSRAEGFGIRLEIGDIMADNFKLVKDQGDRLIGVLAQYPDTEGGVFDFQSLSDSIHAQGGSFCVATDLLALTVLKAPGEFGADIAFGNAQRLGVPMGFGGPHAAFFACTDKYKRKIPGRIVGVSKDRLGNRALRLALQTREQHIRREKATSNICTAQALLANMTAMYAVYHGPQGLKAIAERIMALTALLRTKLQLLGFNVPVRGNASFDTLVVETKSSAEADAIVGSALSAGLYLRRVSPTKVGISLDEAVGVDELKELLAVFANLSDKKGAETLDLSKDIPSVDVPVDIRRTSSYLTHPVFNTHHSETEMLRYMQHLVSKDLSLAHSMIPLGSCTMKLNATTEMVPVTWPEFSTMHPFTPAQKVEGYVNMVEDLEKQLADITGMAEVTIQPNSGAQGEFAGLRVIKMYQDSLGEPGKRNICLIPVSAHGTNPASAAMAGMKVVPVKCDTGTGNLDVADLRAKCQKHKDELGAIMITYPSTFGVYEPTIKEVCDIVHEYGGQVYMDGANMNAQIGLCSPGEIGADVCHLNLHKTFCIPHGGGGPGVGPIGVAEHLRPFLPSHPLSEPLLAKRPASVDSPPISAAPYGSASILPITFSYINMMGSKGLTHATKITLLNANYLLSRLKQHYPILYTNENGRCAHEFILDVRKFKATAGIEAIDIAKRLQDYGFHAPTMSWPVANTLMIEPTESEPKGELDRFCDALVSIREEIAAIERGEQPKDKNVLKMAPHTQRDLLTGDWDRPYTREKAAYPLPWLLEKKFWPTVTRVDDAFGDQNLFCTCGPVEDTSE

SEQ ID NO: 26579 - protein, 466 aa, Zea mays
MCFVPFFYRVDVIDERNACSHFEATKSCSREHNSEMRWNYRILIDSIVFSLKKKKKGRPPSMAAEIIRYGPSDVAFVPYGEYWRQGRKLLTTHMLSTKKVQSFRHGRQEEVRLVMDKIRAAATAAPPAAVDLSDLLSGYTNDVVCRAVLGASHRNQGRNRLFSELTEINVSLLGGFNLEDYFPPNMAMADVLLRLVSVKARRLNQRWNDVFDELIQEHVQSRPSGESEESEADFIHVLLSIQQEYGLTTDNLKAILVDMFEAGIETSYLTLEYGMAELINNRHVMEKLQTEVRTTMRSPDGKKLDMLAEEDLGSMPYLKATIKETLRLHPPAPFLLPHYSTADSEIDGYFVPAGTRVLVNAWALGRDRTTWEKPEEFMPERFVQEPGAVDVHMKGKDLRFIPFGSGRRICPGMNFGFATMEIMLANLMYHFDWEVPGSAAGVSMDESFGLTLRRKEKLLLVPRIAS

SEQ ID NO: 26580 - protein, 578 aa, Exiguobacterium sibiricum 255-15
MSWKETYQKWNQFAGLETELKEELTALANDDKAAEEAFYKELEFGTGGMRGEIGVGTNRMNVYTVRKASQGFADFIKAEGDEAVAQGIVIAHDSRHYSPEFALEAAKTLASNGIKAYLFDGLRPTPELSFAVRELRAAGGIVITASHNPPEYNGYKVYGNDGGQLPPKEADDLVSYVDQVADELSIELEAEEVLRANGLIVRVGEQLDDAYQEQLKTIRVLPTIQDELADPLKIVFTPLHGTGLVPVTVGLKSYGFEHVTVVEEQAKPDGAFPTVSSPNPEEHAAFKLAIEYGDRVDADVLLATDPDADRVGVATRDADGEWVVLTGNQTGALLLDYILSQKAAQGTLPKNGFVAKTIVTSELGALIARHYDLHVENTLTGFKFIGEKIKQYNESGEYEYLFGYEESYGYLIGDFCRDKDAVQACLLAAEMTAYHKKEGRTLYEALQAIYEQFGYFEESLRSLTLKGKDGVAQIGRIMDTFREHPPKQVAGEKVILFEDYDASISHDLVKHQPSPINLPKSNVLKFTLEDGSWFCLRPSGTEPKIKFYFSVTSPDAAETTRKRQMIEDEVMQEVEQIQ

SEQ ID NO: 26581 - protein, 116 aa, Arabidopsis thaliana
  misc_feature (14)..(14): Xaa can be any naturally occurring amino acid
  misc_feature (54)..(54): Xaa can be any naturally occurring amino acid
  misc_feature (110)..(110): Xaa can be any naturally occurring amino acid
MRPLLLPVCLVLAXLHCGEAAVSCNPVIADLYPCLSYVTQGGPVPTLCCNGLTXTLKSQAQTSVDRQGVCRCIKSAIGGLTLSPRTIQNALELPSKCGVDLPYKFSPSTXDCDSIQ

SEQ ID NO: 26582 - protein, 412 aa, Frankia sp. CcI3
MTGSSPARFDAAITGLGLVSAAGIGTDATWERVCSGVSTAARDPALAGLPVDFSCRVPDFDGTKLLGRAMAWRLDRFVQLAIVAARQAIADARLDPGTWDGARVGVVIGNSLGGTDTWERQHRSLVEGAPEDVSPLMIPMGMANMVAGCVAIDCQALGPSLVTATACASGSTAVGLARDLLRSDTCDVVIAGGAESALSAGAITGLQRMGALSARRDDPAAASRPFDVARDGFVAGEGAGILVLERPADARARGADVHALVSGFGASSDAYHATAPDPAGAGIERAVRAALRDAGIAGDDVDHVNAHGTSTPLNDVTEARALRRTLGERPLVTSTKGVTGHALAAAGSIEAGLTALALRHGAVPPTANLTDLDPAVDLTVVAGTATTASLDVALSTSLGFGGHNAALVLLAA

SEQ ID NO: 26583 - protein, 755 aa, Pseudomonas anguilliseptica
MLLATDLDGTFLGGDPKDRLSLYQTIAAHPEIRLAYVTGRSLESVLPLLADPTLPQPDFIISDVGASLVHGDSLQPIQPLQSAVDALWPGDSQVASAIERFALERQDVPQVRRCSYFCNPEQAANPELLTIAESLGCDLLYSAERYLDFLPKGVNKGSSLQALIDWLELDNDQVLTAGDTLNDLSMLSGQFKGVCVGASEPGLLQATRQYSLVFHAERAGCGGILEAFVHFGFLGKQGIAAEGKQVAEPGKADLMMVYHRLPYEEFRGADGKLQRRRPTSPNGIIPTLLSFFGDGRAGSWVAWAEHDENSGETFDSHTTVDAERYPKLTAARVALSKEEVDIFYKRFSKEAFWPTLHTFWERGQFREDDWQVFLKVNRAFAERTALEAAEGATVWLHDYNLWMVPGYLRELRPDLRIAFFHHTYFPSADVFNVLPWRRQIIGSLLQCDYIGFHIPRQVENFVDAARGVMPLQTVSRQNCAPRFITYGCAVGLERMTTAVDTGNRVVKLGAHPVGLDIERVRSALAAPKIREMMERLRSELAGVKLILSVERLDYTKGILEKLNAYERLLEENPELLGKVTLVTVCVPAAKEMTIYDELQGQIEQAVGRINGRFARIGWTPLQFFFRSLPFEEVSAWYAMADVMWITPLRDGLNLVAKEFVAAQGLLDGRGVLVLSEFAGAAAELKGALLTNPHDPVDMTQTCYVALNMPKAEAQARLRELFDIVNYNDIRRWGDEFLAAVSDPQEQLDRALGLVG

SEQ ID NO: 26584 - protein, 457 aa, Bordetella bronchiseptica RB50
MSKSPEQMTPYDQFNIEVPEDHFPVEGMSARAAQALVLSDEWTDTNPMLNMSSFVTTFAEPEAVRIAEKNMYKNYIDHDMYPQLFAMEQRMVRWLHQLWNGPKDAEPYGTATVGSSEACMLAGLAHKWNWRQRREREGKDATRPNMVTGGNVQIVWKKFLRYFDVEPRIVPLKPGQYCLTAEDLDKYVDENTIAVVAIAGQTFTGEDDDIQGIHDWLDAYEKKTGVSVPMHIDGASGGFVNPFLYPDYKWDFRLPRVQSINASGHKYGLTPPGLGWVIFRERKVFNEDLVFYVNYLGGEMPTATLNFSRNSFQVAVQYYQFLRLGFDGFKRVMQRTLDNAIALRQHLVDSGYFTIMNDTQRIPVVAVTLDPKVKKFNEFDVSNKVRERGWVISAYTMPPDAESVRSLRVVVRPHINRNVALLLAEDIVKACKYLEQHGGTATPPALHDTHKSSPAKC

SEQ ID NO: 26585 - protein, 159 aa, Brassica napus
MSDEEHHFESSDAGASKTYPQQAGNIRKGGHIVIKGRPCKVVEVSTSKTGKHGHAKCHFVAIDIFTAKKLEDIVPSSHNCDVPHVNRIDYQLIDISENGFVSLLTDSGGTKDDLKLPTDDNLSALMKSGFEEGKDVVVSVMSSMGEEQICAVKEVGGGK

SEQ ID NO: 26586 - protein, 409 aa, Brucella suis 1330
MDDRCIIIGAGHAGSQAAVSLRQEGYAGEIILINDETDIPYHKPPLSKSYLKAPEKGSLVLRPESAYRDNNIEMLFGAHVDAVSIAERTVTLGDGRVLPWSELVFATGARARIPDVPGVALEGVVTLRRMEDARRIAAMMPDVRNVVIIGGGFIGLEMAHSAIALGKKTVLIEAAPRVLGRSVAAPVSAHVEARSRAADITLLTGLGIASIEGENGRAIGVTAGDGTFFPADLVVIGTGAVPNVELAAKAGLSIDNGIRVDEHMRTSAPHVYAIGDCASYAHFHAGRHVRLESVQNATDQAKHVARTIVGRETPYREVAWFWSDQGDMKLQTAGLSFDADRHVLSGEPEENAFSVFHFKGDRLVAVDSINRPADHMIARRLLAAGISPSEADIMAGMPRLKELLAVVAR

SEQ ID NO: 26587 - protein, 542 aa, Silicibacter sp. TM1040
MTERLYLYDTTLRDGQQTQGVQFSTLEKKQIAQALDDLGVDYIEGGWPGANPTDSAFFDEAPKTRATLTAFGMTKRAGRSAANDDVLAAVMNAGTRSVCLVGKSHDYHVTTALGISLDENLDNIAQSVAHIVAEGREALFDAEHFFDGYKANPEYALAACRAALDAGARWVVLCDTNGGTLPHEVSRIVTEVIAAGLPGEKLGIHTHNDTENAVACSLAAVDAGVRQIQGTLNGLGERCGNANLTTLIPTLLLKEPYASGYETGVPKGALARLTKVSRMLDEILNRVPQKQAAYVGASAFAHKAGLHASAILKDPSTYEHIDPAVVGNGRIIPMSNQAGQSNLRRRLAEAGLTVEKGDPALGRILERVKERETEGYSYDTAQASFELLAREELGQMPEFFEVKRYKVTVERRKNKYNKMVSLSEAVVVVKVDGEKLLSVSESLDPSGSDRGPVNALAKALRKDLGRYSKVLDDMRLVDFKVRITQGGTEAVTRVIIDSEDGKGRRWSTVGVSANILDASFDALLDAMNWKLLRDASEAADAV

SEQ ID NO: 26588 - protein, 577 aa, Anabaena variabilis ATCC 29413
MTKNPSPHIWLYDTTLRDGTQREGLSISTEDKLRIAHRLDQLGIPFIEGGWPGANPKDVQFFWQLQEDPLKLSQIVAFCSTRRPHTHAADEPMLQDILAAGSSWVTIFGKSWDLHVTTGLKTTLEENLAMIRDTIEFFRSQGRRVIYDAEHWFDGYKHNRDYALQTLKAAMAAGAEWLVLCDTNGGTLPHEVSQIVQDVVKVTRDWGRINSKLDQSGQVVSEEVEKSTNSLPNTQYPIPNLPFPIPQIGIHTHNDSDMAVANALAAVMAGATMVQGTINGYGERCGNANLCSLIPNLQLKLGYSCITEHQLGQLAEASRFVSEVVNLAPDEHAPFVGRSAFAHKGGIHVSAVERNPLTYEHIQPEQVGNRRRIVISEQSGISNVLAKARTFGIELDKQTPEAKQILQRLKELESEGYQFEAAEASFALLMYEALGGRQQFFEVKGFQVHCDLVEGKEMTNALATVKVAVNGKNILEAAEGNGPVAALDAALRKALVNFYPQLATFELTDYKVRILDGHTGTSAKTRALVESGNGYQRWTTVGVSPNILAASYQAVVEGLEYGLLLHAQAEAAVKASG

SEQ ID NO: 26589 - protein, 112 aa, Klebsiella pneumoniae
MKKIDAIIKPFKLDDVREALAEVGITGMTVTEVKGFGRQKGHTELYRGAEYMVDFLPKVKIEIVVTDDIVDTCVDTIIRTAQTGKIGDGKIFVFDVARVIRIRTGEEDDAAI

SEQ ID NO: 26590 - protein, 316 aa, Capsicum annuum
TTGRYHYQLVWCQISFSSTSRTSYYRHSPFLGPKPTPTTPSVYPITPFSPNLGSILRCRRRPSFTVCFVLEDDKFKTQFEAGEEDIEMKIEEQISATRLAEKLARKKSERFTYLVAAVMSSFGITSMAVMAVYYRFYWQMEGGEVPFSEMFGTFALSVGAAVGMEFWARWAHKALWHASLWHMHESHHKPREGPFELNDVFAIINAVPAIALLDYGFFHKGLIPGLCFGAGLGITVFGMAYMFVHDGLVHKRFPVGPVANVPYLRKVAAAHSLHHSEKFNGVPYGLFLGPKELEEVGGLEELEKEVNRRTRYIKGS

SEQ ID NO: 26591 - protein, 834 aa, Agrobacterium tumefaciens str. C58
MSSELTRRNLLKAHAAGIAAATAGIALPAAAQPVPGGVSALQIKWSKAPCRFCGTGCGVMVGVKEGKVVATHGDMQAEVNRGLNCIKGYFLSKIMYGKDRLETPLLRKKNGVYAKDGEFEPVSWDEAFDVMAQQCKRVLKEKGPTAVGMFGSGQWTIFEGYAATKLMRAGFRSNNLDPNARHCMASAAYAFMRTFGMDEPMGCYDDFEHADAFVLWGSNMAEMHPILWTRIADRRLGFDHVRVAVLSTFTHRSMDLADIPMVFKPGTDLVILNYIANHIIKTGRVNEDFVRNHTKFVRGVTDIGYGLRPDDPVEVNAANSADPTKTEAIDFETFKEFVSEYTLEKTAAMTGVEAGFLEELAELYADPKRKVMSLWTMGFNQHVRGVWANQMVYNIHLLTGKISEPGNSPFSLTGQPSACGTAREVGTFAHRLPADMTVTNPEHRKHAEEIWRIPHGIIPEKPGYHAVQQDRMLHDGKLNFYWVQVNNNVQAGPNTKNETYLGYRNPENFIVVSDAYPTITAMSADLILPAAMWVEKEGAYGNAERRTHVWHQLVEASGEARSDLWQLVEFSKRFTTDEVWPAEILDANPAYRGKTLYEVLYKDSDVGKFPLSEINADYKNQESSDFGFYLQKGLFEEYAAFGRGHGHDLAPYDAYHEVRGMRWPVVDGKETLWRYREGYDPYVKPGEGVKFYGNKDGRAVIIAVPYEPPAESPDQEFDTWLVTGRVLEHWHSGSMTMRVPELYKAFPGARCFMNADDARKRGLNQGAEIRIVSRRGEIRSRVETRGRNRMPPGVIFVPWFDASQLINKVTLDATDPISKQTDFKKCAVKIEPVA

SEQ ID NO: 26592 - protein, 358 aa, Clostridium acetobutylicum ATCC 824
MNNSRIKRVIENMKKHKLNQMLVTSASSIFYLSGASIDSGERLVAMYINTDGKVTFIMNSLFKNSKGLDNSEIITYDDSEEPIPVLLNEIDKNDTLGIDKNWPAHFLIELMEKSNMNFVNSSPIVDEVRMIKDEEEIKILRESSKINDKVMEELVDYINKDKTEKEMAKVIQGIFEKNGIEKLSFDTICSYGKNGADPHHMPDDTELNNGDTIVIDMGGVYNNYCSDMTRTFFYKEASKEAKKIYETVKKANEAGKKAVKPGVKLSDIDRVTREVIEKEGYGKYFTHRTGHNIGIEDHEFPSVGGNSDIEAQVGMVFSIEPGIYVPGECGVRIEDLVVVTETGCEVLNNVSRELKILQ

SEQ ID NO: 26593 - protein, 481 aa, Corynebacterium efficiens YS-314
MTSATTNPGATQPMTDDQIIESIGPYNYGWHDSDDAGASARRGLSEEVVRDISAKKGESEWMLQQRLKALSIFEKKPMPTWGADLSGIDFDQIKYFVRSTEKQAQSWEDLPEDIKNTYDRLGIPEAEKQRLVAGVAAQYESEVVYHQIREDLEEKGVIFLDTDTALKEHPELFQEYFGTVIPAGDNKFSALNSAVWSGGSFIYVPKGVHVDIPLQAYFRINTENMGQFERTLIIVDEDAYVHYVEGCTAPIYKSDSLHSAVVEIIVKKGGRCRYTTIQNWSNNVYNLVTKRTKVEEGGTMEWVDGNIGSKVTMKYPAVWMTGPHAKGEVLSVAFAGEGQFQDTGAKMVHMAPHTSSNIVSKSVARGGGRAAYRGLVQINANAHHSTSNVECDALLVDDISRSDTYPYNDIRNDHVSLGHEATVSQVSEEQLFYLMSRGLAEEEAMAMIVRGFVEPIAKELPMEYALELNRLIELQMEGSVG

SEQ ID NO: 26594 - protein, 120 aa, Gossypium hirsutum
MASSMSLKLACVVVLCMVVGAPLAQGTVTCGQVTGSLAPCINYLRGNGAGAVPQGCCSGIKSLNSAAQTTPDRQAACKCIKSAAAGIPGINYGIASGLPGKCGVNIPYKISPSTDCSRVK

SEQ ID NO: 26595 - protein, 311 aa, Neisseria meningitidis MC58
MNPKKLVIASRESLLAMWQAKHIQGRLKALYPDCEVEILGMTTRGDQILDKTLSKVGGKGLFVKELEQALYDGRADLAVHSIKDVPMDLPEGFALAAIGERANPFDAFVSNQYTRLEEMPEGAVVGTSSLRREAQLRARYPHLLIKPLRGNVQTRLSKLDNGEYDAIILAAAGLQRLKLDGRIRMILSESDSLPAAGQGALGIEIAAHREDLYEVLKPLNHGVTNACVTAERALARALGGSCQVPLAAYCTEENGLLTLRGLVGHPDGSVVLRADAQAPAEYADALGRAVAKKLADDGARELIGAVLNTEN

SEQ ID NO: 26596 - protein, 115 aa, Triticum aestivum
MARGAATQLVLVSMVAAMLLVACDAAISCGQVTSALSPCISYARGNGANPPAACCSGVRSPAGAARSTADKQAACKCIKSAAGGLNAGKAAGIPLKCGVSVPYAISSSVDCSKIR

SEQ ID NO: 26597 - protein, 571 aa, Buchnera aphidicola
MEILSGAEMVVRSLINQGIQHIFGYPGGAVLDIYDALKTIGGIEHILVRHEQAATHMADGYARSTGKTGVVLVTSGPGATNAITGIATAYMDSIPMVVISGQVASLLIGYDAFQECDMIGVSRPIVKHSFLVKKTEDIPITFKKAFWLAESGRPGPIVIDLPKDILKKKSKYFFKWPDSVNIRSYNPTTKGHKKQIQKALYRLLKAKQPVIYAGGGVISSKCHKELLEFAEKTNCPVTTSLMGLGVFPGNHPQSIAMLGMHGTYEANMAMHHADVIFAIGVRFDDRTTNNLKKYCPNAIVVHIDIDPTSISKTVSAHIPIVGDAKYVLQQMLKILKSEQHIFCLKNWWNCIEKWKKVNSLKYYENNKKIKPQKVIETLFQLTKGDAYITSDVGQHQMFTALYYPFNKPRRWINSGGLGTMGFGFPAALGVKLGFPKDTVICITGDGSIQMNIQELSTARQYNLAILIINLNNASLGMVKQWQDMIYCGRHSHSYMDSLPNFIQLVESYGHIGIQISQPLELKEKLILALQKLSTGNLVFVDIKIDSSEHVYPMQIQGGGMNDMWLRKKEEF

SEQ ID NO: 26598 - protein, 583 aa, Arabidopsis thaliana
MVFKVSTVSTSPIDGQKPGTSGLRKKVKVFKQPNYLENFVQATFNALTAEKVKGATLVVSGDGRYYSKDAVQIIIKMAAANGVRRVWVGKNTLLSTPAVSAVIRERSGADGSKATGAFILTASHNPGGPTEDFGIKYNMENGGPAPESITDKIYENTKTIKEYPIAQDLPNVDISAVGVTSFEGPEGKFDVEVFDPADDYVKLMKSIFDFEAIRKLLSSPKFTFCYDALHGVAGAYAHRIFVEELGAQESALLNCTPKEDFGGGHPDPNLTYAKELVARMGLGKSDTGGEPPEFGAAADGDADRNMILGKRFFVTPSDSVAIIAANAIGAIPYFSSGLKGVARSMPTSAALDVVAKSLNLKFFEVPTGWKFFGNLMDAGMCSVCGEESFGTGSDHIREKDGIWAVLAWMSILAHKNKGNIDGNAKLVSVEDIVRQHWATYGRHYYTRYDYENVDAGKAKELMEHLVKLQSSIPEVNKIVKGIRSDVASVASADEFEYKDPVDGSISKHQGIRYLFEDGSRLVFRLSGTGSEGATIRLYIEQYEKDASKTGRESQEALSPLVDLALKLSKMEEFTGRSAPTVIT

SEQ ID NO: 26599 - protein, 273 aa, Silicibacter pomeroyi DSS-3
MMEVPPMSEGVSTRRDGHVLEVTLSRGKVNAIDVPTSQALAAAFQELHEDKELRCAILTGGGDKIFSAGWDLKALNAGEMQLDNWWESDDYGFGGFTGLTENWALNKPVIAAINGLAIGGGFEMAMACDLLIAADHVEFGLPEMPLGIVPDAGALQRLPRRIPHNIAMEMFLLGRRMSATEAAHYGLVNKVVPKEQLMDAAREWAASIAWSAPLAMQSVKEVQREIECVPLEQAFHKMRTDPMPTYRKMLKSDDAAEGVAAFVEKREPRFKGE

SEQ ID NO: 26600 - protein, 486 aa, Bacillus thuringiensis serovar konkukian str. 97-27
MITTEIKRVKNHINGEWVESTGTEVEAVPNPATGKIIAYVPLSPKEDVEKAVEAAKAAYETWSKVPVPNRSRQLYKYLQLLQENKEELAKIITLENGKTLTDATGEVQRGIEAVELATSAPNLMMGQALPNIASGIDGSIWRYPIGVVAGITPFNFPMMIPLWMFPLAIACGNTFVLKTSERTPLLAERLVELFYEAGFPKGVLNLVQGGKDVVNSILENKDIQAVSFVGSEPVARYVYETGTKHGKRVQALAGAKNHAIVMPDCNLEKTVQGVIGSAFASSGERCMACSVVAVVDEIADEFIDVLVAETKKLKVGDGFHEDNYVGPLIRESHKERVLGYINSGVADGATLLVDGRKIKEEVGEGYFVGATIFDGVNQEMKIWQDEIFAPVLSIVRVKDLEEGIKLTNQSKFANGAVIYTSNGKHAQTFRDNIDAGMIGVNVNVPAPMAFFAFAGNKASFFGDLGTNGTDGVQFYTRKKVVTERWF

SEQ ID NO: 26601 - protein, 568 aa, Glycine max
MAPSFAINGGFPGARVTPPSVTGRFAAVYSEVQNSRIDHELPLPSVLKNPFIIVDGPQSSAAGNPEEIAKLFPKLFGQPSAALVPSDSHAPHANRKLKIGVVLSGGQAPGGHNVISGIFDYLQDLAEGSTLYGFRGGPAGIMKCKYVELTSDYIYPYRNQGGFDMIRSGRDKIETPEQFKQAEETVQKLNLDGLVVIGGDDSNTNACLLAEHFRSKNMKTRVIGCPKTIDGDLKCKEVPTSFGFDTACKIYAEMIGNVMIDARSTGKYYHFVRLMGRAASHITLECALQTHPNITIIGEEVAAKKMTLKDVTDYIVNIISKRAEDNYNYGVILIPEGLIDFIPEVQHLIAELNEILANDAVDEGGLWKKKLTDQSLKLFEFLPKAIQEQLMLERDPHGNVQVAKIETEKMLIQMVETELEKRKQQGTYKGGFRGQSHFFGYEGRCGLPTNFDSTYCYALGYGAAALLQSGKTGLISSVGNLCAPVEEWTVGGTALTSLMDVERRHGKFKPVIKKAMVELEGAPFKKFASLRDEWALKNCYISPGPIQFTGPGSDAINHTLLLELGAQA

SEQ ID NO: 26602 - protein, 310 aa, Oceanobacter sp. RED65
MTVLKIATRSSKLALWQAEFVKSELEKFHSDLQVELVKIKTQGDKILDTPLAKIGGKGLFVKELETAMLNGDADIAVHSMKDVPMEFPEGLGLSVICEREMPTDAFVSNHYQRFLDLPQGAHVGTSSLRRQCQVLAARPDLKVSSLRGNVQTRLGKLDAGEFDAIILASAGLLRLELEERVAEHMSDEISLPAGGQGAVGIECRMDDEVTQKLLAPLHHSDTASRVYAERALNKRLQGGCQVPIACYATLNDGELHLRGLVGSEDGSRIIRTEIRGPESQAEQLGIQAAEDLLAQGAGEILSEVYGFDVK

SEQ ID NO: 26603 - protein, 188 aa, Triticum aestivum
  misc_feature (87)..(87): Xaa can be any naturally occurring amino acid
  misc_feature (93)..(93): Xaa can be any naturally occurring amino acid
  misc_feature (114)..(114): Xaa can be any naturally occurring amino acid
  misc_feature (131)..(132): Xaa can be any naturally occurring amino acid
  misc_feature (137)..(137): Xaa can be any naturally occurring amino acid
  misc_feature (139)..(139): Xaa can be any naturally occurring amino acid
  misc_feature (147)..(147): Xaa can be any naturally occurring amino acid
  misc_feature (153)..(153): Xaa can be any naturally occurring amino acid
  misc_feature (155)..(156): Xaa can be any naturally occurring amino acid
  misc_feature (159)..(159): Xaa can be any naturally occurring amino acid
  misc_feature (162)..(163): Xaa can be any naturally occurring amino acid
  misc_feature (167)..(167): Xaa can be any naturally occurring amino acid
MAPTVMASSATSVAPFQGLKSTAGLPVSRRSNGASLGSVSNGGRIRCMQVWPIEGIKKFETLSYLPPLSTEALLKQVDYLIRSKWVXCLEFSXVGFIFREHNASPGYYDGRYWXTCGKLPMFGWNDATKVXXRRWRXAXKELPDAYXRIIGFXNXXKCXWVXXIASXQPGWKESGKGKLNHQRAKKCH

SEQ ID NO: 26604 - protein, 485 aa, Xylella fastidiosa 9a5c
MATDIATPQNAEILERLDRRYEAGFVTEIESDSLPPGLNEIIIRALSAKKHEPEWMTEWRLAAYRHWLNMPMPEWAKLHIAPIDFQALSYYSAPKGPKYASLDEVPKELLDTYDKLGVPLHERARLAGVAVDAVFDSVSLGTTFRKELAEKGIIFCSISEAIQEHPDLIRQYLGSVVPVRDNYFAALNSAVFSDGSFVFIPKGVRCPMELSTYFRINAGHTGQFERTLIVCEEQAYVSYLEGCTAPIRDENQLHAAVVELVAQEDAEIKYSTVQNWYPGDEAGRGGIYNFVTKRAECRGARSKVIWTQVETGSAITWKYPSCVLLGDDSTGEFHSVALTRHHQQADTGTKMIHIGKRTKSKIVSKGISAGHGQNTYRGLVKIDRNAEGARNHTQCDSLLIGKQCGAHTFPYIEVKHPNATVEHEATTSKISDDQLFYCRARGIAEEDAVSIIVDGFCKQVFRELPMEFAVEAKKLLDISLEGSVG

SEQ ID NO: 26605 - protein, 223 aa, Saccharomyces cerevisiae
MSSQPSFVTIRGKAISLETQTESLLSKYSTFAQTTSSEQTGQEKKIDKQLEGILGQRQDVIDSLTQICDSNPAISASKLSQLHRHKEILQDHWKSFRNIRSSIQQERNRLNLLFSVKNDIANSTTDAPAPIGDADEYIQNETRRIDQSNNVVDRLISQAWETRSQFHSQSNVLNTANNKVLQTLQRIPGVNQLIMKINTRRKKNAFVLATITTLCILFLFFTW

SEQ ID NO: 26606 - protein, 271 aa, Zea mays
MAAQSMLMSTSVNGGRALPSLQAVRPAPYPRLPLPSSSSSSGYRHSKSVSVKTLALFGKSKVKTAPAKKAAAPKPKPKVEDGIFGTSGGIGFTKENELFVGRVAMLGFAASLLGEAITGKGILAQLNLETGIPIYEAEPLLLFFILFTLLGAIGALGDRGRFVDEEVTGLDKAVIQPGKGFRGALGLSEGGPLFGFTKSNELFVGRMAQLGVAFSIIGEIITGKGALAQLNIETGVPINEIEPLVIFNVLFFFIAAINPGNGRFIIGEEEE

SEQ ID NO: 26607 - protein, 165 aa, Burkholderia thailandensis E264
MMFATTDLCDANEERLAAGTLRVIEPVFRSFGGVRRFAGPAATLKLFEDNTLVRAALEQDGAGRVLVVDGGGSLRCALVGGNLGKLAEKNGWVGIVVNGCVRDSAELAECRAGVLALAAHPRKSDKRGAGVSDVPVDVRGTRIAPGDWIYADADGILVSDAALLA

SEQ ID NO: 26608 - protein, 469 aa, Streptomyces coelicolor A3(2)
MTDSSVREFKMPDVGEGLTEAEILKWYVQPGDTVTDGQVVCEVETAKAAVELPIPYDGVVRELHFPEGTTVDVGTSIIAVAVGDGAAAAAEPVQEAVAEEPKPEGRQPVLVGYGVSTSSTKRRPRKGAEAPAAAQTPAAAIQAELNGHGQAAPAAPATPAAPVTGDRPLAKPPVRKLAKDLGVDLATVVPSGPDGIITREDVHAAVSAPEPAQAAAPRSEQAAPAPSPSAPSSYDTTRETRVPVKGVRKATAAAMVGSAFTAPHVTEFVTVDVTRTMKLVEELKQDKEYTGLRVNPLLLIAKALLVAIRRNPDVNASWDEAAQEIVVKHYVNLGIAAATPRGLIVPNIKDAHAQTLPQLAGSLGELVSTAREGKTSPAAMQGGTVTITNVGVFGVDTGTPILNPGESAILAVGAIKLQPWVHKGKVKPRQVTTLALSFDHRLVDGELGSKVLADVAAVLEQPKRLISWA

SEQ ID NO: 26609 - protein, 326 aa, Streptomyces coelicolor A3(2)
MAAEKMALAKAINESLRRALESDPKVLIMGEDVGKLGGVFRVTDGLHKDFGEDRVIDTPLAESGIVGTAIGLALRGYRPVVEIQFDGFVFPAYDQIVTQLAKMHARSLGKVKMPVVIRIPYGGGIGAVEHHSESPEALFAHVAGLKVVSPSNAADAYWMMQQAIQSDDPVIYFEPKRRYWDKAEVDKEAIPGPLHTARVVREGTDLTLAAYGPMVKLCREVADAAAEEGRSLEVVDLRSISPVDFDTIQASVEKTRRLIVVHEAPVFLGSGAEIAARITERCFYHLEAPVLRVGGYHAPYPPARLEEEYLPDLDRVLDAVDRSLAY

SEQ ID NO: 26610 - protein, 404 aa, Brassica rapa
MGICMSVQVKAESPSNTGASPKYMSSEANDTQSMGSKCSSVSVRTSPRTEGEILQSPNLKCFSFAELKAATRNFRLDSVLGEGGFGCVFKGWIDEESLTASKPGTGMVIAVKRLNIEGWQGHQEWLAEVNYLGRLSHPNLVKLIGYCLEDEHHLLVYEFMPCGSLENHLFRRGSYFEPLSWNIRLKIALGCAKGLAFLHSAETQVIYRDFKTSNILLDSNYNAKLSDFGLAKDGPTGDNSHVSTRVIGTYGYVDPGYLLNGHLTTKSDVYSYGVVLLEMLSGRKVVDNNRPPREQKLVDWAKPLLANKKKVSRVIDNRIRDQISVKEAHKVATQVFRCLDVDKNQRPNMNEIVFHLENIQASREEGGNKTEKRMRRRRDSFAQQTGVGGIATAYPRPSASPLFV

SEQ ID NO: 26611 - protein, 346 aa, Nocardia farcinica IFM 10152
MGAAATGTPLRIGTRGSLLAMTQAGTVRDALIAAGRPAELVVVKTPGDMSSDPVQKIGVGVFTSALRDELAAGTIDLAVHSYKDLPTAPDPRFVIAAIPPREDPRDALVARDGLVLGELPAGAKVGTSAPRRVAQLRALGLGLDIVPLRGNLDSRLARVTDGELDAVVVARAGLSRIGRTAVITEALEPVQMLPAPAQGALAVECRSEDAALIEALAELDDAATRAAVVAERALLAELEAGCTAPVGALAEVVESLDDDGRIVEELSLRGCAAAVDGSEVLRASVVGDPERAAELGRALARELLELGARELLVEVAATEPGARSGTGAVRPPETDLSNPSPMENPQ

SEQ ID NO: 26612 - protein, 550 aa, Legionella pneumophila subsp. pneumophila str. Philadelphia 1
MSAEENMTKESEIKIPDIGGANQVDVIEILVKEGDQIEVDTPLITLESEKASMDIPSPISGTVTQILVKVGDKVSEGDLIVKAKSDTTTNISSSQEQKTEPEKQNLQTRAEEQSVDTKATASTPSSKDIEISIPDIGGANDVDVIDILVKPGMEVEKDQALITLEGDKATMDIPSPYAGKVIEMKIKLGDKVSQGTPILTLKTLGKSETPEIEKSQIKNISEQSIKEIEKPYEELKSEAISINNLEIAESKSILISAGPAVRRLAREFGVDLSLVQGSGRKSRITKEDLQNYIKVRLSEKTTSGGFSLPSNPAIDFSKFGSIETKPLNKIKKLTGTNVHRSWITIPHVTQFDEADITDLEAFRKSESESAKNQDYKLTLLAFVCSVVCKALHAYPQFNASLDTSGENLIYKKYYNIGIAVDTPNGLVVPVIKNVDKLSVIDIAKEMSRLSTKAREKGLTPIDMSGGCFTISSLGGIGGTAFTPIVNSPEVAILGLSRSIIKPIYDNKEFKPRLMLPISLSYDHRVIDGAEAARFTRFLCDCLGDIRRVLL

SEQ ID NO: 26613 - protein, 120 aa, Gossypium hirsutum
MASSMSLKLTCVVVFCMVVGAPLAQGAISCGQITSALAPCIAYLKGNGAGSAPPACCNGIRSLNSAAKTTPDRQAACSCIKSAATGISGINYSTAAGLPGKCGINIPYKISPSTDCKSIK

SEQ ID NO: 26614 - protein, 639 aa, Oryza sativa
MLSARAAATAAAAAASPLWKRGEGGSSGSGSGCTSCREVRRRAAAVRVRAAAPRRVEAVAMESAAETEKKEEVAAAGGGVEDMATEEVPVTPWAFSVASGYTLLRDPHHNKGLAFSEKERDAHYLRGLLPPAVVSQDLQVKKIMHNLRQYSVPLQRYMAMMDLQERNERLFYKLLIDNVEELLPVVYTPTVGEACQKYGSIFRQPQGLYVSLKDKGKVLDVLRNWPERNIQVIVVTDGERILGLGDLGCQGMGIPVGKLSLYTALGGVRPSACLPITIDVGTNNEQLLNDEFYIGLRQRRATGKEYHELMEEFMSAVKQIYGEKVLIQFEDFANHNAFDLLAKYSKSHLVFNDDIQGTASVVLAGLLSSLKVVGGTLAEHTYLFLGAGEAGTGIAELIALEISKQTKAPIEECRKKVWLLDSKGLIVNSRKESLQAFKKPWAHEHEPVTTLLDAVQSIKPTVLIGTSGVGKTFTKEVIEAMASFNERPVIFSLSNPTSHSECTAEEAYNWSQGRAVFASGSPFDPVEYNGKIHVPGQSNNAYIFPGFGLGVVISGAVRVHEDMLLAASETLADQATQENFEKGSIFPPFTNIRKISARIAASVAAKAYELGLATRLPQPRDLEKYAESCMYTPVYRSYR

SEQ ID NO: 26615 - protein, 120 aa, Gossypium hirsutum
MASSMYLKLACVVVLCMVVGAPLAQGAVTCGQVTSSLAPCINYLRGTGAGAIPPGCCSGIKSLNSAAQTTPDRQAACKCIKSAAAGIPGINFGLASGLPGKCGVNIPYKISPSTDCSSVK

SEQ ID NO: 26616 - protein, 396 aa, Rubrivivax gelatinosus PM1
MAKSKFERTKPHVNVGTIGHVDHGKTTLTAAITTILSSKFGGEAKAYDQIDAAPEEKARGITINTAHVEYETANRHYAHVDCPGHADYVKNMITGAAQMDGAILVCSAADGPMPQTREHILLARQVGVPYIIVFLNKCDMVDDAELLELVEMEVRELLDKYEFPGDATPIVHGSAKLALEGDKGELGEQAIMKLAEALDSYIPTPERAVDGAFLMPVEDVFSISGRGTVVTGRVERGIIKVGEEIEIVGISATQKTTCTGVEMFRKLLDQGQAGDNVGILLRGTKREDVQRGQVLCKPGSVKPHTHFTAEIYVLSKEEGGRHTPFFNNYRPQFYFRTTDVTGAVELPKDKEMVMPGDNVSITVKLINPIAMEEGLRFAIREGGRTVGAGVVAKIIE

SEQ ID NO: 26617 - protein, 574 aa, Buchnera aphidicola
MEMLSGSEMIIQSLIDQGIKYIFGYPGGAVLDIYDSLKSTKKIKHILVRHEQGATHMADGYARATGKIGVVLVTSGPGATNSITGIATAYMDSIPIVVISGQVSSSLIGYDAFQECDMIGISRPIVKHSFLVKKTEDIPITFKKAFWLASSGRPGPIVIDLPKDILNSYNKKPYIWPIEVNIRSYNPITKGHSRQIKKAIDILKLSKQPVIYAGGGVISANCHNELKELAEKLNIPVTTSLMALGAFPGNHPQNLQMLGMHGTYEANMAMHYADVILAIGVRFDDRTTNNVKKYCPNATIIHIDIDPTSISKTITAHIPIVGNAKNVLQQILVFINSNMFVKEFYCLKKWWIKIQSWKNKNSLNFDTNSDNIKPQSVIKTIWKLTKGKAFITSDVGQHQMFAALYYSFQKPRRWINSGGLGTMGFGLPAALGVKLAFPNETVICVTGDGSIQMNIQELSTAMQYELPILILNLNNKSLGMVKQWQDIIYSGRHSHSYMKSLPNFIKLAESYGHSGISINTPKELEKKLQLALEKLQNGHLVFVDIKIDASEHVYPMQIRDGGMNNMLLRKNGQK

SEQ ID NO: 26618 - protein, 164 aa, Thermus thermophilus
  misc_feature (20)..(20): Xaa can be any naturally occurring amino acid
MEARTTDLSDLYPEGEALPXVFKSFGGRARFAGRVRTLRVFEDNALVRKVLEEEGAGQVLFVDGGGSLRTALLGGNLARRAWEKGWAGVVVHGAVRDTEELREVPIGLLALAATPKKSAKEGKGEVDVPLKVLGVEVLPGSFLLADEDGLLLLPEPPSGVRSGG

SEQ ID NO: 26619 - protein, 506 aa, Silicibacter pomeroyi DSS-3
MAALDQTQVKEGVDQETVDAVREAGTYKYGWETEIEMEYAPKGVNPDIVRLISDKNEEPEWMTEWRLAAFERWTGMSEPKWAMVSYPEIDFQDQYYYARPKSMSEKPKSLDDVDPKLLATYEKLGIPLKEQMILAGVEGAENAPAEGRKVAVDAVFDSVSVGTTFQAELKKAGVIFCSISEAIREHPELVKKYLGSVVPVSDNFYATLNSAVFSDGSFVYVPPGVRCPMELSTYFRINAENTGQFERTLIIADKGSYVSYLEGCTAPKRDVAQLHAAVVEIIIEEDAEVKYSTVQNWYPGDENGKGGIYNFVTKRADCRGDRSKVMWTQVETGSAVTWKYPSCILRGDDSQGEFYSIAIANNMQQADTGTKMIHLGKNTKSRIVSKGISAGRAQNTYRGLVSMHPKAKNSRNYTQCDSLLIGDKCGAHTVPYIEVKNNSSRCEHEATTSKVDEDQLFYCRSRGMDEEEAVALVVNGFCKDVLQALPMEFAMEAQQLVAISLEGSVG

SEQ ID NO: 26620 - protein, 542 aa, Ralstonia eutropha JMP134
MSTSLSAWQSLREHAAKIRHTHMRDWFTGPQGQARSVRLTVEACGLTLDYAKNRVTEDTLSLLFALARQARVCERRDAMFAGEPVNTTERRAALHMALRAHPGDGYRALGVPVEADVSAVLAQMERFARDVRSGSWTGFDGRAITDVVNIGIGGSDLGPRMVCRALEQDTEPGPRLHFVANVDGYDLARTLARLDAATTLVIVCSKTFTTLETMANARTARDWFLRHGVTHSDLARHFVAVSTNRDAVAAFGIDPVNMFPFWDWVGGRFSLWSAVGLSIAVAIGFDRFRQLLDGARAMDRHFAGAPPEQNLPMILGLLDVWYRSFLGTASRCVAPYCEPLDLLPAFLQQLEMESNGKSVQHDGAALEAGSAAVVWGTTGTNGQHAYFQMVHQGSQLVPVDFIACLQPHSDLPGHHTKLLANCFAQGEALLRGRTADEVRAEGKADEALVPHLVFEGNRPSNTLLLQRLDAFHLGALLAMSEHRTFVQGALWNINPFDQWGVELGKMLARPIERELEGAPPQPHDASTAALIRRAAQFCASTD

SEQ ID NO: 26621 - protein, 227 aa, Xanthomonas oryzae pv. oryzae KACC10331
MRWITGVVLNYNTDTQAVNCLSSPTDGTPSPVRRLNYRRALLMLLNRLLVIVFIGFFAKSAFAAGTPVLDVDYRPLAGKTPINLNLTYGGKVVMVVNTASKCGYTPQYEGLEALNQRFASRGFTLLGFPSNDFHGQEPGSEKQIQEFCTLTYGVKFPMFEKVHVLGAEATPLYQRLTQATGVAPGWNFHKYLIGRDGRVVAQFPSKIKPDDPSVLAAIERELKAPSR

SEQ ID NO: 26622 - protein, 573 aa, Buchnera aphidicola
MEMLSGSEMGIQSLIDQGIKYIFGYPGGAVLDIYDSLKSTNKIKHILVRHEQGATHMADGYARATGKVGVVLVTSGPGATNAITGIATAYMDSIPIVVISGQVASYLIGYDAFQECDMIGISRPIVKHSFLVKKTEDIPITFKKAFWLASSGRPGPIVIDLPKDILNSCKKKPYVWPTKINIRSYNPIIKGHFGQIKKAIDALKLAKQPIIYVGGGVISSNSYNELKEFAERLNIPVTTSLMALGAFPGNHPQNLNMLGMHGTYEANMAMHNSDLILAIGVRFDDRTTNNVDKYCPNATIIHIDIDPTSISKTITAHIPIIGNAKNILQQMLQLINDSMFVKELYCLKKWWIKINHWKSMNSLHINIDNVKIKPQSVIKTIWKLTKGEAYIASDVGQHQMFAALYYSFQKPRRWINSGGLGTMGFGLPAALGAKLALPKKTIICITGDGSIQMNIQELSTAMQYELPILILNLNNRSLGMVRQWQDIIYSGRHSHSYMKSLPNFVQLAESYGHIGIYIEHPKDLEKKLRIALEQLKKGHLVLVDVIIDASEHVYPMQIRGGGMNSMILRKNGK

SEQ ID NO: 26623 - protein, 353 aa, Coccidioides immitis RS
MAEAIKVLQAFSSPNLRFNLRNELIGGCSIDAHGTPITDAVKQAALESDAVLFASVGGPKWDSSRRGLEGPEGGLLQLRKVLDVYGNLRPCSTDVCASVSREFSPYRTEVVEGVDFVVLRENCGGAYFGKKVEDEDYAMDEWGYSTQEVQRIARLAAHVALRHDPPWPVISMDKANVLASSRLWRRVVEKTLTTEFPQVKFSHQLADSASLIMATNPRSLNGVLLADNTFGDMLSDQAGSIVGSLGVLPSASLSGIPGEERKDGKKSYALYEPTHGSAPTIAGKNVANPLAMILCVAMMFRYSFNMEPEAKAIENAVTATLEAGVRTPDLGGKAGTTDVGNAIVAHIKKSLSI

SEQ ID NO: 26624 - protein, 552 aa, Synechococcus sp. CC9605
MRGHHARSWIRSARLQRPPGMSFPDFSASDAHIQWQRFCDLSWYHDDLGVWLDISRMHVNASDLQQLQPRMDKAFAAMQELEAGAIANPDEQRQVGHYWLRTPELAPSSELQQHISREIDLIAAFGRDVVNGTIKAPNGEAFTDVLWIGIGGSGLGPALMIKALQNPGEGLPFHFFDNVDPNGMSNVLAGLEGRLDRTLVVTVSKSGGTPEPHLGMEQARHRLEAAGGQWAGQAVAVTMLDSKLDQQAQKEGWLKRFDMFDWVGGRTSITSAVGLLPGALIGCDIRDFLSGASQMDAATRMADLRRNPAALMAASWHVAGGGRGQRDMVVLPYRDRLEVFSRYLQQLVMESLGKRLDRNGDVVHQGIAVYGNKGSTDQHAYVQQLRDGVDNFFATFIEVLEDVSDIPTISGECPGDFLDGFLQGTRSALTESGRQSMTISMRCFDARRLGALIALFERAVGLYGELVNINAYHQPGVEAGKKAAAAILNLQGRVEAILADGVARSADEIRLALGDGTDESIFWILRHLTGNQRGFSAQGDWSQPASMRFSKG

SEQ ID NO: 26625 - protein, 145 aa, Psophocarpus tetragonolobus
MGGFTEKQEALVNSSYEAFKANVPQYSVVFYTSILEKAPAAKDLFPFLANGVDPTNPKLIGHAEKLFGLVHDSAAQLRAKGAVVADAALGSLHAQKGVTDPQFVVVKEALLKTVKEAVGDKWSDELSNAWEVAYNELAAALKKAF

SEQ ID NO: 26626 - protein, 480 aa, Kineococcus radiotolerans SRS30216
MAHPHGKKHDTSTDDGGGLTGAVVVVALVSAISGLLYGYDTGIISGALLQIGDEFEIGNGWEQLIAASILAGAVVGALTCSRLSERRGRRGTLLVVAVVFVVGTLGAAFAPNPELLSLARLVLGFAVGGATQTAPVYVAELAPTKYRGRLVLFFQIAIGVGILTATIVGASEAVDWRVSIGAAAVPAAIMLVLMLRLPESPRWLLKSDQQDRARQSLERVRPRGADVAGELHEIDALVREESSAGTRGWRGLREAWVRPALVVGCGLAIATQLSGIEMIVYYSPTILTDNGFADSTALQVSVGLGATYLITQLIGLAIIDRVGRRRLTLITLPGAALALIVLGTFFVTGNDGKEQVPYIIATLIAFMAFTAGGIQLMGWLTGSEIYPLATRSAGAAAQSASLWGTNLLITLTLLSIIDTIGTGQTFWLYAAFNVLAFVFLYKRMPELTGHSLEEIEGRLHEGRFRPADFAKEPAERAASR

SEQ ID NO: 26627 - protein, 493 aa, Synechococcus sp. CC9605
MAALQIVWFKRDLRIVDHQPLAAAVERGLVLPLYVVEPELWRQPDASERQWMFCRESLLELRQALADRGQPLVVRAGDVVQVLERARRQFGIDGLWSHEETGNGWTYQRDKRVGAWARRHGIAWMELPQFGVTRRMHSRNGWAKRWEVQMTEPITPVPAALQALDGIDHGVIPERPCSELLLDACPQRQIGGRSTGLEELNDFLQHRAQRYQRSMSSPNTAFTGCSRLSTYLTWGCLSMREVLQTSRTHSGRGVSSFESRLHWHCHFIQKLEDQPAIEFSDFHPFMRGIRAADAERLTAWSEGRTGVPFVDACMRALRAHGWINFRMRAMLMSFASYNLWLPWRDSGLHLARQFVDYEPGIHWSQCQMQSGSTSINTIRIYNPIKQGMDHDPQGLFIRQWCPELKDVPTIHIHEPWMLGGGMPAPIVDVTASMQDAKDRIWDIRRSAGFDRHADAIQCKHGSRKAGLKPTTARRRRRQPQPPDNGSQQLSLGF

SEQ ID NO: 26628 - protein, 643 aa, Shewanella oneidensis MR-1
MCGFAGFFNTSNLTDHARILECMGLELFNRGPDSFGIWFNSDDRIGLVHRRLAIVDLSAAGHQPMTSDSGRYIISYNGEIYNHQELRDELESIRQYNWRGHSDTETLLAAIEQWGLKITLQKATGMFGIALWDTLNKELYLARDRFGEKPVYYGLHKDAFIFASQLNAFRAYPDFKPEINRDSITLLLRHNYIPAPYSIYSDIHKLLPATILKLDSNNNISLETYWSAKDIMSNASSTETDLPVGKQVEALENTLKKAVALQMSADVPLGAFLSGGVDSSLIVSLMQAQSNKPVKTFSIGFDDPRFNEAVFAKEVAKHLGTEHTELYLTAEDALEVIPKLAEIYDEPFSDSSQIPTFLVSKIARQYVTVSLSGDAGDELFCGYNRYLMTSKVWKRLSVLPVFLRSFLANVFTFVPVNVWNLFGKLLPSRLQLSNLGDKLHKAAAVLACRDVEQLYLGLVSHWQNPEQVVLGSKEPLTVLTDPKRKANFSDPILQMMAQDTLSYLTDDILVKVDRAAMAVSLETRVPFLDHSVLEHAWRLSLDLKLRDGKTKWCLREILYKYVPKDLIERPKMGFAVPLDAWLRGPLKVWADNLLAAERLRQEGFFDAELIDRMWQEHKSGKRNWQYQLWDILMFQSWYEKYHK

SEQ ID NO: 26629 - protein, 171 aa, Pinus thunbergii
MATGAGAGAATVVSAFTGLKSTAQFPSSFKMSNAAAEWEQKTTSNGGRVRCMQVWPPFGNPKFETLSYLPTLTEEQLVKEVEYLLRNKWVPCLEFDLEGSISRKYNRSPGYYDGRYWVMWKLPMFGCTEASQVINEVRECAKAYPKAFIRVIGFDNVRQVQCISFIVHKPE

SEQ ID NO: 26630 - protein, 935 aa, Anabaena variabilis ATCC 29413
MWRKFQAFIQRTRTVLIITPSVALTIIVGQSLGIFNLLEWKLRDEWVRLRSCEANTLLVCSHNTIADEIIIVTIDERDIQSVGKWPIPDSSLAELLEKIRSQQPRAIGLDLYRDLPEGKGHEQLVEVFHTTPNLIGVEKITGERVNPPPALKKNDQIGLADLVLDGDRHVRRALLTAVDTQEEGKIKAGLATLVALKYLEAEKITLESVDAKQQKFRLGKQIHLPLQNLSAGYTDSDLGGYQILLNWYGSEAAFRTVTMRHVLAGKIPPELMRDRMVFIGSTAASTNDFFSTPFSSSLMSAQKPTPGVVIHANIAHQLVRGARTGKANLRGVSGLSMAGWIILWSVIGSSGSWLLASARSGRRIPGGKILWTTTSISGAFLGGGYGMFLHGVLIPVTPPLAAFIVSVIATTNAYKQQKLEEANQQLEIANSQLLDYSKTLELKVQERTHELLEAKQAADAANQAKSEFLANMSHELRTPLNGILGFAQVLEVSPNLKEKDLEGVNIIHQCGSHLLLLINDILDLSKIEARKLELVEANVHLLTFLHGVSEICSIRAAQKGIAFKVSVGDRLPTVIEVDEKRLRQVLINLLGNAVKFTDSGEVAFKVELLDTQDQDNQQSSVAKLRFQIEDTGVGMSPEQLEKIFLAFEQVGDYRRQSEGTGLGLAISQRIAELMGSQIQVQSRLGEGSIFWLDLTLPVPIAHDWQTYAPTHQKIIGIQGNAPQILIVDDDDNHRSMLNSLLQEIGCQTLEASDGKQGLQMAHEHHPDLILLDLAMPNMDGFELMVQLQENPQTSSIPIIVSSASVFEENRQRSLQAGATAFLPKPLQIDELFNALRSVLQVEWIYTPSASLSLSPQPEHTTHTELVLPSQDVLQELYHLAMMGDIPAIEGILRELIQHNSQLAPFATELSKLTTNFQTAKIRQFLKSFVITESHP

SEQ ID NO: 26631 - protein, 511 aa, Synechococcus sp. CC9605
MVDDEQRENEGDLICAAQFATPEAINFMATEARGLICLAMEGQRLDELDLPLMVDRNTDANETAFTVSIDAGIEHGVTTGISAEDRAATIQVALNPATRPAELRRPGHIFPLRARPGGVLKRAGHTEAAVDLAQLAGLSPSGVICEIQNSDGSMARLPELRSYADRWGLKLISIADLIRYRLDNERFVRRMAQAQMPSRFGNFQAVGYRNELDGSEHVALIKGEPNALSEPVLVRMHSECLTGDAFGSLRCDCRPQLEAALHQIEAEGEGVVVYLRQEGRGIGLINKLKAYSLQEAGLDTVEANERLGFPADLRNYGVGAQILSDLGIHRLRLLTNNPRKIAGLGGYGLQVEERVPLVMDPGAYNADYLAAKREKLGHLFESESPCVVLALAVNVGPESWPTVRREVEAIAQRHGFSLEALHEPRLLALWDRPQFVWKLIPDGADAAPLLKNLAALAATERVGLMRVPTERMALHPPQTLERVEHQLNELINLGSDGLLENGPSLLHWTRS

SEQ ID NO: 26632 - protein, 434 aa, Salinibacter ruber DSM 13855
MPFNFDVYERSAYREPAPIDHDSPFQSMMERFDVAAEILELSPGFYEYLCRPARMHVTSIPVEMDSGRVKIFEGYRVIHNNVLGPSKGGIRFAPDVTLNEVKALAGWMTWKCSLVDLPFGGAKGGVACNPEEMSPGELERLTRRYTADLFDVFGPDKDIPAPDMNTNEQIMAWVLDTYSMHARQTENAVVTGKPVGLGGSKGRRQATGRGVMTVTLAAMEQIGLAPGDCTVAVQGFGNVGATAADLLGEQGCTVVAVSDITGGYYNENGLDLKAMKAYTQQNGGTLAGYEEAQHITNEELLTLDVDVLVPAAKEDQINREIAEDLRARIVAEGANGPTHPAADEVLAEKEVLVIPDILANAGGVTASYFEWVQNRQGFFWTEEEVNRRLDRMMGEAFDKVYTAADKYDVSLRIAAYVVGIRRVAEALRMRGIYA

SEQ ID NO: 26633 - protein, 172 aa, Triticum aestivum
MATMMTMSSFAGAAVLPRGSAGHFGAQSLPALGRRALIVRAQTEGPSAPPPNTPKASTSIWDALAFAGPAPERINGRLAMVGFVTALAVEAGRGDGLLSQLGSGTGQAWFAYSVAVLSVASLVPLLQGESAEGRAGAIMNANAELWNGRFAMLGLAALAATEIITGAPFINV

SEQ ID NO: 26634 - protein, 159 aa, Xerophyta humilis
VGRVAMIGFAASLLGEAITGKGILAQLNLETGIPIYEAEPLLLFFILFTLLGAIGALGDRGKFVDDPPPPTGLERAVIPPGKGIRAALGLNSDGPLFGFTKANELFVGRLAQLGIAFSLIGEVITGKGALAQLNIETGVPISDIEPLLLLNIAFFFLAA

SEQ ID NO: 26635 - protein, 253 aa, Zea mays
  misc_feature (128)..(128): Xaa can be any naturally occurring amino acid
MAATAPNGNPTVSSLAATVPVQAVLFDIDGTLCDSDPLHHVAFQEMLLEIGYNNGVPIDEVFFIKNIAGRSDVEAAQNLFPDWELEKGLKFLEDKEAKYRSLAKERLVPVKGLAKVVQWVKDHGYKRXAAVTNAPRINAELMISLLGLSDFFQAVIVGGECEQPKPAPYPYLRALKELQVSAEHSFVFEDSPAGIRAGVAAGMPVVGVATRNPEKSLVEAGTKKLVKDYEDPKLWAALEEVEGEEAKLKKASE

SEQ ID NO: 26636 - protein, 146 aa, Burkholderia thailandensis E264
MQRSRPSFRKSGASCPGDRQGPPAAGAGSPRTERGIDPMSEQIKHISDASFEQDVVKSDKPVLLDFWAEWCGPCKMIAPILDEVAKDYGDKLQIAKINVDDNQATPAKFGVRGIPTLILFKNGAVAAQKVGALSKSQLTAFLDSHL

SEQ ID NO: 26637 - protein, 618 aa, Candida albicans SC5314
MSEQAQTQVSADQQQHQHNHHHHHHHHHHNENQSQQQVPIDPAANPANRIGRYQILKTLGEGSFGKVKLAQHLGTGQKVALKIINRKTLAKSDMQGRVEREISYLRLLRHPHIIKLYDVIKSKDEIIMVIEFAGKELFDYIVQRGKMPEDEARRFFQQIIAAVEYCHRHKIVHRDLKPENLLLDDQLNVKIADFGLSNIMTDGNFLKTSCGSPNYAAPEVISGKLYAGPEVDVWSAGVILYVMLCGRLPFDDEFIPALFKKISNGVYTLPNYLSAGAKHLLTRMLVVNPLNRITIHEIMEDEWFKQDMPDYLLPPDLSKNKNSKIDVDEDVIRALSVTMGYDRDEIVNVIEKANKQVAAGNSSSQQSKSSNEILDAYLLMKENHALVKDLKKSKSENIESFLSQSPPPSPFPNAGSTSSAPGVQQSLTYQTLATVPDLSTLPNSTIAILPTSLPSIHRAYMAETKQNGDPSQQHAPPPTKKSKTRWHFGIRSRSYPLDVMGEIYRALKNLGAEWAKPTEEELWTIRVRWKYDTSAQFECGSAPNLMKMQIQLFQLEPNNYLVDFKFDGWESAHGNAGTDSPQSHRQQDLDEVGSFSAYPFLHLATRLIMELAVNSQSG

SEQ ID NO: 26638 - protein, 447 aa, Prosthecochloris aestuarii DSM 271
MSKNSHAISLVEAVSMAVGTMIGASIFSIFGLGAEIAGQNLPMAFFLSGMLAFMVAYSYAILGRQIISNAGPISFLLKGIGDNVLTGTLAVLMWLSYVISIALFVKGFSGYLLPFINIESTPLAIGLTEAGIIMFFTLLNTYGSQAVGKLELYIVAVKLSILLIFIVLGMSSIHLSSIVPSLTPKGTEGMLMGSIVFFLSYMGFGLITNASENIDNPFVNVPRAIYISISIVIMVYVLVSVVALGNLAIPDLVKAQDNALAVAARPFLGQTGFALLSVGALFSIASALNATLYGGANIAYSLAKDGELPGIFERKIWFGSSEGLYITAGLGLFFALLFDIGAIASITSTIYTIIYLCVMISHYRIAGTYGGSRPLIFIFSCTMAVVLIGLMSYQYMTSKITFFATIATFFGALLIEYLYRYGRKRRFGIINNLSDTSQALHPARKDI

SEQ ID NO: 26639 - protein, 491 aa, Streptomyces coelicolor A3(2)
MAHASDGHVLEFKLPDLGEGLTEAEIVRWLVEVGDVVAVDQPVVEVETAKAMVEVPCPYGGVVTARFGEEGTELPVGAPLVTVTVGGGGAAADGPARDSGTDAGAAGTPVAGTPAAAAAETSPAAETKAEGSGNVLVGYGTSEAPARRRRVRPGRQAATGASGRANGRVRGAGAVDGPVRTAEPADGPVPVISPLVRRLARQHDLDLRELTGSGPDGLILRADVEYALRAAAAQGGRTADPEAGTGRVPDAAPAAVSSAPRSDGTRVPLKGVRGAVADKLSRSRREIPDATCWVDADATELMRARTAMNASGGPKISLVALLARICTAALARFPELNSTVDTDAREVVRLDRVHLGFAAQTDRGLVVPVVRDAHTRDAEALTAEFARLTEAARAGRLTPGELTGGTFTLNNYGVFGVDGSTPIINHPEAAMLGVGRIVPKPWVHEGELAVRQVVQLSLTFDHRVCDGGTAGGFLRYVADCVEQPAVLLRTL

SEQ ID NO: 26640 - protein, 919 aa, Corynebacterium efficiens YS-314
MNELLRDDIRYLGRILGEVISEQEGHHVFELVERARRTSFDIAKGRAEMDSLVEVFAGIDPEDATPVARAFTHFALLANLAEDLHDAAQREQALNSGEPAPDSTLEATWVKLDDAGVGSGEVAAVIRNALVAPVLTAHPTETRRRTVFDAQKHITALMEERHLLLALPTHARTQSKLDDIERNIRRRITILWQTALIRVARPRIEDEVEVGLRYYKLSLLAEIPRINHDVTVELARRFGGDIPTTAMVRPGSWIGGDHDGNPFVTAETVTYATHRAAETVLKYYVKQLHALEHELSLSDRMNVISDELRVLADAGQNDMPSRVDEPYRRAIHGMRGRMLATTAALIGEEAVEGTWFKTFTPYTDTHEFKRDLDIVDGSLRMSRDDIIADDRLAMLRSALDSFGFNLYSLDLRQNSDGFEDVLTELFATAQTEKNYRGLTEAEKLDLLIRELSTPRPLIPHGDPDYSEATNRELGIFSKAAEAVRKFGPLMVPHCIISMASSVTDILEPMVLLKEFGLIRANGKNPTGSVDVIPLFETIDDLQRGAGILEELWDIDLYRNYLEQRDNVQEVMLGYSDSNKDGGYFAANWALYDAELRLVELCRGRNVKLRLFHGRGGTVGRGGGPSYDAILAQPKGAVRGAVRVTEQGEIISAKYGNPDTARRNLEALVSATLEASLLDDVELPNRERAHQIMGEISELSFRRYSSLVHEDPGFIQYFTQSTPLQEIGSLNIGSRPSSRKQTNTVEDLRAIPWVLSWSQSRVMLPGWFGVGTALREWIGEGEGAAERIAELQELNRCWPFFTSVLDNMAQVMSKAELRLARLYADLIPDREVADRIYETIFGEYFLTKEMFCTITGSQDLLDDNPALARSVRSRFPYLLPLNVIQVEMMRRYRSGDEGTAVPRNIRLTMNGLSTALRNSG

SEQ ID NO: 26641 - protein, 506 aa, Oryza sativa (japonica cultivar-group)
MSDSELSQSTVVFGLRMWVLVGVAVGAAFVLFLVLLSVLCLLASRRRRRRRGPNTSPVQQLPVSAPPKNPQKVKAPKDIQEVPAQATAAAAAKTPLAQVLQMPAPPPPPPPMAAAAPPPETVQIATGKEHRITYPEPPHRSGSSSHGSGEAPSVPEVSHLGWGHWYTLKELEAATEMFADENVIGEGGYGIVYHGVLENGTQVAVKNLLNNRGQAEKEFKVEVEAIGRVRHKNLVRLLGYCAEGNQRMLVYEYVDNGNLEQWLHGEVGPVSPLSWDSRVKIILGTAKGLMYLHEGLEPKVVHRDVKSSNILLDKHWNAKLSDFGLAKLLGSERSYVTTRVMGTFGYVAPEYAGTGMLNETSDVYSFGILIMEIISGRVPVDYNRPPGEVNLVDWLKTMVSTRNSEGVVDPKMPQKPTSRALKKALLVALRCVDPDARKRPKIGHVIHMLEVDDFPYRDERRGARAPVQARVADKPVAIEAGDRESDSSGNNSARQTEPFRWRNPES

SEQ ID NO: 26642 - protein, 258 aa, Legionella pneumophila str. Lens
MNLIEQDIDNNGILTLTLNRPEKLNALSTDVLNALNELFFQAKSNPKVKALLLTGNGKAFCAGADINRLAECNAQTGYEFACQGQEVFRLLETMGKPSLAAVNGFAFGGGCELAISATLRIASNKAMFGQPEVKLGVIPGYGGTQRLARLIGKGRAMDLCLTGRFINAETALNWGLVSEVVAPEDLLTQGKNILNGILSMAPLAVASVMEVIDHGYDLSLTEALHLEAIHFAKVCATEDKKEGVAAFLDKRTADFKGV

SEQ ID NO: 26643 - protein, 334 aa, Corynebacterium efficiens YS-314
MTIRVGINGFGRIGRNFYRAVLERSDDLEIVAVNDLTDNKTLSTLLKFDSILGRLSEEVEYDDESITVGGNRIAVYAERDPKNLDWAAHNVDIVIESTGFFTDAQAAKAHIDAGAKKVIISAPASNEDATFVYGVNHQDYDPENHHVISGASCTTNCLAPIAKVLNDKFGIENGLMTTIHAYTGDQRLHDAPHKDLRRARAAAVNIVPTSTGAAKAVALVLPELKGKLDGYALRVPVITGSATDLTFTTNSDVTVESINAAIKEAATGELAETLAYTEEPIVSTDIVTDSHGSIFDAGLTKVSGNTVKVVSWYDNEWGYTCQLLRLTELVASKI

SEQ ID NO: 26644 - protein, 321 aa, Legionella pneumophila subsp. pneumophila str. Philadelphia 1
MIFTQRTYTVYSMSAKIIRIATRQSPLALWQANHVREMLVKQWPNLSIELLPMITSGDRFLKDKLLSAGGKGLFVKELEEALLDKRADLAVHSTKDMPAQLPDGLLLTAICKRDNPFDALISPQFKSLAALPKNAIIGTSSLRRQSQLLAYNPNLQIKTLRGNIHTRLSKLESGEYQAIILAAAGLERMGLAHHITQLIPDDIMLPTCAQGALCIECRTDDLEIQELVHGLNDPISALCVHTERRVNAKLGGNCHIPFAVYCTITEEKLLLLRAKVLNMDGSQMIDDEQQGKIAEAEVIADRCTESLMTKGAMSLLSTIPS

SEQ ID NO: 26645 - protein, 434 aa, Candidatus Pelagibacter ubique HTCC1002
MATNQCQQNYKMSDKEIKVPNIGEFKDVEVIEVLVSNGQSVSKNDPLITIESDKSSVEIPASFDGKVKSVKIKVGDRVSEGDLILTVEQSGEQEKNIEQKTIKEEEPVANQNQVEKNAKVNPAQNTIKKDNSETSSASPKVRKFARELGVNINEIAGSERQGRIVEDDVKNFISSKINKAPDKTEAQPKKIISEFSHSDFGEIEVKDIPRVKKLASTYLVNSWTTIPHVTNHDEADITEMEVFRTSLTDMYTGERKKITPLAFIIKALVASLKKFPSFNSSIDNIENGKITIKKYFHVGIAVDTPHGLMVPKIRSADNKSISYISNELKTVSDQCRNLKIDKKEFFGGSMTITSLGGIGGSFFTPIINYPEVAILGVGKAQKKQIFINGKFETRTMLPLSLSYDHRIIDGAEAARFNNDLKENLGKNFAYKLAV

SEQ ID NO: 26646 - protein, 530 aa, Oryza sativa (japonica cultivar-group)
MEAVAEAVAAAVAAGVEPFPAVDKCDASGREAHAVAADLEGTLLRSRSAFPYYALVAFECGGVPRLALLLLLAPLAAALRAAVSEAAAVRVLVFAATAGARVREIESAARAVLPRFYAADVHPGAWRVFAACARRRVVLTATPRVMAEPFLVDCLGADAVAGTELATWRGRATGLVDDRRGGVLVGRRKAQALLDMFAGGDVPDVGLGDRRSDYPFMSLCKEGYIVPRSPAVEAVPMDKLPRPVIFHDGRLARRPTPLAALLAVLWFPVGFALACVRIAAGALLPMPWVYYAFWALGVRVVVRGAPPPRAERAAGRRGVLFACSHRTLLDPIFLSAALGRPVAAVTYSLSRLSEFLSPIRTVRLTRDRAADAAMIGELLDEGDLAICPEGTTCREPFLLRFSALFAELTDEVVPVAMESRMGMFHGTTARGWKGMDPFYFFMNPSPAYVVTFLGKLPPEHTCGAGGRSSHEVANYIQRLIAATLSYECTSLTRKDKYRALAGNDGVVDNATGKLPSPATATANNSKDKAC

SEQ ID NO: 26647 - protein, 457 aa, Tuber borchii
MSNLAPEPEFQQAYNELVHSLRDQNSSRLPQILRLLCLSSPPERVIQFRVTWEDDKGNFQVNRGYRVQFNSALGPYKGGLRFHPTVNLSILKFLGFEQTFKNALTGLNMGGGKGGSDFDPKGKSDNEIRRFCYSFMRELSKHIGQFTDVPAGDIGVGGREIGYLFGAYESYKNQFEGVLTGKGITWGGSLIRPEATGYGLVYYVAHMISYASGGKETFAGKRVAISGSGNVAQYAALKVLELGGKVITLSDSKGALIATGEEGFNETDIELIAKLKLDRGYLTQLHAAEDSFKSRFKYLPGERPWCHVDKVDVALPSATQNEVSEQEAKELIASGCKFLAEGSNMGSTQEAINVYEEDRKSRKADGLWYGPAKAANCGGVAVSGLEMAQNSQRLTWTSEQVDKELAGIMERCFWNCLNPAKEYFDIAEGELPSLVAGANIAGYVKVVNAMKAQGDWW

SEQ ID NO: 26648 - protein, 391 aa, Synechococcus sp. CC9605
MSRVGVVLLNLGGPERIQDVGPFLYNLFADPEIIRLPSPALQKPLAWLISTLRSGKSQEAYRSIGGGSPLRRITEQQARELQSLLRQRGIDATSYVAMRYWHPFTESAVADIKADGMDEVVVLPLYPHFSISTSGSSFRELQRLRQADPAFEKLPIRCIRSWFDHPGYVKAMAELIAAEVRNSDDPTKAHVFFSAHGVPKSYVEEAGDPYQKEIETCTGLIMKELAVQMGHDNPFTLAYQSRVGPVEWLKPYTEEALEELGQAKTNDLVVVPISFVSEHIETLEEIDIEYRELATEAGVVNFRRVRALDTYAPFIEGLADLVATSLQGPEVSLDAAAELPNKVKLYPQEKWEWGWNNSSEVWNGRLAMVGFSAFLLELISGQGPLHALGLL

SEQ ID NO: 26649 - protein, 574 aa, Synechococcus sp. CC9605
MSGATALMDALRRHGVDTIFGYPGGAILPIYDALHIAESEGWVKHILVRHEQAGTHAADAYARATGKVGVCFGTSGPGATNLVTGIATAQMDSVPMVVITGQVPRPAIGTDAFQETDIFGITLPIVKHSWVVRDPADLASIVAQAFLIAASGRPGPVLIDIPKDVGQEMFDYVPVEPGSIVPKGFRKPQPPRDEPILSALELIAEAERPLLYLGGGAISAGAHDSLRMIAERYQIPVTTTLMGKGAFDENDPLSVGMLGMHGTAYANFAVTECDLLIAVGARFDDRVTGKLDTFAPRAQVIHFEIDPAEIGKTRRPDVAVLGDLGLSVARLVELSLQQQVQPRTSAWLARIAEWKQTYPLTVPPTQGPLFPQEVLLAVRELAPNAIVTTDVGQHQMWAAQYLRNGPRGWISSAGLGTMGFGMPAAMGAQVACPDRQVVCIAGDASILMNIQELGTLAAYGLPVKVVIVNNHWQGMVRQWQESFYEERYSASDMLNGMPDFVALARSFGVDGVHIRERESLKRDLEAALKAPGPMLIDIHVRRGENCYPMVPPGKSNAEMVGLPAPMPVLNAPTS

SEQ ID NO: 26650 - protein, 257 aa, Parvularcula bermudensis HTCC2503
MYETIETAKDDAVLVVTLNRPDALNALNAQLMAELSDALKQAEGDNAVGAIVITGSEKAFAAGADIKEMASGEFATMYLEDKVSSGFDQINRCRKPIIAAVAGYALGGGCELAMACDFILAADTAKFGQPEITIGAIPGAGGTQRLARSVGKAKAMELCLTGRMMAADEAERCGLVSRVVPAADLNSEAIETAKKIAGFSRPVTLMVKEAVNRAFETSLQEGLLFERRSFHAVFALEDQAEGMAAFVEKRKPAFKNK

SEQ ID NO: 26651 - protein, 161 aa, Brassica napus
  misc_feature (113)..(114): Xaa can be any naturally occurring amino acid
  misc_feature (152)..(153): Xaa can be any naturally occurring amino acid
MAASMQLCGVRTSGLAFDSKSIEFGSKGLNLLAPVFTRDINHSCRKNRSLRVTCEARSAELLERKNTETFKLNRTEIKLTCVMKFGGSSVASAERMREVANLILSFPDEKPVXXVLSAMGKTTNNLLMAGEKAVCCGVTNINTIEELSYIRXXHIRTAHEL

SEQ ID NO: 26652 - protein, 459 aa, Synechococcus elongatus PCC 6301
MTGVENVVIIGSGPAGLTAAIYAARANLKPLMFEGYQLGGLPGGQLMTTTEVENFPGFPEGITGPELMERMRAQAVRWGAELYTEDVISADLSQRPFRIRSQEREVLAHSVIIATGATARRLSLPGEDRLWNNGISACAICDGAAPIFRDGELVVIGGGDTAAEEAVYLTKYAKHVHLLVRSDRMRASKAMQDRVLAHPNVTVHWHTEAIEAVGNTLLEAVRVRNNQTGEEKAIAAQGLFYAIGHTPNTKLFEGQIELDGTGYIRTKPDSVETSLEGVFAASDVQDHEYRQAITAAGTGCAAALLAERYLSAHNLLQEYKQEAAAAEPETKAAATPAASQPEASEFDPTSVYHEGSYALRKLYHESDRLLAVLYTAPTCGPCRTLKPILRKVAEEFSDRLHYVLIDIDADPEIAQSAGVVGTPTLQLFKDKAKVDEIRGVKMKSDYRARFEQHLQPVSR

SEQ ID NO: 26653 - protein, 588 aa, Hordeum vulgare
MVMGSTDRFDKSPLLDGGSSSQESTTEYTGDGSVCTSGHPASKKHTGNWKASSLTIVCSFCCYLAYSSIGKNLVSYLTKVLHETNLDAARHVATWRGTSYLAPLVGAFVADSYLGKYRTALIACTIFIMGMMMLLLSAALPLISAGPHAWTLWADPVSSRYIMFLVRLYMVGLGYGAQSPCVTSFGADQFDDTDEVEKTRKSSFFNWHYFSINAGSLIAGTVIVWVQEHEGWLWGFTISTLFVTLGISVFSLGSIVYRFQKPGGSPLARIWQVVVAASRNFDKVLPCDSSALYEFSGQGSAIEGSRKLVHTSGLEFFDKAAIVTLPDCESPGQLNEWKICTVTQVEELKILIRMFPIWSAMVLFAAVQEQMFSTFVEQGMTMEKHIGSFEIPAASFQSIDTITVIMLVPIYEKVLVPVIRKFTGRANGITSPQRIGIGLCFSMFSMLLAALVESNRLQIAQAEGLVHSKVVVPMSILWQGPQYFLLGVAEVFSNIGLTEFFYDESPDAMRSLGMAFSLLNISVGNYLSSFILSLVPVFTARGGSPGWIPDNLNEGHLDRFYLMMAGLSLLNIFVFAFYARRYKCKKAS

SEQ ID NO: 26654 - protein, 334 aa, Streptomyces coelicolor A3(2)
MTTVAVKPATMAQALTRALRDAMAADPGVHVLGEDVGTLGGVFRVTDGLAAEFGEDRCTDTPLAEAGILGTAVGMAMYGLRPVVEMQFDAFAYPAFEQVVSHVTKMRNRTRGKMPLPLTIRVPYGGGIGGVEHHSDSSEAYYMATPGLHVVTPATVADAYGLLRASIASDDPVVFLEPKRLYWSKDSWNPEEPASVEPMGRAVVRRSGRSATLITYGPSLAVCMEAAEAARAEGWDLEVVDLRSLVPFDDETVCASVRRTGRAVVVHESGSFGGPGGEIAARVTERCFHHLEAPVLRVAGFDIPYPPPMLERHHLPGVDRILDAVGRLQWEAES

SEQ ID NO: 26655 - protein, 866 aa, Idiomarina loihiensis L2TR
MNSFWTFLQLIFVILQVTSLALYALLPAPWSDTVLVAMILFSLIIGIVIWWWSRRNALTAPFRQPFLSSDSLQLFEQVFNDLPTRVYWRDPELKLLGGNRAFANDFGIDPESLAGKTDAEIDSLASNDVLLERDRKTFSQQAPSVNAEIELKVSGKSQWVEHSSVPLYDDDHNIIGILGSYYDISGIKSVAEEMEKAKETAERANQSKGEFLANMSHEIRTPINAIVGMANLCLKTELTQKQKRYIKVIDSSSQALLGVINDILDFSKIDAGKLTVERIPFDLQDVLTSLADMFAYRAYDKDLEFIINLPANIPTRLIGDPLRLNQVLVNLISNAIKFTEDGEINVAVNLLDSSRDNVLLRISVTDTGIGMDEEQRANLFKAFTQADTSTTRKYGGTGLGLAISRRLILLMGGDIGVTSAAGQGSTFYIEVELPLQTEQDNSHHQYLLQKLKGVRILAIDDNLSTREMLYEMLRSYQVDVKVCRTAEQALQVFQLSVEDNNPYQLVLVDWRLPGMDGLEFCQKITERYAEDIRPKMTLATGYYAEELSEKAKQAGVNDIISKPFTASTLGRSLTSTLFQRELSDADDADSGDGIPESILRAPILVVEDNEINQQVAREILSSHKFKVDIVENGQLAVEAVHNKNYSLVLMDIQMPVMDGLKAAQTIRADFNYQQLPILAMTANAMSGDEERSLAAGMQGHIAKPIDEQQLIKAIIKWAVPGDYTNNQQPEVPPESKQDEVNKPPVRIPQVKGIEFETALKRLQYNVELYLKLVEQLYETYQGSATKVSDFITRGQHESARRYFHSLKGAAANLGFTQLQSKAADLEQFMAEGNIDKVADQITELEKRLRYAHQAAVDLEAIQQHQS

SEQ ID NO: 26656 - protein, 615 aa, Burkholderia thailandensis E264
MRGGRGPGRSRGGRARARRAHARQSAVLYATRHAGRSAAILIVPPRRRAPRPPACRAPARRRGPPPIHAVSLLIAMTLNSLPVWPALQAHYEEIRDAHLRDWFAPANDRAPTRAERFTFEGGGLAADFSKNLITDATLALLVRLAREAGVEARRDAMFAGETVNPTEGRAALHTALRANSPDAPFHAQVAAERAKMARFADAVRAGAWTGYTGKRIRHVVNIGIGGSDLGPKMVVHALHHVATPDIATHFVSNVDGADLARVLERIDPQETLAIIVSKTFTTLETMTNARSLREWFVANGCPEDALAKHFVGVSANPAEVVKFGIAEANVFEMWDWVGGRYSLWSAVGLSIMIAIGPERFAELLAGAHDMDEHFRTAPLERNLPVLQGLVGIWYRNFFGAQSYLVAPYSEALHYLPSYLQQLEMESNGKSAQIDGAFVDYPTSAVTWGEPGTNGQHAFFQMLHQGPTLVPIDFIAVLTPEHPLASHHPKLLANCFAQSEALMLGRTLDEARKIAGPAHPELAPHLTFPGNRPTTTLLVDALTPRTLGALIALYEHKVLVQAAVWNINPFDQWGVELGKILGKVVEADLTAPQVDPAKHDSSTSALIARARKALGE

SEQ ID NO: 26657 - protein, 386 aa, Aspergillus oryzae
MFSLRTAQPAQSFLRRAAVTAPTVRSSLAARSFASVQSDIFKPTKYGGKYTVTLIPGDGIGAEVAESVKTIFKADNVPIEWEQVDVSGVDAGNKHSEELFKESIASLRRNKLGLKGILFTPVERSGHQSFNVALRQELDIFASIVLIKNIPGYKTRHENVDLCIIRENTEGEYSGLEHQSVQGVVESLKIITRAKSERISKFAFGFALANNRKKVTCIHKANIMKLADGLFRSTFHKVAENYPTLEVNDMIVDNASMQAVSRPQQFDVMVMPNLYGGILSNVGAALVGGPGVVPGCNMGRDVAVFEPGCRHVGLDIKGKDQANPSAMILSGSMLLRHLGLDDHANRISKAVYDVIGEGKTRTRDMGGQATTHEFTRAVLDKMEAAL

SEQ ID NO: 26658 - protein, 107 aa, Francisella tularensis subsp. holarctica
MSKCIDISDSQFESELVNSDIPVLLDFWAPWCGPCKMLAPILDQVAEHYGDKIKVCKINIDDNEETAMKFGVRGVPTLMVFKDGENKETKVGVVQKTQLISIVDKYL

SEQ ID NO: 26659 - protein, 501 aa, uncultured archaeon GZfos19A5
MHEKNRTIEIFDTTLRDGEQTPGISFTTEQKRTIARQLDALGVDIIEAGTPITSKEEKEVVQLICDEGLSAKICGLARILAQDIDACVDCGVDMIHIFVPSSEIQREHTTKMSEAQVKEQAYKMTRYVKERGFMCMFSAMDATRTRLEFLIDLYKTAEEGGADILNVPDTVGISEPFAMYELVGEIYRAVKVPISIHCHNDFGLAVANSLAAVKAGASEVQVSVNGIGERAGNADLVETVMGLNSIYGLKTNIKTERLFEMAKLIERLTGIPIPVTKPVVGDNAFSHESGIHTHGVIVRSDTFEPGIMTPEMVGHRRRIVLGKHTGKHTIEKKLSEIGMSPSKEELEEILKRIKELGASGKRVTDDDLFSIAEVVMGEIARHERIVVLKELSVMTGNNLIPTASLKAVVRGKECTSAQMGLGPVDAALKAIQQVIGGEIDGDIELKDFRIEAITGGSDALAEVIVGVKKGDRMVTARGVREDIVMASVEAFINAVNRLMQR

SEQ ID NO: 26660 - protein, 258 aa, Burkholderia xenovorans LB400
MAYENILVETRGRVGLVTLNRPKALNALNDALMDELGAALREFDADDAIGAIVVTGSEKAFAAGADVGMMSTYTYMDVYKGDYITRNWETVRSIRKPIIAAVAGFALGGGCELAMMCDIIFAADTAKFGQPEIKLGIMPGAGGTQRLPRAVSKAKAMDLCLTARFMDAAEAERAGLVSRVIPAASLVDEAVAAAATIAEFPLPAVMMVKESVNRAYETTLAEGVHFERRLFHSLFATEDQKEGMAAFVEKRKPVFKHR

SEQ ID NO: 26661 - protein, 523 aa, Candida maltosa
MAIEQIIEEVLPYLTKWYTILFGAAFTYFLSIALRNKYYEYKLKCENPPYFKTAGFVGIPGLIDVIKAKNAGKLADYADQTFDEYPHHSFYMTVAGMLKIVLTVDPENIKAVLATQFNDFALGARHAHFDPLLGDGIFTLDGEGWKHSRAMLRPQFAREQIAHVKALEPHVQVLAKQIKLNKGETFDLQELFFRFTVDTATEFLFGESVHSLYDEKLGVPPPNNIPGRENFAKAFNTSQHYLATRTYSQMFYFLTNPKEFRDCNAKVHKLAQYFVNKALDASEDEVAEKSKGGYVFLYELVKQTRDPKVLQDQLLNIMVAGRDTTAGLLSFAMFELARNPKIWNKLREEIEVNFGLGEEARVDEISFETLKKCEYLKAVLNETLRMYPSVPVNFRTATRDTTLPRGGGKDGTSPIFVPKGSSVVYTVYKTHRLEEYYGKDAYEFRPERWFEPSTRKLGWAYVPFNGGPRICLGQQFALTEASYVITRLAQMFEHLESKDETYPPNKCIHLTMNHNEGVFISAK

SEQ ID NO: 26662 - protein, 380 aa, Klebsiella pneumoniae
MERVLINDTTLRDGEQSPGVAFRTSEKVAIAEALYAAGITAMEVGTPAMGDEEIARIQLVRRQLPDATLMTWCRMNALEIRQSADLGIDWVDISIPASDKLRQYKLREPLAVLLERLAMFIHLAHTLGLKVCIGCEDASRASGQTLRAIAEVAQQCAAARLRYADTVGLLDPFTTAAQISALRDVWSGEIEMHAHNDLGMATANTLAAVSAGATSVNTTVLGLGERAGNAALETVALGLERCLGVETGVHFSALPASCQRVAEAAQRAIDPQQPLVGELVFTHESGVHVAALLRHSESYQSIAPSLMGRSYRLVLGKHSGRQAVNGVFDQMGYHLNAAQINQLLPAIRRFAENWKRSPKDYELVAIYDELCGESALRARG

SEQ ID NO: 26663 - protein, 412 aa, Rubrobacter xylanophilus DSM 9941
MPQTLAIVGAGPAGGSAAAALRREGFEGRVILIGAEPHPPYERPPLSKEYLRGETSFEQALLQPSGFYRENGIEAWFGVRATRVDAARREVELENGERLAYDGLLIATGARNRRPAIPGLGLGGVHQLRTVADCDRIRQEIAPGRRAVVVGMGFIGSEVAASLRQSGVEVTVVDRNEVPLRRALGREVGRVIEELHRDHGAELILEDAVAAFEGRERVERVTTRGGRRIGCDFVVVGLGAEPVTDLLAETGAKIQNGIVVDEHCRTSVEGVYAAGDVANHYHPTFGRHIRTEHWQNALRQGSVAARSMLGKKSAPYEEIPWFWSDQYGHNLQYAGLHTEWDELVVRGSMRERDFLAFYRKDGRVLAAVAIGRGRELRRSIPLIKARERVEAAKLRDPDVDLRALAGAAGSRR

SEQ ID NO: 26664 - protein, 245 aa, Nocardia farcinica IFM 10152
MTYTLVLLRHGESEWNALNLFTGWVDVHLTDKGVAEGKRAGELLAEHGILPDIVYTSLLRRAISTANIALDAADRHWIPVVRDWRLNERHYGELQGKNKAQIRDKYGEEQFMLWRRSYDTPPPPIEAGNEYSQEGDARYAGIDIPKTECLLDVVNRMVPYWESTISKDLLAGKTVLIAAHGNSLRALVKHLDQISDEEIAGLNIPTGIPLRYELDENLRPVRPREYLDPEAAAAGAAAVASQGGK

SEQ ID NO: 26665 - protein, 457 aa, Halobacterium sp. NRC-1
MGISPPLTAVSAFGTDVSGNAFIGAGVATLAVLMVLSAFFSSSEIAMFSIPRHRIDALVEEGRSGADAVAALKSDPHRLLITILVGNNLVNIAMSSIATGLFATSMSQGKAVLAATFGVTALVLLFGESAPKSYAVENSESWALSIAKPLQWSERFLYPLVVLFDYLTRAVNQFTGGRAAIESSYVTRSEIQDMIKTGEREGVIEEDEREMLQRIFRFNNTIAKEVMTPRLDVVAVSKTDTIEAAIQTCTQAGHERVPVYDGELDNVIGVVSLEDLVRESLYGETEDAELDDLIEPTLHVPESKNVDDLLQEMQDERVQLVVVIDEFGTTEGLLTAEDITEEIVGEILDGGEDLPIDSVDEDTVRVRGEVNIEEVNEALNIDLPEGEEFETIAGFIFNRAGRLVEEGEAFRFEDIELTVEHVENTRIMKARVQRLDSAAEADANAEVLTADSTGNGA

SEQ ID NO: 26666 - protein, 322 aa, Zea mays
  misc_feature (267)..(267): Xaa can be any naturally occurring amino acid
MAKKRKRTDAPAEAAGAEKPDDSAPARPERTLFGFKDLVPDAEPASAGAEAAVAPFRNREKVLITCSRRITYRYRHLMQDVLSLLPHAKKDSKVESKQSKGNALNELLELRSCSSCLFFECRKQKDLYLWMVKSPGGPSVKFLVNAVHTMEELKLTGNHLKGSRPLLTFSTNFDEQPHWKLVKEMITQIFATPKDHRKAKPFHDHVFVFSIVDGHVWFRNYQISVPHNEIDKVDKGGLDKMTLIEVGPRFCLNPIKIFGGSFGGPTXYENPYYISPNQIRALEKRQKAGKYAKKVKAKVRRKMHEMENTLEPDEFAELWKGE

SEQ ID NO: 26667 - protein, 434 aa, Corynebacterium efficiens YS-314
MMTVTENAVTENAAQNIQLDTVEEAIAEIAAGRAVVVVDDENRENEGDIIFAAELATPELVAFMVRYSSGYICTPMTSEDADRLDLPPMTAHNQDARGTAYTVTVDANTGSTGISATDRAHTIRLLADPNSDRTDFTRPGHVVPLRAREGGVLVRAGHTEAAVDLARAAGLRPAGVICEVVSEEDPTGMARLPELRRFCDTHGLKLISIEQLIAWRRQNEILVERVVETKLPTEIGEFTAVGYRSKVDGTELMAIVEGDPSSDGGENVLVRVHSECLTGDVFGSRRCDCGQQLNESLRMIHEAGRGVVVYMRGHEGRGIGLLAKLRAYQLQDEGADTVDANLSLGLPADAREFGTGAQILYDLGVRSINLMSNNPTKRMGLEGHGISIAGRTPIPVQVHEDNIRYLRTKRDRMGHILPAIDEWDAAHGNTDKTT

SEQ ID NO: 26668 - protein, 331 aa, Medicago truncatula
MEVKTSNLTHETDDSTYDRNAEVKAFDDSKLGVRGLMERGVTKIPRMFYSGEANIIENSINNSMLSVPIIDLKDIHIYPSRRVEVINQIRTACKEWGFFKVINHGIPINVLDETIDGIRRFHEQDPEVRKQFYNRDMEKKIVYLSTISLYRDKFANWRDSVGCFMTPNPPKYEELPEVFRDIIIEYSKKITTLGGTILELFSETLGLDLSYLKERNYLDGLFIQGHYYPPCPEPELTMGTSEHTDPSFMTIVLQEQLGGLQVLRDNQWFDVAPAHGGLVVNIGDLLQNGGNRDLSSCPLVKASVGGGAAMRRVAQAEPPRDASQPGCTPPE

SEQ ID NO: 26669 - protein, 372 aa, Xanthomonas campestris pv. campestris str. ATCC 33913
MVCPSGRVLRQPSDAEAAHCLGMTPDIDPDHRYDVAIVGAGPAGLATAVYAASEGLSVIVLDQRAIGGQAGASARIENYLGFPTGISGQALAGRAYNQALKFGAELAIPLEAATLECGREDGALRLDLADGKQLQASTVVIASGARYRRPQIDQLDRFEGHGVSYWASPVEARLCEGGVVALVGGGNSAGQAVAFLAPRVKELHLIIRGEGLEASMSQYLIERIAALPNVTLHTGTEVAALEGDPERGLQAAVLRTRADGQTQRLELRHLFLFVGADPNTGWLQQCVETDAHGFVVTGSVRAEGLPPCLPLETNRRGVFAIGDVRAGSVKRVAAAVGEGAAVVAQIHQFLAHQATPVAVSELANATQESATS

SEQ ID NO: 26670 - protein, 254 aa, Ralstonia eutropha JMP134
MSDTLQLETRGNILLITMNRPEARNAMDFETATALAAALDQLESRDDLSVAILTGAGGTFCSGMDLKGFLAGKRPSLPGRGFGGLTEAQPRKVLIAAVEGYALAGGFEMALACDLIVASKAAKFGLPEVKRGLVAAAGGLMRLPSRIPYHIAMEYALTGNMLGAEQAHTYGLVNRLTEPGQALEAAIALAEEVGANGPMAVAVSKQIVSESADWSAAEMFERQRPLVAPVFTSSDAREGAAAFAEKRKPVWTGK

SEQ ID NO: 26671 - protein, 332 aa, Oryza sativa
MLRAAKYLLGSPGANGFGSKSTAEDVCPDLGCITAIITGATSGIGAETARVLAKRGARVVIPARNVKAAEDMRARIRGECPGADVLVLPLDLSSLASVRAFADRFLSLGLPLHLLINNAGKFSHGQLALSEDGVEMTFATNYLGHFLLTKLLLGRMAETAAATGVQGRIVNVSSSVHSWFAGDWAEYLDLVTRRKIAYDATQAYAVSKLANVLHTKELAVRLKEMGANVTVNCVHPGIVRTRLNRDRDGLVTDLVFLLLSKLLKTIPQAAATTCYVAAHPRLAGVSGRYFADCNEALPSPAATNRHEAERLWQISESMLLCTNRHSKDASAP

SEQ ID NO: 26672 - protein, 597 aa, Vibrio fischeri ES114
MHPQTSQRVEQLRTWLAQQDFDALIIPHEDEFLGEYIPEHNERLHWVTGFTGSAGAAVITKEKAAIFVDGRYTVQVRKQVPADVFEYRHLHEEPLLEWIKDSLTSGSKVAIDPRMHTAQWLKTASKNVEGVVTLEAIATNPIDELWLDRPEVKVSDVRLMSLEFVGKSSEDKRKEIAKEVSKKKADAALLTQLDSICWLLNIRGLDVSRLPVLLSHAIIHADESVDFFLEPSRLPAEFNAHVGQGVRVHQPDALQETLESLAGKKVLVDSATSNAWMSLVLSNANAQIIEASDPCLLPKAAKNETEKAGMRACHVRDGAAMAKFLTWFDAEIEAGNLHDEAVLADKLQAFREEDASLADLSFDTISAAAGNAAMCHYNHQNQPEPGKLQMNSLYLVDSGGQYPDGTTDITRTLAVGTPSDDIKQQFTLVLKGHIGLANARFPKGTCGHQLDILARQHLWAQGYDYDHGTGHGVGHFLSVHEGPQRIAKVVNNTALLPGMVLSNEPGYYRADEFGIRIENLELVVEIETQGDFSVLGFESLTRCPIDKRLINVDMLNRPELAWLNNYHQKVWNEVSPLVDGEVKEWLKQATAELSYES

SEQ ID NO: 26673 - protein, 221 aa, Corynebacterium efficiens YS-314
MAQQRKPIIAPSILAADYARLGEEIAAVPDADWIHVDIMDGHFVPNLSFGYDVTRAVHRVTDKPLDVHLMIENPEKWVDHYIDAGAACVIFHVEATDKHVELAQHIRSKGVRAGFSLRPGTPIEDYLDDLEHFDEVIVMSVEPGFGGQSFMPDQLDKVRTLRRVIDERGLDIIIEIDGGISATTIEQAAEAGVDAYVAGSAVFGADEPNAAVQELRALASK

SEQ ID NO: 26674 - protein, 87 aa, Zea mays
MSSRRSRASTVSEEEINELISRLQTLLPSARRRGGSQASTTKLLKETCSYIKSLHREVDDLSDRLSDLMASMDHNSPGAEIIRSLLR

SEQ ID NO: 26675 - protein, 539 aa, Silicibacter pomeroyi DSS-3
MFQDLHALHTRTSGRRILDLFAADLRRAERFSADLGEMRLDYSKTQIDDAIRAGLIALCDRAQLADKREAMFAGAPINETEGRAVLHTALRNLDGGPVHVDGAEVMADVRLTLARMRRFAEALRSGALPGAGGAITDVVNIGIGGSDLGPAMAVLALAPYHDGPRCHFVSNVDGAHIADTLRGLDPARTLVIVASKTFTTIETMTNARTARDWMQRGGGDPERQFAAVSTATDRTAAFGIPGDRVFGFADWVGGRYSLWGPIGLSLMIAIGPDDFDAFLRGAQEMDRHFQSAPWEKNLPVMLALTGIWHHQICGHPSRAVLPYDQRLARLPAYLQQLEMESNGKSVAMDGTALDQAAGPIVWGEPGTNGQHAFYQLIHQGKQVVPCEFMVAARGHEPDLAHHHRLLIANCLAQSEALMRGRPLDEARAIAAARGVAGDELERQARHRVFAGNRPSTTLIYPRLTPAMLGRIIALYEHRVFVEGVILGINSFDQWGVELGKELATSLGPVVDGTESAAAKDGSTAALVDYVLAHRDTDLT

SEQ ID NO: 26676 - protein, 470 aa, Lactococcus lactis subsp. lactis Il1403
MTENSTQEVVKDLEEYKFGFHDNAELEFTTGLGLTEEVIREISETKNEPEWMLEFRLKSFEAFKKLDMPKWGPDLSGIDFNDIVYYQKPSAKAARSWEDVPQEIKDTFEKIGIPEAERSYLAGASAQYESEVVYHNMKDEFEKLGIIFTDTDSGLRDYPEIFKKYFSKLVPPTDNKLAALNSAVWSGGSFVYVPKGVKCEIPIQAYFRINNEKSGQFERTLIIVEEGASIQYVEGCTAPTYSASSLHAAVVEIFVEEGGYMRYSTIQNWSDNVYNLVTKRAAAEKNATVEWIDGNLGSKVSMKYPAVHLNGPGARGTMLSIAFAGANQNQDTGAKMIHNAPNTSSSIISKSIAKNGGAVNYRGQVTFGKNSKKSASHIECDTILMDDLSKSDTVPFNEIHNSQVALEHEAKVSKISEEQLYYLMSRGLTEKEATDMIVMGFIEPFTKELPMEYAVELNRLISYSMEGSIG

SEQ ID NO: 26677 - protein, 447 aa, Salinibacter ruber DSM 13855
MTPLDILRAHEPGQWTRPEDCASRTPLPIDEGDRVGVVLFNLGGPSTLGEVEPFLYRLLMDPLLLDVPVGGRMRRWLARSVAYLRAGTLREHYELIGGASPVPRLAREQATVLQDHLDARYGGPAGVGVRVYSAMRYGRPFPEKVAADMEADGVDKVVLVPSYPQYAAGTTGSALAYWKALGARGERPSWPTTVVPEYAANPKYVQAVSERIDEALQRFPRHVREEVALVFSAHGSVFDAQGPRKPPYCCHVHSTVDRVMQHRGRDRPFRTAFQSLMGPNHWLTPSTPDTIAALAEQGHRAVLVVPIAFVTDHVNVRYDLDVDVRETASAHGIDYFEVTAGLNTHPLFIEALGEATMAQLDVPIDTNQRRHGGDGHAQTYPLRPLQQLPRHKVTRDGACPTCGRQWGARRWTHPDRPTQSATATDRPASPPDERSSPLAESRSKEDP

SEQ ID NO: 26678 - protein, 265 aa, Ralstonia eutropha JMP134
MADFLRYEQQGHIVTLTMNEPERRNPLTGNTAVDEFLAAIDRIHGDRSVRAVIITGAGTAFSSGGNIHDMERQASGEVSGMEIRQDYRCGIQRLPLALFNLEVPVIAAVNGAAMGAGLDLTCMCDIRIASERAQFAESFVRLGIIPGDGGAWLLPRVIGLSRAAEMIFTGESISAQQALEWNLVSRVVPPEELLPAANAMAERIAANPPHAVRLAKRLMREGMHTRLDTLLELSAGFQALSHQTADHREAVQAFLEKRKPVFSGN

SEQ ID NO: 26679 - protein, 418 aa, Lactococcus lactis subsp. lactis Il1403
MNQEILNFSQMHAEPAWLSDLRQKAALEFENLELPNIERVKINRWGLDHLSISENEEIGSVPTFTEIPNHPLLVQVGSQTVMEQMTPNLAEQGVIFTDFNSALTEIPELLEENFGSVVPFNESRLTAANTVTFNSGLVLYVPDGVEVLEPIESILMQEGSSEVPFNKRILIIVGKNAKVDYLERLETSDEQSSKAKANIVVEVIAKAGAQVKFAAIDRLGENVTASVVRRGLIGDNATVDWSVGVMNDGNVVADFDSDLKGNGSHSQIKVVGISTGHQTQGIDTRVTNFGLNSVGHILQNGVILDKGTLTFNAIGHIIKGAKNADAQQSSHVLMLSDKGRGDANPILLIDENEVTAGHAASVGQVDEEDLFYLQSRGLDEETAKRLVIRGFLGSVVSEIPVKSVQAEFIETIERKLGM

SEQ ID NO: 26680 - protein, 379 aa, Schizosaccharomyces pombe
MVADTKLYDCLEVRPEASEAELKKAYRKLALKYHPDKNPNGEKKFKEISLAYEVLSDPQRRKLYDQYGITEGNAAPPPPGAEGGPGAGFGCFPGAGPGGARTFHFNMGGPGGAQFFSASDPNDIFERVFGHAFAGGGGMGGGMGGMGGMDDDMDMDGGFGTRTRGGGMPGGFANMFGGGGAGPHARRSHPSFGGSRPSQPPAQNEVITRPLNVSLEDLFTGCTKKMKISRHIIDASGQSVKADRILEIKVKPGWKAGTKIKFAGEGDEKPDGTVQDIQFVLAEKPHPVFTRSGDDLRMQVELSLKEALLGFSKQISTIDGKKLKVSSSLPTQPGYEITYPGFGMPLPKNPSQRGNMIIECKVKFPTELTPAQKTAAEAF

SEQ ID NO: 26681 - protein, 541 aa, Glycine max
  misc_feature (519)..(519): Xaa can be any naturally occurring amino acid
MDISVSFSKTRPPPFSPSLCRQLSLRPNAPQLLRFSRNNGTFRRKPPPTISRPNKLAVTAIQISNLSENEDDFVLEDVPHLTDFLPNLPSYPNPLQKSQGYSIVKKTFVSPEDVVAENVVIQKGSPRGVHFRRTGPREKVYFKPEEVRACIVTCGGLCPGINTVIREIVCGLNNMYNVEDILGIEGGYKGFYSKNTMMLTPKVVNHIHKCGGTFLRTSRGGHDTHKIVDNIEDRGINQVYIIGGDGTHKGTALIYEEVKKRGLQVAVAGIPKTIDNDIAVIDKSFGFDTAVEEAQRAINAAHVEVESVENGVGIVKLMGRYSGFIAMYATLASRDVDCCLIPESPFYLEGRGGLFEFIEQRLKENGHLVIVVAEGAGQEYIAAEVHAADKKDASGNKLLLDIGPWLSDKIKDHFSMSRKMAVNMKYIDPTYMIRAIPSNASDNIYCTLLAHGAVHGAMAGYTGFTVGPVNSKHAYIPIARVTEKQNKVKLTDRMWARLLASTNQPSFVASDQERVEKEXNEYINNMNIASLSRFKCLMGID

SEQ ID NO: 26682 - protein, 163 aa, Arabidopsis thaliana
  misc_feature (106)..(106): Xaa can be any naturally occurring amino acid
  misc_feature (118)..(118): Xaa can be any naturally occurring amino acid
  misc_feature (124)..(124): Xaa can be any naturally occurring amino acid
  misc_feature (131)..(131): Xaa can be any naturally occurring amino acid
  misc_feature (134)..(134): Xaa can be any naturally occurring amino acid
  misc_feature (139)..(139): Xaa can be any naturally occurring amino acid
  misc_feature (144)..(144): Xaa can be any naturally occurring amino acid
  misc_feature (150)..(150): Xaa can be any naturally occurring amino acid
  misc_feature (154)..(154): Xaa can be any naturally occurring amino acid
  misc_feature (159)..(160): Xaa can be any naturally occurring amino acid
  misc_feature (162)..(162): Xaa can be any naturally occurring amino acid
MASSMLSSAAVVTSPAQATMVAPFTGLKSSASFPVTRKANNDITSITSNGGRVSCMKVWPPIGKKKFETLSYLPDLTDVELAKEVDYLLRNKWIPCVEFELEHGFXYREHGNTSGYYXGRYLTXWKFHLFXLNXSAQVXLKEVXDSKKGXPGGXIRSTXXQXP

SEQ ID NO: 26683 - protein, 368 aa, Kodamaea ohmeri
MSTKTITVVPGDHVGTEICDEAIKVLKAIEKVSPVKFEFKHHLIGGAAIDATGVPLPDETLEAAKSSDAVLLGAVGGPKWGTGAVRPEQGLLKIRKELNLYANLRPCNFVSDSLLELSPLKSEIVKGTNFTVVRELVGGIYFGERQEQEESSDGQSAWDTEKYSVEEVTRITRMAAFMALQHNPPLPIWSLDKANVLALSRLWRKTVDHVMSTEFPQLKVQHQLIDSAAMILVKSPSQLNGVIITSNMFGDIISDEASVIPGSLGLLPSASLASLPDTNSAFGLYEPCHGSAPDLPANKVNPVATILSVAMMLRLSLDCLKEAEALEKAVGQVLDAGIRTADLRGSSSTKEVGDAVAAAVEKILAEGK

SEQ ID NO: 26684 - protein, 159 aa, Codonopsis lanceolata
MAGYGDSFQTGRDQARQTDDYGNLVRQTDEHGNPIHPTTGGTIGDHISTGGYGTGTGEHNAGHQGQQHHGDTGGVTGVLHRSGSSSSSSSEDDGMGGRRKKGIKEKIKEKLPGGRKEEQRTSTTTPGTGAVYGGHEVEPEKKGLVEKIKEKLPGAHAHH

SEQ ID NO: 26685 - protein, 263 aa, Burkholderia xenovorans LB400
MSYEAIRLDIDASSHVATITLNRPDKLNSFTRAMHQELSAALDQVEASGARALVLTGAGRGFCAGQDLADLDFTPGAMTDLGELIEQHFNPLIRRLQALPLPVIAAVNGTAAGAGANLALACDLVLAARSASFIQAFVKIGLVPDSGGTWFLPQRVGMARALGLAITGDKLSAEKAESWGLIWQAVEDAELAGTATKLASQLAQQPTRAIAAIKQAMRAGATQTLDQQLDLERDLQRELGASHDYAEGVQAFVEKRAPRFEGR

SEQ ID NO: 26686 - protein, 185 aa, Triticum aestivum
  misc_feature (174)..(174): Xaa can be any naturally occurring amino acid
MASPALISDTDQWKALQAHVGAIHKTHLRDLMTDADRCKAMTAEFEGVYLDYSRQQATTETIDKLFKLAEAAKLKEKIDKMFKGEKINTTENRSVLHVALRAPRDAVINSDGVNVVPEVWAVKDKIKQFSETFRSGSWVGATGKPLTNVVSVGIGGSFLGPLFVHAALQIDPKXAESAKGWQLRL

SEQ ID NO: 26687 - protein, 205 aa, Candida albicans SC5314
MGQEVEGDSVGDEFKGYIFKITGGNDKQGFPMKQGVMHPTRVRLLLSKGHSCYRPRRTGERKRKSVRGCIVAQDLSVLALSIVKQGDNEIEGLTDTTVPKRLGPKRANHIRKFFGLTKEDDVRDFVVRREVTKGDKTYTKAPKIQRLVTPQTLQRKRALKAKKVKNAQQQRDAAAEYAQLLAKRLHERKEERAEIKKKRAESLKN

SEQ ID NO: 26688 - protein, 378 aa, Burkholderia pseudomallei K96243
MTLASTPDIIAELKAGRMVILVDEEDRENEGDLVLAAEFVTPEAINFMARYGRGLICLTLTQERCKQLNLPLMTYRNGTQYGTAFTVSIEAAEGVTTGISAADRARTIATAVAHDVRPEHIVQPGHVFPIMAQPGGVLVRAGHTEAGCDLTALAGLTPAAVICEIIKDDGTMARLPDLLEFGKEHGLKIGTIADLIHYRSRTESIVERVAERTMQTAHGPFKTVLYRDHPTGSPHIALVRGTPTPNDETPVRVHEPLSVLDLLETGVSTHSWTLDAAMKEIAARELGVIVLLNCGDTKEHLVDVFLAFDEKEKAAELKRRPVDFKTFGIGAQILRDVGVGRMQVLSNPRKLGSMSGYGLEVTGFAPMPGSATSASGAA

SEQ ID NO: 26689 - protein, 419 aa, Pyrococcus furiosus
VEADPYEIVIKQLERAAQYMEISEEALEFLKRPQRIVEVTIPVEMDDGSVKVFTGFRVQHNWARGPTKGGIRWHPEETLSTVKALAAWMTWKTAVMDLPYGGGKGGIIVDPKKLSDREKERLARGYIRAIYDVISPYEDIPAPDVYTNPQIMAWMMDEYETISRRKTPAFGIITGKPLSIGGSLGRIEATARGASYTIREAAKVLGWDTLKGKTIAIQGYGNAGYYLAKIMSEDFGMKVVAVSDSKGGIYNPDGLNADEVLKWKNEHGSVKDFPGATNITNEELLELEVDVLAPAAIEEVITKKNADNIKAKIVAEVANGPVTPEADEILFEKGILQIPDFLCNAGGVTVSYFEWVQNITGYYWTIEEVRERLDKKMTKAFYDVYNIAKEKNIHMRDAAYVVAVQRVYQAMLDRGWVKH

SEQ ID NO: 26690 - protein, 453 aa, Arabidopsis thaliana
  misc_feature (253)..(253): Xaa can be any naturally occurring amino acid
ISKKKKKPSSFTSGLLLSTSVVVAGSFCYGCAMSYSSPAQSKIMEELGLSVADYSFFTSVMTLGGMITAVFSGKISALVGRRQTMWIADVFCIFGWLAVAFAHDKMLLNIGRRFLGFGVGLISYVVPVYIAEITPKAFRGGFSFSNQLLQSFGISLMFFTGNFFHWRTLALLRAIPCAFQVIWLFFIPESPRWLAMYGQDQELEVSLKKLRGENSDILKEAAEIRETVEISRKESQSGIRDLFHIGNAHSLIXIGLGLMLLQQFCGSAAISAYAARIFDKAGFPSDIGTTILAVILIPQSIVVMLTVDRWGRRPLLMISSIGMCICSFFIGLSYYLQKNGEFQKLCSVMLIVGLVGYVSSFGIGLGGLPWVIMSEIFPVNVKITAGSLVTMSNWFFNWIIIYSFNFMIQWSASGTYFIFSGVSLVTIVFIWTLVPETKGRTLEEIQTSLVRLS

SEQ ID NO: 26691 - protein, 1764 aa, Cryptococcus neoformans var. neoformans JEC21
MSHHPQLSVSTGSAGAGPSTPTLPRRPQGARRRGVMPGLFIANPDNSDEENSPPKAGSQRSSSGVSPISVSSSSGRGGPSSVSIPQPASPSHSIKERGSLPYPSIPAPQSSPLPSISAFPSPQPLIPTPSPAPIAYGHTPEISSGPPQPPPQPQRHLQRAFTTATPENAPRLLPEPRSSSTGTTSFHQQVNNSPSRALPSLPSPITRQSTMPSPVSQSPSTSHGQPYSAPPAYHPHDPTRVASPDDVMSPATGSEHGSIMSAGIGHRNRSASVQGQQVRLQVTTDNEAFHLVDITGINTAEGIREKVFSKLRIRDEDYPTLSMYRTEIGEPADETPILPAALLNICRTLGDSRASLKFLVKQTDVPPSSAASVIPPVSQTDYHPFRAASDPRRAGVPPITTDLPNPVLYRVSSRHSKEGKDWSGPGLSRSTRKSVLQNAGVRLSTSTGGSRSPVTEHSASLGTSSPALPTPPIPPHSTSLQAGEPSIHSSPSSRPSSRHYEFNELSLPPQFDHFKPSNAISVFPRPGTPISDSYQNENAFAGPSRPVMNQEQGSQGLGLTLDDDIDPETRALIEQFQREEQEAQKKEEERRRQLEADEELAKREQQSERELWEMMQQMQKEQRQREQAQIAEDEARARQVEEEQRQEEEQRQALEAARTAWEAEQREQRDQREQREQQESRFHTFEKDRRQRQQFFQNRARMGAPLDDSATWESTWMVGPSAEGSLSSRRPSEGRMPMVQTSAPRTSQTQSPALPPRQSSQPIYQPSQSQYLPDFAYSHRRPSGFPNTSYAETSHAQERLHDPRLQQATGRAPAPGQRGGTSNTPRPESQRLRHPFSYAAHEPSNERLQAPALSTARSVDNLRMTNGPLGMTSRQSQVYGPPRTSITPAPGFAEHRNIQPASATATSYRSPSSDRARDGRYPEPLHSSSRVATPMAPAIIDTGLVPFPSPHPNSAASSNSWRGHTPQFNSLPRSARGPTFDITRPNTVHYDRSPPPPTSPETAIPPRRPSTYYDEFHPPDTARTIVEDGATIRRPSSPFPWGDRARSGNASTPYRTASPVPVDQPRTSETNTFDDTDSQLPYAHNASPQSSWLSVSRAGAHRSDSDTLSVAGTVSSEATVRPGKGMGEDNDTNSGDTAKAGQWDRHLKEMIAKMGPGGGEGTVRPRKEEEEDEATLFITPPVRAPETSSSRTNAIRPSPSKPNLIVNTASLSQQAYDQVNPVLSASTPSDSATESEGTGEGDGEIEGSNIKRGKSFARPRDPNQWNFRPEPEQLYENLDRVFPQIDLDRPIVQGAESTPSTPGIESPSRVEIIGGLPLPAGAAPGRQGGPQAGSGPLGRAPQATGPSSAPTGAFNRSKFNKAENRRSIRVVADHKRRTLQRQVSRHEDLPPEYDVGAEEVNSAMDDQVVDPRSEEQRKKDNRRSSSMWDHKLVEVTRFARAQANREADIPESPASDGKPGTVNWVKGELIGKGSYGRVYIALNVTTGDMMAVKQVELPATEIERHDSRQQGMVKALRDEIELLKGLEHKNIVAYLGYETSPEYLSIFLEYVPGGTIASIYRTPNQARFEPQLVRFFTEQILEGLAYLHSKNIWHRDLKGDNILVDAQGICKISDFGISKQTADAYDSFGQATNMKGSVFWMAPEVIHSYSERSYSGKVDIWSLGCVVLEMWSGKRPWGDMEQFAAMFELFNKRSRPPLPPDINLSSVALDFLNEKCLATDPRNRPMARDLLQHEFIKNRDLTWTFKDSKIGKAVAKRGAKRPQA

SEQ ID NO: 26692 - protein, 641 aa, Desulfitobacterium hafniense Y51
MKTYNCFPFAAVCGQEKVKKALILAAINPRIGGVLISGEKGTAKSTLVRGLAQIMEDTDLINLPLNITEDRLVGSIDMGKAIQYGQKELEEGLLKKAHGQFLYVDEVNLLSPHIAGILLEVAATGVNIIEREGISHSHPARFVLVGSMNPEEGILSPQFLDRFGLYMEAKGEKEKAVRTEIMQRRLAYEQDPEGFCTQWQEAGQVLARRIKSSKSMLKEVQVPEEGYKLAAELAKAGRCAGHRAEIILVETARALAALAQRTELTAGDIREAATYVLPHRLRESLAIEEVMTEEQEMDKEEADSPAEGEKTPEKDERAPEGCEREPEQDREEPEEGRDPEPEKAEDRAIEDSSRISDENEKIEGIEKNGETLSIQILPENKLAPQGSGKRNKVRTDSRQGRYIRYRFLHGPLQDIAFDATFRAAAVKQAYRDKGELALAVRSEDLREKVREKRTGATLLFVVDASGSMGAKRRMGAVKGAILSLLNDAYQKRDSIGMIAFRKDGAEVLLNITRSVDLAQKCLETLPTGGKTPLAAGLAKAYELLKVDRIKNPEALQYIILVSDGKANLPLFSDQALKDALIVGKKIRHEGIRSMVLDTENSYIQFGFAKELADAMGSVYLKLQNITRTEIESTVKNVLKGT

SEQ ID NO: 26693 - protein, 228 aa, Zymomonas mobilis
MPTLVLSRHGQSEWNLENRFTGWWDVNLTEQGVQEATAGGKALAEKGFEFDIAFTSVLTRAIKTTNLILEAGKTLWVPTEKDWRLNERHYGGLTGLNKAETAAKHGEEQVHIWRRSYDVPPPPMEKGSKFDLSGDRRYDGVKIPETESLKDTVARVLPYWEERIAPELKAGKRVLIGAHGNSLRALVKHLSKLSDEEIVKFELPTGQPLVYELNDDLTPKDRYFLNER

SEQ ID NO: 26694 - protein, 445 aa, Triticum aestivum
MAMVTAKLSSPATARLAPVRSAQPARRASLVRVRASGGSYADELVSTAKTVASPGRGILAIDESSATCGKRLASIGLDNTEVNRQAYRQLLLTTAGLGEYISGAILFEETLYQSTTDGKTFVDVLKDQNIMPGIKVDKGLVPLPGSNNESWCQGLDGLASRCAEYYKQGARFAKWRTVVSIPCGPTALAVKEAAWGLARYAAIAQDNGLVPIVEPEILLDGDHGIERTLEVAEKVWSEVFFYLAENNVLFEGILLKPSMVTPGAEHKEKASPEAIAKNTLTMLRRRVPPAVPGIMFLSGGQSELEATMNLNAMNQSANPWHVSFSYARALQNSVLKTWQGQPENIEAAQNALLVRAKAGQMLLGRTLFPVPCRLHSPCLTFLKARKFKPWYQGYQRVWFRGPGPTMNPGAKVLMVWPQGALSTTSRVHASQSGELLLASPVVLLH

SEQ ID NO: 26695 - protein, 301 aa, Kluyveromyces lactis NRRL Y-1140
MFYFIFVSSFRVKKKAIYSRQNARASDHLLVDNNPSEISSYCVFIMEKEFMNLTGCTYSVAQEYLRKNGGRVEYALNDYYDNVDTIGGMRQSYNPSLVAIFEKYSNGVSATEWDSSGLIRFIEDLGISIEDPITLCLSQMLCIDDLTKPVSREQFLNAWSDLCCDTLRKMKAYLHTLEERLETDKDYFKSIYSYTFPLNTDEGSRHLPKDVAIEYWNIFFKDNKYALKISKERLNSWLEFINSDDSDPRKQNISNDIWLMFYKFIEQYPNDESLKQNYDEMAAWPLLIDEYYEFLEENDKL

SEQ ID NO: 26696 - protein, 942 aa, Schizosaccharomyces pombe; identical to SEQ ID NO: 510

SEQ ID NO: 26697 - protein, 507 aa, Blastopirellula marina DSM 3645
MAHAFDNDDFEQDPAARFPADAAEEQEDMFEDPSDDSQIDDPIRMYLMQMGEIPMLSRQEEVDAARQIEFWRTRFRHAFISNDFILEQSVQLLEQVRDGKLRLDRTVEVSVTNAKEKKNIMRRIGPNLVTLRKLLTGNVTDFKVVISKTASLAERCAASKNMIRRRAKAVRLIEELNLRTNKISALLPKLREISERMDTLLGQIDEATKAGVSRTGQTVNELRTELRYLMKVTLESPTMLRRRLLRISEFQEEYDAAKRLLSAGNLRLVVSIAKKYRNRGLSFLDLIQEGNTGLMRAVDKFEYQRGYKFSTYATWWIRQAITRAIADQSRTIRVPVHMIDTMGKVRAVTRDLLQELGRDPTAEEVAERAGLSIDDARVILKMNRNPLSLDQPVGDHDDSFFGEFLEDHRDEDPLYETHQQALKDRLCEVLEALNHREREIIRLRYGLTDGYSYTLEEVGKIFSVTRERVRQIESKAVRKLQQPYRSRGLASFLEGAEELVADHAETA

SEQ ID NO: 26698 - protein, 428 aa, uncultured archaeon GZfos19A5
MRDLWGLMREYDIVVVGGGPAGCMAAKYAAKAGASTLIIEENPAIGEPVQCAGLISKRAIEESELKNTGSFVNCELKGAIVHSQSHELRIEVPSPEKSAFAIRRDIFDKELAKAAMDEGAELILNSRVKHVKKGGERDSAKLTILAAATTTNAGVNLEENEIKANVVIGADGWRSGIARMAGLTVTKNFLNCVQIEGQYEIHEPVADIFVGKTIAPGFFAWVIPIGETTARIGLCIDKRFSTHPNPLPFLKRILSEHPVIAKKYKGTQSKFTAGAIPIPTERQKTVKTGDGTGILLVGDAAAQVKPITGGGVYYGMKCGKIAGEAAARACLERNMELLNGYEKRWQEEIGAEMAFGLKIHRLRCVFSDKDFDRMCRALSKYDMIQRITNRGDMDYPSFVFRELIKNPGIIMLMAKNIIKYLYAERKIR

SEQ ID NO: 26699 - protein, 152 aa, Glycine max
  misc_feature (85)..(85): Xaa can be any naturally occurring amino acid
TYSLCKPCFLYRASDCPRESDGASIQMRLSYSPAAQFFLFLVQWTDCHLAGVLGLLRILIYKVYEDGKTTMSIYEKKASLKEFYXGISDVEERKQKDLCATKYKPRDIIRRGKSSEIDIEREEECGICMEMNNKVVLPNCNHSLCMKCYRNW

SEQ ID NO: 26700 - protein, 310 aa, Rickettsia conorii str. Malish 7
MKITTKVLIIGSGPAGLSAAIYTARAALKPILINGMQPGGQLTITTDVENYPGFAETVQGPWLMEQMYMQAKNVGTEIVSDYVEKVDLSKRPFKVFTGAGNEYDAESIIICTGAEAKWLGIASEQKFRGFGVSACATCDGFFFKNQEIVVVGGGNSAVEEALYLTNHANKVTIVHRRDSFRAEKILQDRLFKNSKISVIWDHVVDEIVGSNKPKSVTGVKIQNVHTKEISLLNCSGVFIAIGHAPNTGLFTGQIVMDDDNYIITKSGTTRTSVEGVFAAGDVQDKIYRQAVTAAGTGCMAALEAEKFLNK

SEQ ID NO: 26701 - protein, 533 aa, Rhodospirillum rubrum ATCC 11170
MSDKRVYLYDSTLRDGAQTQGVDFSATDKAAIARELDALGIDYVEGGWPGANPTDDALFANPPVLRRARLSAFGMTRRSGRSAENDPSLQALFCPGVRVVTMVGKTWDFQCEVAIGVPLDENRKMIADSIAHAAARVEEAVFDAEHFFDGYKSNPDYALSCVRAAYEAGARWVVLCDTNGGTLPHQIEAIVGAVAAVIPGDHLGIHCHNDTENAVANSLAAVRAGARQVQGTLNGLGERCGNANLVSIIPNLMLKMGFETGVSEHDLRHLTHVSRMLDERLNRAPNRNAAFVGDSAFAHKGGLHVSAVERDPRCYEHIAPETVGNARQILVSNQSGRSNVIARFREIGLEIDPGEPKVNDLLDAVKRRESEGYAYDGAEASFELLARRALEGVPEYFRLNSFRVIDERRWNARGQLITLSEATIKAVVQGRDYMTVAEGNGPINALDAALRKVLLPVYPQLADLRLVDYKVRILTPDDATAAITRVMIESADSKGGRWNTVGVSGNIIDASYNALHDSLTYKLFKGEQASRAA

SEQ ID NO: 26702 - protein, 475 aa, Rickettsia conorii str. Malish 7
MNLLKNITGKNYINGEFIEFGKQISVINPATLKEIATVPNLGLSEINSAINNTVTSFSLWSQSSFEARIAILRRWYNLVIENIEELSYILTLEQGKVLAESKKEILYGASFIDWYTYAIHNIHSTIKPGNSNTHKIVTQYEPVGPSAAITPWNFPNAMITRKVVPAIAAGCSVILKPSSLTPLSALVLAKFASDAGLPAGVFNVITGSSDIIGKAFCEDFRLRKLSFTGATNVGKILYQNAANTLKRLSLELGGNAPFIITADNNLEKVVSDLVIAKTRNSGQSCTSPNRIFIEESIYEKFIEILKAKFTKLKAGDGFDKESDIGPLINSAAIEKIQKLLADAQSKGAKLICGGKTVDNFIEPTIIIDCLDNMDIFRIEIFGPVVACYKFKDLDEVIEHANNTEYGLQGYVYSNNISVAQMIASKLDFGMVSINDPLPANAKAPFAGRKASGFGVEGSFEGIFEYLNTKYINLQN

SEQ ID NO: 26703 - protein, 437 aa, Zea mays
  misc_feature (309)..(309): Xaa can be any naturally occurring amino acid
MESFGVPPAPVAAPEKRKKPLDLKDPVPAAAANGGGATKASPAAKWAEKKKLVGGDAGYVLEDVLHLTDYLPQLPTYPNPLQDNPAYSVVKQYFVNPDDTVTQKIVVHKTSARGTHFRRAGPRQRVYFQPDEVNAAIVTCGGLCPGLNTVIRELVCGLYDMYGVTSVVGIEGGYKGFYSKNTVALTPRSVNGIHKRGGTVLGTSRGGHDTAKIVDCLQDRGINQVYIIGGDGTQKGAPVIYEEVRRRGLKCAVVGVPKTIDNDIAVIDKSFGFDTAVEEAQRAINAAHVEAESAENGIGVVKLMGRNSXDHFKKKPRFPITLKYIDPTYMIRAVSSNASDNVYCTLLAHSALHGAMAGYTGFIVAPVNGRHAYIPFYRITEKQNKVVITDRMWARVLCSTNQPCFLSHEDVENMKHDDDEHHLHNTLLLDSPENSSK

SEQ ID NO: 26704 - protein, 559 aa, Blastopirellula marina DSM 3645
MPEKITIVIVGGVAGGASAATRARRMNEAAEIILLEKDEHVSFANCGLPYYIGGEIAERQKLLVATADLLRKRFRIDVRANQEATRIDRAAKQLDVRDHLKNEDYTLAYDKLILSPGAAPLVPPIENANAPGVFTLRNLADADKIREHAVKTSARKAVVVGAGFIGLEMVEQLHRLELKIVLAELQPQVLPPLDPEMTYPLEKALRDREVQLYLGDGIAGILTDERGNASGVKLQSGEVTTGDLVILGLGVRPNSQLAQEAGLEIGATGGIAVNRFSQTADPDIYAVGDAAEYPYGPTGKQQRVPLAGPANRAGRLAGEHAASGASAEMPDVQGTAIVRVFQQAAATTGLSVKMARKLGIDAWSVTIAANHHAGYYPGAKQLVLKLVFAPETGKILGAQCVGVAGVDKRIDVIATAMQFGGTVRQLAGVDLSYAPPFGSAKDPVHMAAFSACNYLDGVDLFLDSDANLSGQQVVDVRTEKEVSAKPLAGADDAIAIPLDDLRERLGELDQDRPTVVSCGVGVRAHVAARILRQNGFADVQNLSGGALVREWAIAQRTAE

SEQ ID NO: 26705 - protein, 174 aa, Xanthomonas campestris pv. vesicatoria str. 85-10
MPLNDLQHVPGANAAPADTHGFVFNHTMLRVKDATQSLDFYTRVLGFRLLDARDFADAKFSLYFLALLPEGTAIPDDDAQRRLWMAGIPGVLELTHNHGTETQDGPVYHDGNSDPRGFGHICISVPDIHAACARFDSLNVPYQKRLEDGRMKHLAFIKDPDGYWVEIISNTPLA

SEQ ID NO: 26706 - protein, 368 aa, Symbiobacterium thermophilum IAM 14863
MAQPTYHIACLPGDGIGPEVTRGAVTVLQAAAAAYGFRLEFSEYLVGGAAYDAVGTPFPDETRDACDRADAILFGAVGGPRYEGLPWDLRPEAGLLAIRKRYDLYANLRPILLYPPLKDASPLKNEIIGGGVDFIIVRELVGGIYFGEPRGIETLPDGTRRGVNTEVYTDAEIARIARMGFEIARGRRRRLTSVDKGNVMEAGKLWRTVVDEVAREFPDVEVEHLLADNAAMQILRRPGDFDVMLASNLFGDFLSDEAAMLTGSIGLLPSASLGAARNRFGLPKGFYEPIHGSAPDIAGQDRANPLAAILCGAMLLRHSLGREDAARAVEQAVAAVLEEGLRTADITVPGTAVLGTAAMARAVADRVH

SEQ ID NO: 26707 - protein, 917 aa, Pseudomonas sp. PCL1171
MLRKMGIKGRVLLLTLLPTSLMALLLGGYFTWMQLSELQTQLLQRGEMIAEQLAPLVAPPLSSKNTDLLERIATQSLEQPDVRTVSFLAPDRSSLAHAGPTMLNQPPIGNSSHLLQRTGNDATRYLLPVFGRHRNLAGELIPDESDRLLGWVEVELSHNGMLLRGYRSLFASLLLIAIGLICTAALALRISRTINSPISQIKLAVAQLKDGNLETRLPPLGSQELDQLASGINRMAETLQNAQEELQHSIDQATEDVRQNLETIEIQNIELDLARKEALEASRIKSEFLANMSHEIRTPLNGILGFTHLLQKSEMSPRQLDYLGTIEKSADNLLGIINEILDFSKIEAGKLVLDSVPFNLRDLLQDTLTILAPAAHAKQLELVSLVYRDTPLALVGDPLRLKQILTNLVSNAIKFTREGTIVARAMIEDEQEDSVQLRISVQDTGIGLSNQDVRALFQAFSQADNSLSRQPGGTGLGLVISKRLIEQMGGEIGVDSTPGEGSEFWISLNLPKTRDDVEDLPAAPLLGRRVAVLENHELARQALQHQLEDCGLEVTPFNSLENLTNGITSAHQTEQAIDLAVLGVTANDIPPERLNQHLWDLEHLSCKVLVLCPTTEQMLFNQSVPNPNSQLQAKPACTRKLRRALADLISPRPSRSEPGEPLSSRAPRVLCVDDNPANLLLVQTLLEDMGAKVLAVESGYAAIDAVKQETFDLVLMDVQMPGMDGRQSTEAIRQWESERHGTPLPVVALTAHAMANEKRALLQSGMDDYLTKPISERQLAQVVLKWTGLALRNQGPERAPDGLAPGVRLQVLDHEEGLRLAANKADLAADMLAMLLASLEADRQAITAAREANDNNALIERVHRLHGATRYCGVPQLRAACQRAETLLKQDDAKAMTALDELDMAIARLASEARVSA

SEQ ID NO: 26708 - protein, 344 aa, Haloferax volcanii
MTDDELKAVLKDLQTNITVVGCGGAGGNTVNRMHEEGIKGAKLVAANTDVQHLVEIGADTKILMGEQKTQGRGAGSLPQVGEEAALESQEEIYDAIEGSDMVFVTAGLGGGTGTGSAPVVAKAARESGALTIAIVTTPFTAEGEVRRTNAEAGLERLRDVSDTVIVVPNDRLLDAVGKLPVRQAFKVSDEVLMRSVKGITELITKPGLVNLDFADVKTVMERGGVAMIGLGESDSESKAQESVKSALRSPLLDVDISGANSALVNVTGGSDMSIEEAEGVVEEIYDRIDPDARIIWGTSVDDELEGMMRTMIVVTGVESPQIYGRNGEAQAHAEERLEDIDYVE

SEQ ID NO: 26709 - protein, 513 aa, Rhodobacter sphaeroides 2.4.1
MAALEETAVPEVRDGVDRETIETAQAMAGKYKYGWETEIEMDFAPKGLNEDIVRLISAKNDEPEWMTEWRLQAYRRWLQMEEPRWAMLDYPEIDYQDIYYYAKPKSMDVKPKSLDEVDPKLLETYKKLGIPLKEQAILAGVEGAEVPDAPRQVAVDAVFDSVSVGTTFQKELAKAGVIFCSISEAVREHPELVKKYLGSVVPQSDNYFATLNSAVFSDGSFVYIPPGTRCPMELSTYFRINAENTGQFERTLIIADKGAYVSYLEGCTAPKRDTNQLHAAVVEIVVLEDAEVKYSTVQNWYPGDEEGRGGIYNFRWTRKMPGPDCRGARSKVMWTQVETGSAITWKYPSCILRGDDSQGEFYSIAIANNAQQADTGTKMIHLGKNTRSRIVSKGISAGRAQNTYRGLVSMHPKATNSRNYTQCDSLLIGDKCGAHTVPYIEVKNNSSRVEHEATTSKVDDDQLFYCRSRGMDEEEAVALVVNGFCKEVLQALPMEFAMEAQALVAISLEGSVG

SEQ ID NO: 26710 - protein, 202 aa, Phaseolus vulgaris
EFLHFPAVVTSPATAKTYFLGGAGERGLTIEGKFIKFTAIGVYLEDKAVASLATKWKGKPSEELINTLDFYRDIISGPFEKLIRGSKILQLSGTEYSRKVMENCVAHLKSVGTYGDAEAKGIEEFAEAFKKVNFPPGASVFYRQSPDGILGLSFSEDATIPGEEAVVIENKAVSAAVLETMIGEHAVSPDLKRSLASRLLRY

SEQ ID NO: 26711 - protein, 873 aa, Pseudoalteromonas tunicata D2
MSNYSALKSNVNLLGQLLGQTIKAAQGDAILAKVEQIRALSKASRSGDGQSRHELIDLLHQLTDAELLPVARAFNQFLNLANVAEQFHTISRQNEANNHPLLDSLNTIAASNVSADAVQQAIVNLKVDLVLTAHPTEITRRTLVNKHRELNDCLVALELDSLLPSEQAILLNRIEQLICQAWHTNEIRQQRPTPVDEAKWGFAVIENSLWQAVPDFLREFTDLVDHKFKFSLPLDYNPIVFTSWMGGDRDGNPFVTAKVTKEVLDLGRWMAINLYLRDIDKLSAELSMNQCDSELGELTGHAHEPYRFVISQLRDQLRETEHHLTAKIKGHSSDAKDIITSIDQLKQPLEACYRSLHHSKMGVIADGLLLDVLRRIHCFGLYLTKLDIRQDSDRHSQVFAELTDYLAIGDYNAWSEQQKQTFLLTELQSKRPLIPRNWQPSSDVQEVIDTCKVIAETSQERFGIYIISMARKASDVLAVHLLLKEAGCPYVLPVAPLFETLDDLNAGPAVIETLFNEPWYKNHVKNQQYVMIGYSDSAKDAGMMAAGWAQYEAMDKLVQFSEQQDIELILFHGRGGTVGRGGAPAAQALRSQPPGSLKSGLRVTEQGEMIRFTFGLPQVAQQSLSLYAGAVLENNLLPPPEPQAKWQEVMAVISAVSCEHYRAIVREHQDFVPYFRAATPEQELAQLPLGSRPAKRKANGGVESLRAIPWIFAWSQNRLMLPAWLGAAAGLVAAEKQFGPDVLAQMNKQWPFFRTRIEMLEMVFCKADTWLSEHYDHHLVPKELQPLGETLRSELTAAVELVRGYCQNGVLLAAQPWVQQSIELRNPYTDPLNVLQVELLRRARRESLAEGCEVNQALMITMAGIAAGMRNTG

SEQ ID NO: 26712 - protein, 221 aa, Phaseolus vulgaris
MATAPTITDVQVEFLHFPAVVTSPATAKTYFLGGAGERGLTIEGKFIKFTAIGVYLEDKAVASLATKWKGKPSEELINTLDFYRDIISGPFEKLIRGSKILQLSGTEYSRKVMENCVAHLKSVGTYGDAEAKGIEEFAEAFKKVNFPPGASVFYRQSPDGILGLSFSEDATIPGEEAVVIENKAVSAAVLETMIGEHAVSPDLKRSLASRLPAVLNGGIIV

SEQ ID NO: 26713 - protein, 95 aa, Phytophthora infestans
MGKRTKKVGICGKYGTRYGSSLRKVVKKIEISQHAKYNCVFCGKDSIKRNVTGIWECRSCHKTIAGGAYLLNTASAATVRSTLARLRKIRDDASA

SEQ ID NO: 26714 - protein, 555 aa, Ralstonia eutropha JMP134
MIAQPSAKYQPFPPVGLTDRTWPNRTITSAPMWLSTDLRDGNQALFEPMNGERKMRLFQELVRIGFKEIEVGFPSASQTDFDFIRKLIDENLIPDDVTIMVITQSREELIDRTVEALKGASKAIVHVYNAVAPAWRRIVFGMSVPEVMSLVHHHIDYLKTLTDQHPETKWTLQYSPETFSAAELEVSLQACHTAIEAWGASADRRVIINLPTTVENATPNVFADQIEWMHRRLVPRKHIVLSVHPHNDRGTGVAAAELAMMAGADRVEGCLFGNGERCGNVDIVTLAMNMYTQGVHPNLDFSDINAVARIAEEATSIPVHPRHPYAGDLVFTAFSGSHQDAIKKGFAAQDPNGVWEVPYLPIDPADLGRTYDSVIRVNSQSGKGGIAFMLEREHGVVMPRRMQVEFSAVVQRATDASETEISGPELWKLFGETYLPSDASGQGIVYHAYKLDESGEGIALDVTVDGVRKTLHGKGNGPIAAAVHALDLRMRIDAYEERATGAGADAQAMAIVEAALEGVPGASFGVGMSHNIVEASVQAVISVANRLVRQRRSQA

SEQ ID NO: 26715 - protein, 560 aa, Triticum aestivum
ARGSNGGGLFFCPQSPNAPSLVSKRDRTAYHLQPPKNWINDPCGPMYYNGIYHEFYQYNPDGSFNPNTSYNIVWGHSVSTDLVNWVTLEPAIEPDTLNDIKGCWSGSATIVSGDQPVIIYTGVIDIEKHQVQNIALPKNRSDPYLREWTKAGNNPVIQSGVPGLNSGQFRDPTTGWIGPDGLWRIAVGAQLNGYGAALLYKSEDFLNWTRVDHPLYSSNASIMLECLDFFAVLPGSNNGLDMSSAIPNGAKHVLKMGLNFGEDVYVIGVYDLKRDVFVPDTDDSRLWPRIDYGNFYASKTFFDSKHGRRIIWAWTTETDSSSDDVAKGWAGIHSFPRTIWLDSDSKRLLQWPVEEIESLRGNEINHQGLDLKMGDLFEIEGADTLQADIEIDFELTSIDDADPFDPSWLFDAEKHCREADASVHGSIGPFGLVILASDDTEEHTVVHFRVYKSQKNYMILMCSDLRRSSLTPGLDTPTYGGFFEFDLEKERKISLRTLIDRSAVESFGGGGRVCIMARVYPVSLVDDNRQPHMYAFNNGSATVRVPQLRAWSMRRAQVSV

SEQ ID NO: 26716 - protein, 359 aa, Schizosaccharomyces pombe
RMRVAIIHVGAPAGGMNSATRAAVRYCLNRGHTPLAIDNGFSGFLRHDSIHELSWIDVDEWCIRGGSEIGTNRDTPDLDMGFTAFKFQQHKIDALIIIGGFEAFTALSQLESARVNYPSFRIPMAIIPATISNNVPGTEFSLGCDTCLNAVMEYCDTIKQSASASRRRVFVCEVQGGRSGYIATVGGLITGASAIYTPEDGISLDMLRKDIDHLKATFALEAGRNRAGQLILRNECASKVYNTKVIGNIISEEVISASPLVPLFPSRPTRCNPTPMDRARAARLAMRAIRFFETCRANDLGNDPSSAVVIGIRGTGVSFSSVADVENNETEIEMRRPKNAWWRDMHNLVNILAGKTFAD

SEQ ID NO: 26717 - protein, 189 aa, Synechococcus elongatus PCC 6301
MMDGRFVPNITIGPLIVEALRPVTQKPLDVHLMIVEPEKYVPDFAKAGADIISVQAEACPHLHRNLAQIKDLGKQAGVVLNPSTPVETLEYVLELCDLILIMSVNPGFGGQSFIPAVLPKIRKLRAMCDERGLDPWIEVDGGLKANNTWQVLEAGANAIVAGSAVFNAPDYAEAIAAIRNSKRPELVTA

SEQ ID NO: 26718 - protein, 643 aa, Oryza sativa
  misc_feature (21)..(21): Xaa can be any naturally occurring amino acid
CCCSLFSTMNPIPRKHGMKKXFLKSCSSQRCSKHGPDIRFPFRLSTHDPSCGMPGMQLSCSGHDTILDHPVLGSCKVTAIYYRYRVINAILLVESSSNCPLQKLASTNVSTAVYEPQKKDGATIVGCSKDSIATNQDGIVGPRSCLNLSSHGSQLWYLVPPRTYMSALPPDCTVVAKGIPIPYNYDRNGPNENQYLDISNLKEKANKVINFGETAFTWHLNKITNACQGCEWNGHHCGFSSQRGQAFCQHQGILHLIFFFHKGILQILAHTLLILMEQTNFIYFYTATSSAATLVVLLLMVGTTIYLSLKTRYNEEIHLKVEMFLKTYGTSKPTRYSFSEVKKITRRFREKIGHGGYGNVYKGELPNGVPVAVKMLENSRGDGQEFINEVATIGRIHHANVLRLLGFCSEGTRRTLIYEFMPNDSLEKYIFSQGPNVSREFLVPDKMLDISLGIARGMEYLHQGCNQRILHFDIKPQNILLDYSFNPKISDFGLAKLCARDQSIVTLTAARGTMGYIAPELYSRNFGVISYKSDVYSFGMLVLEMVSGRRNLDPGIDNQHEVYFLEWIYEKVFTGQNLLIGTEMTQDEKYKVRKLAIVALWCIQWNPKNRPSTTQVVNMLTGRLQDLQMPPKPFVSSASESIP

SEQ ID NO: 26719 - protein, 507 aa, Burkholderia xenovorans LB400
MNVVNEQAKLSVQQLGHYIGGAPAAPTSGRFKDVFNPATGKVTGSVALASVEEVDAAVQAAKAAFPAWSETAPLKRARILFRFKELLNQHHDELAMLITREHGKVFTDAQGEVVRGIEVVEFACGIPNLLKTDFTDQIGGGIDNWNLRQALGVVAGITPFNFPVMVPMWMFPVALACGNTFVLKPSERDPSASLRIAELLKEAGLPDGVFNVVNGDKVAVDALIDHPDVAALSFVGSTPIAEYIHTEASKRGKRVQALGGAKNHLVVMPDADLDQAVDALIGAAYGSAGERCMAISVAVAVGNVADQLIEKLVPRVKSLVIRNGENLDAEMGPLVTAEHKAKVAGYIASGEAEGAKLIVDGRAHPVASEEGFFIGGTLFDNVGTQMKIYKEEIFGPVLAVVRVPDFASAVELINAHEFGNGVSLFTSDGGVARAFGRQIQVGMVGINVPIPVPMAWHSFGGWKRSLFGDHHAYGEEGVRFYTRYKSIMQRWPDSIAKGAEFTMPVAK

SEQ ID NO: 26720 - protein, 284 aa, Oceanobacter sp. RED65
MNEDRPRNAILNWLDSLKIFGGDPRSRKEIKHILREAEGRQLVDSDALSIMEGAIQVADMQVREIMIPRSQMVCVRIDQKPKDYLPSIIESAHSRFPVLAESDDEVVGILLAKDLLPLVLEQNTDSFRLKDILRPVTFVPESKRLNVLLKEFRATRNHMAIVIDEYGSIAGLVTIEDVLEQIVGDIEDEHDVDDEDTSIKQVDNDTYMVKALTSIDDFNETFGTQFEALEFDTIGGIVVDQFGRLPECEETIDIGQHTFKVVNGNSRQIHLLQVTPKTDLSEED

SEQ ID NO: 26721 - protein, 295 aa, Prosthecochloris aestuarii DSM 271
MMLIDGKKVSTDLKNELKTRVEELKAKAGCVPGLTVIIVGEDPASQVYVRNKAKSCKETGMNSTVIELPAETTQEELLGKIEALNQDPDVHGILVQQPLPSHIEEYAVTMAIDPAKDVDGFHPENVGQMVLGNLDKCFISCTPFGILELLRRYDIETRGKHCVVVGRSNIVGKPMANLMLQKLRETNCTVTVCHSATQNMPELTRQADILIAAIGRANFITREMVKPGAVVIDVGINRIEDPSRKSGFRLAGDVDFDNVAEMASAITPVPGGVGPMTIAMLLKNTLQSFARSHNL

SEQ ID NO: 26722 - protein, 555 aa, Magnetospirillum magnetotacticum MS-1
MFSGQIEIVMAERVYLYDTTLRDGAQTQGVDFSAADKVRIARELDRIGIDYVEGGWPGANPTDDAFFADPPAFKRSRLTAFGMTRRAGRSADNDPGLNALLVTPARVATMVGKSWDFQVTVALGIELDENLRMVADSVQHALTKVEEVMFDAEHFFDGYKANPAYALAAAKAAYDAGARWVVLCDTNGGTLPHEMRRIVSEVIKGGIPGSHLGVHCHNDSDTAVANSLAAVEAGVRQVQGTLNGLGERCGNANLISIIPALTLKMGFDTGIAPEDLKNLVSVSRALDEVLDRAPNRGQPYVGNSAFAHKGGLHVSAVAKDPRCYEHVDPASVGNLRHIVMSDQAGRSNLVARLTEIGVDLDSIKRESLVRVVDQMQVTFDAREATDLVDLVKRLEHEGYAYDQAAASFELLVRRALGEVPEYFQLERYRVIDERRRNAHGEWITLSEATVKVEVGGVEYMEVGEGTGPVHAFDVALRKVLTRVYPALTAMELKDYRVRITESTVGTAAKTRVTIESEDDKGHRWTTVGVHTNVLEASLEALQDSITFMLFRFRDE

SEQ ID NO: 26723 - protein, 349 aa, Candida glabrata CBS 138
MVKETKLYDLLGISPSANEQEIKKGYRKAALKYHPDKPTGDTEKFKEISEAFEILSDPQKREVYDQYGLEAARNGGPAFGGAGGFRGGGFSSAGGAHAFSNDDAFNIFSQFFGGSSPFGAADDGFSYSSFGGMPGGMGGMHGGMGGGMHGGMGGGMGGMGGMPGGFRSASSPQPEEEVVPVNLSVSLEDLYTGKKKTFMIGRKGPNGAPEKTQVDIQLKPGWKAGTKITYKNYGDYNPATGRRKTLQFIIQEKKHPFFTRDGNDLIYTLPLTFKESLLGFNKTIQTIDGRTLPVSRIQPIQPSEKSTYPGQGMPIPKTPGQRGDMIVNYKVDYPISLTDKQRQAIDENF

SEQ ID NO: 26724 - protein, 99 aa, Triticum aestivum
KKILNPFLGPPPFFIKDFSLEAIVVSKETLRGGHAVNRKRAERGLTQLEIEVVELVPEKSTGNKISSTAFRKIEAEKALQQQKLDQQEEQQTVQLECRT

SEQ ID NO: 26725 - protein, 483 aa, Schizosaccharomyces pombe
MLSANMLRRMHHGVAVTRMLLVSNGKVQVKKSALYPVMAKLARTYATKNYPAHTVINMPALSPTMTTGNIGAFQKKIGDKIEPGDVLCEIETDKAQIDFEQQDEGYLAKILIETGTKDVPVGKPLAVTVENEGDVAAMADFTIEDSSAKEPSAKSGEEKSAPSSEKQSKETSSPSNVSGEERGDRVFASPLARKLAEEKDLDLSQIRGSGPNGRIIKVDIENFKPVVAPKPSNEAAAKATTPAASAADAAAPGDYEDLPLSNMRKIIASRLAESKNMNPHYYVTVSVNMEKIIRLRAALNAMADGRYKLSVNDLVIKATTAALRQVPEVNAAWMGDFIRQYKNVDISMAVATPSGLITPVIRNTHALGLAEISTLAKDYGQRARNNKLKPEEYQGGTFTISNLGMFPVDQFTAIINPPQACILAVGTTVDTVVPDSTSEKGFKVAPIMKCTLSSDHRVVDGAMAARFTTALKKILENPLEIML

SEQ ID NO: 26726 - protein, 387 aa, Desulfitobacterium hafniense Y51
MEERKLTIVDTTLRDGEQTAGVVFSNQEKLMIARMLDDLGVHQIEAGVPVMGGDEQKAIRDIVKMGLKASIMGWNRAVIADIEKSIECGCDAVAISISTSDIHIEHKLMTTREDVLARMVKAAEFAKRNGLYISVNAEDASRSDLDFLLEFARQAKEAGADRLRYCDTVGILEPFTTFERITKIKETIDIDVEMHTHNDFGMATANALAGVKAGASHIGVTVNGLGERAGNAALEEIVMALKYLVGVDLKFATERFVEVSEFVARASGRSVPAWKAIVGSNMFAHESGIHADGALKNPLTYEVFKPEEVGLERQIVIGKHSGTSAIKAKFRNEYGKEISEEEANELLARVRAFAVDMKRSLFDKELMYIYEDLHREAENRQPNPKWF

SEQ ID NO: 26727 - protein, 161 aa, Shewanella sp. ANA-3
MTSTIYSHSANDIQGNPTALAQYQGKVILIVNTASECGFTPQYKGLEALYQKYKSQGLVVLGFPCNQFGAQEKADEKGIQSFCELNFGVSFPLFSKIEVNGEHTHPLYQYLKKAAPGVLGTERIKWNFTKFLINRQGEVVARFAPTTKPEAISDKIEALLK

SEQ ID NO: 26728 - protein, 146 aa, uncultured archaeon GZfos27E7
MENVDMENVVIAGSGPAGLTAAIYTARSGLNPLVLGGLVSGGQLIVSPEVEHYPGFPEPVSDMELMDRFRKQTEQFGARFKTEAFKELVETDKNGLVQVEAGFLPEPRHRMFVIRFTNKRLWLQDRDAWPLWMLNNIYYSKEEVRC

SEQ ID NO: 26729 - protein, 360 aa, Emericella nidulans
MAAARTLRIGLIPGDGIGREVIPAGRRILEALPASLNLKFNFVDLDAGYDCFKRTGTALPDKTVEVLKKECDGALFGAVSSPSTKVAGYSSPIVALRKKLDLFANVRPVKTTAGTSAGKPIDLVIVRENTEDLYVKEESTEETPNGKVARAIKQISERASSRIATIAGEIALRRQNIRDGAAASGLRTKPMVTITHKSNVLSQTDGLFRETARAALAAQKFSSVEVEEQIVDSMVYKLFRQPEYYDVIVAPNLYGDILSDGAAALVGSLGLVPSANVGDNFAIGEPCHGSAPDIEGKNIANPIATLRSVALMLEFLGEEQAAAKIYAAVDGNLDEGKYLSPDMGGKATTTEVLEDVLKRL

SEQ ID NO: 26730 - protein, 396 aa, Halobacterium sp. NRC-1
MSSQQIRLATRGSDLALRQAGEVVDTLEDRRHDVELVEVETEGDRVTDALISDLGKTGAFVRALDQEVMEGTVDAAVHSMKDVPTEVPEDLVVAAVPHRENPADVLVTPDGTDLEDLPAGSVVGTASLRRGAQVQAHRPGLDVEPIRGNVGTRVEKLLAPALHREHERRTEAEKEAQSRDAREQRRGDYTADIEAGVENLDTEDGEEGAADDGDDTASSSEFEQSVTEWFDSLTPLQQSAMERDPDTEYDALVMARVGLERTGLLHHVGIEELSTGTHVPATGQGALCVTARRDSDVVDTLRDALEHVRTRVEVTAERVVLEELGGGCIAPIGVHALVQGDTIRTAVQVFSQDGSEQVGETRELDAEQYATDARELAADLRDRGAADLIEDARTEA

SEQ ID NO: 26731 - protein, 565 aa, Schizosaccharomyces pombe
MPAGTKEQIECPLKGVTLLNSPRYNKDTAFTPEERQKFEISSRLPPIVETLQQQVDRCYDQYKAIGDEPLQKNLYLSQLSVTNQTLFYALISQHLIEMIPIIYTPTEGDAIKQFSDIYRYPEGCYLDIDHNDLSYIKQQLSEFGKSDSVEYIIITDSEGILGIGDQGVGGVLISVAKGHLMTLCAGLDPNRFLPIVLDVGTNNETHRKNHQYMGLRKDRVRGEQYDSFLDNVIKAIREVFPEAFIHFEDFGLANAKRILDHYRPDIACFNDDIQGTGAVALAAIIGALHVTKSPLTEQRIMIFGAGTAGVGIANQIVAGMVTDGLSLDKARGNLFMIDRCGLLLERHAKIATDGQKPFLKKDSDFKEVPSGDINLESAIALVKPTILLGCSGQPGKFTEKAIREMSKHVERPIIFPISNPTTLMEAKPDQIDKWSDGKALIATGSPLPPLNRNGKKYVISQCNNALLYPALGVACVLSRCKLLSDGMLKAASDALATVPRSLFAADEALLPDLNNAREISRHIVFAVLKQAVSEGMSTVDLPKDDAKLKEWIIEREWNPEYKPFV

SEQ ID NO: 26732 - protein, 365 aa, Candida glabrata CBS 138
MAVTKTIVVLPGDHVGQEITEEAIKVLNAIQECRPDKVNFKFDHHLIGGAAIDATGVPLPDEALEASKKADAVLLGAVGGPKWGTGAVRPEQGLLKIRKELQLYANLRPCNFASDSLLDLSPLKPEIARGTDFVVVRELVGGIYFGERKEDEGDGVAWDSEKYSVPEVQRITRMAAFMALQHNPPLPIWSLDKANVLASSRLWRKTVEETIKNEFPQLTVQHQLIDSAAMILVKNPTHLNGIIITNNMFGDIISDEASVIPGSLGLLPSASLASLPDKNTAFGLYEPCHGSAPDLPKGKVNPVATILSAAMMLKLSLDLFEEGEIIEQAVKKVLDSGIRTADLKGTNSTTEVGDAVAKAVRELLA

SEQ ID NO: 26733 - protein, 468 aa, Kluyveromyces lactis NRRL Y-1140
MLRSSTRVAVKSALHKPLVRCATVSQLEAVRSFSSSRISSDISSRNGSFNAVSRRSSGPFQFRCSPSQLNTRFMAVRHATSVPVPPMAESLTEGSLKEYTKKVGDFIEKDELLATIETDKIDVEVISPISGTIAKLNFSPDDTVTVGEEIAQIEPGEAPAGGAAASESSSASAPAAEEQQQQAAPKKEEQPATPKKEEKAAAPAPKKEEKPAAAAPKKTEVDSSATESSTPSFTQFSRNEHKVKMNRMRMRIAERLKESQNTAASLTTFNEVDMSAVLEMRKLYKDEIIKTKNVKFGFMGLFSKACTLAAKDIPAVNGAISGDQILYRDYTDISIAVATPKGLVTPVVRNAESLSVLEIEQEIVRLGKKARDGKLTLEDMAGGTFTISNGGVFGSLYGTPIINMPQTAVLGLHGVKERPVTVNGQIVSRPMMYLALTYDHRLLDGREAVTFLRTVKELIEDPRKMLLA

SEQ ID NO: 26734 - protein, 380 aa, Mycobacterium bovis AF2122/97
MSKKHTTLNASIIDTRRPTVAGADRHPGWHALRKIAARITTPLLPDDYLHLANPLWSARELRGRILGVRRETEDSATLFIKPGWGFSFDYQPGQYIGIGLLVDGCWRWRSYSLTSSPAASGSARMVTVTVKAMPEGFLSTHLVAGVKPGTIVRLAAPQGNFVLPDPAPPLILFLTAGSGITPVMSMLRTLVRRNQITDVVHLHSAPTAADVMFGAELAALAADHPGYRLSVRETRAQGRLDLTRIGQQVPDWRERQTWACGPEGVLNQADKVWSSAGASDRLHLERFAVSKTAPAGAGGTVTFARSGKSVAADAATSLMDAGEGAGVQLPFGCRMGICQSCVVDLVEGHVRDLRTGQRHEPGTRVQTCVSAASGDCVLDI

SEQ ID NO: 26735 - protein, 592 aa, Borrelia hermsii
MEISTKILSLRNLMRKSEIDAYLIASYDPHMSEYSHVRFNVREFITGFTGSAGTVIVTETDAVLFTDGRYFLQASSELEGTEFKLMKLGVKGYPDIFSYINTNLKGLRLGIYAEDVSIKLYNDLIKNCRHTEIEILHEDLVSKIWQGRPVLEGSKIFELSEAQKNDKRTDKLDRVNARLEEKAIDFCIVSSLDEIAWLLNLRGLDIESSALFYAFLFIARSERYKNVLFVNVDKLDSDLRERLETESFEIEDYGNFYSFLAEINHEGKFFIPVESNVKILEAIGKPNAVLGQSVVNELKAIKSDYEISKMKEAHIIDAVSLIKFLYEFKSLSKDELSRLDEVDVADMLLNFRAARDEFFSSSFDSIVGFKENSALPHYKPKKGAKNLDGAGLLLIDSGGSYLGLGTTDVTRTILIGEASCKEREDYTLVLKSFIALASLKFPFGISGASLDGIARFPLLKQGLNFSHGTGHGVGFFLNVHELPVSISPLSAYAFKGSEITSIEPGIYRESQYGIRTENLVFVKQSYSNEFGTFLEFENLTLVPFEKELIVTEMLSKDELDYINSYHEFVYFSLKEYLSGDELKFLEILTSKI

SEQ ID NO: 26736 - protein, 198 aa, Citrus sinensis
LLTTKPAPLFAPLGTHRGFFNGKNRRKLNSFTVCFVLEEKKQSTQIETFTDEEEGESGTQISTAARVAEKLARKRSERFTYLVAAVMSSFGITSMAVMAVYYRFWWQMEGGEVPLAEMFGTFVLSAGAAVGMEFWARWAHKALWHASLWHMHESHHRPREGPFELNDVFAIINAVPAIALLSFGFFHKGLVPGLCFGA

SEQ ID NO: 26737 - protein, 581 aa, Oryza sativa
  misc_feature (487)..(487): Xaa can be any naturally occurring amino acid
  misc_feature (506)..(506): Xaa can be any naturally occurring amino acid
  misc_feature (524)..(524): Xaa can be any naturally occurring amino acid
  misc_feature (564)..(564): Xaa can be any naturally occurring amino acid
GRRRRRRGLPAEFWKKISPGEPYRIILGDVRDKLYNTCERARQILSKGISSIPEDQTYTNVEQFLEPLELCYRSLCDCGDKLIADGRLLDLMRQVSTFGLSLVKLDIRQESERHTDAMDAITTHLGIGSYREWPEERRQEWLVSELRGRRPLFGPDLPQSEEVADVLGAFRVIAELPADSFGAYIISMATAPSDVLAVELLQRECGVKKPLRVVPLFEKLADLQQARATMELLFSVDWYKERIDGKQEIMIGYSDSGKDAGRLSAAWQLYKAQEEIVGVAERHGVKLTIFHGRGGTVGRGGGPSHLAILSQPPNTVNGSLRVTVQGEVIEKSFGEENLCFRTLQRFTAATLEHGMNPPVSPKPEWRRLLDDMATVATDEYRSIVFQEPRFVEYFRAATPETEYGRMNIGSRPSKRKPGGGIESLRAIPWIFAWTQTRFHLPVWLGFGAAFRHAMQQSDAGGGLATLREMYDEWPFFRVTIDLLEGGXVPSFVGIAALYDELLVPDXDLRPFGEQLRANYVETQXLLLQVAGHKDLLESDPYLRQRLMLRDSYITALNVCQAVHXLSRIRDGGFRPETRAPL

SEQ ID NO: 26738 - protein, 441 aa, Arabidopsis thaliana
MEIDSEKIHERKQSDYNSLQDERFEIQKEMYRGQQYSQIYFARLHLMRTLLYSLAPTWKSHLPVCKVLGLEKGKECIIVGTLFKHMKLKPCVLDEYSKERSVTPLVKPHNFMHPDDNLILEDESGRVKLAGSALSPAIYVTGVVVALHGKETNAGEFFVEDVLEAGLPPQIERPIDLQEDKYVVLLSGLCIGSKSANPLQFQLLVDHITGHLGDEEEQGLAAQIVHVVIAGNSFEFPRKLINGQNLASKDQSTLYEPIKELDIMLSQIAAGVSVDIMPGTNDPANFALPQQPLNRCLFPGSSPYNTFRSCTNPHSFDVDNIRFLGTSGQNIDDLGKYSEAKSKLDFVERTLRWRHLAPTAPNTLGCYPFTDRDPFLIETCPHVYFVGNQDKYDNRLIKGSEGQLVRLICIPKFCETGIAVAVNLRNLECHTLSFSTQINQS

SEQ ID NO: 26739 - protein, 413 aa, Thermoanaerobacter tengcongensis MB4
MAVNPLKAVQEQIKNACELLNLEESVYEILKEPLRVMEVSIPVQMDDGTVKVFKGYRSQHNDALGPAKGGIRFHPDVTLDEVKALSMWMTFKCGVVGLPYGGGKGGVAVNPQELSPTELERLSRGYIRAISSIIGPEKDIPAPDVGTNAQVMAWMVDEYNKIVGYNSPAVITGKPLIYGGSKGRVDATGYGVALIAREAAKKLEMDIKNCTVAIQGYGNVGSYTGIHLQRLGAKIVGVVDIYGGVYNERGIDAEKLAEHVRKTGSVKDFEGTTSLTNEELFALDVDVLIPAALENQITEENAPNVKARMVCEAANGPTTPEADRILREKGIFVVPDILANSGGVIVSYFEWVQNLMNYYWTEEEIKERQEIVMINAFNNIYQLAQEYKVDMRTAAYMIAIKRIYEAMKVRGWI

SEQ ID NO: 26740 - protein, 108 aa, Vibrio fischeri ES114
MSDKILQLTDGGFEESVINAAGPVLVDFWAEWCGPCKMIAPILDEIADEYEGKLTIGKLNIDQNAGTPPKFGIRGIPTLLLFKDGGVAATKVGALSKTQLKEFLDANL

SEQ ID NO: 26741 - protein, 602 aa, Pseudomonas syringae pv. phaseolicola 1448A
MSTQSNASSEVAERLAQTRALMSRERIDAYLVPSADPHLSEYLPGYWQGRQWLSGFHGSVGTLIITQDFAGIWADSRYWEQATKELAGSGIELVKLLPGQQGPLEWLADEAKAESVVAVDGAVLAVASSRTLASRLYARGARLRTDIDLLTELWQDRPALPSHPIYEHLPPQASLDRAEKLARVRQIVAERNADWHFIATLDDIAWLFNLRGADVSYNPVFIAFALIGPHSVTLFVDSRKVPDPVRSRLERDGINLMEYTQIGAALRELPKDARLLVDPARVTCGLLDYLDSEVTLVEGLNPSTLLKSQKTETDTGHIRQAMEQDGAALCEFFAWLDSALGREPISEVTIDEKLTQARERRPGYVSPSFATIAGFNANGAMPHYRATEAEHAQIEGDGLLLIDSGGQYLGGTTDITRMVAIGTPSAEQKQDCTRVLKGVIALSRTHFPKGILSPLLDAIARAPIWSEGVNYGHGTGHGVGYFLNVHEGPQVIAYQAPATPQTAMLPGMITSIEPGTYRPGRWGVRIENLVINQEAGTTEFGEFLRFETLTLCPIDTRCIEVSMLNEEERTWLNDYHAHVLARLSPLLQGTVLLWLQARTVAV

SEQ ID NO: 26742 - protein, 373 aa, Corynebacterium efficiens YS-314
MRRRGEGATHMALADTRFATRRRALASKLAARRIDSILVTSPIHVRYLTGFTGSNGALLLHKDLSARMCTDGRYTTQIGEEVPDIEAMIERASATALLATVEGDRRVAFEAAQTTVAQLDALREAAGEDVQLIPVTGVVESIRLHKDPFEQDRLRDVAALASQAFEDLLSAGELAEGRSERQVAADLEYRMRMLGAERPSFDTIVASGPNSAKPHHGAGDRIIERGDLVTIDFGAHARGFNSDMTRTLIMGEAGDFETEIYDIVLRAQLAGVEAAYAGTKLVDIDHACRSIIEDAGYGDYFVHSTGHGIGLEVHEAPAAAKTATGVLEEGSTLTIEPGIYVPGRGGVRIEDTLIITAGAPEIITKVGKDLRVV

SEQ ID NO: 26743 - protein, 396 aa, Xylella fastidiosa Ann-1
MAQDKFKRTKLHVNVGTIGHVDHGKTTLTAALTKVGAERFGGEFKAYDAIDAAPEEKARGITISTAHVEYETEVRHYAHVDCPGHADYVKNMITGAAQMDGAILVCSAADGPMPQTREHILLARQVGVPYIVVFLNKADMVDDAELLELVEMEVRELLSKYDFPGDDTPIVRGSALKALEGDQSEIGVPAIIRLAEALDTHIPNPERAIDRPFLMPVEDVFSISGRGTVVTGRIECGVIKVGDEVEIVGIRPTSKTIVTGVEMFRKLLDQGQAGDNAGLLLRGTKRDEVERGQVLAKPGSIKAHKEFEAEVYVLSKEEGGRHTPFFNGYTPQFYMRTTDITGKVCLPEGVEMVMPGDNVKVTVSLINPVAMGEGQRFAIREGGRTVGAGVVSKVIG

SEQ ID NO: 26744 - protein, 105 aa, Rickettsia prowazekii
MVNNVTDSSFKNEVLESDLPVMVDFWAEWCGPCKMLIPIIDEISKELQDKVKVLKMNIDENPKTPSEYGIRSIPTIMLFKNGEQKDTKIGLQQKNSLLDWINKSI

SEQ ID NO: 26745 - protein, 365 aa, Yersinia pseudotuberculosis IP 32953
MNMTKTYHIAVLPGDGIGPEVMAQASKVLDAVRQRFGLKISTSVYDVGGAAIDRHGSPLPAATVAGCEQADAILFGSVGGPKWEHLPPAEQPERGALLPLRKHFKLFSNLRPARLYQGLEDFCPLRSDIAARGFDILCVRELTGGIYFGQPKGREGQGMHERAFDTEVYHRFEIERIARIAFESARKRRSKVTSIDKANVLQSSILWREVVNGIAADYPDVALSHMYIDNATMQLIKDPSQFDVLLCSNLFGDILSDECAMITGSMGMLPSASLNEQGFGLYEPAGGSAPDIAGKNIANPIAQILSLILLLRFSLGKDDAADAIERAINQALEQGYRTADLAGDGHAIGTHEMGDIIAKFVVEGV

SEQ ID NO: 26746 - protein, 276 aa, Arabidopsis thaliana
MRQFATMFRQIAQHKWAWPFLEPVDVKGLGLHDYYKVIEKPMDLGTIKKKMESSEYSNVREIYADVRLVFKNAMRYNEEKEDVYVMAESLLEKFEEKWLLIMPKLVEEEKKQVDEEAEKHANKQLTMEAAQAEMARDLSNELYEIDLQLEKLRESVVQRCRKLSTQEKKGLSAALGRLSPEDLSKALKMVSESNPSFPAGAPEVELDIDVQTDVTLWRLKVFVQEALKAANKSSGGTNAQNNNNTGTGEINKNNAKRRREISDAINKASIKRAKKA

SEQ ID NO: 26747 - protein, 360 aa, Synechococcus elongatus PCC 6301
MAVRKLGVLTSGGDCPGLNAVIRAIARHAVGNYGWELWGIAYATQGLLKRQAIALSPHHFDRQSLDPLLCSGGTILGSINRGDTLAHQAEILAGYQELGLDALIGIGGDGSLAILRQLAEAGRWQFIGIPKTIDNDVALTERAIGFDTAIHTVAEALLSLGSTAASHDRIMIAEVMGRQSGHLALQGGIAGGADVILLPEIPYRLLELCHYLQQLRDRWQRRYAVIAIAEGTHHPPEVTQGPGSLGEQLVQAITAQDPTLDARVTVLGHVQRGGNPVASDRLLATQMGYAAVERLAAGASGEMMAWQGGRVVSVPLEAVCLQSPTLVDPHSPPVDTAAGLGIFLGDRSLTPWRGSACPTH

SEQ ID NO: 26748 - protein, 501 aa, Glycine max
MGSAAKYELPFKLNNPDLLHNESFVHGKWVKSKSGKTFEVADPGTGKTWIDCPTNDASDVDEAVKSSHECFLEYKKISPRQRAQMLYKWDALIKENREDIATILVYETGKPRAEAYGEIDYSTGFTWWFAGEAERIQGSVFTPALPNRRIFTIKQPLGVAAALVPWNFPIAMILRKAGAALAAGCTMIVKPSPETPITVLALAYLADKAGFPKGALNVLTTDLDKTPELSEALCRHPLVNKVTFTGSTRVGKLVAKICSDNLKKVTLELGGNCPVLIFDDANIEQAMSQVFALKFRHAGQACITANRIYVQSGIFDKFLERWNAEAQKIVVGHGSDEKTTMGPVTTPRAVDKALSLVEDARKKGAKIHTGGNKVEKNGGYFFEPTVITGVTPDMDIAKEEVFSPISTFIKFETEDEVVKAANDTSMGLASYLFTKNVDRMWRLFENLEAGMIGLNTGNSSAAESPFGGIKQSGYGKESGKDVAVNEYMITKTGTFTLEDQS

SEQ ID NO: 26749 - protein, 412 aa, Zea mays
MAKGVIFYSIPKSICEYLDLVRHYLSSIILPGDNYYAALNSAVFSDGSFCFVPKDTVCPMEISTYFRINNKETNQFERTLIVADERCTYVLLIELCLQVDGVKVRLPPWPPPIWTFWLPYDVCSDMHYNCRYCAWFKDNGEDGATLLMYKHYAATAISKGIHCLSLRLTDEYSSNAHARNRLLPPELLFLLSDTKTHSRMHSWIALNSISPAIVEVKGVHQFDWLTRENVSVLEAIESHRGVRNHYHGDHGTVSSASDNPSIIASKLQARSPKYISLLNHLRIYLPELFPNLNKVVFLDDDIVVQRDLSPLWAINLEGKVNGAVETCRGEDSWVMSKRFRTYFNFSHPVIARSLDPDECAWAYGMNIFDLAVWRKTNIRDTYHFWLKEVMHFTPTYPFPSLTRCSIVRLLCL

SEQ ID NO: 26750 - protein, 112 aa, Methanococcus maripaludis S2
MKKIEAIIRIERLDIVKGILSENGFLSLTISEVKGRGVQGGITERYRGTEYVVDLLPKVKLEMVVDDKDIDEVITIIRENAETGKPGDGKIFIIPVEDAVRIRTGESGIKAI

SEQ ID NO: 26751 - protein, 604 aa, Burkholderia xenovorans LB400
MNARLPETSSIPERLATLRNAMAREGVAAYLVPSADPHLSEYLPGRWQGRQWLSGFTGSAGTLIVTADFAGVWTDSRYWEQAYAQLAGTGVQLMKMTGGQQTAPHFEWLAQNVPAGGTVGVDGAVLGVAAARALSQALSARGVQLRTDVDLFDAIWPQRPSLPAAAVFEHAAPHASVARSDKLAQIRRAMADKGAQWHFISTLDDLAWLLNLRGADVSYNPVFVAHALIGVDHASLFVADGKVPQALAEALAKDNISIEPYAKAADALAALPAGSTLLIDPRRITFGSLQSVPATVKVIEAVNPSTFFKSRKTAAEAGHVRETMEQDGAALAEFFAWFEGALGRETITELTIDERSTAARARRPGFVSLSFATIAGFNANGAMPHYRATEESHSVIEGNGLLLIDSGAQYLSGTTDITRVVPVGTISEEQRRDFTIVLKGTMALSRAHFPRGIRSPMLDAIARAPIWEAGADYGHGTGHGVGYFLNVHEGPQVISHYAPAEPWTAMEEGMITSVEPGIYRPGKWGVRIENLVLNVPAGQTEFGDFLKFETLTLCPIDTRCLDLSLLREDERAWLNAYHETVRTRLAPHVSGEAKAWLELRTQPI

SEQ ID NO: 26752 - protein, 416 aa, Burkholderia thailandensis E264
MALIVHKYGGTSMGSVERIKNVAKRVAKWHQAGHQMVVVPSAMSGETNRLLGLAKEISSQPSPRELDMIASTGEQVSVGLLSIAMQEIGVEAVSYAGWQVPIKTDSAYTKARIHSIDDERVRRDLDAGKVVIITGFQGVDPDGHITTLGRGGSDTSAVAVAAALEADECLIYTDVDGVYTTDPRVVEEARRLDSVTFEEMLEMASLGSKVLQIRSVEFAGKYRVKTRVLSSLTDPQIPLDEEMRSGTLITFEEDETMEKAVISGIAFQRDEARIAVMGVPDKPGIAYQILGPVADANIDVDMIIQNQSVEGKTDFTFTVGRGDYQKAMDILTNQVKGHVNAEQVLGDPKVSKVSVVGVGMRSHVGVASTMFRTLSEEGINIQMISTSEIKISVLIDEKYMELAVRALHKAFELDQA

SEQ ID NO: 26753 - protein, 408 aa, Methanococcus maripaludis S2
MATADLFADPTNIVTGLSTLATSGDVMFLVLMGVLVFSMQLGFALLEGGQVRKKNVNNVMMKNMADWLIGAVSWLFIGGVLSVSLVPADFFSWWGQIFTTNFANNGIDLANWFFGLVFAATAATIVSGGVAERIKFKSYLLMSIIITAILYPLFVYLGPWGSGMIPFNDYAGSFVVHGLGGFLALGAIAALGPRIGKFVNKKAISIPGHNIPMSVFGAFVLAIGWYGFNVGSSFAVADISGLVCATTTLAMAGGGIGALLASKDDVLFTANGIVAGLVAICSGTDVVSPIGALIIGLVAGIQVPIVYKIVEKMGLDDVCGVIPVHGTAGILGGILTGVFGMAALGGAGGVSLVNQLIAAGLTVVYGTGLGFGLGKLVGGFTGGLRVTEEEEKMGLDLAEHKLPAYPDE

SEQ ID NO: 26754 - protein, 112 aa, Methanococcus maripaludis S2
MRKIEAIFRPERLLAVKNALFEEGFISLTLTEVKGRGVQGGIIERYRGNEYLVDLLPKVKIEIVSNDSDVEKIVKLISENAVTGKPGDGKIFVIPVEDVIRIRTNETGKDAI

SEQ ID NO: 26755 - protein, 478 aa, Arthrobacter sp. BP2
MVPAAGLDYYVIHHRGEPPMGVYTTIDPATGDATAQYPEISDAELDTLIKNSAAAYRSWRTTTLEQRRAVLTRTAEIHREQAEELAKLLTLEMGKPIAQARGEVELVASIYQHYADNLEEYLADESLTFRGSGTAVVRTEPIGPLVGVMPWNYPYYQVARFAAPNIALGNTIILKHARNCPQSALAIERVLTEAGLPAGVYANAFISSAQVAAAVADRRVQGVSLTGSEKAGAAVGEVAGRNLKKCVLELGGSDPFIVLDDADIDAAAAAAVIGRLSNGGQACTASKRFIVADSVYEEFLQKFLDAMASWQTGDPTDSGTKLGPLASAAGVEELDELVQDAVSHGAKLLLGGERPDGPGAYYPATVLAGVTPAMRAFTEELFGPVAVVYRVGSLQEAIDLANNSPFGLSSSVFTSDARNAERLAEELEVGMVWINSTSKSSPDLPFGGVKGSGFGRELAGYGFNEFANKKLVRNPGAR

SEQ ID NO: 26756 - protein, 288 aa, Rickettsia conorii str. Malish 7
MNNIIDGKALANEILADLKLEIQELTSQTNASPKLAIVLVGDNPASIIYVRHKIKNAHKIGIYTLLINLSATIHTNDLISKINELNLDNEISGIIVQLPLPSSIDKNKILSAVSPSKDIDGFHPLNVGYLHSGISQGFIPCTALGCLAAIKKYEPNLTGKNVVIIGRSNIVGKPLSALLLKENCSVTICHSKTHNLRSITSKADIVVAAIGSPLKLTAEYFNPKSIVIDVGINRISSNKIIGDVDFENVQSKVQYITPVPGGIGPMTIAFLLKNTVKAFKDSLYTLDT

SEQ ID NO: 26757 - protein, 370 aa, Bordetella bronchiseptica RB50
MSEQNRLLLIGGDGVGAEVVHEAGRIAQWFAARRGLPLSIGQAAFGVEVLNRTGRIMTDDTLAQIRAADAVLFGAIGGPEYDRLPLEQVREEGLLRIRRELGLYANLRPVRYWPALAELCPFVPERVEKVDMMIVRELAGGIYYASPRGIDQTGDGRRVGTNTQRYDDLEIRRIARVAFELARARGGRVCSVDKSNVLESGLLWREEVQACRDAEYPDVELEHILVDNCALQLCLRPARFDVLLADNLFGDILSDAAGAVAGSLGMLPSASFGAEDGGRRRGFYEPVHGSAPDIAGQGIANPLGAILSLALALRWTFRQPAEADLLERAVERALAGGARTLDLLAGAAAPALSTRAMADAVLQALETLAA

SEQ ID NO: 26758 - protein, 565 aa, Triticum aestivum
MSKAFTKSLLLYNKILVRRLKSLITRAPPAPTSATEKLPPSHMRKSSTAPLDALPAPGTTDDGNNNDGGTGGGTIVCEVEGGLLMSASTFPYFMLVALEAGGLLRGLLLLLLYPLFRLLTDELATKAMVMVSFAGLRKDEFGRLGMAVMPKLFLQDVSAELFHAATSAPATAGAARRRRRCVCVSSMPRAMVEPFLKEYLAVDAVVAPELRELGGYYLGLVEDEGEVARRTDVEEIIGAKGGAVVGIGGQGCSFQHIFQKYCKEVYVPTESTRRRRGVLHPRRYPKPLVFHDGRTAFRPTPAATLAMFVWLPLGAPLAVLRTAVFLLLPFSLSVPLLAALGMHNRMIASSSPSAPGDRSKGNLFACNHRSLLDPLCVSAAAGRRDLAAATYSISRLSEMLAPIPTFRLTRDRAADRAAMQAQLARRGGRGGLVVCPEGTTCREPFLLRFSPLFAELAAGGVDVVPVALHLAVDMFHGTTAGGRKMLDPLYLLMNPVPSYLVQILAPVECGGQEARAVANEVQRRVAEALGYERTGLTRRDKYLILAGNEGVVGAAAAAHDGGPKN

SEQ ID NO: 26759 - protein, 530 aa, Exiguobacterium sibiricum 255-15
MTTFRELNLSEALIKGVLKMGFEEATPIQAETIPVGLSGVDLIGQAQTGTGKTAAFGIPTIERLDAKSRYIQALILAPTRELAIQVAEELNRIGEVKRVHALPVYGGQQIDRQIRALRKNPQIVVATPGRLMDHMNRKTLNLDHVQTVILDEADEMLNMGFVEDIEKILGTLPPTRQTLLFSATMPPQIRKIADRFMTTPTHIKVKAKEMTVENIDQSFIELKESQKFDVLCRLIDTDSPELSIIFGRTKKRVDEMTEGLIQRGYTADGLHGDLTQAKRDQVIRRFKKGTIDILVATDVAARGLDISGVTHVYNFDVPQDPESYVHRIGRTGRAGKTGSAITFVTPREFGQIKTIERVTNKKMSRRHAPTLDEILEGNLKLAAQELIKRVEAKNSQEYTTLAQELLEEYEAVELIAAALKGLTKEPDATPVQISSIEPIRVKRFGSNGGGGNRRPYGNKGGSGSGSSSNRGGGYRGSNPRGGERREGGRPSEGNRSSSSASSDRREGGYAGRNRSESDRNRGGRKPRFEK

SEQ ID NO: 26760 - protein, 311 aa, Vibrio fischeri ES114
MSQQLPVRIATRKSPLALWQAHFVKDALQAAHPGLEVELVTMVTKGDIILDTPLAKVGGKGLFVKELEVAMLEGRADLAVHSMKDVPVEFPEGLGLVTICEREDPRDAFVSNTYNNIDELPQGAVVGTCSLRRQCQLKEARPDLIIKELRGNVGTRLQKLDDGNYDAIILACAGLIRLGLEDRIKSAIEPEQSLPAVGQGAVGIEARLDDDRLRALLEPLNHPETANRVLCERAMNNRLEGGCQVPIGSYSLIDGDQIWLRALVGEPDGSVMIRGEVSGPVSDAEALGTQLADQLLNDGAKEILERLYAEA

SEQ ID NO: 26761 - protein, 975 aa, Xanthomonas campestris pv. campestris str. ATCC 33913
MSQTPSSLRDLEHHSAFVERHIGPNDAEIAQMLGVVGHDSLDAMTDAIVPSNIKSPAALALPDAITEEEALARIRAIASKNQVQRTFIGQGYYGTHTPKVILRNILENPAWYTAYTPYQAEISQGRMEALINFQTMCADLTGMQIANASLLDEATAAAEAMTLAKRSAKSKSDTFFVHDAVHPQTQELLRTRAEPLGIVLRVGTPDEAMQAECFGVLLQYPDSFGHIGDHAALADAVHAQGGLVAVATDLLALTLIAAPGEWGADIVVGNSQRFGVPFGFGGPHAAFMACRDAYKRSMPGRLIGVSIDAAGNPAYRLTLQTREQHIRREKATSNICTAQVLLAVMASMYAVYHGPEGLTRIARRTHRLAAILAAALRSAGVTVGEHFFDTLHVKAIDADAIHAKAHAAGINLRAIDSEAVGISLDETSTRADVVALAQLFGAQADIDALDAATADALPQGMRRTSAFLQHPVFNTHHSEHELLRYMRSLADKDLAMDRTMIPLGSCTMKLNATAEMIPVTWPEFGAIHPLAPPEQSAGYAQLIEELEAMLVECTGYDAVSLQPNSGAQGEYAGLLAIRAYHRSRNEAHRDICLIPESAHGTNPASAQMCGMTVVVTKCDANGNVDVDDIRAKAEKYSDRLAALMITYPSTHGVFEEDVVAICEAVHAHGGQVYTDGANMNALVGVAKPGKWGSDVSHLNLHKTFCIPHGGGGPGVGPCAVKSHLAPFLPKTLPNAGIRAGENQKAAIHGSGSNFGEGEVGMVSAASYGSASILPISWMYVTMMGSAGLRKATQVALLNANYIAKRLSAHYKTLYTGRNGLVAHECILDVRPLEKTSGIGAEDIAKRLIDFGFHAPTLSFPVAGTLMVEPTESESQHELDRFIDAMIQIREEIRAIEDGRLDREDNPLKHAPHTATQVSASEWTHAYPRELAAFPLPSLKQQKYWPPVGRVDNVYGDKNVMCACIPVDAYKDDVVA

SEQ ID NO: 26762 - protein, 590 aa, Cryptococcus neoformans var. neoformans B-3501A
MSATHIENRDDNFLENKHFDHTERLENIKGWQEPPSPSGFGGHLIDENLVRVEGEDKVTWYLCFLISASAIAGFLFGYDTGVVGVALPLVGTDLGGSALNSSQQEIITAGTTIGAIFGSAILGGWGDRLGRKRAILISDVFFTIGAVIIASSYSVPQIIVGRIVLGIGVGGAAVIAPLFITETAPTAVRGRCIGINAFFIPFGQVVSDAIGAGVQNMHNGWRLLFALGAVPSLLQLLLFHYLPESPRILILKGDTEGARTVFQRIYPTATSEMIEYKFRVAQEYVAATTALQSGTTFWERAKKVWRTGSYRRSIIAVSVLQAAGQLCGFNTLLYYAGTLFSLLGLSNPALGGLIPAGTNAVFLLIGMTTVDKIGRRGLLLIGVPIMLLGHVWNIVAFYYLCKPTGGFLDTSYTYDTTNVGIVIGGIVFFVAGFGLTYSHLVWYQAEYLALEVRSMGSGIATTICWIANLVVSVSYLSELETMTPSGTYGFYFGISVVAFVFVVFCFPETKQLSIDETSLLFENDWGVKRSAQMRKERRETRKRFQDAEVAEAATAHLEARQQKSTSVSPAELSKFMAGLKSGKRKPSVSV

SEQ ID NO: 26763 - protein, 403 aa, Candidatus Pelagibacter ubique HTCC1002
MRRVVVTGLGVVSCLGNNQEEVYKSLLNSKSGISFCEEYKEHNLRSHIHGKPNIKLEDHVDRKTIRFMGSGAAYNYIAMKEAIKDSGLEDNDISNFKTGIVMGSGGPSIENVVLSVDKTRAKTPKLMGPFIVPRTMASTSSATLAVPFKIKGVNYTMSSACATSGHCIGHASELIQMGKQDVVFAGGSEELHWAMTAMFDAMTALSSKYNDAPETASRAYDKTRDGFVIAGGGGVLVLEEYEHAKARGANIYAELTGYGATSDGYDMVAPSGEGAVRCMKMALATAKNKMDYLNTHGTSTPVGDITELRGVGEAFGAEVPKISSTKSLSGHPLGAASVHEAIYSLIMMKNNFITASANITEMDDEAKKFPIVTKTETDVKLNSVMSNSFGFGGTNATLIFEKV

SEQ ID NO: 26764 - protein, 260 aa, uncultured bacterium
QPNAMGGREVGGMANLLAVHKDLHNEEHRREVAQFWGVDKISPKPGLTATEMFDALESGKLKAVWIACTNPLVSMPNSHQIEKAMANSKFVVVQEISHKSDTLQYADLVLPAAAWLEKEGTMTNSERRISYLPKEIEAPGEARPDVEIFCDFAQRMGFRGFNYNSTSEIYDEYASMTKGTNIDVSFLNYDRLKTEGTFQWPVNEYRHKGTPRLFEDKKFYTASQKAIFNIPSTIENTSVKTNDEFPLILTTGRVRDQWHT

SEQ ID NO: 26765 - protein, 379 aa, Salinibacter ruber DSM 13855
MPSDSLRVGVLTGGGDCPGINAALRAVTKSLTLQHDAEVLGFLDGFRGVVDRNVEPLHYRDVSGILTRGGTILGASNKADPFNYLPRGGADVSAQVMRTYRTLDLDALVAIGGDGTMSIAHRLTDLGVDIVGVPKTIDNDLVGTDRTVGFDTAVSTATDAIDRIHTTAQSHHRVMIVETMGRYSGWIALHAGVASGTDVILLPEIEYEVETVADVCRDRERSGQRFTIVAVAEGARRKEGDYVVQERGDEYTDSIRLGGISRVLADQLREHLDTSIRTTVLGHMQRGGSPTAYDRTLATTLGTRAATLVAEGTTGVMVAVQNDAFTQVPLDEIAGKTRTVPLDDPLIASGLDVGTSFGVAVSDLSEAASHSKPASPIQP

SEQ ID NO: 26766 - protein, 260 aa, uncultured bacterium
QPNAMGGREVGGMANLLAVHKDLHNEEHRREVAQFWGVDKISPKPGLTATEMFDALESGKLKAVWIACTNPLVSMPNSHQIEKAMANSKSVVVQEISHKSDTLQYADLVLPAAAWLEKEGTMTNLERRISYLPKEIEAPGEARPDVEIFCDFAQKMGFRGFNYNSASEIYDEYASMTKGTNIDVSFLNYDRLKTEGTFQWPVNEYRHKGTPRLFEDKKFYTASQKAIFNIPSTIENTSIKTNDEFPLILTTGRVRDQWHT

SEQ ID NO: 26767 - protein, 125 aa, Glycine max
MEIESVKCECCGLKEDCTQDYISEVKSKFDGKWLCGLCSEAVRDEVSHGGKKASSAMDEAVKAHMSFCRKFKSNPAVRVAEGMRQMLRRRSDLSSSSSSSSPSSSKKYTRSTSTSQVGDSSSFHL

SEQ ID NO: 26768 - protein, 373 aa, Oceanobacter sp. RED65
MSTVEIAPKTTRISQWFARSLTTHNSFAAFFEPLIQWIKPNWRADRCYTRVVSVRYESSDMYTLQLKPLQSFSHEFAGQYVELIIQKDGAWVSRYFTISSSPEFFRETGTIELSIAIQANGRITPWLMKNLNKGDMVNLGQPMGDFLPLNIPRDKSVSRKVFIAGGSGITPFRSSLQSLMQSDERDTQEIELFYYARSEEHFLFREELQRCAYLLPKAHVHFMDSEKIGFFDYTHLQVENKHQTDTAFFVCGPPAMIQHVRSTLNTHGVKKENIYYEFFGPEPLEADGQARAVLFQRAKLQANTEGNESLLELAEKQELKPVSGCRIGVCHQCICKKQSGRVRNIKTGEISDSGQQEIQLCISTAVDDVVLDL

SEQ ID NO: 26769 - protein, 112 aa, Methanococcus maripaludis S2
MKKLEAIIRMERVGLVKNALYKSGHASLTLTEVKGRGVQGGIVERYRGTEHVVDLLPKVKIELVVNEKDVDSVIKIIAENAYTGKPGDGKIFVIPVEDVCRVRTGEMGPDAI

SEQ ID NO: 26770 - protein, 426 aa, Prosthecochloris aestuarii DSM 271
MFFTTERYVALTIQNAFWTICTGSDIRSVSDVLLNDLTEAPIMKVDLSKYEFTGHNSPEVEDLTRLDNNEKKSMRMAGFDANEQNRSASFVQIDHNHAFCKSYDPGVEILPIGLAMKIHEGLADYQWKLLKPGKDEFTRMASDNPHGGYVIRVKKGARLNNPIQSCLMMHAEDVGQNVHNIIIIEEGAEAHILSGCTTSQADQSAAHIGISEYYIEKNARLTFTMVHNWGEHVEVRPRSAGEVDAGGVFLSNYISLKPVKNLQMYPSVAMKGAGSVSRFNSIIVATEGSFMDVGNKVILDAPETRTEIISHAIASGGHIIARGHIQANCAPSKGHLECQGLLLKNGIIQAIPELDGRAEGVELSHEAAVGKLAKEELEYLMIRGLDEQAAGSAIIRGFLNIDIMGLPSELQSEIDKAIAETEKSMF

SEQ ID NO: 26771 - protein, 411 aa, Methanococcus maripaludis S2
MVTADLFNNPTNIMDALNTLANSSDVMFLIFTGAFIFIMHLGFAMLEGGQVREKNVNNAMMKNMGDWIIGCISWLLVGSVIARTLNPADFFIWWGKIASATPFLTNNGLELANWFLGLVFAATAATIVAGGIAERIKFKSYILISIVITALLYPFFSYLGPWGAGVIPFHDYAGSLMVHGVGGFLALGLIAAIGPRFGRFVNKKAITIPGHNIPMSILGAYILAFGWYGFNVGSSLALSDISGLVCATTTLAMAGGGLGGCLFSKNDVLYTANGLLAGTVAICAGTDIVSPLGALIIGFIAGSQVPLIFKIVEKMGLDDVCGVIPVHATSGALGAILAGIFGMTAFGGVGGVSLTEQIIATLICAVYGTGAGFILGKLVGAVTGGLRVKESEEKAGLDISIHKLPAYPKEN

SEQ ID NO: 26772 - protein, 316 aa, Frankia sp. EAN1pec
MIVTVTLNPSLDRTIDISALARGAVIRAASARLDPAGKGVNVARALLANGKRSRAVLSCGGDDGQRLVRMLAAEGVDMLAVPIAGSTRSNITLSEPDGTVTKINELGPSLSKDELDTVAAAVLDCDVPGGWVAVCGSLPPGVPADAYADLCVRFRAAGRRVAVDTSGAALLDAVAAGPAVVKPNQEELGEAVGAPLRNLGEVIEAAQQLRTWGAGAVLASLGAHGAVLVDDHGAVMGDSPVLGPRSTVGAGDALLAGFLAAGARGPEALAEALAWGAAAVSLPGSRMPRAEDIRRDRVRIHNRPDFHRAMTLPLPA

SEQ ID NO: 26773 - protein, 343 aa, Candida albicans SC5314
MSTPITVIVSGATGFIAQHVVKQLLAKNYQVIGTVRSTAKGDHLLKLFNNPQNLSYEIVEDVGTKGAFDKVLQKHGEAKVFLHLASPFHFNVTDVEKELLLPAVDGTKNVLQAIYNFGNNIEKVVITSSYAAISTASKEADKNAIITEKDWNEISWQDALLNPVNGYRGSKKFAEKAAWDFIKSNDNVKFSLSTINPSFVFGPQSFGSEIKQSLNTSSEIINSILKLKPNDSIPASKGGWVDVRDVAKAHIIAFENEDAKNQRILLNSGRFTSQSLVDIINDKFPDLKGKIPVDEPGSDKSVIAESLATIDDTKSRELLGFEYYNLEQSVYDTVEQIVNAHKL

SEQ ID NO: 26774 - protein, 517 aa, Burkholderia xenovorans LB400
MLTGLGSIIGSGWLFGAWKAAKIAGPAAICAWVIGAVVILAIALTYAELGAMFPESGGMVRYARYSHGALVGFISAWANWIAIVSVIPIEAEASIQYMSTWPYPWAHALFVDGSLTTHGLLLSAALVIIYFLLNYWGVKLFARANSAITIFKFLIPGATILGLMLTGFHKENFGEVSTFAPYGWSAVLTAVATSGIVFAFNGFQSPINLAGEARNPARSVPFAVIGSILLALVIYVLLQIAYIGAVNPSDVMKGWSHFNFASPFAELAIALNLNWLAILLYVDAFVSPSGTGTTYMATTSRMIYAMERNNTMPKMFGNVHPFYGVPRPAMWFNLLVSFIFLFFFRGWSSLAAVISVATVISYLTGPISLMSLRRAATDLERPLHIPGMKIIAPFAFVCASLILYWAKWPLTGEIILLMVVALPVYFYFQAKSGFAGWGRDLKAAWWLVAYLPVMAILSLIGSKQFGGHDLIPYGWDMLVVIAFSLVFYYWGVNSGYRSEYLDERQEHDEVLEGIGAH

SEQ ID NO: 26775 - protein, 115 aa, Hordeum vulgare subsp. vulgare
MARTAATKLALVALVAAMLLVAADAAITCGQVSSALGPCAAYAKGSGTSPSAGCCSGVKRLAGLARSTADKQATCRCLKSVAGAYNAGRAAGIPSRCGVSVPYTISASVDCSKIH

SEQ ID NO: 26776 - protein, 115 aa, Hordeum vulgare subsp. vulgare
MARSAATQLVLVAMVAAMLLVAADAAISCGQVSSALRPCISYASGNGGILPPACCSGVKRLAGAAQSTADKQAACKCIKSAAGGLNAGKAAGIPSMCGVSVPYAISASVDCSKIR

SEQ ID NO: 26777 - protein, 197 aa, Gibberella zeae PH-1
MAALRSQSAARMLRSAAVPRVALSAAPRRFQSNITSATGTITGPVANEPDYNIQADKATSTYTPVPRSIQDGSEEILPAAIMSGAPMELQARTVRIYQEAKPATQSGDWRGRRWRMDWDILPKGHRWENPLMGWQSSGDFMQGTHINFESKEDAIHFAEKQGYEYFVQEPNSRKFAPKAYANNFLYSARKLKHIRTK

SEQ ID NO: 26778 - protein, 468 aa, Idiomarina baltica OS145
MAAVVWFRSDLRTVDNPALDAACLNHKHVYALFLVPQRTWQAHDWAPIKVDLWWRHLAEFKQELADKGIGFSIFTIDRFSQSGATIADFCEKHKVNTVYANREYPLDEIERDKQARACFEQRDIEFQLFDGNLLVPPEAVETKQGGYYKVFTPFNRAWRTEVAKISDWTPESWRVENTVASSTELPQCPLERKNSQTYPVGRQAIMGKLGQFIEHQVDEYKARRDEPSVDGTSMMSAYFEMGAIAPKTVARALSSLSPEFPYGLEPGADTWLTEVAWREFYQHLMFHEPRLSRGENYQTETQGLPWRDAEEDFQAWCDGRTGFPIVDAGMRQLNETGWMHNRLRMIVANFLVKDLLIDWRKGEQYFMRNLVDGSFPANNGGWQWSASVGTDAVPYFRVFNPVRQSEKFDPDGIYIRTWIKELADVPSKHIHWPHSYLKQHKTGYVSPIVDHSEARERFLSTFKQVKNG

SEQ ID NO: 26779 - protein, 392 aa, Thermosynechococcus elongatus BP-1
MILGMASQTGVLLLNLGGPDRPEDVRPFLYNLFSDPEIIRLPFRWLQKPLAWFISTSRARRSQANYAQIGGGSPLRRITEQQARALKDALEGIGIEANLYIGMRYWHPFTEEAIAQIKADQIRELVILPLYPQFSISTSGSSFRLLESLWNQDPELQKIRYTLIPSWYNHPGYVAAMADLIRQELDRCPNPDEAVIFFSAHGVPKSYVTEAGDPYQEEIEACVRLIMAALNRPNAHVLAYQSRVGPVEWLQPYTEDVILELAAQGVKTLVVVPISFVSEHIETLQEIDIEYREIAAEAGIEVFRRVPALNDHNGFISALAQLVKEALAAPPRTFAEVNQSRKRVKLYPQERWEWGMTSAAERWNGRLAMLGFLALMIELISGQGPLHMLGLL

SEQ ID NO: 26780 - protein, 267 aa, Wolbachia endosymbiont of Drosophila ananassae
MLVKIGTRGSKLAVVQALEAKQKLLDSFPNLSIEIVKIKTSGDKYANANLAEIGGKGLFIKEIEAELLENNIDMAVHSLKDVPAFFSWGLTIPCVLERLSPCDAFISHKHNSLESLPQQATIATSAIRRKVQLLNFRPDLNIVPLRGNVTTRLQNQSFDGIILAEAGLIRLEKHHLITEVLPPKVMLSAVGQGAICIQCRRNDVKIIDLLEKINNNMSFIGVKSERSFMKTVNGSCFTPLAALAEYVSENMLYLSLYVGRWKKYILH

SEQ ID NO: 26781 - protein, 281 aa, Geobacillus kaustophilus HTA426
MKKWMMAAAVVSLMALSACSNDGSEAIVETKNGNITKDEFYNEMKERVGKSVLRDLIDEKVLSKKYKVTDEEIDREIERIKEAYGTQYDLAVQQNGEKVIREMVKLDLLRTKAAVEDIKVTEKELKEYYDNYKPKIRASHILVKDEKTAKEVKAKLDKGEDFSKLAKEYSQDPGSASNGGDLGWFGPGKMVKEFEEAAYKLKVGEVSDPVKTDYGYHIIKVTDKEKKKSFNEMKDEIAFEVKRNKLDPATMQSKVDKLVKDAGVEIKDKDLQDVIEQQGKQ

SEQ ID NO: 26782 - protein, 571 aa, Xylella fastidiosa 9a5c
MRRSFVCGDIFAVDSLYVSPSAICRAATPCAFNPPLQEIVMFDESLKAQLKAYLDRVIRSIHIHASVDESHKSREMLDLLENIVLLSGKKVVLEVHRDDDQRKPSFGLGTPGESISIRFAGLPMGHEFASLVLGLLQVGGHPPKVADDLIERVRNLDGHYRFETYFSVSCQSCPDVVQALNMAAVLNPQIEHVAIDGALFQDEVEARQIMSVPTVYLNGELFGQGRMTLEQIVAKLDSGAAKRTAESIQAKAAFDVLVVGAGPAGTAAAVYAARKGVRTGLVAERFGGQVLDTMTIENFISVPETDGPRMVAALEQHLRQYEVDIMNLQRVETLVPAGENGFIEVRLASGASLSSRTVILSTGARWRQMNVPGEDEYRNKGVAYCPHCDGPLFKGKRVAVIGGGNSGVEAAIDLAGIASYVTLLEFDTKLRADEVLQRKLRSMSNVEVIMGAQTTEVRGDGKKVTGLVYVDRSTGGSFTLALEGVFVQIGLLPNTEWLKGRVELSPRGEIVVDECGHTSLPGVFAAGDATTVPYKQIVIAMGEGSKAALSAFDYLIRNVVEITGIAQAQAA

SEQ ID NO: 26783 - protein, 75 aa, Arabidopsis thaliana
MSFLYGNHVLKGGLGRITDSIVPGDGVVVFSMSDVPLGFGIAAKSTQDCRKLDPNGIVVLHQADIGEYLRGEDDL

SEQ ID NO: 26784 - protein, 174 aa, Clostridium acetobutylicum ATCC 824
MKLIVSGKNLEVTEGLREAVEKQISKLEKYFKPEVEAHVTLSVEKNRQIVEVTIPFNGVILRGEETNNDMYASIDIVGDKLERQVRKQKTKLERRKYSDSLKFQNIPDYHKEEQEPEIVKTKRFAIKPMSEEEAVLEMELLGHNFFVFQNGDSNEVNVVYKRKDGNYGLIEPEF

SEQ ID NO: 26785 - protein, 462 aa, Blastopirellula marina DSM 3645
MPKCDVPETPLSELLPADVLADNPPALPELAEPEVVRHYTNLSTLNMSVDTHYYPLGSCTMKYNPKRNERLASLPGIVDLHPYQPEDSLQGMLQLLYELQQFLTEISGLPAISLQPAAGAHGEWTALMSAAAYFRSIGQEQRKLVLSPDSSHGTNPASAQMAGFTAVTVRTVDGAVDMDDLRSKLNDQVAVFMITNPSTLGLFETQMAEIADAVHAAGGLIYLDGANMNAVLGISRPGDVGADMMHYNPHKTFSGPHGGGGPGAGPICVAEKIAPFLPSPIVVKEGDKYRLDYDRPESIGRVRTFFGNVGVLVRAYCYILSYGPDGLKAVSENAVLNANYLLSKIKHFLPVPHGLRCMHEFVASAAKLKQEKGVTAMDIAKRLLDYGFHAPTVYFPLTVPEAMMVEPTETESKEMLDAFVEILFRITEEPAELLHEAPHTTPISRPNEVQAARQPCLRAVCG

SEQ ID NO: 26786 - protein, 491 aa, Triticum aestivum
  misc_feature (163)..(163): Xaa can be any naturally occurring amino acid
MTSKVANSSGSDNADAKLSPSGLPVREVPGGYGVPFLSPLRDRLDYYYFQGAEEYFRSRIARNGGATVLRVNMPPGPFITADSRVVAFLDARSFSVLLDDAKVDKTDTLDGTFMPSLALFGGYRPLAFLDAADPRHAALKRVMISLAAARMHHVAPVFRIAFXAVFDAADAGLGDGPVQFNKLNEHHMFDFTCSALFGGTPPSKAMGDGAVTKAIKWLGVQLHPLASKIIKPWLLEDLLLHTFRLPPLLVRRDYADLTAYFAEAAAGFLNDADKAQSGISRDELLHNLVFTAIFNAYGGFKIFLPHVIKWLARAGPALHARLASEVRAAVPNGSDITVPAVDKMPLVKSVVWEALRMNPPVEFQYGRARQDLVVESHAAAYQVRKGEMLFGYQPLATRDERVFKQAGEFVPDRFVGGEGRLLGNVVWSNGPENSEPAEGNKQCPGKDMVVAVGRLMVAELFRRYDTFTADVKEMPLEPVVTFTSLTRAKAE

SEQ ID NO: 26787 - protein, 455 aa, Blastopirellula marina DSM 3645
MAYLFNTPQEQQEMLASIGAASIEELFEQIPASLRLGRPLDLPPAMGELELTQHLATLAAKNQGPGDKICFLGGGSYDHFIPAAVDALASRGEFYTSYTPYQPEVSQGNLQAMFEYQTLICELTGLDVSNASLYDGGSAIAEAVIMSMNTVRRHDKIVVLGSVHPEYRQILDTYFGPLGTQIVVVPTPNGTVDPAEVAAVVDDQTACVVVQSPNFFGSPEQVQALADIAHAKDALLVQSFDPLSLGVIKRPGDLGADIAVAEGHSLGSPMQYGGPYLGIMACREQFVRRMPGRICGETVDRRGKRCWVLTLQTREQHIRREKATSNICTNQGLFALRASIYLALMGPHGLQDVGELCARKSHYAATQIASQERFELAFSTPFFKEFVVRDLQNDVATVLADASEAGFFAGVALGTWFPELADCFLVTVTEKRTRVEIDGLVKTLALTTNRTTIHA

SEQ ID NO: 26788 - protein, 273 aa, Rhodospirillum rubrum ATCC 11170
MRGGTLYHGTVLHNRLRPRRHRMSYKVFSLLVDIDALPELDRKLRLFAHNGFALFGVHDRDHGAADGGALRPYIEGELARAGIDLGGGRIDLLCYPRVLGYVFNPLSVYYCRDGEGVLRAIVYEVRNTFGQRHSYLIPVTGETGVVRQDCPKEFYVSPFMEMACTYHFRLVPPEAEIVAGSSLAVSIEEDDAEGPLFFASFAGEAEALSDGALVRAFLRYRLMTLKVMGAIHWEALKLVIKGMRLLPRPPPPAEPVTILPSPPIPAPDSPAAR

SEQ ID NO: 26789 - protein, 316 aa, Geobacillus kaustophilus HTA426
MVKKTAGLLVMAYGTPYREDDIERYYTHIRHGRKPPQEQIEDLKARYRAIGGLSPLAKITEEQAKRLEERLNEVQDEVEFRMYLGLKHIEPFIEDAVERMHDDGIKEAVGIVLAPHYSTFSIRSYNERAKAAAKKLGGPTIYTIDQWYDEPKFLQYWAEQVRAIFAAMPERERERAVLIVSAHSLPEKIIQAGDPYPTQLEDTAKRIADQAGVAHYAVGWQSAGQTPEPWLGPDVQDLTRQLYEERGYTSFVYAPVGFVADHLEVLYDNDIECKQVTEEIGARYYRPEMPNTNPLFIDALASVVLKRWAEEGDRHE

SEQ ID NO: 26790 - protein, 388 aa, Roseovarius nubinhibens ISM
MSDTVPFEKPGPVEAGLRDAIATTEEIIEEARAGRMYILVDHEDRENEGDLVIPAEHADAAAINFMATHGRGLICLPMTAERVETLGLPMMAVNNSSRHETAFTVSIEAREGVSTGISAADRALTIATAINEQKSAADIATPGHVFPLRARKGGVLVRAGHTEAAVDISRLAGLHPSGVICEIMKDDGTMARLPDLVEFAQKHEMKIGTISDLIAYRHKHDNLIHEVRREKVTSSHGGAWDMAIYADQITGTEHVVLSKGDITDGAPVLARTHALDALEDVLGIGLEATGSGPTGKLPRAMEIIAAEGRGAVFLFRQPRPRLASEMEDDDTPRTIKHTGLGAQIMSYMGLHELILLTDSPDTRYLGLDAYGISIVGTRPISGAKAETN

SEQ ID NO: 26791 - protein, 428 aa, Synechococcus sp. RS9917
MGLCHGILSHPTPGPELLHQTLANGSRCVLAPMPESPLTCLDFWCRAGSASEGNGEEGLAHFLEHMVFKGSDRLGAGEFDLRIEALGGSSNAATGFDDVHFHALVPPDAAAEGLELLLDLVLQPALQAEAFAMERDVVLEEIAQYRDQPDEQVIQQLLSACCPDQAYGRPILGWESSLQASDPEAMRQFHRRRYQGPQCCLAMAGAIPAGWEHWLQSSALAGLDSKGDGTPGPSEPMLHFRPGRQEQRVPRLEAARLLMAWPAPPAREQTTLMGFDLATTVLAEGRRSRLVQRLREELQIVESIDMDLTSLEQGSLVMLEACCPADLVTRVEAEVCAVLKAMVDAPIERQELDRARHLVGNGLRFSLEAPGSVAAIAGAQTLWRGPQALLDPLLQMEAWDGPSLRERIVPALQPELASTLIALPADPA

SEQ ID NO: 26792 - protein, 587 aa, Xanthomonas campestris pv. vesicatoria str. 85-10
MAEIKEALVPDIGDYSDVPVIEVLVSVGDTVSKDQSLVTLESDKATMEVPSSVAGVVKELKVKVGDSLSQGALVALIEVADAGAETAKPAAAAPAKAAPAAAPAPAAKAESAAPAASSDGGLIEARVPDIGDYTDIPVIEVLVAVGDTVAKDQSLVTLESDKATMEVPSSAAGVVKELKVKVGDTLSQGNVVAIIAASDGGTGAAQSPAKPTTDTAETAGKVEPVAVPAEPDKLAQREIAQVQGARSGAGTQAAQGGQPSAGNPSSPPVTFDADSVLPSKVPYASPVVRVFARELGVDLNQLKGSEKGGRITREDVQRYVKAALSGGAPAAAGAAPAGGGNGLNLLAWPKVDFSKFGETETQPLSRIKKISGANLARNWAMIPHVTQFESADITDLEALRVALNKENEKAGIKLTMLAFLIKASAAALKKFPEFNASLDAAGENLTLKKYFHIGFAADTPNGLVVPVIRDVDKKGVLQIAQESGELAKKARDGKLGPADMSGGCFSISSLGGIGGIAFTPIINAPEVAILGVSKSAMQPVWNGKEFAPKLMLPLSLSYDHRVIDGALAARFTTYLSQVLADMRRVLL

SEQ ID NO: 26793 - protein, 310 aa, Mannheimia succiniciproducens MBEL55E
MNNKNHLKIATRQSPLALWQANYVKDRLTALYPDLQVELVTMVTKGDVILDTPLAKIGGKGLFVKELEHALLNHEADIAVHSMKDVPMEFPQGLGLSVICKREDPRDAFVSNKYRSLAELPQGAIVGTSSLRRQCQLKSLRPDLDIRSLRGNVGTRLSKLDNGDYDAIILASAGLIRLGMAERIASFIETDISLPAAGQGAVGIECRVDDELVQSLLAPLAHQETTICVLAERAMNNRLQGGCQVPIGGFAQVKNGEVFLRALVGATDGSQIIRAEGKSAVENAEVLGVQIAEDLLQQGADKILKSVYQD

SEQ ID NO: 26794 - protein, 231 aa, Oryza sativa (japonica cultivar-group)
MPAAESCHSRSLSWLVKSCIPADPARHIAVPVLCPTPQPPPPSSPPAPPISALPDDLLLECLARVPRASLPPLPAVSRRFATLLASDAFLHLRRAHAHLRPSLLALSVSDNGCTAQALLRFDASVPVLEVAALPLPPTLLHCCGSVFAHARAVVLGRDVFLIGRGATLRVDALTGAARACAPTLFPRKKFAAAAVGDRIYVAGGSARTSAVEEYDPEVDAWLVVGEAPRRR

SEQ ID NO: 26795 - protein, 258 aa, Bordetella bronchiseptica RB50
MTDGAIAYAVNEGIAEIVLARPPVNALDLATVRSLIAALARARQDAEVRAVIIGSATPGRFCAGLDLGQVQGRSTLEMHELLSTLYVALHQAQAGLGKPSIAAIDGAARGAGMTIAISCDVLVCDASATFGYPEIDVGLIPGIHFAHLPRIVGKHRAFELLFSGRAFDAPEAASLGLVSRVVPAGQAMAQARELARIFAAKPPTVMRLARAAFVRTVDMGYERSVAEVVETFCTVAGTDEAREGVAAFAARRAPGWAK

SEQ ID NO: 26796 - protein, 481 aa, Bacteroides thetaiotaomicron VPI-5482
MEDLNFRKGDAKTDVFGSDRMLQPSPVERIPDGPTTPEVAYQMVKDETFAQTQPRLNLATFVTTYMDDYATKLMNEAININYIDETEYPRIAVMNGKCINIVANLWNSPEKDTWKTGALAIGSSEACMLGGVAAWLRWRKKRQAQGKPFDKPNFVISTGFQVVWEKFAQLWQIEMREVPLTLEKTTLDPEEALKMCDENTICVVPIQGVTWTGLNDDVEALDKALDAYNAKTGYDIPIHVDAASGGFILPFLYPDTKWDFRLKWVLSISVSGHKFGLVYPGLGWVCWKGKEYLPEEMSFSVNYLGANITQVGLNFSRPAAQILGQYYQFIRLGFQGYKEVQYNSLQIAKYIHGEIAKMAPFVNYSENVVNPLFIWYLKPEYAKSAKWTLYDLQDKLSQHGWMVPAYTLPSKLEDYVVMRVVVRQGFSRDMADMLLGDIKNAIAELEKLDFPTPTRMAQEKNLPVEAKMFNHGGRRHKTVKK

SEQ ID NO: 26797 - protein, 268 aa, Marinomonas sp. 'Barents Sea 8'
QPNAMGGREVGGLANQLAAHMDFATPGAQDLVQRFWQAPNMATKDGLKAVDLFQAMEEGKVKVVWIMSTNPMVSLPDTAQVRRALEKCELVIVSDCKAHTDTTVMADVLFPATGWSEKDGTVTNSERRISRQRGLFPAPGEAKHDWWVICEVAKSLGFQSAFPYQNVHEIFAEHAALSAFENNGKRDFDMGHFSQITKADYDALTPVQWPVPKSRPEGTKRMFEDGRFFTSDGRAKFVAISPSLPKHQASQEWPFTLNTGRVRDQWHT

SEQ ID NO: 26798 - protein, 120 aa, Gossypium barbadense
MASSMSLKLACVAVLCMVVGAPLAQGAVTCGQVTSSLAPCIGYLTGNGAGGVPPGCCGGIKSLNSAAQTTPDRQAACKCIKSAAAGISGINYGIASGPPGKCGVNIPYKISPSTDCNSVK

SEQ ID NO: 26799 - protein, 335 aa, Xylella fastidiosa Ann-1
MTQTITVIRGDGIGPEIMDATLSVLNALQANLNYEFADAGLSALEKHGDLLPEATLNSISKNKIALKSPLTTPVGEGFSSINVALRRKFDLYANVRPAKSFPNTKSRFSDNVDLITVRENTEGAYLSEGQTISPDGEVATSSARVTRKGSERIVRYAFDLARTTGRKKVTAVHKANIIKSTSGLFLKTARDVASQYPEIDFQEMIVDNTCMQLVMRPEQFDIIVTTNLFGDILSDLCAGLVGGLGLAPGANIGNEQAIFEAVHGSAPDIAGQGKANPCALLLGAVQMLDHIGQPQNAERLRNAIVATLNAKDSLTPDLGGNGNTMGFAKAIASRL

SEQ ID NO: 26800 - protein, 114 aa, Capsicum annuum
MDMFGKIACFVLLCMVVVAPSAEALSCSQVTSGLAPCLPYLQGRGPLGGCCSGVKDLLAAAKTPADRKTACTCMKSTANSIKGIDAGKAASIPATCGVNIPYKISPSTDCTKVE

SEQ ID NO: 26801 - protein, 145 aa, Glycine max
MGAFTDKQEALVSSSFEAFKTNIPQYSVVFYTSILEKAPVAKDLFSFLANGVDPTNPKLTGHAEKLFGLVRDSAGQLKASGTVVIDAALGSIHAQKAITDPQFVVVKEALLKTIKEAVGDKWSDELSSAWEVAYDELAAAIKKAF

SEQ ID NO: 26802 - protein, 216 aa, Carica papaya
LPENVDWRKKGAVTPVRHQGSCGSCWAFSAVATVEGINKIRTGKLVELSEQELVDCERRSHGCKGGYPPYALEYVAKNGIHLRSKYPYKAKQGTCRAKQVGGPIVKTSGVGRVQPNNEGNLLNAIAKQPVSVVVESKGRPFQLYKGGIFEGPCGTKVEHAVTAVGYGKSGGKGYILIKNSWGTAWGEKGYIRIKRAPGNSPGVCGLYKSSYYPTKN

SEQ ID NO: 26803 - protein, 221 aa, Nicotiana benthamiana
VILYALLCGTLPFDDENIPNLFKKIKGGIYTLPSHLSAGARDLIPRMLIVDPMKRMTIPEIRLHPWFQAHLPRYLAVPPPDTMQQAKKIDEEILQEVVKMGFDRSNLIESLRDRVQNEGTVAYYLLLDNRHRVSTGYLGAEFQESVEHGYKRNNSNEAVTSPVGQRFPGIMDYQQAGARQFPIERKWALGLQSRAHPREIMTEVLKALQELNVCWKKIGQY

SEQ ID NO: 26804 - protein, 728 aa, Arabidopsis thaliana
MASTEALLPVTSLQDPLSESRSDQIPETRRRRPIKVHLAVYSGLLLIALYVTLIVTHDGSKAEIATESRPRMAGVSEKSNDGVWISSDDGKVEAFPWNNTILSWQRTAFHFQPEKNWMNGTNIKCPLFYKGWYHFFYQYNPNAAVWGDIVWGHAVSKDLIHWLYLPIAMVPDQWYDANGVWTGSATFLDDGSIVMLYTGSTDEFVQVQNLAYPEDPSDPLLLKWVKFSGNPVLVPPPGIGAKDFRDPTTAWKTSSGKWRITIGSKINRTGISLIYDTTDFKTYEKHETLLHQVPNTGMWECVDFYPVSKTQLNGLDTSVNGPDVKHVIKASMDDTRIDHYAIGTYDDSNATWVPDNPSIDVGISTGLRYDYGKYYASKTFYDQNKGRRILWGWIGESDSEAADVQKGWSSVQGIPRTVVLDTRTHKNLVQWPVEEIKSLRLSSKKFDMTIGPGTVVPVDVGSATQLDIEAEFEIKTDDLKLFFDDDSVEADNKFSCETNGGSTARGALGPFGFSVLADEGLSEQTPVYFYVTKGKHSKLNTVFCTDTSRSTLANDVVKPIYGSFVPVLKGEKLTMRILVDHSIVEGFAQGGRSCITSRVYPTKAIYGATKLFLFNNAIDATVTASFTVWQMNNAFIHPYSSDDLGQILSLTYLRTQSRASSNAAFYFISYKTTKTVVTMTQYELKSLAVHKTITKQKSLSFVKKKEGEKQKQSHPRARKISIRNLKSA

SEQ ID NO: 26805 - protein, 414 aa, Pseudomonas fluorescens
QVPAASKPWPALHAPRTLPAPHDLDKLVELLSQSKAVTLLCGSGCAGAHDQVVALADALGAPVVHALRGKEHVEWDNPFDVGMTGLIGFSSGYHAMLNCNTLVMLGTDFPYRQFYPSDACVIQIDRNPQALGRRVPLDLGIAADVGETLAALLPRLPYKGDRRFLEESLKHYAKARQGLDDLAQPSPAGRPIHPQYLTRLLSELADQDAIFTADVGTPTVWAARYLKMNGQRRLLGSFNHGSMANAMPQAMGAQAAFPQRQVISLSGDGGFSMLMGDFISLAQLKLPVKIVVYDNASLGFVAMEMKSAGYLDTGTDLHNPDFAAMANAMGILGLRVENSEELEGALRTALAHDGPVLVDVVTATQELAMPPAIKLEQAKGFSLYMLKAVMSGRGDEVIELARTNWLKDSWFKIT

SEQ ID NO: 26806 - protein, 232 aa, Oenococcus oeni PSU-1
MLAEYFIAVAFVASGLSANFQGLISPLGFKLPTTLSTASTGSNGGLMDLFAIIIILLVATLLSRGASQTARVENTLVILKVIAILVFIFVGVTAIKGQNYVPFIPKYHANTDGSAFGGWQGIYAGVSEIFLAYIGFDSIAANSAEAKNPQKTMPRGILGSLFIAVFLFISVALVLVGMFRYSDYANNAEPVGWALRQSGHEIIATIVQAVAVIGMFTGLIGMMLAGSRLLYS

SEQ ID NO: 26807 - protein, 477 aa, Prosthecochloris aestuarii DSM 271
MKRKTVICWFRQDLRLEDNPALFVAAEEGYVLPVYILDDSSPGTWQMGSATRCWLHHSLVSLNRSFDGKLGIFRGEPLEILKTLARQHKAEKIVWNRCYEPWRMKRDQGIKATLQAEGIEVSSFNGSLLWEPHEVLKQNNTPYRVFTPFFRRGCLNALPPRTPLPAPQRMLMADTIDNSISVQDLNLLPSIPWDSQLISHWSVGENSARQSLLRFLDQGLNGYKEGRDFPGQNHVSRLSPALHFGELSPNTVWYEAKRCGSGQDLDHFLSELGWREFAYTLLYHNHDMPEKNLQSAFDAFPWVHNDETLIRWQQGMTGYPLVDAGMRELWQTGYMHNRVRMITGSFLVKNLLLHWHYGQQWFHDCLLDADLANNSAGWQWIAGCGVDAAPYFRVFNPVRQGEKFDPDGTYTLRFVPELAKLPKKYLFNPWEAPKNILQEAGITLGKTYPEPIVDLAISRNRALSAYASIRKKKIQEK

SEQ ID NO: 26808 - protein, 195 aa, Zea mays
GEPAFSVLVSRFFLGEHFPAPVYFSLLPIIGGCALAAVTELNFNMVGFMGAMISNLAFVVRTIFSKKGMKGKSVSGMNYYACLSIMSLVILLPFAVAMEGPKVWAAGWQTAVAEIGPNFVWWVAAQSVFYHLYNQVSYMSLDEISPLTFSIGNTMKRISVIVASIIIFQTPVQPINALGAAIAILGTFIYSQAKQ

SEQ ID NO: 26809 - protein, 547 aa, Pseudomonas aeruginosa PAO1
MSELIRVPDIGNGEGEVIELLVKPGDKVEADQSLLTLESDKASMEIPSPKAGVVKSIKAKVGDTLKEGDEILELEVEGGEQPAEAKAEAAPAQPEAPKAEAPAPAPSESKPAAPAAASVQDIKVPDIGSAGKANVIEVMVKAGDTVEADQSLITLESDKASMEIPSPASGVVESVSIKVGDEVGTGDLILKLKVEGAAPAAEEQPAAAPAQAAAPAAEQKPAAAAPAPAKADTPAPVGAPSRDGAKVHAGPAVRMLAREFGVELSEVKASGPKGRILKEDVQVFVKEQLQRAKSGGAGATGGAGIPPIPEVDFSKFGEVEEVAMTRLMQVGAANLHRSWLNVPHVTQFDQSDITDMEAFRVAQKAAAEKAGVKLTVLPILLKACAHLLKELPDFNSSLAPSGKALIRKKYVHIGFAVDTPDGLLVPVIRDVDRKSLLQLAAEAADLADKARNKKLSADAMQGACFTISSLGHIGGTGFTPIVNAPEVAILGVSKATMQPVWDGKAFQPRLMLPLSLSYDHRVINGAAAARFTKRLGELLADIRTLLL

SEQ ID NO: 26810 - protein, 381 aa, Klebsiella pneumoniae
MERVLINDTTLRDGEQSPGVAFRTSEKVAIAEALYAAGITAMEVGTPAMGDEEIARIQLVRRQLPDATLMTWCRMNALEIRQSADLGIDWVDISIPASDKLRQYKLREPLAVLLERLAMFIHLAHTLGLKVCIGCEDASRASGQTLRAIAEVAQNAPAARLRYADTVGLLDPFTTAAQISALRDVWSGEIEMHAHNDLGMATANTLAAVSAGATSVNTTVLGLGERAGNAAAWKPSALGLERCLGVETGVHFSALPALCQRVAEAAQRAIDPQQPLVGELVFTHESGVHVAALLRDSESYQSIAPSLMGRSYRLVLGKHSGRQAVNGVFDQMGYHLNAAQINQLLPAIRRFAENWKRSPKDYELVAIYDELCGESALRARG

SEQ ID NO: 26811 - protein, 108 aa, Thiobacillus denitrificans ATCC 25259
MSEHVHYISDDSFEQEVLQAGVPVLVDYWADWCGPCKMISPILDEVAKEYAGKLKVCKLNIDENQATPPKFGIRGIPTLMIFKNGNVEATKVGALSKSQLTAFVDSNI

SEQ ID NO: 26812 - protein, 561 aa, Prochlorococcus marinus str. NATL2A
MKSEDCYEIEFDDIADALAAIRNGECVVVVDDEKRENEGDLICAAQFATPQQINFMATEARGLICLAMQGERLDELDLPLMVDRNTDSNQTAFTVSIDAGPEFGVSTGISAEDRAKTIQVALNSQTKPIDLRRPGHIFPLRAKIGGVLKRAGHTEAAVDLSLLAGLSPAGVICEIQNLDGSMARLPELKKYARERNLKLISIADLIHYRLENERFVYRQAVAKLPSLFGDFKAIGYKNELDGSEHVAIIKGNPENLKEPVLVRMHSECLTGDAFGSLRCDCRPQLEAALSRISEEGEGVVVYLRQEGRGIGLVNKLKAYNLQDGGLDTVEANEKLGFPADLRNYGVGAQILTDLGINRLKLLTNNPRKIAGLGGYGLQVESRVPLVICPGDHNAAYLEVKREKLGHLIDNNIQRNLTNERQNIVVYWDGKVNNSELKHFEDKACKWSENHFLNISIQTAPRLIALCENPLFIWNVRHRDIKTHLEGNLIDKRLLESLLKELSNWENTERIGIIKTENYERLLHPSSNISIESKKISELSNFENSPLFDWNLKDKTSTIEWS

SEQ ID NO: 26813 - protein, 592 aa, Bacteroides fragilis NCTC 9343
MKQSISERIHALRMWFKPNIQAFIIPSTDPHLSEYVAPHWKSREWISGFTGSAGTVVITEKKAGLWTDSRYFLQAAEQLQGSGIDLYKEMLPETPSITKFLSDELQPGESVGIDGKMFSVEQVESMQAELSAKNIQIVFCPDPMDELWENRPPMPESPAFVYDIKYAGKSCSEKIAAIRTELKKKSAESVMLSALDEIAWTLNLRGNDVHCNPVVVSYLLITEKKAVLFIAPEKVTEGVRNYLEEQQIEIQNYSDTEIYLSDLNSSSILMNPAKTNYSVFSSVNPRCRIIRGEAPVALLKAIRNDQEIKGIHAAMQRDGVALVKFLRWLESAVPSGTETELSIDRKLHAFRATQDLYAGESFDTIAGYKEHGAIVHYSATEESNATLHPKGFLLLDSGAQYLDGTTDITRTIALGELTTEEKTDYTLVLKGHIALAMAVFPSGTRGAQLDVLARMPLWSHKMNFLHGTGHGVGHFLSVHEGPQSIRMNENPIVLQPGMVTSNEPGVYKGGSHGIRTENLTLVCSAGEGLFGEYLKFETITLCPICKKGIIKELLTADEVDWLNNYHQQVYEKLSPKLNEEEKAWLKEATAAI

SEQ ID NO: 26814 - protein, 322 aa, Streptomyces coelicolor A3(2)
MSDVRNVIIIGSGPAGYTAALYTARASLKPLVFEGAVTAGGALMNTTEVENFPGFQDGIMGPELMDNMRAQAERFGAELIPDDVVAVDLSGEIKTVTDTAGTVHRAKAVIVTTGSQHRKLGLPNEDALSGRGVSWCATCDGFFFKDQDIAVIGGGDTAMEEATFLSRFAKSVTIVHRRDTLRASKAMQERAFADPKISFVWDSEVAEVQGDQKLAGLKLRNVKTGELSDLPVTGLFIAIGHDPRTELFKGQLDLDPEGYLKVDAPSTRTNLTGVFGAGDVVDHTYRQAITAAGTGCSAALDAERFLAALSDEDKAEPEKTAV

SEQ ID NO: 26815 - protein, 487 aa, Rubrivivax gelatinosus PM1
MREPNEADDAAVARARAADAAPLRSVAALPGPRGWPLIGNLLQFDLPRLHRQFEDWADRHGPTYRLRLGRREVLVISDAETIAALLRDRPDTWRRMRPIEAVIREAGGHGVFSAEGDDWRRQRRLVMSAFDPGHLKRFYPSLQRVTERLMASWREAARRGEAIDLQASLMRYTVDVTTGLAFGVDLNTIDAPHPLQEHLDKLFPMLFRRVNLPFPYWHYLRLPIDREYDRHLRRVHEAVRGFVQAARQRLQDEPTRRERPTDLLEAMLAARDADGSALTEEEVAGNVLTVLLAGEDTTANTLGWAIWLLHEHPDDWQALVAEVDAALGDARLPPSFDAARGLASIEASVGEAMRLKPVAPLLFMEANRETALAGFRLPPGAVVFCLMRRAALDARLAEDVADFRPGRWQDGADRAVQKASMPFGAGPRLCPGRYLALLEMKMVLGMLARNFELLEVGPEGGGAPGERMAFTMFPVGLKMRLAERARR

SEQ ID NO: 26816 - protein, 286 aa, uncultured gamma proteobacterium eBACHOT4E07
MTLKIATRSSKLALAQVDEFVSEYNISDYKIIKIKTEGDVKSSKGETLFDKAHFVTDIQKSILRGDADIAVHSAKDTPAKKTNGIERNFIISRTSKDVLIFKDNNNFNSSMKLGTSSLRRKLQAFHFLKSTNVFDINGNVDTRLEKLYRGDYDCIILAKAGLERLRLLKELNYEEMDWITASGQGTLAVEMTESYHENEKLLEIHSNIKNKLATNGIEYERNILERVDAGCNSAIAIESISENSKQIIRGEIYGVKEFITFSGASDIEAIEDIERQNGRRLLNEHN

SEQ ID NO: 26817 - protein, 224 aa, Idiomarina loihiensis L2TR
MKPLIAPSILSADFARLGEEVDAVLNAGADVVHFDVMDNHYVPNLTIGPMVCKALRDYGIEAPIDVHLMVKPVDRIIPDFAEAGASIITFHPEASDHVDRTLQLIHEQGCQAGLVLNPATPLHYLDHVMDKVDVILLMSVNPGFGGQSFIPSTLDKLRAVRKRIKASGRDIRLEVDGGVKVSNIGEIAEAGADMFVAGSAIFNADDYASVIRTMRDEIAAVTGS

SEQ ID NO: 26818 - protein, 321 aa, Phaeosphaeria nodorum
MATDPSKYKLNHSMIRIKDPKRSVQFYEFLGMKLINQIKMPEAKFDLYFLAYDSPKAVSHGNHWTDREGIVELTHNYGTEDDPDYKISNGNTEPHKGFGHLCVSVDNIQAACQRLEDAGYKFQKKLTDGRMRHIAFVLDPDGYWVEVIGQKPLEETESVKDTDTSTYRMNHTMIRVKDKDVSLKFYQDVLGMQLKRTSESPNSGFNLYFLGYGAPASDETANGVNPTADHEGLLELTWNYGTEKEADFKYHNGNDEPQGFGHICIAVDDLEAACARFEEKKVNWKKRLTDGRMKSIAFVLDPDNYWIEVVQNEKLKTRSNV

SEQ ID NO: 26819 - protein, 108 aa, uncultured gamma proteobacterium eBACHOT4E07
MSNVVVVENKDDFQNEVINTEGPVLVDFWAEWCGPCKQLAPLVEDASEEFKDKIKVCKMDVDANRETAAEYGIRSIPTLMIFENGELVGTEIGALSKLQLEEFIRSKI

SEQ ID NO: 26820 - protein, 223 aa, Thermoanaerobacter tengcongensis MB4
MAEVVITSKNWEEEVVNSDVPVLIDFWAEWCMPCRLVAPIIEELAKEYEGKIKVGKVNVDEEDELAMKFRIMSIPTIGLFKNGKMVGKLIGARPKADFVKFIEKYLNEDTFQKEESLEVEITYDNWEEEVVNSDVPVLIDFWAEWCAPCRLVAPIVEELAHEYKGRLKVGKVNVDEEQELAMKFRIMSIPTIGLFKKGKMVDKIIGARPKADFVRFIEKHLNN

SEQ ID NO: 26821 - protein, 161 aa, Pinus monticola
MVSGTSSTEEVVQVEARRLWNATTKDSHNFLPKVLPGVFTSVTLLQGDGGVGTVKQLNFTPGKKDFSFIKERVDELDEENFVYKYTAIEGGPLGKKLSSACFEVKLVPRKEGGCVAKWTCNYETLPGVQPDEGKFKEIKEDSFGMLKKVEQYLLSNPNLYC

SEQ ID NO: 26822 - protein, 213 aa, Oryza sativa (japonica cultivar-group)
MNMCEKDQNFHWGYDLFRDPFAPIGYYGPPHGYGDGNYCDLHYARDASHLDETHLHSSALTYDLYNPSVGIYHPGNAGEHDHDTVYIEPTSSNSCPDTDDSFPMDEEVGKRFYPMVPVPHVPKINGEIPSVDEATMDHERLTERLRLYELVEHKVKGDGNCQFRALSDQLYQSPDHHEFVRQQIMSQLKSNRDAYDGYVPMAYDDYLEKVSHA

SEQ ID NO: 26823 - protein, 258 aa, Bordetella bronchiseptica RB50
MAQFVQYEVVEGVAEITMNRGPVNAIDMQLAREVVDAYQRARHDDAAGAVILKSALPTVFSAGVDLKVALEFDGQALRRLIEVFYYEMHEALYRMGKPVIAAVNGHARAAGVTWAVSCDMVVAAEEAGMGYPEIDVGLLPAMHLVHLPRQAGRHRAAQLLFTGDIVSAREMMALGVVNEVVPRDQVLERARTLARRLARKSPLAMRLLRDAFMRANDLDYRRAMESVVETMCLLKESEDSREALSAFVEKREPVFRGR

SEQ ID NO: 26824 - protein, 131 aa, Narcissus pseudonarcissus
RMFHELDAESKAEFYSRDPKKSVKYNSNYDLYESPTAYWSDTISCHFDKLMDPEELPSVCRAEMLNYHQHVMTLVEMLCELLSEALGLPSSYLKNINSTESQLLAAHNYPPCPEPTLTLGMPKHIDPSFLT

SEQ ID NO: 26825 - protein, 457 aa, Synechococcus sp. RS9917
MLRVAVVGGGPSGSCAAEILAKAGIQTWLFERKLDNAKPCGGAIPLCMVDEFEIPDHIIDRKVRNMKMISPSNREVDIKLDPLGYDQNAYIGMCRREVFDAFLRNRAAELGTTLVNGLVQKIDTGNQRQGPYTLHYADYSSGGPTGEIKSLEVDLIIGADGANSRVAKAMDAGDYNVAIAFQERIKLPAEEMAYYEDLAEMYVGTDVSPDFYAWVFPKYDHVAVGTGTMQQNQSLIKGLQKGIRERASKRLFKGEVIKVEAHPIPEHPRPRRVVGRMALVGDAAGYVTKSSGEGIYFAAKSGRMCAEAIVEISGNGARIPTEKEIKSTYLKRWDRKYGATYAVLDILQRIFYRNDAAREAFVEMCDDRDVQKLTFDSYLYKRVVMMNPWQQIKLTLRTLGSLLRGEALAPSDYDPVPSAVGRSDGDFLAQEAAEAIKAKAQAQASDSSDHKETATIA

SEQ ID NO: 26826 - protein, 466 aa, Leuconostoc mesenteroides subsp. mesenteroides ATCC 8293
MDSGPSMIINFFIILVVLLLAILFTLTEYSLVKVRLSALKALQETREKPSRNISNAIYMTTHLTEYLSTAQVGITLTSLILGWIGEETVAEIILGSGIIPAEYAHAVASVAAMIIFTIVHAVFTDLVPKNIAIESPVKVLLFIVRPVRFFHIALFPLIWTLDHLSNGITHLLGFRTDGEEDIYSQTEILSLSKNAAAAGELDEEDLTFMQRAFEMNDKVAVDIMIDRTSMTIIDVTASIADGLNLYLQERYSRFPVVADNDKDKVLGYVFNYDLVRQARIKSSDPVSKIMRDIPAVPENMDLHDVMDEMIIKRSPIAIVVDEYGGTSGLITDKDIYEELFGTVRDEIDDVSDDYIEKLGDHRFKISGKMTLYDFERYFNRNIKELENDDAVTLTGYVLNHDPEFRAGDTMKVANFELTALDYDNAYISQFIVKELPLPKDDLNQNGIFDEDEAASEKNSEDEVAAN

SEQ ID NO: 26827 - protein, 594 aa, Arabidopsis thaliana
MADEAKAKGNAAFSSGDFNSAVNHFTDAINLTPTNHVLFSNRSAAHASLNHYDEALSDAKKTVELKPDWGKGYSRLGAAHLGLNQFDEAVEAYSKGLEIDPSNEGLKSGLADAKASASRSRASAPNPFGDAFQGPEMWSKLTADPSTRGLLKQPDFVNMMKEIQRNPSNLNLYLQDQRVMQALGVLLNIQIRTQQAGDDMEIGEEEMAVPSRKEPEVEKKRKPEPEPEPEPEFGEEKQKKLKAQKEKELGNAAYKKKDFETAIQHYSTAMEIDDEDISYITNRAAVHLEMGKYDECIKDCDKAVERGRELRSDYKMVAKALTRKGTALGKMAKVSKDYEPVIQTYQKALTEHRNPETLKRLNEAERAKKELEQQEYYDPNIGDEEREKGNDFFKEQKYPDAVRHYTEAIKRNPKDPRVRRIHHHISFNVVLKKSSVFDCFNNFNRAACYTKLGAMPEGLKDAEKCIELDPTFLKGYSRKGAVQFFMKEYDNAMETYQKGLEHDPNNQELLDGVKRCVQQINKANRGDLTPEELKERQAKGMQDPEIQNILTDPVMRQVLSDLQENPAAAQKHMQNPMIMNKIQKLISSGIVQMK

SEQ ID NO: 26828 - protein, 240 aa, Bacillus cereus ATCC 10987
MVKLVLIRHGQSEWNVENRFTGWTDVDLSSKGLEEAREAGVMLKASGFSFDIAYTSVLRRAMRTLWITLEEMDLMWIPVYKTWKLNERHYGALQGLNKEETARKYGDEQVTLWRRSTNVRPPALTKDDERYEAAHPKYRDIKDYEFPLTEDLEDTEKRVVSYWNEEIAPNVKAGKQVIIAAHGNTIRALVKHLDQISDKDIENVNIPTGTPLVYELDNDLKPIGHYYLNREIETLEEKQV

SEQ ID NO: 26829 - protein, 154 aa, Narcissus pseudonarcissus
KVMKKASFIGVSTTTTFYLLCGCLGYAAFGNKAPGNILTGFGFYEPFWLVDIANLCIIIHLVGAYQVFSQPIFSAVETWITNRHPNINFLNHDRVLVIGKCFRYKINLFRLIWRTLFVIACTFIAILMPFFNDILGFLGAVGFWPLTVYFPTEM

SEQ ID NO: 26830 - protein, 187 aa, Oryza sativa
MITPPVAGDTFAGAPPPPSQEEDAPPYGSVVLGGTFDRLHDGHRRLLKASADLARDRIVVGVCTGPMLAKKEYAELIEPVEKRMKAVEDYIKSVKPELVVQVEPIEDPYGPSIIDDKLDAIIVSKETLNGGFAVNRKREEKGLPLLKVEVVDLLSGGAEGEKLSSSALRKLEAEKANQQEGAASKGV

SEQ ID NO: 26831 - protein, 107 aa, Brassica napus
  misc_feature (100)..(100): Xaa can be any naturally occurring amino acid
METPNVTIPKVGPKPSRKVKLPTPKELISHYESKGMDTQDASLKVIEDLQKALFRVISSGKGKHDKLLTESSRKIDAINNRLTVLDMKLDSKPAYVETFXIGLASGA

SEQ ID NO: 26832 - protein, 496 aa, Burkholderia xenovorans LB400
MTNHPTAMPSLQEPSLFRQECYIAGEWIESDPMARIDVVNPANGLKIGTVPRATLADVRTCIDAAERALPAWSGKTGKERAAILRRWYELMLQHQEDLAVIMTCEQGKPLAESRGEIVYAASFLEWFAEEAKRVYGDTIPTPASDRRIVVLKQPIGVCAAITPWNFPAAMLTRKIGPALAAGCTMVLKPASQTPFSALALCVLAERAGVPAGVLSCVTGKASMIGDEFCRNPAVRKLSFTGSTEIGKLLLQQCASTVKKTSMELGGNAPFIVFDDADLDAAVVGAIAAKFRNAGQTCVCVNRFLVQDTVHDAFVEKLSTAIAALKVGDGLDAGTRIGPLIDSKAVEKAREHVDDAIARGATVVTGGSGHALGGNYFEPTLLTGASKDMKIFREETFGPVAPVFRFRTEEEAIQLANDTEFGLASYFYGRDIGRVWRVAEALEYGMVGINEGLISTEVAPFGGVKESGLGREGSKYGIEDYLEVKYLCMGGLAARPV

SEQ ID NO: 26833 - protein, 532 aa, Prochlorococcus marinus str. NATL2A
MAITDIFQMNNNDKWARYCDLLYSDDSLGFWLDISRMDVAINDFEDFNEIYSKAFDALESLENGSIANIDEGRQVGHYWLRNPKVAPSPEISDSITKEIQDISKFGSSILNGEITNSDGEKYTDVFWIGIGGSGLGPLLIKESFKRESIGLDLHFLDNVDPEGISHKLNSILPNLNSTLFVVVSKSGGTPEPLIGMEQAMKFVRDNNQNWSSRAIAITSKGSKLDLLAHNENWLDIFDLPDWVGGRTSITGAVGLLPAALIGADINKFLNGASQMDALTRVKDIKNNPAALLSLAWFKSGNGKGLRDMVVLPYRDRLEVFSRYLQQLVMESLGKKFDRDENQVNQGIAVYGNKGSTDQHAYVQQLRDGIDNFFVNFIEILHDPLEIVEVKNKRPGDYLSGFLQGTRSALTEGGRQNLTITFKSFDESSLGALIALFERAVSLYAELINVNAYNQPGVEAGKKAATKIIKLQKEIEELLDDGKQRTLNEINDALSSDSTESIYLILRKLSENSDHYSMIGNQSNPDKLIISKT

SEQ ID NO: 26834 - protein, 390 aa, Wolbachia endosymbiont strain TRS of Brugia malayi
MVQVVEAFGKPHVNVGTIGHVDHGKTTLTAAITKHYGNFVAYDQIDKAPEERKRGITIATAHVEYQTEKRHYAHVDCPGHADYVKNMIVGAAQMDAAILVVSGVDGPMPQTREHILLAKQVGVGYIVVYINKADVSDPDMIGLVEMEVRELLSKYGFPGDEVPVVIGSALKALEDDDGEYGKKSIDKLMERLDDYVEVPPRSVDLPFLLPIEDVFSISGRGTVVTGRIEKGEIKIGDEIEIIGLKATQKTTCTGVEMFKKLLEKGSAGLNVGILLRGTKREEVERGQVLAKPGTITPHRKFKAEVYILKKEEGGRHTPFFANYQPQFYLRTTDVTGSIKLLEGKEMVMPGDNVSIEVELQVPIAMDKGLRFAIREGGRTVGSGVVSEILE

SEQ ID NO: 26835 - protein, 149 aa, Glycine max
  misc_feature (2)..(2): Xaa can be any naturally occurring amino acid
  misc_feature (7)..(7): Xaa can be any naturally occurring amino acid
  misc_feature (109)..(109): Xaa can be any naturally occurring amino acid
  misc_feature (139)..(140): Xaa can be any naturally occurring amino acid
MXTPAVXIRTIAPKPSKKLKLPSPKQLISLYESQGMHSQNASLKVIKDLQKALFGVISYGKGKHDKLLIECSSKIHAISNRLAVLGMKLDSKPGYVETFAIGLASGWCXLKGLVLIVPHIIAPLFQIWNSVFSATRSSXXMILNFVITS

SEQ ID NO: 26836 - protein, 415 aa, Moritella marina
MANNRRVVITGLGIVSPVGNTVATAWEAIKSGISGIENIEHFDTTNFSTKFAGLVNDFDAESVGINRKDCRKMDLFIQYGIAAAEQALTDSGLEITEQNATRIGTAIGSGIGGLGLIEQNVHSFGKGGAPKVSPFFVPATIVNMVAGHVSIRNNLKGPNIAIATACTSGTHCIGQSARMIAYGDADVMVAGGAEKASTEMGLAGFGSAKALSTRNDDPQKASRPWDKDRDGFVLGDGAGVLVMEEYEHAVARGATIYAELAGFGMSGDAFHMTSPPEDGAGAALSMNNAIADAGITADKVGYVNAHGTSTPAGDKAETAAVKSVFGEHAYTLAVSSTKSMTGHLLGAAGAIEAIFTILALKDQILPPTINLENPSEGCDLDYVTDGARPVNMEYALSNSFGFGGTNGSLLFKKAD

SEQ ID NO: 26837 - protein, 161 aa, Pinus monticola
MVSGTSSTEEVVQVEARRLWNATTKDSHNFLPKVLPEAFTSVTLLQGDGGVGTVKQLNFTPGKKDFSFIKERVDELDEENFVYKYTAIEGGPLGKKLSSACFEVKLVPRKEGGCVAKWTCNYETLPGVQPDEGKFKEIKEDSFGMLKKVEQYLLSNPNLYF

SEQ ID NO: 26838 - protein, 377 aa, Xylella fastidiosa Ann-1
MNSFAAVPVLIEEVRAGRMVVIVDDEDRENEGDLIMAAELVAPKDINFMVTHARGLVCLSLTRERCAQIGLSPMVQRNTTRFQTNFTVSIEAAEGLTTGISAYDRAHTIRTAVRPNAKPSDLHQPGHIFPLIAQPGGVLTRAGHTEAASDLPMLAGLEPAGVLVEIMNADGTMARRPQLEVFAQQHGLKIGSIADLIAYRLANEHTVERVDERVIETEYGSFLLVTYRDRIAHDLHFALVRGTLDASIPTLVRVQVENPLADMLHWRREDFGMAASDALRMIAAAERGVMVMLAAPRDSDVLLARLRSEPEVVSNVKDVGQWRRNGAGGQILADLGLAKLRVLGTPRRQIALAGFGLEVLEYLECRGGVPFASQGVD

SEQ ID NO: 26839 - protein, 353 aa, Halobacterium sp. NRC-1
MGNTTDELLDDITFDADEPDRAEIVSMGERTSVRMLKAALAARGVDATFLEPGTTDWPIVTNERGEVDADATAAGVDRLAGRLGDTVPVITGFLAEDPQGNVTTLGRGGSDTTAVMLGRYLDADEVVIVTDVEGIMTGDPQVVEGARNVGRITVDELRNLSFRGAEVIAPSALSFKDDALDVRVIHYQHGDLLSGGTRIEGTFESMIDMRDSPLACLTVAGRAIRNRPGITSALSTALSDSDINVDAVASGMDSMTFYVDESVAERAENILHQEVIAVSELSSVTVTDDIAAIRVLGGELPNRPGVLCRIIDPLADRNINVIDIISSATSVAVFVSWADREPALDVVQNGFGS

SEQ ID NO: 26840 - protein, 406 aa, Rhodospirillum rubrum ATCC 11170
MARIVMKFGGTSVGDVDRIRNVARRVKAEVDAGNEVAVVVSAMSGETNRLVGFCDSMTNMYDAREYDAVVATGEQVTIGLLAIALQDIGVEARSWMGWQIPIHTDEAHGKARILSIDTTVLEQRLASGQVAVVAGFQGLGPNNRVTTLGRGGSDTSAVALAAALKADRCDIYTDVDGVYTTDPRIVPKARKLDRITYEEMLEQASLGAKVLQTRSVEMAMKHRVRVRVLSSFSDAPGTLVCDEDEIVEKELVSGIAYSRDEAKITLVKVSDRPGVAARIFGPLADANINVDMIVQNVSEDGHSTDLTFTLPRSDLARALKVLEGARDDINYRELTTSSAVVKVSVIGVGMRSHAGVAQTMFRALSEKGINIHVISTSEIKVSVLIAEEYMELAVRALHSAYGLDAA

SEQ ID NO: 26841 - protein, 161 aa, Pinus monticola
MVSGTSSTEEVVQVEARRLWNATTKDSHNFLPKVLPEVFTSVTLLQGDGGVGTVKQLNFTPGKKDFSFIKERVDELDEENFVYKYTAIEGGPLGKKLSSACFEVKLVPRKEGGCVARWTCNYETLPGVQPDEGKFKEIKEDSFGMLKKVEQYLLSNPNLYC

SEQ ID NO: 26842 - protein, 450 aa, Idiomarina loihiensis L2TR
MSYIKETIEKLKQTSPAQVEFYQAVEDVLESIEPLLEERPKYREHSIIERLLEPERQIMFRVPWMDDDGKIQVNKGYRIEFNSALGPYKGGLRFHPSVNAGIVKFLGFEQIFKNALTGLPIGGGKGGANFDPKGKSDAEIMRFCQSFMSELYRHIGPHTDVPAGDIGVGSREIGYLFGQYKRLANRFDGVLTGKSELWGGSQVRKEATGYGVVYFAQCMMDDQDDSLDGKRCLISGSGNVAIHAMEKLYELGAKPISCSDSSGTIYHDSGIDLDLVKRIKEEQGGRLKEYLETHEDAEYTSKDDYPEEGHCVWRYEADIAFPCATQNELTEKDAQALLENGCKYIVEGANMPTTQAAVDLFIESGVGYGPGKASNAGGVATSQLEMAQNASMLRWDFEEVDEKLKDIMSNIYQDAKRTAEDFGHPSNLVLGANIAGFRKVADAMLEQGVV

SEQ ID NO: 26843 - protein, 161 aa, Pinus monticola
MVSGTSSTEEVVQVEARRLWNATTKDSHNFLPKVLPEVFTSVTLLQGDGGVGTVKQLNFTPGKKDFSFIKERVDELDEENFVYKYTAIEGGPLGKKLSSACFEVKLVPRKEGGCVAKWTCNYETLPGVQPDEGKFKEIKEDSFGMLKKVEQYLLSNPNLYC

SEQ ID NO: 26844 - protein, 309 aa, Oryza sativa
  misc_feature (40)..(40): Xaa can be any naturally occurring amino acid
  misc_feature (78)..(78): Xaa can be any naturally occurring amino acid
  misc_feature (90)..(90): Xaa can be any naturally occurring amino acid
ARFAATTSARSARVGALLLSAVRILVVSGLSCHVAAGAAXGVAGSAGAAARAPPPLMPPDAVMRELPPPVPYVFTPQXPVAPLHIPTEFXPVFNNSWINESDESTNNHPQEKGIPTLISWSQGGNEVFVEGSWDNWTSRRVLEKSGKDHTILLVLPSGVYHYRIIVDGEPKYVPELPHVADEGGQVANLLDVHDYIPESLGSVAGFDSPPSPEHSYDLQLPGDEEFPKEPPILPPQLVMSVLGDTDNSEEQTLKPKHVVLNPLYIEKGWGSQSLLALGVTPRFQSKYVSFVLYKPLRRSSTAKRPKNGG

SEQ ID NO: 26845 - protein, 430 aa, Oryza sativa
MPAVKKDDVRTHRPVGMRKGRWVLGDITEVLDRNSWRLGKIAKVLKDDYFVIRVRKQSEKQTQHVDQTFHHSKMVMEDDHHSNEANDHITKRHKAINLCPSSSARNVKKKLELTRMPPDDSIPGASKKRRVDAHEVHRQTRKPQPLKVSAKNDIHRDLFCRPSSERYNDLAKNNLTKRKPDSIEHEKLQQNYGFTFRTMKSYREIILLEYCEVSSPAKPPFSLVSGASRCRIRRRRLLPGPLSDPEEDAPPYGSVVLGGTFDRLHDGHRRLLKASADLARDRIVVGVCTGPMLAKKEYAELIEPVEKRMKAVEDYIKSVKPELVVQVEPIEDPYGPSIIDDKLDAIIVSKETLNGGFAVNRKREEKGLPLLKVEVVDLLSGGAEGEKLSSSALRKLEAEKANQQEGAASKGTYPLPVLWQRLQNRGSGVT

SEQ ID NO: 26846 - protein, 292 aa, Oryza sativa (japonica cultivar-group)
MAQIIDGKAVAADIRREVAADVAALSSAHNLVPGLAVVIVGSRKDSQTYVQMKRKACAEVGIRSVDVDLAEDISEAALVAEVHRLNADPAVHGILVQLPLPKHINEEKILNEISLEKDVDGFHPLNIGKLAMKGRDPLFLPCTPKGCMELLTRSGVTINGKRAVVVGRSNIVGLPVSLLLLKADATVSIVHSRTPNPESIVREADIVIAAAGQAMMIKGDWIKPGAAVIDVGTNSISDPTRKSGYRLVGDVDFAEVSKVAGHLTPVPGGVGPMTVAMLLKNTVDGAKRGIVQ

SEQ ID NO: 26847 - protein, 161 aa, Pinus monticola
MVSGTSSTEEVVQVEARRLWNATAKDSHNFLPKVLPEVFTSVTLLQGDGGVGTVKQLNFTPGKKDFSFIKERVDELDEENFVYKYTAIEGGPLGKKLSSACFEVKLVPRKEGGCVAKWTCNYETLPGVQPDEGKFKEIKEDSFGMLKKVEQYLLSNPNLYC

SEQ ID NO: 26848 - protein, 94 aa, Oryza sativa (japonica cultivar-group)
MVHHNPLPSSNCRFLGCQIKGDWIKPGAAVIDVGTNSISDPTRKSGYRLVGDVDFAEVSKVAGHLTPVPGGVGPMTVAMLLKNTVDGAKRGIVQ

SEQ ID NO: 26849 - protein, 227 aa, Synechococcus sp. RS9917
MSTKPLVISPSILSADFARLGEEVKAVDQAGADWIHVDVMDGRFVPNITIGPLIVEALRPVTQKPLDVHLMIVEPEKYVPDFAKAGADIISVQVEACPHLHRNLAQIKDLGKQAGAVLNPSTPLDTLEYCLELCDLVLIMSVNPGFGGQSFIDNQVQKIRDLRRMCEAKGLDPWIEVDGGVKGANAWKVIEAGANAIVSGSGVFNQPDYAAAIEGIRNSKRPEGVLV

SEQ ID NO: 26850 - protein, 428 aa, Flavobacteria bacterium BBFL7
MALEMKVPSPGESITEVEIAEWLVATGDWVEKDQAIAEVDSDKATLELPAEASGIITLKAEEGDAVAVGAVVCLIDTEAANPNGGSQDVENAPSSMGGGDEGGNNGDVATEMKKNAPADKSANSEKAPQPAQAKETYASGTASPAAKKILDEKGVDAKSVSGTGRDGRITKDDAVNAKPSMGTPGAGSRGESRTKLSMLRRKVAERLVSVKNDTAMLTTFNEVDMKPIFDLRKEYKEDFKAKHGVGLGFMSFFTKAVTRALEMYPAVNSMIDGKEMVSFDYKDISIAVSGPKGLMVPVIRNAENLSFRGVEAEVKRLALRARDGNITVDEMTGGTFTITNGGVFGSMMSTPIINPPQSAILGMHNIIERPVVVDGNIVARPMMYLAVSYDHRIIDGKESVGFLVAIKEALEDPINILMDGDVKKALEM

SEQ ID NO: 26851 - protein, 358 aa, Oryza sativa
MAGCLWPCVTGGGAAADGAGSLFRSKARGPVEVVRHARELLAFLAENHDACGDKRDVKREHKMVDLAKSIGEMKSILYGNGEADPVDEACSQLTKEFFKENTNSLHLLVVCLPYMDLETQKDVTQVTANLLRQKVDYRMVASDYLEENQDLLDVLMSGYDNMDIAIHYSAILRDCIRHQVAARYVLESQHMKKFFDYIQYPDFNIASDAFKTFKELLTRHRSSAAEFFSNNYDWFFPEFNSKLLSSSNYIIRRQATQLLGDILLDKSNTTAMVRYVSSKDNLIILMNLLREQSRAIQVEAFRVFKLFTCNPKKPPEIVGILVTNKSKILRFLADFTIEKEDQQFEADKAQVVTEISAM

SEQ ID NO: 26852 - protein, 648 aa, Arabidopsis thaliana
MASTEALLPVTSLQDPLSESRSDQIPETRRRRPIKVHLAVYSGLLLIALYVTLIVTHDGSKAEIATESRPRMAGVSEKSNDGVWISSDDGKVEAFPWNNTILSWQRTAFHFQPEKNWMNDPNGPLFYKGWYHFFYQYNPNAAVWGDIVWGHAVSKDLIHWLYLPIAMVPDQWYDANGVWTGSATFLDDGSIVMLYTGSTDEFVQVQNLAYPEDPSDPLLLKWVKFSGNPVLVPPPGIGAKDFRDPTTAWKTSSGKWRITIGSKINRTGISLIYDTTDFKTYEKHETLLHQVPNTGMWECVDFYPVSKTQLNGLDTSVNGPDVKHVIKASMDDTRIDHYAIGTYDDSNATWVPDNPSIDVGISTGLRYDYGKYYASKTFYDQNKGRRILWGWIGESDSEAADVQKGWSSVKGIPRTVVLDTRTHKNLVQWPVEEIKSLRLSSKKFDMTIGPGTVVPVDVGSATQLDIEAEFEIKTDDLKLFFDDDSVEADNKFSCETNGGSTARGALGPFGFSVLADEGLSEQTPVYFYVTKGKHSKLNTVFCTDTSRSTLANDVVKPIYGSFVPVLKGEKLTMRILVDHSIVEGFAQGGRSCITSRVYPTKAIYGATKLFLFNNAIDATVTASFTVWQMNNAFIHPYSSDDLGVPSST

SEQ ID NO: 26853 - protein, 189 aa, Triticum aestivum
MATMVALSSFAVVGRSAARSPVAGPRRRTLVVRAQSEPGMDSTKETTSASTSSSPSTSPTPIPAAPKPMTKKANPSVWDTLAFSGPAPERINGRLAMVGFVAALSVEAARGGGLLDQAGSGAGLGWFLVTAGVFSAASLVPLLQGQTVESKSSGIWSADAELWNGRFAMLGLVALAATEFITGAPFVNI

SEQ ID NO: 26854 - protein, 1118 aa, Oryza sativa (japonica cultivar-group)
MEKEVDVSAGAAEAPQPEDKVAPEAEANGDLGDKAEEEASASAAVEVVEESNAPEELLEKAVVSEANGVAAAVELAVEEKLEDNKGEEEEMEAKPEPVSGVIPVVVDDTSSEMIAPVSAESAVEESTEKEQTVDDTSSEMIAHVSAESAVEESTEKEQTVESEASESVEIVGVEKPTEDESNVDGGASSVVSRELAPEETKENNVGQEDEGVAEVIDREEDADDDEEIVLAAADDEDDGTNEADDDEDGVSSDRGPARVAIIESSEAAKQIMKELGEGSASVSPVSGLSSSREYTNSMDGQIVLDDSEEDGDDDDNEDDDEKGFDSAALAALLKAATGASADGNVTVSSQDGSRIFSMDRPAGLGSSAPSLRPTVPRPVARSNLFSPSELAVTAEPTEEMTEEEKKLHDKVELIRVKFLRLVYRLGATPEETVAAQVLYRLSLAEGIRHGRQTNRAFSLDNARKKAMLLEAEGKEELNFSCNILVLGKIGVGKSATINSIFGEEKSKTDAFSSATNSVREIVGNVDGVQIRIIDTPGLRPNVMDQGSNRKILASVKKYTKRCPPDIVLYVDRLDSLSRDLNDLPLLKTITSVLGSSIWFNAIVALTHAASAPPEGLNGAPMTYEVLMAQRSHIIQQSIRQAAGDMRLMNPVALVENHPSCRRNREGQKVLPNGQSWRHQMLLLCYSSKILSEANSLLKLQDPNPGKLFGFRFRSPPLPFLLSSLLQSRAHPKLSPDQGGNEGDSDIDLDDYSDIEQDEDEEEYDQLPPFKPLTKSQLARLTKEQKNAYFDEYDYRVKLLQKKQWKDEIRRLKEMKKRGKTDMDAYGYANIAGENDLDPPPENVSVPLPDMVLPPSFDCDNPTYRYRFLEPTSTVLARPVLDAHGWDHDCGYDGVSVEETLALLNKFPANMAVQVTKDKKEFSIHLDSSISAKLGEDASSLAGFDIQTVGRQLAYILRGETKFKNIKKNKTTGGFSVTFLGDIVATGLKVEDQLSLGKRLALVASTGAMRAQGDTAYGANLEARLKDKDYPIGQSLSTLGLSLMKWRRDLALGANLQSQFSIGRGSKMVVRLGLNNKLSGQITVRTSTSEQVQIALLGLIPVAASIYRSFRPSEPSFAY

SEQ ID NO: 26855 - protein, 203 aa, Brassica napus
SIRLIEGTINFIFDYLVGAFRLQILNTLHKWGRSNRDKVQQFGAITGAGGKNAFKTFKASDWQFEAAFDGFYSQPQPKSNADVRPLGELYNRYKDQYSDMILADGISVLCTDLQVEPQDIVTLGLSRDIKAVTQREIFTEENVGGVHTAGVDITIKMLEKMLFFLPQRKDEQKFHEIYNFAFGWAKEKGQKSLALDTAIGMWQ

SEQ ID NO: 26856 - protein, 161 aa, Erwinia carotovora subsp. atroseptica SCRI1043
MKYDTSELCDIYHEEVNVVEPLFSNFGGRTSFGGKITTVKCFEDNGLLFDLFEENGLGRVLLIDGGGSVRRALINAELARLATQNEWEGIVVYGAVRQVDDLAELDIGIQAMAAIPVGAGSEGIGESDIRVNFGGVTFFSGDHLYADNTGIILSEDPLDIE

SEQ ID NO: 26857 - protein, 504 aa, Physcomitrella patens
MSDPYGRRLLVDDFHVGPVLGTGGFSVVRAGVRKQDNLQVAIKTLKKFGYGRGDHGRPGAQMSQAEALVKNEIMVMMRIVDEVSPHPNVIHLIDVYEDDGAVHLVLELCRGGELFDRIVQHERYSERDAAKVVRQIASGLAALHQAQIVHRDLKPENCLYVNPLAEAPLKIMDFGLSYIHHNTNSIVGIFGSIDYMAPEQLSLSGIMPANDMWSLGVILYILLCGYPPFRARSSRDKQMQILTGSYSMEEESWRGISHEAKQLIRRLLSVDPFARPTARELLSHPWVSGDIANRDLLHKDVFMRLQHFNARRKFRATAYASIVRTKFLLRTRYLKELLGDRVLTDSELEALRVNFMRISSNGQTATLKEFEEVLRSINLHCFVPLAPRIFELFDYNHDGGIDLREVVCGFSLLRTSHLDDALQMCFKIYDRDDSGYISKGELARVLGALPEDYLPADISQVQMDDIFEHVDTDSDGRISYQEFRRALSLQDAVMNHFRMEGQVQ

SEQ ID NO: 26858 - protein, 121 aa, Mycobacterium sp. KMS
MTTIYEQIGGAEALEGVVEDFYGRVLADEQLSGFFTGTNMARLKGRQVEFFAAALGGPEPYTGAPMRQVHQGRGITMHHFNLVAGHLTDALHAAGVPEALVGQIIGAVAPLADEIATARTA

SEQ ID NO: 26859 - protein, 524 aa, Yersinia pseudotuberculosis IP 32953
MSIEINVPDIGADEVEVTEIMVKVGDTVEAEQSLITVEGDKASMEVPSPQAGVVKEIKIAVGDKVATGSLIMVFDATGAAAAPVKAEEKPAAPAQAAAPAASAAKNVEVPDIGDDEVEVTEVMVKVGDKVDAEQSLITVEGDKASMEVPAPFAGIVKEIKISTGDKVKTGSLIMVFEVEGAAPAAEAAPAQQAAPVAPAPAAAPAAKAESKGEFAENDAYVHATPVIRRLAREFGVNLAKVKGTGRKGRILREDIQAYVKDAVKRAEAAPAAAGGGLPGMLPWPKVDFSKFGEIEEVELGRIQKISGANLSRNWVMIPHVTQFDEADITEVEAFRKQQNIEAEKKKQDLKITPLVFLMKAAAKALEEFPRFNSSISEDGQKLTLKKYINIGVAVDTPNGLVVPVFRDVNKKGIVELSRELSVISKKARDGKLTASDMQGGCFTISSLGGIGGTAFTPIVNAPEVAILGVSKSSMKPVWNGKEFAPRLMLPLSLSFDHRVIDGAAGARFAAYIATIMADIRRLVM

SEQ ID NO: 26860 - protein, 486 aa, uncultured Chloroflexi bacterium
MPIHFGTDGWRAVISDTFTFHNLRLVSQAIADAVRSERWNTGVPLPENADPHTMVVGFDTRFLSDRYAADVARVLAANGFTVYLAQSDAPTPAISFSVRHLGAIGGVMITASHNAPRYNGVKLKAAYGCSALPEQCRHVEVYLNDNEQRGRGPNQMDFDQARQAGLIQRFNPLPAYYDHLRQLINFDAIAENPQRVVVDSMFGSGRGVIKGILQGTGCEVQEIRGELNPGFGGVHPEPIGRYLGALASAISAGMGDVGLATDGDGDRIGAMDGRGNFVDPHRIMALSLRYLVETRGWKGPVVRTVSTTRMVDRLADRYGLPMYETPVGFNHIADYMLKGDVLIGGEESGGISFRGHIPEGDGAIMGLLLLEIVATAGVSLYELVEDLLKQVGPAFYQRTDLRLNHPVEKKEMSRLLVDEAPASIGGEAVDGIATIDGVKYLIADGSWLLIRPSGTEPVLRVYAEGRTPDMVRALLDFGEQVAQRAA

SEQ ID NO: 26861 - protein, 428 aa, Burkholderia xenovorans LB400
MAAVAFAFVIYEKGVTVSRRRVVVTGLGLISPVGNNVADGWANLVAGKSGIANITKFDASNFSTRFAGEVKGFNIEDYIPGKEARHMDTFIHYGVAAGIQAMQDSGLEVTDENSERIGVVVGSGIGGLPMIEVTQTELLNRGPRRISPFFVPASIINMISGHLSIKFGIKGPNLAIVTACTTGLHCIGEASRLIEYGDADVMIAGGAESTVSPLGVGGFAAARALSQRNDDPATASRPWDKDRDGFVLGEGAGVMVLEEYEHAKARGAKIYAEVSGYGMSGDAYHMTAPLEDGDGARRCMLAALKNAGINLDQVNYLNAHGTSTPLGDLAETTGIKRAFGDHAKDMVVNSTKSMTGHLLGGAGGLESVFTVLAVHHQVSPPTINIFNQDPACDLDYCANTAREMKIDVALKNSFGFGGTNGTLVFKRA

SEQ ID NO: 26862 - protein, 391 aa, Xylella fastidiosa 9a5c
MTIEVKVPVLPESVSDATIASWHKKAGEIVKRDENIVDLETDKVVLEVPSPVDGVLKEIKFDTGSTVTSNQVLAIIEEGSIVAAPSPAPSPVIDQKPVAVSAPAAKSSVDSLPPGARFTATTEGIDPAQIEGSGRRGAVTKEDIINFAKQNGAARASGTRLEERVPMTRIRQRIAERLMQSKNSTAMLTTFNEINLAKVSNIRKELQEEFQKAHGIKLGFMSFFVKAAANALQRFPLVNASIDGTDIIYHGYSDISIAVSTDKGLVTPVLRNVERMSFADIEHHIADYAKKARDGKLSLEELQGGTFTVTNGGTFGSLLSTPIVNPPQSAILGMHTIKERPIAENGHIVIAPMMYVALSYDHRIIDGKDSVQFLVDIKNQLEAPGRMLFGL

SEQ ID NO: 26863 - protein, 313 aa, Arabidopsis thaliana
MAALQTLREWIGIQQFPPATQSKLLEILGKYKEEDVSSLTVLVMGKGGVGKSSTVNSVIGEKAAAVSTFQSEGLRPTLVSRTRSGFTLNIIDTPGLIEGGYVNDQAINIIKRFLLNMTIDVLLYVDRLDVYRVDDLDRQVVGAITDAFGKEIWKKSALVLTHAQFSPPDGLNYNHFVSKRSNALLKVIQTGAQLKKQDLQGFSIPVILVENSGRCHKNESDEKILPCGTSWIPNLFNKITEISFNGNKAIHVDKKLVEGPNPNERGKKLIPLMFAFQYLLVMKPLVRAIKSDVSRESKLAWELRDSGLASRRS

SEQ ID NO: 26864 - protein, 309 aa, Pseudomonas aeruginosa PAO1
MHPWTRRNIPQLAGRLALVTGANSGLGWQAARTLAGKGATVVMACRNREQAERARRAILDEYPQARLELADLDLADLASIRACAAGFRQRHARLDLLFNNAGVMFLPLRRTRDGFEMQMGTNHLGHFALTGLLLDSLLAAPRPRVVGMTSGFNQFGRLPLDDLNAERGYNRYLAYCHSKQANLLFSLELQRRAGQRGVLLQSLAAHPGYAATNLQYAAPAMSGSRLGRWAMKVANGAFAQSAEMGALPALSALTEQRWYGGAYVGPDRWLETRGYPAAARIPRNARDLGLAARLWALSEELTGVRFWSE

SEQ ID NO: 26865 - protein, 384 aa, Arabidopsis thaliana
MVSQKETVCVTGASGFIGSWLVMRLLERGYFVRATVRDPGNLKKVQHLLDLPNAKTQLTLWKADLSEEGSYDDAINGCDGVFHVATPMDFESKDPENEVIKPTVNGMLGIMKACVKAKTVRRFVFTSSAGTVNVEEHQKNVYDENDWSDLEFIMSKKMTGWMYFVSKSLAEKAAWDFAEEKGLDFISIIPTLVVGPFITTSMPPSLITALSPITRNEAHYSIIRQGQYVHLDDLCNAHIFLYEQAAAKGRYICSSHDATILTISKFLRPKYPEYNVPSTFEGVDENLKSIEFSSKKLTEMGFNFKYSLEEMFIESIETCRQKGFLPVSLSYQSISEIKVPTKNEIIEVKTGDGLTDGMKPCNKTETGVTGERTDAPMLAQQMCA

SEQ ID NO: 26866 - protein, 454 aa, Glycine max
MATIVLRNCSSTSRRLFPLTSQIHSSFTRSPLSPPVFTNDSTSSSSSSSSSSNPWWRSMATFTRTKPHVNVGTIGHVDHGKTTLTAAITRVLADEGKAKAVAFDEIDKAPEEKKRGITIATAHVEYETAKRHYAHVDCPGHADYVKNMITGAAQMDGGILVVSAPDGPMPQTKEHILLARQVGVPSLVCFLNKVDAVDDPELLELVEMELRELLSFYKFPGDEIPIIRGSALSALQGTNDEIGRQAILKLMDAVDEYIPDPVRQLDKPFLMPIEDVFSIQGRGTVATGRVEQGIIKVGDEVEVLGLMQGGPLKTTVTGVEMFKKILDQGQAGDNVGLLLRGLKREDIQRGQVIAKPGSVKTSKKFEAEIYVLTKDEGGRHTAFFSNYKPQFYLRTADVTGKVELPENVKMVMPGDNVTAVFELISAVPLEAGQRFALREGGRTVGAGVVSKVLS

SEQ ID NO: 26867 - protein, 352 aa, Idiomarina baltica OS145
MPIRIAINGFGRIGKNIVRALYERGLTDHIELVAINDLGSPDVLAHLLQFDTVHGRFAAQVEAGIDSLSIDNHTVSVYAERDPSQLPWQALNIDVVLECTGLFTERDKAKAHIDAGAKKVIISAPGKNVDATVVFGVNDEILTADMDIISNASCTTNCLAPVAKILHESLGIESGLMTTVHAYTNDQRLTDSYHSDLQRARAAAQNMIPSKTGAAAAVGLVIPELQGRFDGLAVRVPTPNVSLVDLNFIAARDTTVEEVNAIVKAATNQAPMSQVLAINELPLVSSDYNHNDHSSIFDARQTRVNGRLVKVMAWYDNEWGFSNRMLDNTIALMNAASKKVVTNSKQEVNTTH

SEQ ID NO: 26868 - protein, 303 aa, Cicer arietinum
GVALAGLLGTVRSQGRPLSDFVNQKIVVAGAGSAGLGVLKMAINAVAKISGCSETAAKSQFFLIDKNGLVTTERNNLDPAAAPFAQNPRDIDGLTEGASIVEVVKKVKPHVLLGLSGVGGIFNEEVLKAMRESVSTKPAIFAMSNPTMNAECTAIDAFNHAGEHIVFASGSPFENVDFGNGNVGHVNQANNMYLFPGIGLGTLLSGAHLITDGMLQAAAECLASYMSEEDILKGILYPSVDSIRDVTAEVGAAVLRAAVEEDLAEGQGDVGPRELAHMSKEETVEYVRRNMWFPVYSPLVHEK

SEQ ID NO: 26869 - protein, 332 aa, Wolbachia endosymbiont strain TRS of Brugia malayi
MVTLSVREALCTAIREEMQNNHDVFIMGEEVAEYDGAYKVTKGLLKEFGKNRVVDTPITEHGFAGLAVGAAFAGLRPIVEFMTFNFSMQAIDQIVNSAAKINYMSGGQLGCPIVFRGPNGAAARVAAQHSQCFASWYSHVPGLKVIAPYFASDCRGLLKAAIRDPDPVIFLENEIAYGHEHEVPDSELSDKDYLLEIGKAAVIREGKDVTITAFSLKLKDALNAADLLSGGGIEAEVIDLRTLRPLDTETIINSIRKTNRLVSIEEGWPFAGIGAELSAVVMEQGFDYLDAPVVRVTGKDIPLPYAANLEKKALPQVEDIVETVHQVCFRKK

SEQ ID NO: 26870 - protein, 411 aa, Shewanella sp. ANA-3
MYTMDSNKMKRVVITGMGVVSSIGNNKQEVTESLKAGRSGITHSAQFEEMQLRSHVWGNIKLDPSELIDRKALRFMGDAAAYAYIAMQEAIKDAQLTEEQYSNPRVGLIVGTGGASSSNQVQAADILREKGVKRVGPYIVPRIMSSTASACLATPFKIKGMNYSISSACATSAHCIGHAVELIQMGKQDMVFAGGSEEVDWTLTMGFDAMGALSTKYNDTPEKASRTYDADRDGFVISGGGGILIVEELEHALARGAKIYAEVIGYGASSDGYDMVAPSGEGAVRCMQMALADVDTPIDFINTHGTSTPVGDVRELEALREVFKDKCPPVASTKSMTGHALGAAGVHEAIYSLIMMENSFIAPSINIDNLDEAAKDMPIVREYRDAELNTVMSNSFGFGGTNATLVMRKYK

SEQ ID NO: 26871 - protein, 608 aa, Candida glabrata CBS 138
MRATVIRLSRAAKSIPPVKLAYKNMLKDPSIKYKPFSIAPKLTDRKWPDNTITKAPRWLSTDLRDGNQSLPDPMSIEQKKEYFHKLVEIGFKEIEVSFPSASQTDFDFTRYAVENAPDDVTIQCLVQSREHLIRRTVESLTGAKRATIHTYLATSDMFREIVFNMSKEDAIAKAVEATKLVRSLTKDDPSQQATRWSYEFSPECFSDTPVEFAVEICEAVKAAWEPTEDNPIIFNLPATVEVASPNIYADQIEYFCTHITEREKVCVSTHTHNDRGCGVAATELGIMAGADRVEGCVFGNGERTGNVDLVTVALNMYTQGVSPNLDFSDIRSVIEVVERCNKLPVPARAPYGGDLVVCAFSGSHQDAIKKGFSVQQKKRDQGDIQWRIPYLPLDPKDIGRDYEAVIRVNSQSGKGGAAWVVLRALGLDMPRTMQIEFSTSVQEHADSLGRELKAEEIVNLFKESYNYNNEIFQHISLVDYNVEKFGAERRILNGQVEINGEVVDIKGTGNGPISSLVDALSNLLNIKLGVSNYSEHSLGSGSSTQAASFINLTYRRDEDNEKAYQWGVGVSEDVGDASVKAIFATLNSVIQKGDISIPKSKKAASGSA

SEQ ID NO: 26872 - protein, 588 aa, Thiobacillus denitrificans ATCC 25259
MCGIAGELRFDDRAPDAATMTRMLARLARRGPDAEGQHAAGPLRLGHRRLAIIDLSPRSAQPMVDAATGTALVFNGTIYNYPELRAELIALGHAFHSDGDTEVILRAYLEWGERCVERLHGMFAFAIWHRDELFLARDRLGIKPLYYSENAGSLRFASTPQALLAAGEVDTGLDAVALHHLFTLHAVVPAPRTILNGVRKLAPGTTLTVNLRGELRHRSYWSLHAQRPAETRSEAEWTDAIHDALRRAVQKRIEIADVKVGVLLSGGLDSSLLVALLAELGVSDLMTFSVGFEDHPEERGNEFEYSDPVAAMYGTRHHKYLIPNSEVLRRLPEAVGEMSEPMFAQDAVAFYLLAEQVSRTVKVVQSGQGADEVFGGYFWYPRMAAEAEGSALDRFRRHYFDRDHAEFLELADPRYHGPDYTGELIAARLAEPFADEFIDQVLRTDTTMLITDDPVKRVDNMTMAWGLEARVPFLDHTLVELAATMPPAMKLASEGKHVLKRIARGRVPDAVIDRKKGYFPMPALKYVRGEFLDFMRDILDSQACRQRGLYRRAYVEHLLDAPEQHHTRIQGSKLWHLALLEYWLQTHV

SEQ ID NO: 26873 - protein, 137 aa, Zea mays
LLTAITRPAISLKEKSAAMKTTSSGIAVVLLVAMLAVHSAVADISCSDVLNDLSPCLPFLQGKAAKPSESNNQCCDGVRALYAAADTRPDRQATCRCLKAAYVQVHAVLSAAQELPGDCGLSLSYNITPDIDCDKIE

SEQ ID NO: 26874 - protein, 333 aa, Thermoplasma acidophilum
MRSMGSRCEGECRKLKSAKQYTGMDRKELLSRPVRDLSITADTRLGDLMDQFSSIGGFTAAKIHEAYEIIKDMFSEDNTTFLSFPADIISTGLRGLINEVVKRKLVDVIITTSGTLDHDIARTYRNYYCGSFSYSDIELRDLGINRLGNVLVPDESYGEIIEEKVMESLEKLYAKKKEWATVDLIHEVGLDINSESSIIYNAAKNNIPVFVPGITDGSFGSQLWSFYEQHHDFKINLLEDEHRLSDIIFDAKKTGAIMIGGGISKHHTIWWNQFRDGLDYAVYVTTAQEYDGSLSGAKLEEAISWKKVRPDARYVNVYGDATVIMPVLLAPFL

SEQ ID NO: 26875 - protein, 161 aa, Pinus monticola
MVSGTSSTEEVVQVEARRLWNATTKDSHNFLPKVLPEVFTSVTLLQGDGGVGTVKQLNFTPGKKDFSFIKERVDELDQENFVYKYTAIEGGPLGKQLSSACFEVKLVPRKEGGCVARWTCNYETLPGVQPDEGKLKEIKEDSFGMLKKVEQYLLSNPNLYC

SEQ ID NO: 26876 - protein, 609 aa, Corynebacterium efficiens YS-314
MLSVQPARQKGRRMSTSDLIVRRLRDWGVKRVYGYSGDGNNALLGAIRRAEDGPEFIAARHEEGAAFMAVGDARYSRGVGVVTSTQGPGAIHILNGLYDAKLDSVPVVALVAQQSRSVLGSDYQQEVDLHTLFADVATPFLETVTTPEQLPMVIDRAFRSALANSGPAVVILPHDIQQAPEPDLGQEHGEIISTAHWSTGRILPRDEDLDHAIRVLSEGRKVAILAGRGVQDAQTEVLALAERLGAGVTTALLGKPYIDETHRLAAGNMGHLGTHSANWVLQNCDTLLIIGSNSPWTEFYPAPGQARAVQIDVDPAQMGNRYPIEVGLVGQAAPTLQALLEKLPEDLLDGKRSEWEQQVEQAIHNSQEINRRRSQVPARPLNPDLVARAVNTRLWENTQLAIDVGSSVYHYVRHITVPRGANAHLCSTLASMGCGIPYGFAAKEVTPDRPVVVMAGDGAMTMLGINELITVADRWKQWEDPRFVIVVLANKDLSEVSWEQRETEGEPRFEASQRVPAFDFVAYAEQLGLRGIHLHDSDTIDQVLAEAFESDRPVVVEAHTDADIPLIPPYPHGRELVDSMREGIRAEGTSGEHALSLLDAYAAIEEEYS

SEQ ID NO: 26877 - protein, 426 aa, Gibberella zeae PH-1
MAPSLLLLPSPPHPSSPSTLSAAYSAPLTSVLQKLKSASSPQTLVVGLALPILTGPSANSKQIAWPIAQSLLASLYTLTSVVCAKEDIPVDVGAGKGSVDVRVVLIDHEKGRRYEPNFEGQFEANCTAVLDLAAFATKVRTWDMVYHPSCEEGYELLSTFLQLAEKKQTFMQNQLVAIEGGISLTTEEKLNTEDLQRGFNTVCLGGTFDHLHPGHKLLLHTSAILLNIPPKDSDKTCTLVVGISSDELLAKKKYAEELQPWTERTQAVLSFLSTLLEYDTTATSPPTQSTPDETIAMLRDGRVKVRCIVLRDPFGPPIHEEDADAIVVSGETRSGGKAINDRRTEKGWKPLEVFEIDVLDAEEVDGEGVSKTEDFASKISSTAIRQKRAEEKRLSERVSGKIAAYDVVTHFTVTCVRTLSRLSYEI

SEQ ID NO: 26878 - protein, 94 aa, Brassica napus
MVVATTIALYASPPSTVCSTPHQITASCDLDLNPRSSSSSSSTTIGGLSLLFKSSSPSSSSSASHPSLGDELPSIRHDRTEDHRTTLSSSFSYS

SEQ ID NO: 26879 - protein, 161 aa, Pinus monticola
MVSGTSSTEEVVQVEARRLWNATTRDSHNFLPKVLPEVFTSVTLLQGDGGVGTVKQLNFTPGKKDFSFIKERVDELDQENFVYKYTAIEGGPLGKQLSSACFEVKLVPRKEGGCVARWTCNYETLPGVQPDEGKLKEIKEDSFGMLKKVEQYLLSNPNLYC

SEQ ID NO: 26880 - protein, 418 aa, uncultured gamma proteobacterium eBACHOT4E07
MKKNAFYAQSGGVTSVINATAASVILESKKYKSKIGKVYAGKNGILGALKEELIDTSKESKSAINSLKSTPGGAFGSCRFKLKSFEENKKEYIRLVEVFKAHNIGYFFYNGGNDSADTAYKVSQISKKLGYPINCIAIPKTVDNDLAETDCCPGFGSAAKYIATSTMEASLDVASMSETSTKVFILEVMGRHAGWMAASSALARIDQKDAPHIILLPEIRFNQIKFLNKVKDVVKKNGYCVIVASEGVKNSKGKFLAESDRKDAFGHSQLGGVAPYLAGLISQKLNLKNHWAVSDYLQRSARHISSKTDLLHAEAVGVHAVRYAIKGLNGVMPIIVRSKSEKYSWKIIPAPLSKIANVEKKLPNSFISKDGFDVTAKAIKYLKPLIQGEAYPKFKNGIPHSQKLKLVEVKKKLPTWKD

SEQ ID NO: 26881 - protein, 364 aa, Idiomarina loihiensis L2TR
MKYQGSPGFSHGQADKIGVLVTNLGTPEAPTKKALKPYLKEFLSDPRVVEVPRLLWFLILNGVILRFRPKRSAEAYKTVWTDRGSPLLFHTQDQASAIEAKLKQTWGDNIVVDFAMRYGNPALSEVVEKMMQKGVRKLLVLPLYPQYSASTTASTFDALAKDFTKRRWLPELRFITHYHDFSPFIEAAAQRIEKHWDAHGRADKLLFSYHGIPLRYLKNGDPYHCECYKTSRLLAERLGLGKDEYLTTFQSRFGREEWLQPYTDMTMKALPGKGVKSVQVFCPGFSSDCLETVEEIGEENREYFMESGGERYEYISALNAESGHIDALSQLIENNLQGWSVEDVTEQRQQRADQVKKQSLPYDD

SEQ ID NO: 26882 - protein, 451 aa, Shewanella sp. ANA-3
MSLVVAKFGGTSVADYGAMNRCADIVLGNPDCRLVVVSASSGVTNLLVELTQESMNDDGRLQRLKQIAQIQYAILDKLGRPNDVAAALDKLLSRMAVLSEALASQRSKATMDELLSLGEQCSSALFAAVLREKGANSSAFDVRRVLRTDSHFGRAEPQVEQIAILSREHLLPLLSEQVIVTQGFIGSDEAGQTTTLGRGGSDYSAALLAEALKASAVEIWTDVAGIYTTDPRLAPNAHPIAEISFNEAAEMATFGAKVLHPATILPAVRQQIQVFVGSSKEPEKGGTWIRHQVEDAPVFRAVALRRDQTLLNLHSLQMLHAQGFLAETFATLARHKISVDLITTSEVNVSLTLDKTGSDSSGQGLLSEALLQELSQHCRVRVEDGLALVAIIGNRIATTAGICRRVFEVLEPHNVRMICQGASPHNLCVLVAESEAAQVVKALHENLFEGA

SEQ ID NO: 26883 - protein, 319 aa, Clostridium acetobutylicum
MKTIAVLTSGGDAPGMNAAIRAVVRTAIEKGINVKGIQRGYSGLINGEIFDMNRHSVSDIIQRGGTILRTARCPEFLKEEVRQKAANVLRVFGIDGLVVIGGNGSFMGAQKLSKLGVKTVGLPGTIDNDLPYTDYTIGFDTTLNTVLDAINKLRDTSTSHERVSIIEVMGRDCGDIALFSGIAGGAESVIIPEIGYDFNELCKNILEGKLRGKMHNLIILAEGVGGAAELAKKVEEVTGIETRSTILGHIQRGGSPSAFDRMLASRMGVKAVEVLMEGKTSRVIGIKEGKIMDQDIDEALAVPRSFNKELYDIANMLSK

SEQ ID NO: 26884 - protein, 391 aa, Prochlorococcus marinus subsp. pastoris str. CCMP1986
MEKVGVLLMNLGGPERITDVGPFLYNLFSDPEIIRLPVPAFQKPLAWLISTLRSTTSQQAYLSIGGGSPIRRITEQQARELQSKLRDKGLNVTTYIAMRYWHPFTESAIADMKADGVDQIVVLPLYPHFSISTSGSSFRELKKLRDSDSEFQKIPMRCVRSWFSQSGYLKSMVELISEQISLCESPDSAHIFFTAHGVPKSYVEEAGDPYKEQIEDCSLLIIDELEKYLGHTNPYTLSYQSRVGPVEWLKPYTEEVLTDLGKAKVNDLIVVPISFVGEHIETLQEIDIEYKEIAEKAGIVNFRRVKALNTHPTFIDGLSELVVSCLEGPIINIEKASELPEKVKLYPQEKWQWGWNNSSEVWNGRVAMIVFLILFIELISGSGPLHKLGIL

SEQ ID NO: 26885 - protein, 587 aa, Prochlorococcus marinus subsp. pastoris str. CCMP1986
MTLTSTSLSKDDSEKNYPIWITGAEALMDSLKVHDVKVIFGYPGGAILPIYDAVHKAENDGWLKHYMVRHEQGGSHAADGYARSTGEVGVCFGTSGPGATNLVTGIATAQMDSVPLVVVTGQVPRPAIGTDAFQETDIFGITLPIVKHSWVVRDPSDIAKVVSEAFFIASSGRPGPVLIDIPKDVGQEFFNYERILPGKIIPKGFKRNGEINDADINQAIELIQESSRPLLYVGGGAISSGAHEEVETLANNYQIPVTTTLMGKGVFDERDDLSVGMLGMHGTAYANFAVTECDLLIAVGARFDDRVTGKLDTFAPSAKVIHIDIDPAEVNKNRRVDVAIVSDVAKALSKINEKYFNNKTSCNTKNWLEKINFWKNKHPLFVPPEEGEIYPQEVLLKVRDFAPEAFITTDVGQHQMWAAQYLRNAPRRWISSAGLGTMGFGLPAAMGVKAALPNEEVICIAGDASVLMNIQELGTLSQYGLNIKLVIINNRWQGMVRQWQESFYEERYSSSDMSCGEPDFVKLAESFGVKGFLISERKQLLNEFKSALDFDGPALINVRVRRGENCYPMVPPGKSNAQMVGYVNSES

SEQ ID NO: 26886 - protein, 126 aa, Methanosarcina acetivorans C2A
MKWDRGYLLVVAMKYIIAMIRPEKLDAVKRELQKVEVNRLTVSSVSGYGAQKGQLEIYRAMEFEADLLEKIKIEIAVNDEFLYPTIEAIKSGAKGSEGHIGSGKIFVLPLEDVIRIRTDESGPVAI

SEQ ID NO: 26887 - protein, 307 aa, Solibacter usitatus Ellin6076
MRNVVIIGSGCAGNTAAIYTARANLKPLVIAGHEAGGQLSLTTLVENFPGFPEGINGPDLVENMRVQAQNFGAEFMHGSVIDTDFSQRPFRLNIEGDWMETRTVIIASGASARWLGLESEHKLIGHGVSSCATCDGFFYRGRKIMVVGGGDSAMEEANFLSRFGSEVTLVHRREEFRASKIMLDRAQHNPKIKFLLNTEVEEVHDVSKKLVTHVRLRNNKSGEVWDQEVDGFFLAIGHIPNTKVFKGQIETDPDGYILSKGGARTNIAGVFHAGDVQDRTYRQAITAAGAGCMAAIEVERFLEAEGH

SEQ ID NO: 26888 - protein, 387 aa, Debaryomyces hansenii
MVSDGEFTRTQIFGTVFEITNRYTDLNPVGMGAFGLVCSAIDKLTGQNVAVKKIMKPFLTSVLAKRTYRELKLLKHLRHENLITLDDIFLSPLEDIYFVTELQGTDLHRLLTSRPLEKQFIQYFTYQILRGLKYVHSAGVIHRDLKPSNILINENCDLKICDFGLARIQDPQMTGYVSTRYYRAPEIMLTWQKYDTEVDLWSVGCILSEMIEGKPLFPGKDHVHQFSIITELLGSPPPDVIETICSENTLRFVQSLPHRDPIPFSERFAQCTHVEPEAIDLLAKMLIFDPKKRISALDALSHPYMEPYHDPTDEPVCEVKFDWSFNDADLPVDTWRVMMYSEILDFHQIIGAGANGTTQEQMAQIQQEGIQAPSSQYQQTNQEQKVE

SEQ ID NO: 26889 - protein, 143 aa, Arabidopsis thaliana
  misc_feature (68)..(68): Xaa can be any naturally occurring amino acid
  misc_feature (81)..(81): Xaa can be any naturally occurring amino acid
  misc_feature (107)..(107): Xaa can be any naturally occurring amino acid
  misc_feature (114)..(115): Xaa can be any naturally occurring amino acid
  misc_feature (117)..(118): Xaa can be any naturally occurring amino acid
  misc_feature (121)..(121): Xaa can be any naturally occurring amino acid
  misc_feature (128)..(128): Xaa can be any naturally occurring amino acid
  misc_feature (130)..(130): Xaa can be any naturally occurring amino acid
  misc_feature (132)..(132): Xaa can be any naturally occurring amino acid
  misc_feature (135)..(135): Xaa can be any naturally occurring amino acid
  misc_feature (137)..(138): Xaa can be any naturally occurring amino acid
  misc_feature (140)..(141): Xaa can be any naturally occurring amino acid
MASSMLSSTAVVTSPAQATMVAPFTGLKSSASFPVTRKANNDITSITSNGGRVSCMKVWPPIGKKKFXTLSYLPDLSDVEXAKEVDYLLRNKWIPCVEFEFGARDFXYREHGNXXRXXIIXRYLANWXKXSXFGXTXXLXXFK

SEQ ID NO: 26890 - protein, 675 aa, Zea mays
MARLPLAACAVAAAFYLCLHLASSSSSAPRLAPAPSDGGRRAGRTAYHFQPAKNWQNGPMYYNGMYHLFYQYNPHGALWGVGNLSWGHSVSGDLVNWAALDTALDPTSPFDANGCWSGSATILPGGTPAILYTGIDANGEQVQNVAFPRDPADPLLRRWDKPGYNPVIPLPADVPGDKFRDPSTAWLGRDGLWRVAVSAEVRGVASTLVYRSADFLRWERAPAAAPLHASRAAGMVECPDLFPVKEEGDDGDGQGLDASASGAGLRHVLKLSVMDTLQDYYMVGRYDDAADAFVPAEPERGDDVRGWRRLDYGHVYASKTFFDARGSRRVLWAWANESDSQADDVAKYRCPNGPARPARVPQPRPKHGTPAWSINNITARRNLGYLSCGTGNPIDDCWRCDSDWHNNRKRLADCGIGFGRNAIGGRDGKIYVVTDPSDDDPVNPRKGTLRYAVIQEEPLWIIFKRDMVITLKEELIMNSFKTIDGRGANVHIANGACITIQYITNVIIHGLHIHDCKPTGNAMVRSSPSHYGWRTMADGDGVSIFGSSHVWVDHCSLSNCADGLIDAIMGSTAITVSNNYFTHHNEVMLLGHSDSYVKDKAMQVTIAFNHFGEGLIQRMPRCRHGYFHVVNNDYTHWEMYAIGGSAEPTINSQGNRYLAPTNPFAKEVTQRVTSC

SEQ ID NO: 26891 - protein, 303 aa, Mycobacterium tuberculosis H37Rv
MTKWTAADIPDQTGRTAVITGANTGLGFETAAALAAHGAHVVLAVRNLDKGKQAAARITEATPGAEVELQELDLTSLASVRAAAAQLKSDHQRIDLLINNAGVMYTPRQTTADGFEMQFGTNHLGHFALTGLLIDRLLPVAGSRVVTISSVGHRIRAAIHFDDLQWERRYRRVAAYGQAKLANLLFTYELQRRLAPGGTTIAVASHPGVSNTEVVRNMPRPLVAVAAILAPLMQDAELGALPTLRAATDPAVRGGQYFGPDGFGEIRGYPKVVASSAQSHDEQLQRRLWAVSEELTGVVYPVG

SEQ ID NO: 26892 - protein, 107 aa, Anabaena variabilis ATCC 29413
MSAAAQVTDSTFKQEVLDSDVPVLVDFWAPWCGPCRMVAPVVDEIAQQYEGKIKVVKVNTDENPQVASQYGIRSIPTLMIFKGGQKVDMVVGAVPKTTLSQTLEKHL

SEQ ID NO: 26893 - protein, 70 aa, Medicago truncatula
MAADWAPVVVSVVLFVLLSPGLLFQLPAKGRVVAFGSMQTSGLSILVHTIIFFGLVTIFLLAIGVHIYSG

SEQ ID NO: 26894 - protein, 428 aa, Oryza sativa (japonica cultivar-group)
MAPAHSHRRGATEANEQMRRKKEKALREKEAGDDDFDEGRYKRAVEHYARAAALDPGDISFPIKCAKSYFHMDQYEECVRRCDEAVERGRELRAKKSLVALALLLKGTALLNLADCASDCKAAIRALKQSLDEHYHKGTEAILDEAESAMEEMEELEKEAAKHHREKKELLSKKKYKEAAIQFTKAIKRNPLNPRNFSDRAKCRIELNALAEGLEDADKCIEVDPTFWKGYFCKGEVQFLMHNYEDAMTTYLDGLKYGPQKTTIYDGIKCLEQIKMAKDRDVRDKDLWEAFKKSSSSQVEKLTMQRDVVTVELKSAKERNANLELQLSEQIGRIERLLSIQNSEPPHFICPISQEVMNDPHFAADGHTYEAEHIRKWLNDGHDTSPMTNERLQHKKLTPNHALRSAIREWHQHRNMRHTSPRRQQLFL

SEQ ID NO: 26895 - protein, 685 aa, Oryza sativa
MAKSLLVSSLLAVVAAVVVGAGPNPQYCPPSSCGHLGNISYPFRLQGDSRDCVATPRPWYNLSCSSGRAAIQINTGTYYVSSINYTGEVFSVVDATLQDDDTNSSCPLPRSDHLPFPDWYRDYRPADSYGFFDLATASGTWACFVNCSRAITDIMPWYKPVTCLLPNNSFVFVSFVNCAVGELQPSCRYLAMIPFESRHISDNSSQLQNASYTDIIGFIRKGFSVRFPYRPDQYQSPRMSARECLKDSNRYFKERISHPSILNLTRAIFWSETNSEVDCGYEVAPQKDRIFLGTIVSAIDIIKFHFVLFRLVLGSLVVFIFLAHKYWKTRITIDAVEKFLRMQQMIGPTRFAYTDIIAITSHFRDKLGQGGYGSVYKGVLLPGNVHIAVKMLTGSSSCNGDEFISEVSTIGRIHHVNVVRLVGFCSEEMRRALVYEYMPRGSLDKYIFSSEKSFSWDKLNEIALGIARGINYLHQGCEMQILHFDIKPHNILLDDNFVPKVADFGLAKLYPRDKSFVPVSAARGTVGYIAPEMISRSFGVISSKSDVYSFGMLLLEMAGGRRNADPNAANSSQAYYPSRVYRELTRRETSEISDIADMHELEKKLCIVGLWCIQMRSCDRPTMSEVIEMLEGGTDELQVPPRPFFCDDEQLPGVESYNMPSDLTAISEEHEDDDDDSICLFESYQ

SEQ ID NO: 26896 - protein, 532 aa, Physcomitrella patens
MDRTLVLTCTTTCSHSAFRQSALPSNTSISVRLGTCSVRTQKRRTVVASLGNIETTSTSTVGQESNLPLREIPGSYGIPYLSQLLDRWTFFYREGEPQFWQSRMAKYGSTVIRSNMPPGWFWTDSRCIMLLDQKSYPTVFDYDKVDKYKAFAGTIMPSTEYNGGYEVCAYLDASDKKHEQLKGYCFELLKFSSSKWAREFHTAISETFNQWEGKLAQKTPALINPTLPESLFSFVINALTTARFDDSSIPDAEKPVCGDLQKWAGFQLMPVIRTGAPIYIEEMLHVAPIPASLTKGGYDKMVVFLQKYAAETLSIAEKFGLSQDEAVHNLIFFLILNAHGGFCRFLPVILREVAKNGQLQADLREEVRAAVKASGSDQVTMKAVMNDMPLVASTVFEALRFDPPVPFQYARAKKDFIIESHDARYQIKTGDFLGGVNYMVSRDPKVFTDRPNEFNARRFMGPEGDKLLAHLVWSNGRQTDETTVYTKQCAGKEIVPLTGRLLLAELFMRFDSFNIEGLEMEATFTSLTPRSD

SEQ ID NO: 26897 - protein, 217 aa, Medicago sativa subsp. x varia
GSWLVMRLMEPGYMVRATVRDPENLKKVSPLLELPGAKSKLSIWKADLGEEGSFDEAIKGCTGVFHVATPMDFESKDPENEMIKPTIKGVLDIMKACLKAKTVRRLIYTSSAGTLNVTEDQKPLWDESCWSDVEFCRRVKMTGWMYFVSKTLAEQEAWKFAKEHKMDVITIIPPLVVGPFLIPTMPPSLITALSPITGNEAHYSIIKQGQYVHLDDL

SEQ ID NO: 26898 - protein, 174 aa, Zea mays
MALETCFRAWALHAAPAGSKDRLLVCSSGGNLVLPSKRVAAAPLSVGRVATRRARHVCQSKNAVDEVLVADEKNWDGMVMACETPVLVEFWAPWCGPCRMIAPVIDELAKDYAGKIMCCKVNTDDSPNVASTYGIRSIPTVLIFKGGEKKESVIGAVPKSTLTTLIDKYIGSSS

SEQ ID NO: 26899 - protein, 211 aa, Triticum aestivum
  misc_feature (57)..(57): Xaa can be any naturally occurring amino acid
  misc_feature (65)..(65): Xaa can be any naturally occurring amino acid
  misc_feature (76)..(76): Xaa can be any naturally occurring amino acid
MTSVWKTKVLPGLNKIFDKDGKKAAAAEFLKSFNKEEIDKEIEDKKTELEPKVVESXEASPPRIXRALMKDKKPSXRSRKNSVAVTKFLERFGPRLISPEPQLVSDPVAKSGTTPLSPAIVFILDKVAPFVPAPNEEPKAEPEDAAPAEETTTREVAVEEKKEEAEPSAAPAEAAAPVEAAAPAAEVVEEKKEEEKPAEPAAPAAEEPEKK

SEQ ID NO: 26900 - protein, 112 aa, Photobacterium sp. SKA34
MKKIEAIIKPFKLDDVREALAEVGITGMTVSEVKGFGRQKGHTELYRGAEYMVDFLPKVKIEIVVTDEVAEQCIDTIVETAQTGKIGDGKIFMFDIERVVRIRTGEEDEDAI

SEQ ID NO: 26901 - protein, 272 aa, Thermoplasma acidophilum
MTEKCVIKIGGSVLKDGSSLPRVMDIISHFRSPILVVSAFGGITDALYRFYEYDESRMDKLRDLLLMHLGILWKYNIEAHPEISIQDSSILDQDAYVSYGEKMSAFTLARFLTGNGIPAAPIYTDEAGLIVEEISKERTVDLEGSRAFFENIARVETSGKVPVVTGFFGIDRYGKTRILGRNSSDYSAVAVAAILGIREVILIKDVPGIYMNLEDRTSIVNRIDYETALRIVDRGSKVVHRAALRLAMKMGMNLLITSPENLESGTVIGDLF

SEQ ID NO: 26902 - protein, 161 aa, Pinus monticola
MVSGTSSTEEVVQVEARRLWNATTKDGHDFLPKVLPEVFTSVTLLQGDGGVGTVKQLNFTPGKKDFSFIKERVDELDEENFVYKYTAIEGGPLGKKLSSACLEVKLVPRKEGGCVARWTCNYETLPGVQPDEGKFKEIKEDSFGMLKKVEQYLLSNPNLYC

SEQ ID NO: 26903 - protein, 133 aa, Glycine max
MAVPLLSKKIVKKRLKKFKRPQSDRKISVKTNWRRPKGIDSRVRRKFKGCTLMPNIGYASDKKTRHYLPNGFKKFVVHNVKDLELLMMHNRTYCAEIAHNISTRKRKDIVERAAQLDVVVTNKTARLRSQEDE

SEQ ID NO: 26904 - protein, 615 aa, Geobacillus kaustophilus HTA426
MCGITGWVHFGRNLRRERTVIDSMTETLAKRGPDDTNTWLDTHVAFGHKRLVVVDPAGGKQPMVRQKNGHRYTIVYNGELYNTEDIRKELLRQGYRFDGHSDTEVLLAAYMEWKEKCVDWLNGIFAFAVWDGERELLFMARDRLGVKPLFYREDGGGLLFGSEVKAILAHPDVKAEVNYEGLAEVFGLGPSRTPGHGVFDGIRELRPAHALTFSRSGLRIWRYWNVESDVHRDSFEETVEKLRFLLTDAVTRQLVSDVPVCTFLSGGVDSSAITGIAANAFAADGKGPLHTYSIDYEGNDQYFKANDFQPNTDAPFIEQVSNKFQTVHHRCVITQEELFRHLHEAVIVRDVPGMADVDSSLLWFCKQIRERFVVSLSGECADEIFGGYPWFHRPDDLSRKGFPWMRSVDARMGLLKDEWRQKLRLDDYVQMRYEQTLAEVPRLEGESAEEAKRRELFYLNMIWFMTTLLDRKDRMSMGASLEVRVPFADHRIVEYVWNIPWDMKMYGGREKGLLRKALEGLLPEEVLYRKKSPYPKTHHPLYTKLVKQWLEQLLHDRSSVLHEFFDREKLLALIETEGKSFQVPWFGQLMTGPQLLAYLGQVHVWFDHYGIRIKE

SEQ ID NO: 26905 - protein, 585 aa, Xanthomonas campestris pv. campestris str. ATCC 33913
MAEIKEALVPDIGDYSDVPVIEVLVSVGDTVSKDQSLVTLESDKATMEVPSSVAGVVKEIKVKVGDSLSQGALVALIEVADADAGAETAAAPAPAAAPAKAAPAAAPAPAAKAAPAAASDGGQVEARVPDIGDYSGVPVIEVLVAVGDTVAKDQSLVTLESDKATMEVPSSVAGVIKELKVKVGDSLSQGDLVAIIAASDGGAGAAQSPAKPTTDTAETAGKVEPVAVPAEPDKLAQREIAQVQSARSTAASQPAQAAPGTPSSPPVTFDADSVLPSKVPYASPVVRVFARELGVDLNQIKGSEKGGRITREDVQRFVKAALSGGAPAAAGAAPAGGGNGLNLLAWPKVDFSKFGETETQPLSRIKKISGANLARNWAMIPHVTQFESADITDLEALRVALNKENEKAGIKLTMLAFLIKASAAALKKFPEFNASLDAAGENLTLKKYINIGFAADTPNGLVVPVIRDVDKKGVLQIAQESGELAKKARDGKLGPADMSGGCFSISSLGGIGGTAFTPIINAPEVAILGVSKSAMQPVWNGKDFAPKLMLPLSLSYDHRVIDGALAARFTTYLSQVLADMRRVLL

SEQ ID NO: 26906 - protein, 662 aa, Vibrio cholerae O1 biovar eltor str. N16961
MFYDVAQITPSYSKLQQFWLDSSIPIIAFVYAHEDALCGRLAANPRNVGMTTTKGSTMSSGLLSQINVFPVKSLGGLALSSAWVEKQGLTFDRRFMLALSDGSMVTARKFPQMVLIKTALRHDGVLFSAQGHPSLTIRYADFKFQPVPAQVWSDNFTAYTTTDEADDWFSQVLGIRVELLYSGEQSNRVREKVGHNVSFADGYPLLVISQASLDELNRRSPEFHSMDQFRTNLVVSGTEPFAEDSWKRIRIGEVEFEAVKPCERCILTTVEVKKGAFRPTKEPLRTLSQFRANERGGVFFGQNLVAKNEGMIRAGDPIEVLEYKEKEVYPDQGISHFTLTCVEREEIARDFVTFWLEPTQEIATQYFPGQYLPIEMVIEGEPVQRYYTLSSSPSRPGRLAISVKRIDGGRVSNWLQENLQIGTTLTAQHPTGHFHLDTTALQPLLLLSAGSGVTPMLSMLRYLADHNQLDDVVFYHQCRSEQDIPCQAELDALAKQHAGLTLIYALTQPSPQWQGEQGRLSLSHIKRIPNLVSRQVFVCGPDGFMQKAKNLLLKQGVAESAYHQEAFGTLQVAPREKKAVTLSFNGIQVSADNQKTLLEHAEDAGVRIPNSCRAGICGACKVKVKSGLVEQPKVPALMDHERSMGMALACCSVANTDLDVEF

SEQ ID NO: 26907 - protein, 529 aa, Arabidopsis thaliana
MAASPKIGIGIASVSSPHRVSAASSALSPPPHLFFLTTTTTTRHGGSYLLRQPTRTRSSDSLRLRVSATANSPSSSSSGGEIIENVVIIGSGPAGYTAAIYAARANLKPVVFEGYQMGGVPGGQLMTTTEVENFPGFPDGITGPDLMEKMRKQAERWGAELYPEDVESLSVTTAPFTVQTSERKVKCHSIIYATGATARRLRLPREEEFWSRGISACAICDGASPLFKGQVLAVVGGGDTATEEALYLTKYARHVHLLVRRDQLRASKAMQDRVINNPNITVHYNTETVDVLSNTKGQMSGILLRRLDTGEETELEAKGLFYGIGHSPNSQLLEGQVELDSSGYVLVREGTSNTSVEGVFAAGDVQDHEWRQAVTAAGSGCIAALSAERYLTSNNLLVKFHQPQTEEAKKEFTQRDVQEKFDITLTKHKGQYALRKLYHESPRVILVLYTSPTCGPCRTLKPILNKVVDEYNHDVHFVEIDIEEDQEIAEAAGIMGTPCVQFFKNKEMLRTISGVKMKKEYREFIEANK

SEQ ID NO: 26908 - protein, 518 aa, Oryza sativa (japonica cultivar-group)
MDGSCDCIEPLWQADDLLVKYQYISDFFIALAYFSIPLELIYFVKKSAFFPYRWVLIQFGAFIVLCGATHLINLWTFAIYTKTIAVVLTVAKAATAVVSCITALMLVHIIPDLLNVKLRERFLKDKADELDREMGIIRTQEETGRHVHMLTHEIRSTLDRHTILRTTLVELGRTLVLAECALWMPTRSGSALQLSHTIYNSAAIGSVVPINLPIVSKVFNSNRVVKIPHTSPLASITADKSRYVPPEVVAIRVPLLHLTNFQINDWPELSAKSFAVMVLMLPPDSAREWRPHERELVEVVADQVAVALSHAAILEESMRARDLLMEQNIALDAARREAEMAICARNDFLAVMNHEMRTPMRAIVSLSSLLLETNLSAEQRLMVETILKSSDLLATLTNDVLDVSKLENGSLELEIAPFNLHSTFTDVVNLIKPVAACKRLSVMVTLAPELPLHAIGDQKRLMQIILNVAGNSIKFTKEGHVSITASMARPDALRGPHEPDYHPVVSDGFFYLAVQVCS

SEQ ID NO: 26909 - protein, 226 aa, Candidatus Protochlamydia amoebophila UWE25
MVKLILMRHGQSQWNLANLFTGWVDIPLSFKGIEEAIEAGKQIKNYPIDLIFTSSLIRAQMTAMLAMSVHTSGKVPVILHTGEGRLEEWASIYSSESQSQTIPVIRAWELNERMYGELQGINKEEMAKKYGAEQVHIWRRSFDVPPPNGESLQMTAARTIPYFENTIVPHLKEKKNIFIAAHGNSLRSIIMKLDGLTTDQVVKLELATGVPVIYDFNHDEYIKQQK

SEQ ID NO: 26910 - protein, 81 aa, Brassica napus
AGWLGGLGYCENLKTLKLVSCKKIDCGFGLGECLSRSCPALERLHLEKCQLREKDAVKALFKMCEAAREVVFQDCWGLDDD

SEQ ID NO: 26911 - protein, 559 aa, Raoultella terrigena
MDKPRHERQWAHGADLIVSQLEAQGVRQVFGIPGAKIDKVFDSLLDSSIRIIPVRHEANAAFMAAAVGRITGKAGVALVTSGPGCSNLITGMATANSEGDPVVALGGAVKRADKAKLVHQSMDTVAMFSPVTKYAVEVTASDALAEVVSNAFRAAEQGRPGSAFVSLPQDIVDGPASGSTLPASRAPQMGAAPDGAVDSVAQAIAAAKNPIFLLGLMASQPENSRALHRHAGKKPYSGHQHLSGAGAVNQDNFARFAGRVGLFNNQAGDRLLRQADLIICIGYSPVEYEPAMWNSGTATLVHIDVLPAYEERNYVPDIELVGDIAATLEKLAQRIEHRLVLTPQAADILADRQRQRELLDRRGAQLNQFALHPLRIVRAMQDIVNSDVTLTVDMGSFHIWIARYLYSFRARQVMISNGQQTMGVALPWAIGAWLVNPQRKVVSVSGDGGFLQSSMELETAVRLHANILHIIWVDNGYNMVAIQEQKKYQRLSGVEFGPVDFKVYAEAFGACGFAVESAEALEPTLRAAMDVDGPAVVAIPVDYRDNPLLMGQLHLSQIL

SEQ ID NO: 26912 - protein, 118 aa, Glycine max
MRDFTAKTMLLFVITLLVVIAYHEGEAISCSQVNMFLAPCLSYLRGGGNPSQPCCAGLNSLKAAAPGKAERQTACQCLKSVSNTIPGINDDNAKQLPSKCGVDLGVPFSKSVDCNSIN

SEQ ID NO: 26913 - protein, 428 aa, Rickettsia conorii str. Malish 7
MSNQRVNKRVVITGLGLVTPVGLNVSSSWKNIVDGVSGIKTITEFDTSKLACKIAGLIDNSEKDGFKLENFIQADDINRLSKMDKFIHYGVAAATEAVEDSGWLPDDEKSRDRTGLILGSGIGGLKMIEDTSIKLYQENNGKVSPFFIPASLINLLSGLVSIKYGFSGPNQTAVTACSTGAHAIGDAMRMIKHGYADVMIAGGAEAPVTPVGVAGFVAARALCTKYNDNPKKASRPWDKDRSGFVMGEGAGVVVLEEYEHALNRGAKVYGEVIGYGSTGDAYHMTAPHPEGRGAYRAMRDAMLDATITPDMIDYINAHGTSTTLGDGIELAAVQKLFLEANPKVLMSSTKSSIGHLLGAAGSVEFIFSALAIRDQIAPPTLNLDTPMDEVNIDLVALKAKKTKIDYVLSNSFGFGGTNASLVIKSILV

SEQ ID NO: 26914 - protein, 324 aa, Gluconobacter oxydans 621H
MPEIHHTDLLVVGAGPAGYTAAIYAARASLKPILVTGMQPGGQLTITTDVENYPGFATPVQGPWLMEQMRAQAEHVGTQLVYDLIVQADLKNGPGPDGYFRLVGDSGDEFRARTVVIATGAQAKWLGLESEKRLQRGGVSACATCDGFFYRGKTVAVIGGGNTAVEEALYLTHHADKVHLIHRRDSLRAERILQERLFSNPKVEVHWNQVVEEILGTGEPEVVCGVALKDTQTGALSRLDVDGVFVAIGHTPNAGPFRHEVACDSDGYILTESDGTGTSVKGVFAAGDIQDRIFRQAVTAAGTGCMAALEAERYLSGIPAMTKT

SEQ ID NO: 26915 - protein, 94 aa, Brassica napus
  misc_feature (92)..(92): Xaa can be any naturally occurring amino acid
MGFSEAQEELVLRSWKAMKSDSESTALKFFLRIFEIAPGAKQMFSFLRDAGDAPLEKHPKLKAHAVTVFVMACESATQLRSTGDVKVREATXKR

SEQ ID NO: 26916 - protein, 119 aa, Arabidopsis thaliana
MAFTPKIITCLIVLTIYMTSPTESTIQCGTVTSTLAQCVTYLTNSGPLPSQCCVGVKSLYQLAQTTPDRKQVCECLKLAGKEIKGLNTDLVAALPTTCGVSIPYPISFSTNCDSISTAV

SEQ ID NO: 26917 - protein, 355 aa, Cochliobolus heterostrophus
MAEFVRAQIFGTTFEITSRYTDLQPVGMGAFGLVCSAKDQLTNQAVAVKKIMKPFSTPVLSKRTYRELKLLKHLRHENIISLSDIFISPLEDIYFVTELLGTDLHRLLTSRPLEKQFIQYFLYQILRGLKYVHSAGVVHRDLKPSNILVNENCDLKICDFGLARIQDPQMTGYVSTRYYRAPEIMLTWQKYDVEVDIWSAGCIFAEMLEGKPLFPGKDHVNQFSIITELLGTPPDDVIQTICSENTLRFVQSLPKRERQPLANKFKNAEPDAVDLLENMLVFDPRKRVRAEQALAHPYLAPYHDPTDEPVADEKFDWSFNDADLPVDTWKIMMYSEILDYHNVDAAVPEQENNGS

SEQ ID NO: 26918 - protein, 350 aa, Aspergillus oryzae
MRIGVLKGNGIGPEITAATIRVIEATGIQPEWDFIPIADEAVRLYGHALPPQVIQRIKDVKFCIKAPLLAEKLHGRISCTQTDGSVVTYPSINNAIRRELNLFVNPRPIRGYVGISGRHEKMDMVIMREITEDTYIGWEKPLEDGAAAEAIKRVTRSASWKVSQYAFEYARKHGRKKVSCLHKANVLHETDGLFLRTFQEVARLYPDIVGDDMMIDAACYSVVRDPCWFDVVVTVNQYGDIFSDLAAGLAGSLGLAPGANIGDSASTFEAAHGAAPDIAGTGAANPIALILSGAELLAHAGYGKGSEAIREAVTRVIEAGRTLTPDLGGRSTTEQVADAISVEVRAILGH

SEQ ID NO: 26919 - protein, 460 aa, Ralstonia metallidurans CH34
MSDMQEHKVTPYDQFNYEVPENVFPREGISANAAAAIVISDEWTDTNPMLNMSSFVTTFAEPEAREVAARNIFKNYIDHDMYPRLFAMEGRMVRWLHELWNGPKGVEPYGTCTVGSSEACMLGGLAHKWNWRQRRQAEGKDATRPNMVTGGNVQIVWKKFLRYFDVEPRIVPLKPGNYCLTAEDLDKYVDENTICVVAIAGQTFTGEDDDIQGIHDWLDAYEKRTGISIPMHIDGASGGFVNPFLYPDYKWDFRLPRVQSINASGHKYGLTPPGLGWVVFRERKIFNEELVFYVNYLGGEMPTATLNFSRNAFQVAVQYYQFLRLGFDGYKRVMQHTLDNAIFLRQQLVDSGYFDIMNTTQRIPVVAVTLNKKYKNFNEFDVSNKVREKGWVLSAYTMPPNAESVTSLRVVVRPHVNHNVAQLLANDIINACKFLEANGGNAKPPALHKHAEAQSTSLKC

SEQ ID NO: 26920 - protein, 170 aa, Arabidopsis thaliana
  misc_feature (102)..(102): Xaa can be any naturally occurring amino acid
  misc_feature (106)..(106): Xaa can be any naturally occurring amino acid
  misc_feature (113)..(113): Xaa can be any naturally occurring amino acid
  misc_feature (116)..(116): Xaa can be any naturally occurring amino acid
  misc_feature (119)..(120): Xaa can be any naturally occurring amino acid
  misc_feature (128)..(128): Xaa can be any naturally occurring amino acid
  misc_feature (134)..(134): Xaa can be any naturally occurring amino acid
  misc_feature (140)..(140): Xaa can be any naturally occurring amino acid
  misc_feature (146)..(147): Xaa can be any naturally occurring amino acid
  misc_feature (151)..(151): Xaa can be any naturally occurring amino acid
  misc_feature (154)..(155): Xaa can be any naturally occurring amino acid
  misc_feature (158)..(158): Xaa can be any naturally occurring amino acid
  misc_feature (160)..(161): Xaa can be any naturally occurring amino acid
  misc_feature (163)..(163): Xaa can be any naturally occurring amino acid
  misc_feature (166)..(166): Xaa can be any naturally occurring amino acid
MASSMLSSTAVVTSPAQATMVAPFTGLKSSASFPVTRKANNDITSITSNGGRVSCMKVWPPIGKKKFETLSYLPDLSDVELAKEVDYLLRNKWIPCVEFELXHGFXYREHGNXSRXTMXXRYWTILGXSIFSGXTDSVKXLRKFKXXKRGXPGXXIRXIXXEXTRXGHDF

SEQ ID NO: 26921 - protein, 259 aa, Azoarcus evansii
MSSAQFQFITYGVADGLATLTINRPPFNVLDIPTMEEMNVALDRCLADNSVKLLMITGAGEKAFSAGVEVADHTPDKVDRMIEVFHGIFRRMQQLQIPTLAAVNGVALGGGMEVAIACDMLVAASNAKFGQPEIKLAVFPPIAAVLLPRLVPPARALELLLGGENIGADEAKAIGLVNRVFAKETFAADVQTFVAPFMGLSRAALASTRKTIRAVADKPFGAALDTAENIYLKELMNTDDAKEGLAAFLEKRKPVWRNS

SEQ ID NO: 26922 - protein, 635 aa, Rickettsia prowazekii
MSNSNIDNDPAKIDSLLKKAKSKKIPVTYDDINKALPLNKNPSIRQLEEAILKFSDAGVDILESNEDDEIKLDIGMDEEFKLSTNVDNESEDEVEEENIGSTDDPVRLYLKDMGGVDLLTRENEVEIAKRIEEGRKTMTASLCRSPIAMRCFIVWYEDLVNEKMLLRDLIDLEANMLHDEVHENDEEHNSETEVEEHEDNHLSMSRVETQILHNIIDRMKKISFICEELLIEAKKCYEESFEPKVLQNSKKYNNNLELLINEVSEIHFNSKRTEEILGKMYGINRDLINKETAFLKLAEKYGVTRQNFLDEYIGSVINAAWKEKMLKNKKVAWKELITKESDYIDQMINELSVIESNTGLLVNDFKKLVNTIQKSERQTLQAKKDMIEANLRLVISIAKKYANRGLQFLDLIQEGNIGLMKAVDKFEYRRGYKFSTYATWWIRQAITRAIADQARTIRIPVHMIETINKILRTSRQMLNELGYEPTATEIANRLSMPLDKVRKVMKIAKEPISLENPVGDDSDGGQLGDFIEDKNAVAPIDAAIQSNLREVTTRVLATLTPREERVLRMRFGIGMNTDHTLEEVGQQFKVTRERIRQIESKALRKLQHPIRSKKLNSFRNGGKRGDGNPSDLLEA

SEQ ID NO: 26923 - protein, 410 aa, Ralstonia metallidurans CH34
MSRRRVVVTGLGLVSPVGNTVAEGWANLVAGKSGIATITKFDHSPFAVHFAGEVKGFNAEDYIPAKEARNMDTFIHFGIAAGSQALKDSGLEVTEANAERIGVLVGSGIGGLPMIEDTQMTLAERGPRRISPFFVPGSIINMISGHLSIIHGLKGPNLAAVTACTTGLHSIGLAARLIQAGDCDAMLAGGAESTVSPLGIGGFAAARALSTRNDDPAAASRPWDKDRDGFVLGEGAGVMMLEEYESAKARGARIYAELIGFGMSGDAFHMTAPNTDGPRRCMVAAIKDAGINPDEVQYLNAHGTSTPLGDKNETDAVKLAFGDHAYKMVVNSTKSMTGHLLGGAGGLESVFTVLAIHNQISPPTINIFNQDPECDLDYVANTARDMKIDVAVKNNFGFGGTNGTLVFRRV

SEQ ID NO: 26924 - protein, 348 aa, Prosthecochloris aestuarii DSM 271
MSNNGVNALPATGDLCDLTIVGGGPTGIFAAFQCGMNNMSCRIIESMPQLGGQLTALYPEKHIYDVAAFNEVQASGLVDSLWTQAGRYNPEVVLNDQAVSFKKLDDGSFVVMSAAGASFRSRALLIAAGLGAFTPRTLPQLGDVSHLEGSSLFYSVTSRNDFEGKRVVIVGGGDSALDWTMGLLPLAERVTVVHRMASFQGHGKTAHEVLDAREDGKIEVHFNTEVASLETSGSCLRRVCTRSKSGHEEVIDADCLLLLIGFKSNLGPIAQWGLELQDNAIVVDNQMKTSVDGLYAAGDIASYPGKLKIIQTGLSDATMAVRHSLSYIKPGEKIRHQFSSVKMAKEKK

SEQ ID NO: 26925 - protein, 346 aa, Verticillium dahliae
MFSLRGLQRLRLTQAHLNKPTIHTAQPFRRLATMAGTTNPKNYKFNHSMIRVKDPKASIKFYELLGMTVIKTIRQPEAKFDLYFLAYDSPKAVSAGASVFDREGLIELTHNYGTEDDASYTVNNGNTEPHRGFGHLCIAVDNIQAACDRIEKAGYEFQKKLSEGRMRHIAFAKDADGYWVELITWNDVAATEGVAETDVSTYRMNHTMLRVKDADKSLAFYRDVLGMDLLRKNESSSFTLFFLGYNKDGDGTATREGVLELTWNHGTEKEADFKYHNGNDQPQGFGHICVTVDDIDAACERFESLNCNWKKRLTDGRMKNVAFLLDPDNYWVEVVQNEKFTGKDNF

SEQ ID NO: 26926 - protein, 367 aa, Photobacterium sp. SKA34
MALSSAKEIIDDIRQGKMVILMDDEDRENEGDLIIASEKITPEAINFMATYGRGLICLTLSKARCQKLNLPLMVQENTEQFGTPFTVSIEAAEGVTTGISAADRSRTVQAAVAANATAADIVMPGHIFPLMAQEGGVLTRAGHTEAGCDVARLAGLEPSSVIVEILNEDGTMARRPQLEVFAEKHGLKLGTIADLIEYRNNNETTIERVAECRLPTEFGEFDMITYRDKIDNEVHYALRKGDIKAGEETLVRVHLQDTFKDILQSGATQWTLPAAMKRISEENGVLVILSKQEPTDAMIHKVKNIAAEEAGQPKVKVTQKDPSRQVGVGSQILSDLGVSKMRLLSSSTQRYHSLSGFGLEVVEYICD

SEQ ID NO: 26927 - protein, 793 aa, Arabidopsis thaliana
MAARNLEKMASIDAQLRLLAPGKVSEDDKLIEYDALLLDRFLDILQDLHGEDVREFVQECYEVAADYDGNRNTEKLEELGNMLTSLDPGDSIVVTKSFSNMLSLANLAEEVQIAYRRRIKKLKKGDFADEASATTESDIEETLKRLLQLNKTPEEVFDALKNQTVDLVLTAHPTQSVRRSLLQKFGRIRDCLTQLYAKDITPDDKQELDEALQREIQAAFRTDEIRRTPPTPQDEMRAGMSYFHETIWKGVPKFLRRVDTALKNIGINERVPYNAPLIQFSSWMGGDRDGNPRVTPEVTRDVCLLARMMAANLYFSQIEDLMFEMSMWRCNEELRVRAERQRCAKRDAKHYIEFWKQIPANEPYRAILGDVRDKLYNTRERARQLLSSGVSDVPEDAVFTSVDQFLEPLELCYRSLCDCGDRPIADGSLLDFLRQVSTFGLALVKLDIRQESERHSDVLDAITTHLGIGSYKEWSEDKRQEWLLSELSGKRPLFGPDLPKTEEVADVLDTFKVISELPSDSFGAYIISMATAPSDVLAVELLQRECGITDPLRVVPLFEKLADLESAPAAVARLFSIEWYRNRINGKQEVMIGYSDSGKDAGRLSAAWQLYKTQEELVKVAKEYGVKLTMFHGRGGTVGRGGGPTHLAILSQPPDTIHGQLRVTVQGEVIEQSFGEEHLCFRTLQRFTAATLEHGMHPPVSPKPEWRVLMDEMAIIATEEYRSVVFKEPRFVEYFRLATPELEYGRMNIGSRPSKRKPSGGIESLRAIPWIFAWTQTRFTYPCGLALEEHSNA

SEQ ID NO: 26928 - protein, 339 aa, Wolbachia endosymbiont strain TRS of Brugia malayi
METDIVVIGAGPVGIFTAFQAGMLDMRCHIIDVLDQAGGQCTALYPEKPIYDIPGYPVITAQKLIEQLMEQASPFEPVYHLSQRVEEIANNDSQSFIVVTSAGTKVKCKAIIIAAGNGIFEPNRPPLSGILEYENKSVFYNVNKISDFQDKIIVIAGGGDSAADWTVELSKVAKKIYVIHRRKEFRCVSETRNKLKLLESSGRIELVVPYQLHKLTGNDGQLSAVIIKNITSKEEKKISADFLLPFFGLSMDLGPIGSWDIQLERSRVVVDQATLRTSRDRIYAIGDVAAYLGKLKLILNGFAESTMACYDIYKVIHNSPVNFQYSTSKVVRGKKSDLL

SEQ ID NO: 26929 - protein, 108 aa, Idiomarina loihiensis L2TR
MSDVIVQLSDDSFDADVINSDKPVLVDFWAEWCGPCKMVAPILDDIASEYADKLVIGKLNVDHNEQTPPKYNIRGIPTLLLFKGGEVVGTKVGALSRAQLTEFLDQHI

SEQ ID NO: 26930 - protein, 568 aa, Frankia sp. EAN1pec
MWAAVSSTTPSSSSATTAAITGSTWSASGSSARTGRGSSTPSRRSSTPRAPSPGCAATSWTACHRRPARPGCRGSGSGTRWRSSSRRTARRSCGPGTPPTTMSCSASSSGRCPRCRAGCRGSPETCASSGRTSAAPACPRRRPTRTTRWPTRGTTWPAGPSSRRCVPSSPRRRPGTPPTDGTISRRNVVDWPRRVYGEGLVGVSGELGCRRQMCRRSGATRAERPWGVKIGVLTGGGDCPGLNAVIRAVVRKGVGVYGHSFVGFRDGWRGPLENDTVPLDVTAVRGILPRGGTILGSSRTNPFASADGPSRIRETLDRTGVDAIVAVGGEDTLGAAARLHAEGIPVVGVPKTIDNDLSATDYTFGFDTAVNIAMEAIDRLHTTAESHHRVLVVEVMGRHAGWIALHSGMAAGANVILIPERPFDIDKVCAFVEQRFATRYAPIIVVAEGARPIAGTAMAREGELDAFGHVRLQGISGLLETEIRGRTGRETRATVLGHVQRGGTPTAFDRWLATRFGLHAVDAVHEGDFGTMVALHGTRIDRVPLSEATGELKTVPEHLYGEAEVFFG

SEQ ID NO: 26931 - protein, 216 aa, Oryza sativa
MESRKPPPSALVDNHVVPGDVVLDLAEMTNQTIKLGAGLRQDCDTIQATSAGRLRLSKPSKYWVESSQKRYIPSVEDTVLGVVVDTKPDNFLVDIKGPNLAFLPVLAFEGGTRRNIPKFEIGTLIYARVVKANSIMNPELSCMDATGKAAEFGQLKDGYMFDTSTGLSRIIFEWHRATKYGGKSLGETILMGAVEECTHKQLPSLSDLCVTLGEFS

SEQ ID NO: 26932 - protein, 144 aa, Glycine max
  misc_feature (8)..(8): Xaa can be any naturally occurring amino acid
  misc_feature (32)..(32): Xaa can be any naturally occurring amino acid
  misc_feature (47)..(47): Xaa can be any naturally occurring amino acid
RACSSAMXLISTRTSSVITLAKVRMQSDEIVXNVDPAIERIVNLLPXKWGNVRSLHLHPLESVAIPVNQPDPNEEFKIDLFTPQEKHNKKQRHGEVSDSIEGRPHTKNKKKGRIREVRYMHENVGRLGWNLNWRVMTMIVKMRW

SEQ ID NO: 26933 - protein, 90 aa, Glycine max
ASLKVAFLAAVLSVAVVSAPMAHAAITCGQVTNSLINCIGFFLNGRTPSKGCCIGVKSLNADIKTTVDRHTVCNCLKSSVSQISCFKTHN

SEQ ID NO: 26934 - protein, 440 aa, Zea mays
  misc_feature (246)..(246): Xaa can be any naturally occurring amino acid
MNRLALGGIITSGIVIILVMKFVTRWIEVTREWQMERARLQALEMQAAAAAAGAPMIQQPAANGSAAPPYAIAANHVVEMGAVNRFLDDILREKPARFTPENLREFTRNYAERLGSGGFGVVYRGAFPNGVQVAVKILNSTLDRRAEEQFMAEVGTAGRTYHINLVRLYGFCFDATTKALVYEYLEKGSLDRVLFDLEGDALGFDALSGIVAGTARGVRYLHEECQHRIIHYDIKPGNVLLTADYXPRVADFGLARLCNRDSTHLTMTGARGTPGYAAPELWLPLPVTHRCDVYSFGMLVFEILGRRRNLELQHPAVTVSQEWYPRWVWQRFDQGKFGDVMAASGIHAKDGEKAERMCKVALWCVQYQPEARPSMSSVVRMLEGEEEIARPVNPFTYMASVHMVSSSSSGDGDGGSAAASSYSSKELRGGTRSAANNQGR

SEQ ID NO: 26935 - protein, 1148 aa, Photorhabdus luminescens subsp. laumondii TTO1
MKSEFKEGYCTLCRSRCGTVNEVRNDTLIKIQQNPKHPTGNAMCMKGKAAPELAHSPNRILHPLRRTNPKGDADPGWEKITWDEALTYVAEKLAFYKAESGAESVAFSVTSPSGTPLSDSLEWIERFIRNFGSPNVCYSTEVCNWHKDEAHKFTFGCSIPVADYRNAELIILWGHNPTNTWLAQAEALGAGRNAGAKLIVVDPRHTALAKESDNWLNINPGTDAALALGLINIIINRRGYDQAFVARWTNASLLVRNDNGLFLREKDINISAKKNRYVVWNNITQSPLPYDIHENVPCDENDHYALLGEFSINSAEDVNKKIPCKSAFQRLLNECQPYTPEYVEKITGITKEKLLYAADLIISSKRIAYHSWTGVAQHTNATQSERAIAVLYALTGCFDTQGSNRVYNKHPVNPVNARRLMPKEQQEKALGFKERPLGPPLDGWITSHDLYQAILHKRPYPIRAMMAFGTNMLSSHADTKIGIDALKQLEFHVHCDLFETPTAHYADILLPVNTPWEREGLRVGFEISAKAEELVQLRQKMISPRGESRSDNEIVFDLACRLGMNDLFFNGSVEAGWNYILEPIGLTVEALREKPAGISMPLIQHDRKYAGIDPVKNTVKGFDTETGVVEIYSEKLWRHGYPPLPIYDEPKENLNSESHFPYRLTSVKNGFYCHSQQRSLTRLRKKSPYPKLEINSRLAEKKGINNGDWVEVITRNGEARFKASLDDNIAYDTIIAEFGWWQACPDYGKEGFPAIGKNSSNYNALISDDSCDPISGASPLRSFRCDIKLAEDINPERRPWQGRKAFRVVDTKPEAKGVKTVIFESQDGTMLPDYEPGQHITVQVSIPGQDAPVIRAYSLTGTATLEGRKSYSISVRHQKSITSDGETFEGVMSSYINKTLVAGAEVNLTPPGGNFIIPLNAKQPVVMLAGGIGITPFISYLESLPANGEKPELLLLYANQNSNTHTFSKRLKEIESKIKQLKVINYYSNPLPVDIEGINYQYHGYITADAVPETLIKQQARFYMCGPAPMMKTFEEGLLTLGVPPFDIYKEMFRSLTPVKIKDGKSFAVKFEKSGVPLEWSPDKGTLLNFGEKSGIKMASGCRVGQCESCAVKLKSGEVQHLNGVEPSEQGMCLTCQCIPISDISIDA

SEQ ID NO: 26936 - protein, 589 aa, Rubrivivax gelatinosus PM1
MWIEEGVTLGHRRLSILDLSENGKQPMSFGEGRYWITFNGEIYNFIEIRSELQALGHVFRTESDTEVILAAYQQWGEACMLRFNGMWSFAIWDRVEKSLFLSRDRFGKKPLFFAELPNGDFAFASEMKALLPLLPTVEPDDALIKGMTLRSSFAYEATERCLIKGVKRLLAGHCGKVVRGRVQSRRWWNTLDHIPTIPSSYGEQVEMMRELFLDACRIRMRSDVTIGTALSGGLDSSSVLSALAHINRTRGGESRLSADWQHAFVASFPGTPLDEANYAQRVAEHAGIKAEILPIDPTRHIDQLQNMLYLYEDMTVTSPIPFMSLYGRIKQGGVTVTLDGHAADELFGGYSNDWAYALLDAGTDRQQINEVLDLYEHNVPDNSTQFRKPSSRLASYAKHMGSAMAKHALGMHTNLGREYTDHPRWKELDHLSRALFWQTHSFVLPSILRSYDRYGMAASIEIRMPFLDWRIATFAFALPWTSKIRGGYSKAIIRDAIAPFMPHEIAYRRNKIGFNSPIVDWMRGPLRGFFLDTVNSTAFKQCGLVDAERATKLVHRVMHDPKATFKSGEQAWWSVLPFLWSNAMISRPA

SEQ ID NO: 26937 - protein, 339 aa, Geobacillus kaustophilus HTA426
MQQTKQRLLTGNKALAEAIRLEMERDPNVFVMGEDVGVYGGIFGATEGLFQKFGPERVIDTPISETAFIGAAIGAAAEGMRPIVELMFVDFFGVCMDQIYNHMAKIPYMSGGRVKLPMVLMTAVGGGYSDAAQHSQTLYATFAHLPGMKVVAPSTPYDLKGMMISAIRDDNPVVFMFHKTLQGLGWMDQLDASIGHVPEEAYTVPLGKANIVREGTDITIVGIQMTVHQALEAAKRLEQQGIQAEVIDLRSLVPLDKETIIQSVKKTHRLLVVDEDYLSYGMTAEIAAIAAEHCLYDLEAPVKRIAVPDVPIPYSRPLEQFVLPNADKIFREAIQLVNE

SEQ ID NO: 26938 - protein, 399 aa, Bacillus subtilis subsp. subtilis str. 168
MLDNKTIEIIKSTVPVLQQHGETITGRFYDRMFQDHPELLNIFNQTNQKKKTQRTALANAVIAAAANIDQLGNIIPVVKQIGHKHRSIGIKPEHYPIVGKYLLIAIKDVLGDAATPDIMQAWEKAYGVIADAFIGIEKDMYEQAEEQAGGWKEYKPFVIAKKERESKEITSFYLKPEDSKPLPEFQAGQYISIKVRIPDSEYTHIRQYSLSDMPGKDYYRISVKKDGVVSSYLHDGLQEGDSIEISAPAGDFVLDHASQKDLVLISAGVGITPMISMLKTSVSKQPERQILFIHAAKNSEYHALRHEVEEAAKHSAVKTAFVYREPTEEDRAGDLHFHEGQIDQQFLKELIANTDADYYICGSPSFITAMHKLVSELGSAPESIHYELFGPQLSLAQSV

SEQ ID NO: 26939 - protein, 436 aa, Geobacillus kaustophilus HTA426
MVVEVTLPKLSDSHDESFITFWHVSEGDAVEKGATLVEVQTEKAVSEIHAPESGTVKEIKKKRGDTAKVGEVLAVIAVETFAPDGGDPQTEIKITPRVKKLAKELGVDWSTVTPTGANGKITEDDIRRAASAGKQRTPQKTFVAAPSVRKFAREQNVSLEEITPSGKNGRILKSDIEAALSVRQQKATDEAAASVEIVKKQESREKVRRVPLTGIRKAIAQAMVRSTRTIPQVTHFGEADATRLVQHRRRIQPLAEQQGVKLTYLAYVVKALAAVLKKYPMLNASLDEEREEIVIHEFIHIGFAVDTDRGLLVPVIRDADQKSLFQIAKEIEELTAKARAGTIQAVEMSGGTCTVSNIGSANGSWFTPIIHYPQSCLLGIGKVEKKPVVVDDSIEIASVMPLSLTYDHRLIDGMMAQHALNECQTYLSEPDWLLVM

SEQ ID NO: 26940 - protein, 109 aa, Bacillus sphaericus
MLRKIIVGSRRSKLALTQTNWFINELKAAGVPFEFEVKEIVTKGDQILDVQLSKVGGKGLFVKEIEQALFDKEIDFAVHSMKDMPAVLPEGLVIGCIPPREDARDAFIS

SEQ ID NO: 26941 - protein, 496 aa, Physaria fendleri
MTSLNIKLLYHYILTNLFNLCLFPLTAFLAGKASHLTKSDLLMFLSHLQDNLITVIVLFTFTIFCLVLYIVTKPKQIYLVDYSCYLPPDHLKVSISSVMDIFYELRKVDPLCEVGCDDSSLEFMRKVLERSGLGDETYVPLGLHQVPPQKTFAAIKDETEQVIKGALENLFENTKVNPREIGILVINSSMFNPTPSLSAMVINTFKLRSNIKSFNLGGMGCSAGVIAIDLAKDLLHVHKNTYALVISTENITITAYAGENRSMNVSNCLFRIGGAAILLSNKPRDKRRSKYKLAHTVRTHTGADDMSYRCVQQEEDEMGKVGVRLSKDITTVAGTAVKKNISTLGPLILPLSEKLLYFVSFIAKKLLKEKIKNYYVPDLKLAINHFCIHAGGRGVLDVLEKNLRLSPIDVEASRSTLHRFGNTSSSSIWYELAYIEAKGRMKKGDKAWQIALGSGFKCNSAVWVALRNVKASANSPWEHCIDRYPVPDTCVENGKS

SEQ ID NO: 26942 - protein, 359 aa, Synechococcus sp. RS9917
MRQHRVVLLPGDGIGPEITAVARMLLEAVAARHGFALQFDEQLIGGAAIDATGVPLPEASLEACRGADAVLLAAIGNPRFDALPREQRPESGLLALRSGLGLFANLRPVKIVPALSAASSLKAEVIEGVDLLVVRELTGGIYFGQPKGRVTADGEERGFNTMTYSASEVDRIARVAFELAKERRGQLCSVDKANVLDVSQLWRDRVEAMAATYPEVSVSHLYVDNAAMQLVRDPRQFDVLLTGNLFGDILSDEAAMLTGSIGMLPSASLGSAGPGLFEPVHGSAPDIAGQDKANPMAMVLSAAMMLRIGLKETEAADALEAAVNRVLAAGYRTGDLMAEGCTPLGCRAMGEQLLVHCNG

SEQ ID NO: 26943 - protein, 324 aa, Paenibacillus macerans
MTKRTIVVGTRQSQLALTQTEQVIGDLKELCRAHGLPFEFEIKKIVTKGDRILDVTLSKIGGKGLFVKEIEQAMLDGEIDMAVHSMKDMPSVLPEGLINGGVPLRKDPRDALISRSGLHLHELPQGARVGTSTLRRSSQLLAYRPDLVLEPVRGNIDSRLRKLEEEGFDAIILAAAGLQRMGWENRVTAYLSADVCLPAVGQGALGIECRENDAELRDVLSLYNDPDTALTVAAERRFLAVLNGGCQVPIAAYANLERAGGQAPEEGGRAAASQAPAALRIRLTGMVGSADGRGYFEGECRREDPVAFGERIAGLLLAQGGRVT

SEQ ID NO: 26944 - protein, 567 aa, uncultured sulfate-reducing bacterium
MPELADKSDVVIIGGVAAGPKTAATLARRLPGARITLFQKEKHLSYAKCGFPFLASGELGSFDALVQTSYGVARDSGFFQSSKGFKTVTSAEVTQINRGKKTVSVRMCETGETFEHGYGRLVIATGSIPNRPPIPMPQSDRVRPFSSPADVTGFRDLAQRGEIDNVVIIGGGFIGVELCEAVGEMWGIGVKLFEKQPQLLPYMLDPEMAAIVQRSLAVQGVDALVDVEVEKVELDSQGKPVVFVKGREPTPADYVFLCLGVHPEGRLARESGLDVSENGAIRVDSALRTSDPDIFAGGDCIESVHRITKQPIYMPMGSLANRHGRVIAENLAGASVEFPGVVGAFVLRAFELNIGGVGLSEQTARGAGLESWSVWGSFPDRPDYNPEAKTLTLKMVYEQKTNRLLGLQAVGRGDICRRIDVFSALLHGEKAVEDLMDFEHGYAPPFAEALDPLHHMAAIAMTRERGVTFVSPDFVHAPVDRDTLVLDVREDEESASAPLPSEISKVFGEALHIPLGQLRERLHEVDRNRRILTICQRGVRSYQAALILQTAGFEDVHILSAGLQAQT

SEQ ID NO: 26945 - protein, 327 aa, Yersinia pseudotuberculosis IP 32953
MVKKIGVLTSGGDAPGMNAAIRGVVRAALSAGLDVFGIEDGYLGLYENRMKKLDRYSVSDMINRGGTFLGSARFPEFRDPEVRKVALKNMHERGIDGLVVIGGDGSYAGADLLTKEGGIHCVGLPGTIDNDVAGTDYTIGFFTALETVVEAIDRLRDTSSSHQRISIVEVMGRYCGDLTLAAAIAGGCEFIAIPEVEFKRDDLVAEIKAGIAKGKKHAIVAITEKLDDIDSLAKYIEKETGRETRGTVLGHIQRGGAPVAYDRILASRMGSYAVDLLLQDHDYKKGGFCVGVQNEKMVHELISVCIAPENKKSKFKEDWYDTAKKLF

SEQ ID NO: 26946 - protein, 536 aa, Oceanobacter sp. RED65
MLDDSMKQQLKAYLENLKTEVQLVLSLDESDTASKLKALANDIAALSDKVSVQEDDNASNRKPMMQVVNPEKQSKLGFAGVPMGHEFTSLVLALLHSGGHPMKLEQEVIDQVAAIDKKLDFEVFISLSCQNCPDVVQALNMMSVINPNITATMIDGSAFQEEVEAKNIMAVPSVFLNGELFSSGRMSLNDILKKVDTGASQREAKAISEKAPYDVLVIGGGPAGASAAIYAARKGIRTGLVAERFGGQVMDTMAIENFISVKATEGPKLVHGLEEHVKDYDVDIMAEQKVDAVVPADETEDGYIHVILENGARLKARSTIVTTGARWREMNVPGEQEYRNKGVAYCPHCDGPLFKGKKTAVIGGGNSGIEAAIDLAGIVEHVTVLEFADTLRADQVLIDKANSLPNVEIIKMAQTTEVEGDGTRVTGLNYKDRESGEIKHVEVAGIFVQIGLVPNSEFLKTSGIELSDRGEIVIGDRGETSKPGIFAAGDVTTVPYKQIIIAMGEGSRASLGAFDYLIRNPAPSKASSETELKESA

SEQ ID NO: 26947 - protein, 118 aa, Brassica napus
MIRKTPNLQNDIINIQERYSNNPVMDAGGGRNNRKNVNFRRPPAMTSENSKHELRRTFSSQKRLMIPANYFSLESLVILVGLTASLLILPLVLPPLPPPPFMLLLIPIGIMVLLIFLA

SEQ ID NO: 26948 - protein, 449 aa, Salmonella typhimurium LT2
MTEIVVSKFGGTSVADFDAMNRSADIVLSDTNVRLVVLSASAGITNLLVALAEGMEPGERFATLDAIRKIQFDILDRLRHPNVIREEIERLLENITILAEAASLATSAALTDELVSHGELMSTLLFVEILRERDVQAHWFDVRKVMRTSDRFGRAEPDVAALAELAAQQLLPRLSETLVITQGFIGSESKGRTTTLGRGGSDYTAALLAEALHAARVDIWTDVPGIYTTDPRVVPVAQRIDEIDFEEAAEMATFGAKVLHPATLLPAVRSDIPVFVGSSKDPQAGGTLVCNKTQNPPLFRALALRRNQTLLTLHSLNMLHSRGFLAEVFGILARHNISVDLITTSEVSVALTLDTTGSTSTGDTLLTQSLLMELSALCRVEVEEGLALVALIGNNLSKACGVGKEVFGVLEPFNIRMICYGASSHNLCFLVPGDDAEKVVQKLHQNLFE

SEQ ID NO: 26949 - protein, 549 aa, Salmonella typhimurium LT2
MKNINPTQTSAWQALQKHYDEMKDVTIAELFANDSDRFAKFSATFDDLMLVDFSKNRITEETLAKLQDLAKETDLAGAIKSMFSGEKINRTEDRAVLHVALRNRSNTPIIVDGKDVMPEVNAVLEKMKTFSQAIISGQWKGYTGKAITDVVNIGIGGSDLGPFMVTEALRPYKNHLTMHFVSNVDGTHIAEVLKKVNPETTLFLVASKTFTTQETMTNAHSARDWFLKTAGDEKHVAKHFAALSTNAKAVGEFGIDTANMFEFWDWVGGRYSLWSAIGLSIILSVGFDNFVELLSGAHAMDKHFSTTPAEKNLPILLALIGIWYNNFFGAETEAILPYDQYMHRFAAYFQQGNMESNGKYVDRNGNAVDYQTGPIIWGEPGTNGQHAFYQLIHQGTKMVPCDFIAPAITHNPLSDHHQKLLSNFFAQTEALAFGKSREVVEQEYRDQGKDPAQLEHVVPFKVFEGNRPTNSILLREITPFSLGALIALYEHKIFTQGVILNIFTFDQWGVELGKQLANRILPELGDDKAISSHDSSTNGLINRYKAWRA

SEQ ID NO: 26950 - protein, 341 aa, Cryptococcus neoformans var. neoformans JEC21
MQYTFICTYRHKPKKIEAQMSADPHQNVIFPSEEIPEDAIDVKGPDFNKPIDLEALLKSYETIGFQATGLARAIRVVDEMASLREILKFLAQHKLVDCFVTTAGGVEEDFIKCLGKTILGDFHLDGAGLRKKGLNRIGNLLVPNSNYCAFEDWVVPILDKMVEEQEEQGVKWSPSSVIRRLGKEINNEDSVYYWCYKNDIPVFCPALTDGSLGDMLYFHTYKSSPLQLNIDIVADIRRLNDMSVKSKKAGMIILGGGVCKHQIANAMLFRNGADYAVYINTGQEYDGSDSGARPDEAVSWGKIRAGAESVKVYADATLVFPLVVAATFGRAHWAEQGEKAA

SEQ ID NO: 26951 - protein, 297 aa, Campylobacter jejuni subsp. jejuni NCTC 11168
MNSLYETLGVSKNASADEIKKAYRRLARKYHPDINKEKGAEEKFKEINAAYEILSDEKKRAQYDQYGDSMFGGQSFHDFSRNTGGVNLDDILKDLFGGGFGGRSRGGFNGFSSKGFSSGFGGFGGFEEEILDSNLELHIPFEKAVKGGEHSFNFQGETIKFKIPHGIKEGEKLRIRSKGKQSRNGARGDLIIIVKIEESPIYTREDDDLYQKVDISLKTALFGGKINIKTLKEGKEEAIINITPNSKNNQKIRLKGYGVQNRKSDIYGDMYLILNVVLPNLDTLDEKFIELLKEKLP

SEQ ID NO: 26952 - protein, 402 aa, Roseovarius nubinhibens ISM
MPGLQSAAIGIWVLAGARNEHREQNGIAHFLEHMAFKGTATRSALDIAEAIENVGGYINAYTSREVTAYYARVLKQDVPLALDVVADILRNPVFDPKEIEIERGVILQEIGQALDTPDDVIFDWLQEQAYPDHPLGRTILGPEERVRSFNRADLERFVAEQYQPQQMILSAAGAVDHDDLVQQAEALFADMTRGEAEAISPAKFAGGESRHEKQLEQAHFALAFESPNYCDSRIHASQIYATALGGSMSSRLFQEVREKRGLCYSIYASAGAYADTGMMTIYAGTSAEQLAGLAEITIDELKRAAEDMRPDEIERARAQMKAGLLMGLESPSNRAERLARMVQIWGRVPPLDEVITRIDAVTLDDVRRLAEETAAEAPAALALYGPVAEAPSLEALQQRRAA

SEQ ID NO: 26953 - protein, 406 aa, Streptomyces coelicolor A3(2)
MTEGPAAITGVGLVTPAGTDADSTWEAMCAARSLEGGDPEPLAGTGAWHSLRVPALRPGQLTGRGTARTDPFIRFALVAVAEALAQSGLDPDSWDGSRVGVVVGSAFGGVTTHDEQHRRLERQGAAMVSPYLHPRALINMAAGTIGARYGITGPGHTVAAACASGASAFGLGKTLLDAGVCDTVVVCGTDAAVTPLVVSGFARMGALSEQKATDASRPFGADRDGFVMSEGAAAVVMEKPAKARARGAEVLGRLLGHADTSDAHHPTAPRPDGAGAAAAVERALAAARMSVRNVTTVNAHGTSTPQNDLTEARLIARLFPHGPSVTANKGLLGHTLGAAGAIEAVLTLRSLRTGVLPPIAHTERADPGLPELDLVLGGVRRHDGNVAVSTSFGFGGSNCALVLDAG

SEQ ID NO: 26954 - protein, 336 aa, Lotus corniculatus
MGSVPETVCVTGAAGFIGSWLVMRLMERGYMVRATVRDPANMKKVKHLLELPEAKTKLTLWKADLAEEGSFDEAIKGCTGVFHVATPMDFESKDPENEVIKPTINGVLDIMKACQKAKTVRRLVFTSSAGTLNVIEHQKQMFDESCWSDVEFCRRVKMTGWMYFVSKTLAEQEAWKFAKEHGIDFITIIPPLVVGSFLMPTMPPSLITALSPITGNEAHYSIIKQGQYVHLDDLCLAHIFLFEHPESEGRYICSASEATIHDIAKLINSKYPEYNIPTKFKNIPDELELVRFSSKKIKDMGFEFKYSLEDMYTGAIDTCKEKGLLPKAAENPSNGK

SEQ ID NO: 26955 - protein, 140 aa, Idiomarina baltica OS145
MVRVEDLDASLRFYCDLLGLKEMYRKEVEAGRFTLVFLAAPEDEDAANENKAPMVELTYNWDPESYDGGRNFGHLAYEVDDIYALCKKLQDNGVTINRPPRDGRMAFVRSPDGISIELLQKGGAREPEAPWDTMENTGEW

SEQ ID NO: 26956 - protein, 386 aa, Oryza sativa
MYSSDVAMQPGFESSYSDYGILDDLSAFNCTEDKSLTTADPSSAVCDEQFDDSYLFNEQKPEDVYGEQAYQRDAMELLSSDQICTGQENLDMIGNRYSSENAMEQPEDQKFSIASGSQLSSSQNLLNQKNHLDSTSPSNITSESYPERNCQIIPSGASFAERNLKVQKKVASSASGQLISDNVTGHPGHQTLTRRASYPCENHEIGKRSLGKRGLGHSDVAMGTSMVVDGSFVSSISSDNSVEENSFRQLQDAVSQLDVKTKMCIRDGLYRLARSAQNRQVFPNTMNNNGDSHNVKDMQNAETSGKFVDPGSIETQTNPIDRSIALLLFHQPSEHVTGAVDEAASLKSHNDNHQAAAKNQRVMHASSVHSPRGQGDPMDAKSCRNN

SEQ ID NO: 26957 - protein, 536 aa, Magnaporthe grisea 70-15
MSAIRMHRNACSASRLVARTSAPRRTVPFLSPSYARLASTQVPKLKDPSLFKQNVCYVNGAFVPAKSGATFAVADPTTGEHIGDAPEFDAADTEAAIAAAENAFKTYRLTTGRERSKLLRRWYDLMIANADDIATLITWENGKTIADAKGEVTYAANFFEWFSEEAPRVYGDTIQPTLAANRVVTRKEPVGVCSLITPWNFPAAMGTRKIGPALAAGCTVVCKAPAETPFTSLALAELAHRAGVPAGVVNFVTSHSNTKTVGEVLCTHQAVRKISFTGSTGVGKTLMQQAAGTLKKCSFELGGNAPFIVFDDADLDAAVDGAIACKFRSSGQTCVCANRIYVQRGIYDAFAERLAKRVKETFKIGSGFDPETTHGPLIHDRAVSKVASQVEDAVGKGAKLLAGGKRLPDLGPHFFAPTVLGDMTPEMSIAREETFGPIAGLFKFDTEAEVVKMANDTEVGLAGYFFSKDIHRAYRVAEALEVGMVGVNTGIISDVASPFGGVKESGFGREGSMYGIHEYQVTKTITFGGMGKELQG

SEQ ID NO: 26958 - protein, 124 aa, Rubrivivax gelatinosus PM1
MIRVRELERSLKFYEAVLDMKESHRLDFPEFTLVYLRAEGCHFEIELTLNKGREDDYTHGTGYGHVAAVVPDASAKRAQVDALGYAPTAVKEFKRGEELLARFFFVQDPDGYKIEVLEQHGHYR

SEQ ID NO: 26959 - protein, 320 aa, Escherichia coli K12
MRQTKTGILLANLGTPDAPTPEAVKRYLKQFLSDRRVVDTSRLLWWPLLRGVILPLRSPRVAKLYASVWMEGGSPLMVYSRQQQQALAQRLPEMPVALGMSYGSPSLESAVDELLAEHVDHIVVLPLYPQFSCSTVGAVWDELARILARKRSIPGISFIRDYADNHDYINALANSVRASFAKHGEPDLLLLSYHGIPQRYADEGDDYPQRCRTTTRELASALGMAPEKVMMTFQSRFGREPWLMPYTDETLKMLGEKGVGHIQVMCPGFAADCLETLEEIAEQNREVFLGAGGKKYEYIPALNATPEHIEMMANLVAAYR

SEQ ID NO: 26960 - protein, 460 aa, Idiomarina baltica OS145
MTNPQHTFRVAKFGGTSVANYSAICAAVANVKSQNQPILVVVSACAGVTDRLVMLANESDNVESILSEIVHRHTEIADELSRLNRAGAVEKQLALDDLHDRLRQHVARRPTPHDASFVAWRDQLLSFGEYCSSLLFSWAWEAKTEQPSAVLEAKTWLFTDSRYGRARPQLKAMIEKAPQWLKTLEPGRLYVTQGFIGKNERGQTTTLGRGGSDYSAALLAVVVQAQELQIWTDVAGVYSTDPRLCSDAFAIAEMSFDEAAEMATFGAKVLHPASLLPAIEYQIPVFVGHAAYPARGGTRLVKNSTHKPDVRAVAVRKQQTLMTVHSIDMFHASGFLAQLFSIFAKYDISVDLITTSEVSIALTLDEGGSQANHAVSVPAAAIAEIELFAKVELEYNLTLIALIGNQIGRQSQLSQWVFDAVAPTPVRLICQGASEFNLCFLIPERDTVDVVTRLHERIKR

SEQ ID NO: 26961 - protein, 355 aa, Thermoanaerobacter tengcongensis MB4
MKTRLSNLRKLMREKDIEAFVIYKFVNVTYITGFTGDDSVALITDDAAIFITDGRYTEQAQKEVKDFEIVEHKTGIKDVLKEYIKKLGIKRLAFEENVTYGQYRELKEALERVELIPQAGLVESLRMVKDEEEINLIKKAQSITDRAFEHILNFIKPGMTEKEVALELEYFMKKNGAEDLAFDTIVASGKRSSLPHGKASDKVIEKEDFVTIDFGCKVSGYCSDMTRTIVVGKASEKQKEIYNVVLEAQQNALKNLKAGITSKEADYLARSVIEEKGYGPYFSHSLGHGVGLEVHEGPSLTFRKEEILKEGSIVTVEPGIYIPDFGGVRIEDMVLLKEDGVINLTNSPKHLIEIN

SEQ ID NO: 26962 - protein, 656 aa, Ipomoea batatas
MAATTSSAAKPYDLENAAARYAPLPAGPHSCEIPASHRPSLKSISTILLSSLFLCSLIILLVFNQSSSIEPDGPVVFAGSGNRSAESVNPGVVLPAPSRGVSQGVSEKAFRGVSGGRISYPWSNLMLTWQRTAYHFQPEKNWMNDPNGPLYYKGWYHFFYQYNPDSAVWGNITWGHAVFPTDLINWIHLPFAMVPDQWYDVNGVWTGSATILPDGRIVMLYTGDTDDYVQVQNLAFPANLSDPLLVDWVKYPNNPVIYPPPGIGVKDFRDPTTAWTAGSQNGQWLVTIGSKVGKTGISLVYETTNFTTFKLLDGVLHAVPGTGMWECVDLYPVSTTGENGLDTSVNGLDVKHVLKASLDDDKHDYYALGTYDPAKNKWTPDNTDLDVGIGLRLDYGKYYASKTFYDQNKQRRILWGWIGETDLEAVDLMKGWASLQAIPRTIVFDKKTGTNVLQWPVDEVESLRSGDPITAEANLEPGSVVPIHVSEGTQLDITASFEVDETLLETTSESHDAGYDCSNSGGAVTRGSLGPFGLLVVADEKLSELTPVYFYVAKGADGKAKAHFCADQTRSSMASGVEKEVYGSAVPVLDGENYSARILIDHSIVESFAQGGRTVTERVYPTSFILQGSLRVSLFRMRAKTTGYITFLLFLSLIIS

SEQ ID NO: 26963 - protein, 156 aa, Haemophilus influenzae
NRTNTPVLVDGKDVMPEVNAVLAKMKDFCQRIISGEWKGYTGKAITDVVNIGIGGSDLGPYMVTEALRPYKNHLNMHFVSNVDGTHIAETLKKINPETTLFLVASKTFTTQETMRNAQSARDWLLKAAKNESAVAKHFAALSTNAKDVEKFGIDTN

SEQ ID NO: 26964 - protein, 259 aa, Bordetella bronchiseptica RB50
MEELIIETKDGVRWLTLNRPHALNALNAALVAALTEAIGQAQADPQIGAIVLTGAGRAFCAGADLKETERRTQEQGSNVAFIRAIGALTELIEAGAKPVIAAVNGIAVAGGLELVLACDIVLAADSARLGDAHANYAMFPGGGATVRLPRRIGIGNAKYVMFTGQSLPASEWVALGLVARAVPADQLAEHAAQLAGQIAGKSPLVIARMKSALNDATDQPAPVAMRRERELNHLHSLSFDRAEGLAAFREKRPPRFQGR

SEQ ID NO: 26965 - protein, 272 aa, Mesorhizobium loti MAFF303099
MMPELKSALYAGKVMHQRLKPRRHRLSYRIFFLLLDLDEIDAMSKRLRLLSHNRFNLFGFADADHGDGSGGSLKAYVEDMLKTAGIETDAGPIRLLSMPRMLGYAFNPISIYFCHSRQGDLVAILYEVNNTFGQRHSYLIPVGERHDETVRQHCDKRFYVSPFMAMGLNYRFRIGLPGENVAIHITASDDQGPLMVASFAGKRRALSDASLLRAFISYPLLTLKVTAGIHWEALRLWAKGIRLQERPAPPHNSITHVAMHGRLRRKAEPDVI

SEQ ID NO: 26966 - protein, 351 aa, Rickettsia conorii str. Malish 7
MTNSIRIGTRKSPLALIHTNLVIQQIKQFFPDINCEIVPIITSGDLIQNKPLYDIGGKALFLKEIEQALLDKKIDLAVHSLKDVPGRMPEPLVIAAVLEREDPRDVFVCLKYKSIEELPQNAVIGSSAVRRKAFIQKIRPDLKVTVFRGNVDSRIKKLMTGEVDATILAYTGLKRLEVFNPEYCHLIEYSQMLPCIGQGVIAVEIRKDDNAMLEICNQINHLPTFELIKPERAFLEYLDANCRTPIAAYSQYLDANPRHLSKLAYREVLEGNTEALATAAYKSNRTDASTGLTYKLPLEVEFGKVSNIQTNFMLGNLDGSKITFHTETTNIKTSTEAGIKAAKMMLEAICK

SEQ ID NO: 26967 - protein, 371 aa, Zea mays
MVTTSENVSQTICIICRFVLMPLAVFVFLAYKYWKTRITIDAVEKFLRMHHMLVPMRYAYTNIIAITAHFRDKLGQGGYGTVYKGVLQPGEVHVAVKMLGNSNCNGEEFISEVATIGKIHHVNVVRLIGFCSEENIRALIYEFMPRGSLDKYIFSSEKTFSWDKLNEIALGIARGLNYLHHGCDMQIVHFDIKPHNILLDSNFVPKVADFGLAKLFPRDDSFVPLSAMRGTIGYIAPEMVSRSFGVISSKSDVYSFGMLLLEMTGGRRNADPHAGSSSQAYYPSLVYSQLSQGDANEISEGVDMHELEKKLCIIGLWCIQMKPQDRPMMSEVIEMLEVGVDGIQMPPRPFFCDDEGDSSYSVISELDTIEE

SEQ ID NO: 26968 - protein, 134 aa, Brassica napus
MATDEDMITRISIEPEKQSLLDHHTEKHFTAGEVVRDIIIGVSDGLTVPFALAAGLSGANASSSIVLTAGIAEVAAGAISMGLGGYLAAKSEADHYAREMEREQEEIVAVPETEAAEVAEILAQYGVEPHEYSP

SEQ ID NO: 26969 - protein, 449 aa, Francisella tularensis subsp. tularensis SCHU S4
MNAQKYIDSVIAQVEKRDGHEKEFIQAVKEVFSTLKPALEHNPKYIEENILARMVEPERGISFRVPWVDKDGNIQVNRGYRYQFNGAIGPFKGGIRFHPSVYSGIIKFLGFEQVFKNSLTTLPMGGGKGGADFDPKGKTDAEIMNFCQSFMIELQRHIGPDIDVPAGDIGVGGKEIGYMYGQYRRIRACFENGVLTGKSLESGGSLIRPEATGYGAVFFLDEMLKHDGETLQGKTVVTSGYGNVAWGVCKKVAQLGGKVVTISGSKGFVHDPEGITTDEKIEFLLKIRNGEKTMQDYSKEFNASWHAGQKPWGIKADIAIPAATQNEIDVEDAQKLIDSGVKYVVEASNMPTTNEAIEFLMKKGIILAPGKAANAGGVAVSGLEMSQNSARLSWSAEEVESKLQQIMANIFHACKFASSKYNLGYNLVAGANLAGFEKVAEAMIQQGRY

SEQ ID NO: 26970 - protein, 544 aa, Rhodobacter sphaeroides 2.4.1
MTVKTVSTTPFSDQKPGTSGLRKKTPVFMRPHYLENFVQSIFDAIGGARGKTFVLGGDGRYFNDRAAQVILRMAAANGAARVIVGQGAILSTPAASHLIRLRKTDGGIILSASHNPGGPEEDFGVKFNTPNGGPAPESVTEAIFEATKTLSEYRIFEAQDVDLSVVGRTVLGDMQIEVVDPVADYAALMESLFDFPAIRAMFSDGFTMRFDAMCAVTGPYATEILENRLGAAKGTVVNGTPLPDFGGMHPDPNPTWAKALMDEMFSAEAPDFGAASDGDGDRNMVVGRGIYVSPSDSLAVLAANAHLAPGYKAGLKGVARSMPTSAAADRVAEALGVEEFETPTGWKFFGNLLDAGRATICGEESFGTGSDHVREKDGLWAVLLWLNILAVRKESVREILEAHWQQFGRNYYSRHDFEAIETARADAMMEELRGKLVGLTGAAFNGHLKVAEADDFAYTDPVDGSVSRKQGVRILFQDGSRIVMRLSGTGTEGATLRLYLERYAPGPEGLDLDPQEALGPIIAAAHEIAGIERHTGRREPDVIT

SEQ ID NO: 26971 - protein, 505 aa, Glycine max
MYRVAASSFRRHLKGHGGNLGSIRFSTSAAVAARTSSGGLFSWLTGERSSALPPLDIPLGGVALPDSLPDFVEQSKTKITTLSNGLKIASETSPNPAASIGLYLDCGSIYETPFSSGASHLLERMAFKSTTNRSHFRIVREVEAIGGNVGASASREQMGYTFDALKTYVPQMVELLVDCVRHPAFLDWEVNEELRKVKAELGELSNNPQGLLLEAIHSAGYSGALAYPLLAPEAALNRLDGPSLEEFVAENYTAPRMVLAASGVEHEELLSIAEPLLSDLPKVPCPEEPKSVYVGGDFRRHGEGGTHVAIAFEVPGGWQKEKDAIVLTVLQMLMGGGGSFSAGGPGKGMHSRLYLNVLNEYQQIQSFSAFNSIFNNTGLFGIYASTSPDFVPKTVDIAAKELIAIASPGQVTQVQLDRAKKSTKSAVLMNLESRMIASEDIGRQILTYGERKPVEQFLKAVDEITLNDITKIAQKIISSPLTMASYGDVMNVPSYESVNSKFHAK

SEQ ID NO: 26972 - protein, 369 aa, Brassica napus
  misc_feature (52)..(52): Xaa can be any naturally occurring amino acid
  misc_feature (212)..(212): Xaa can be any naturally occurring amino acid
  misc_feature (329)..(329): Xaa can be any naturally occurring amino acid
IKDCLAQLYTKDITPDDKQELDESLQREIQAAFRTDEIKRMPPTSQDEMRAXMSYFHERIWNGVPKFLRRALKNIGIDERVPYNAPLIQLSSWMGGDRDFWKTIPPTEPYSVVLGDVRDTLYHTRERTRQLLSNGISDIPEEATFTDVEQFLEPLELCYRSLCSSGDRPIADGTLLDFLRQVSTFGLSLVRLDIRQESERHNDVLDDITKHXNTGSSYRDWSEERRQEWLLAELRGKRPLFGLDLPKTEEIADVLDTFKVISELPSDCFGAYIISMATSPSDVLVVELLQRECHVKKPLRVVPLFEKLADLEAAPAAVSRQLLLLSMGXTLQFRLNPSGALCLMEWLLLLPRSIDLWSSKNLDLSSTSA

SEQ ID NO: 26973 - protein, 453 aa, Brassica napus
IRDCLTQLYAKDITPDDKQELDEALQREIQAAFRTDEIRRTPPTPQDEMRAGMSYFHETIWKGVPKFLRFWKQIPSNEPYRAILGDVRDKLYNTRERARQLLSSGVSDIPEDSVFASVDQFLEPLELCYRSLCDCGDRPTADGSLLDFLRQASAFGLALVKLDIRQESDRHTDVLDAITQHLGIGSYKEWSEDKRQEWLLSELSGKRPLFGHDLPKTEEIADVLDTFKVISELPHDSFGAYIISMATAPSDVLAVELLQRECGIIHPLRVVPLFEKLADLENAPASVARLFSIEWYRNRINGKQEVMIGYSDSGKDAGRLSAAWQLYKTQEELVKVAKEYGVKLTMFHGRGGTVGRGGGPTHLAILSQPPDTIHGQLRVTVQGEVIEQSFGEEHLCFRTLHGFTARTLEHGIDPPVSPKPEWRVLMDEMAVIATEEYRSVVFKEPRFVEYFRL

SEQ ID NO: 26974 - protein, 94 aa, Arabidopsis thaliana
  misc_feature (29)..(30): Xaa can be any naturally occurring amino acid
  misc_feature (33)..(34): Xaa can be any naturally occurring amino acid
  misc_feature (36)..(36): Xaa can be any naturally occurring amino acid
  misc_feature (44)..(44): Xaa can be any naturally occurring amino acid
  misc_feature (46)..(46): Xaa can be any naturally occurring amino acid
  misc_feature (48)..(48): Xaa can be any naturally occurring amino acid
  misc_feature (66)..(66): Xaa can be any naturally occurring amino acid
  misc_feature (73)..(73): Xaa can be any naturally occurring amino acid
  misc_feature (83)..(83): Xaa can be any naturally occurring amino acid
LQPAAYPRYPPLGYGPPLVFLYWLIGVWXXERXXPXVNGDHMVXEXMXNAMLDNRISDLHVERKLXPICGDVXKELNRAVKRXVTWQDPVALSV

SEQ ID NO: 26975 - protein, 942 aa, Yersinia pseudotuberculosis IP 32953
MTKYSLRARMMILILAPTLLLGLLLSTSFMVNRYNELQNQIVSAGTNIIEPLAVASEYGMSFRNRDTVRQLINLLHRRHSNIVRSISVFDVDNKLFVTSNYNYNSSQLRLPPGEPVPDSLMLSYRGDSLILRMPIVSESNLSSEQASGQGESDQILGYIAIDLDLQSVRLKQYKEIFISTLLLLFCMCVAILFAYRLMRDVTGPIRNMVNTVDRIRRGQLDSRVEGHMLGELNILKNGINSMAMSLAAYHEEMQQNIDQATSDLRETLEQMEIQNVELGLAKKRAQEASRIKSEFLANMSHELRTPLNGVIGFTRQTLKTSLTPTQTDYLQTIQRSANNLLCIINDVLDFSKLEADKLILEHIPFSLRGTLDEVIILLAHTAHEKGLELTLHINNDVPDQVLGDAMRLQQIVTNLLGNAIKFTEEGNIDILVVVKAIASQQVTLMVEIHDTGIGISESQQAQLFQAFRQADASTSRRHGGTGLGLVITERLVKEMGGNISFQSQMSCGSIFRFHLTLELNESIPYRQPDMAHLEGKQLAYIERNSTAARATINILNTTPLQVTHRQSLAQLPEQHYDFLLVGVPIPFRNNMAIHQDKLLTALKIADHVILALPSQSQVEAEQLKQIGAKGCLLKPISSIRLIPLLLAEDTHSKVPSEEQPRKQPKLPFRVMAVDDNPANLKLIGTLLEEQIEETVLCDSGAMAITYAREHTLDIILMDIQMPEIDGIRASEIIHQIPHHQETPIIAVTAHAVKGQQEQLLRLGMADYLAKPIDEARLLQVLSRYQSDNPPLSTASTASTASTASTASTASTASTASTAESLPLPVPKGAGVIDWAQAVRQAANKEDLARDLLTMLLEFMPQITARVQAILAGADDGDILNLVHKFHGSCACSGVPRLRQLCMTIELQLRQQVNLQDLEPEWLELLDEIENVSEAAKTYLRTE

SEQ ID NO: 26976 - protein, 373 aa, Musa acuminata
MASLVCLWMALLALGLGACSPAAAELGDASMAERHVEWMARHGRTYKDAAEKEQRLGIFKSNVEYIESFNAGKRKYQLAANQFADLTHEEFKAMHTGFKPSGTGAKKAGNGFRHGSLSSVPDSVDWRSKGAVTPVKDQGLCGSCWAFTVVAAVEGITKIVTGKLISLSEQQLVDCDVHGKDQGCQGGDMDAAFEFIVNNGGITSEANYPYEEVQRLCNAHNASFVVATIESHEDVPTNDEKALRKAVANQPVSVGIDAGSSLDFQLYSGGVFSGECGTDLDHAVTVVGYGTTSDGTKYWLAKNSWGETWGENGYIRMERDVAAKEGLCGIAMQASYPTAGTLGTQYSSATAAESILHAWFMLLCVIAVCVVVT

SEQ ID NO: 26977 - protein, 128 aa, Triticum aestivum
  misc_feature (92)..(92): Xaa can be any naturally occurring amino acid
  misc_feature (101)..(101): Xaa can be any naturally occurring amino acid
MAASMITSPIVAPTSVPSLSRRGSSFAVVCSGGKKIKVDKPLGLGGGLTVDIDANGRKVGKKGVYQFVDKYGANVDGYSPIYTPEEWSESGXRYAGGTTGXLLIWAVTLAGLLGGGVLLVYNTSALAG

SEQ ID NO: 26978 - protein, 320 aa, Erwinia carotovora subsp. atroseptica SCRI1043
MIRRIGVLTSGGDAPGMNAAIRGVVRAALSEGLEIYGIYDGYQGLYEDRMEQLDRYSVSDVINRGGTFLGSARFPQFRDEAVRQVCVENMQRRGLDALVVIGGDGSYMGAKRLTEMGFPCIGLPGTIDNDVAGTDYTIGYFTALETVLEAIDRLRDTSSSHQRISIVEVMGRHCGDLTLAAAIAGGCEFIVLPEVPFSPEDLVSEIKAGIEKGKKHAIVAITELVCDVDELAKYIEKETGRETRSTVLGHIQRGGSPVAYDRILASRMGAYSIELLQQGYGGRCVGIQNEKMVHHDIVDAIENMKRPFKGDWLETAKKLF

SEQ ID NO: 26979 - protein, 401 aa, Rickettsia prowazekii
MSVKIIIPSLGESVTEATIAKWYKKLGDSVKTDELLLEIETEKVTLEVNAPCNGTIEKIAKTDGANVTVGEEIGEINEVVDTDTACTNNNSYKKQAIVQHDSEQIVDKPASSSNILAPSVQKLVTENKLDPNNIKGTGRGGRITKCDVLETINTTPVTIETPALNKTNEERTQRVRMSRLRKTIAQRLKDSQNTAAILTTFNEIDMSKVIALRNQYKEEFEKKHTVKLGFMSFFVKATIEALKLIPSINAEIDGDDLLYKNYYDIGVAVGTDQGLVVPVVRDADKMGFADVEQAIGDLAKKAREGKLSMSDLSGGTFSISNGGVYGSLLSTPIINPPQSGILGLHKTEERAVVIDGKIEIRPMMYIALSYDHRIIDGKEGVSFLVKIKNLIENPEKLLLNL

SEQ ID NO: 26980 - protein, 333 aa, Anabaena variabilis ATCC 29413
MAATDFKDYYAILGVSKTATPEEIKQAFRKLARKYHPDVNPGNKQAEASFKEVNEAYEVLSDAEKRQKYDQFGQYWRQVGEGFPGGGAGVDMGGVDFSQYGNFDEFINELLGRFGGAAPRGGRQGYSYRTSGGRPGGGFGGFNDFGFQDVGTAGGGQDAEATISLTFAEAFAGVQKRFNLGNETIDVRIPAGTKPGTRLRVRGKGQFNPMTQQRGDLYLKVEFQPHSFFQIEGDNLACEIPITPDEAALGASIDVPTPDGSVNVKLPAGVRSGQSLRLRGKGWPIAKGGRGDQFVKVAIVPPKDMSQQEREYYEKIRAIRSYNPRSHLQQVKL

SEQ ID NO: 26981 - protein, 168 aa, Ralstonia solanacearum
MTTMMIPVTDLCDAHEDQLASGAVRVLAPVFRSFGARAAFAGPAATLKVFEDNGLVRAMLEQPGEGRVLVVDGGGSLRCALVGGNLAKLAEDNGWEGVLVNGCVRDTRELAACNVGVHALAAHPRKSFKKNQGERDIGVQMPGAYIHPGEWIYGDEDGVLVSRERLHD

SEQ ID NO: 26982 - protein, 365 aa, Kazachstania exigua
MAQTTKHIVVLPGDHVGQEITEEAIKVLNAISSVRPNVNFDFQHHLIGGAAIDATGVPLPDEALEASKKADAVLLGAVGGPKWGTGSVRPEQGLLKIRKELQLYANLRPCNFASDSLLDLSPLKPEIVKGTDICIVRELVGGIYFGERKEDEGDGVAWDSEKYSVSEVQRITRMAGFLALQHNPPLPVWSLDKANVLASSRLWRKTVEETIKNEFPTLTVQHQLIDSAAMILVKNPTHLNGVVIANNMFGDIISDEASVIPGSLGLLPSASLASLPDTNTAFGLYEPCHGSAPDLPKGKVNPVATILSVAMMLKLSLNMTEEGIAVEKAVKQVLDSGVRTADLRGSNSTSEVGDAIAKAVKEILA

SEQ ID NO: 26983 - protein, 165 aa, Mycobacterium sp. KMS
MTESYLLDIELNTLDGTSTSLRELADGAVLVVNVASKCGLTPQYSALEKLAQDYGDRGLTVIGVPCNQFMGQEPGTAEEIQTFCSTTYGVTFPLLAKTDVNGADRHPLYAELTQTPDAGGEAGDVQWNFEKFLLAPGGEVVNRFRPRTEPDAPEVISAIEAVLPK

SEQ ID NO: 26984 - protein, 222 aa, Citrus sinensis
MNPSPSVTELQVENVTFTPSVQPPGSTKSHFLGGAGERGLEIEGKFVKFTAIGVYLEDDAVPLLAGKWKGKTAEELTESVEFFRDVVTGPFEKFMKVTMILPLTGAQYSEKVAENCIAIWKFFGIYTDAEAKAIEKFTEVFKDEIFPPGSSILFTQSPGSLTISFSKDGSIPKDGVAVIESNLLSEAVLESMIGKNGVSPAAKKSLAERLSALLNVTSDKMK

SEQ ID NO: 26985 - protein, 257 aa, Pseudomonas putida KT2440
MAFETILLDIHGKVGLITLNRPQALNALNAQIVGEINQALDQLERDPNIGCVVLTGSAKAFAAGADIKEMAELQYPQIYVDDLFSDADRIANRRKPIIAAVSGFALGGGCELAMMCDFILAADNAKFGQPEINLGVLPGMGGTQRLTRAVGKAKAMELCLTGRLMGAEEAERAGLVARIVPQAELVEEALKVAATIASKSIPVSMMVKESVNRAFEVTLSEGVRFERRVFHAAFSTEDQKEGMAAFIAKREAQFKDR

SEQ ID NO: 26986 - protein, 405 aa, Arabidopsis thaliana
MASIRRTLSPMYHDRSHENGGSHKGFTIGGSSSKHNSSQFLSYLTKLLGVTSDPKSSRRGPWRRPFYQFLVFFLLGFVLGLTPFGKMEDVNGSDRFSFEIKQPYVEERLENRKREEAAVDAVSFVAETENGKKEVNFVPKKLLIVVTPTYNRAMQAYYLNRVAQTLRLVESPVLWIVVEGNVASFETSEILRKTGVMYRHLVCKRNMTSIKDRGVHQRNTALEHIELHKLDGIVYFADDDNIYSLELFQSLRQISRFGTWPVAMLAQSKNKAILEGPVCNGSQVIGWHTNEKSKRLRRFHVDMSGFAFNSTILWDPKRWRRPFSHPTRQLDTVKEGFQETSFIEQVVADESEMEGVPPACSSILNWHLHLDALDVSTYPMCCAHYWIYIKEAYEEWKKTSEGSLG

SEQ ID NO: 26987 - protein, 701 aa, Idiomarina loihiensis L2TR
MYLFEGLKAQVSEYLPSEQVERIRDAFVVANEAHSSQKRSSGEPYITHPVAVASLLADMRLDCETLMAALLHDVIEDTETSREDLAERFGATVASLVEGVSKLDKLQFNSKEEAQAENYRKMIMAMVQDIRVILIKLADRTHNMRTIQHLRPDKRRRIARETLEIYAPLAHRLGMHDIKNELEQLGFWALYPWRGKLLESEVKRARGNRREFTERVQSEISSRLDGNNIQARVSGREKHLHSIYRKMQAKEVKFEQVMDIYAFRVIVDSVDTCYRVLGALHNLYKPIETRFKDYIAIPKSNGYQSLHTSLKGPHGVPVEIQIRTEEMDLMADRGVAAHWMYKQSDDSSTTAQVRARKWMQSLLELQQSAGNSFEFIESVKSDLFPDEIYVFSPDGRITELPQGATAVDFAYAVHTDVGNTCIGARVNHRTYSLSKPLETGQTVEIKTAPNSRPNIAWLNFVVTGKARAKIRQYLKSQEADEAQQLGERLLRSALGQVSYDEIPEAEFKRVLQETKIDSRENLLKQIGLGNMMSVAIAKRLLGDLQPIKDDNASQKSLSIKGAEGLLVSFAKCCRPIPGDDIIAHVSPGKGLVIHRRECKNVRGHEDDPGRYFPVEWDNKPEAEFISEIRIEIVNNQGVLAKLTSAIATTGCNIDGLQTEEIDANIYFIDVALTIKNRKHLADVIRHIRKMPDVQRVTRLRK

SEQ ID NO: 26988 - protein, 317 aa, Yarrowia lipolytica CLIB122
MSRWYFTELRQAVRNLWTPQPHYTESEYPDLTSKTFVITGGHSGVGLAATQLLIDKGAKVVLVGRSREQAKHVLDELPEGTYDFAEADLADLSTIRSAGDYIVNQYPEIHGVILNAGIAFKPYSLTPQGHEYQWGTNVVGHHALMKCLDPAVIKTAHSSAPGSVRIVWVSSSAVIISNVPGGINFDDMSYKESQPSALQLYSQSKIGNAYQAYLWSKNHPDSGVVSVSVDPGNLKSNIGRHTPKTMTRAFEYLLYPSKYGAYTELAALLAPGVEDGDHLIPWGLKGHLRNDVDEGRRGDKGEELWKILEENVKQVGM

SEQ ID NO: 26989 - protein, 276 aa, Saccharophagus degradans 2-40
MRDLHSAIYTGSVFHKRTSPKLHMFKYNVFMVYLDLNELDEFFSLSRWWSHINWALARFKRSDFHGDKKQSLQSAVKHTVEQQLGFKPAGPVRMLANLRYFGYIMNPLVVYYCFDKQGENLEAIVAEVNNTPWNEKHPYVLDCRKSALTIADTTADEAKRHAHQFEKAFTVSPFNPVNMTYQWQSSVPAKQLSVHIQNILAGQQVFEASLMLTREEATARNLRKCLIQYPFFTVKVITAIYWQALKLFVKGVPFLGKNAMYQGNTTLKSEISQKVK

SEQ ID NO: 26990 - protein, 495 aa, Rhodospirillum rubrum ATCC 11170
MPEGTTRIAALDIVREAGLLKDKAYIDGAWVGADDGGDFPVLDPATGREIGRVPNMGAAETRRAIDAAAAAWPAWRARTAKDRAAVLRRWYGLIMDNQEALAVLMTAEQGKPLGEARGEIAYGASFVEWFAEEGKRLYGEVVPAHGTDKRILTLREPIGVVAAITPWNFPSAMITRKVAPALAAGCPVVLKPAEDTPLSALALVELAERAGLPKGLINVVTTHEAKAVGGEMTANPIVRKLSFTGSTEVGKILMAQCAGTVKKVSLELGGNAPFIVFDDADLEAAVAGAIASKYRNAGQTCVCANRLYVQEGIYEAFTEKLKAKVEAMRVGPALEGDVQQGPLINKKGLDKVDGLVRDALDKGATAVLGGKVHALGGTFYEPTILTGVTAAMRMATEEIFGPVAPLYRFSTEAEAIALANATRFGLAAYFYTRDIGRVWRVAEGLEYGIVGINEGIISTESAPFGGVKESGIGREGSRHGIDDFVEIKYLCMGGI

SEQ ID NO: 26991 - protein, 655 aa, Idiomarina baltica OS145
MKETLSVPNPEQIGNQNFAELLAAGNSVCLFVWQDSELWPVRYVSDNVESIFGYNKQQFIDREVHFKFLIHEDDLPRVNEEVKRLKSGETGFRITHNDYRIKHKNGRHVWVSDTTIIKMDTDDGVPLLFGYLIDITERKELEIKLETERNRLQLLLDATRLGTWEWNPQSNLTSFNDRWAQIFGWSREEIEQSPYSWSSRLHPDDYDRVWRAVKDHLDGITPFYESQHRIRHRDGHYVYVLDRGRVIERDEHGKATRYAGTVTDVTEQKQAEINARRAASAKNVFLANMSHEVRTPLHGILGLVSVLENTALDTHQHQLLMTVKESGDHLLQMLNDLLDLTRSEEGQLKLNKDVLELARILQHIESMYRAPIEEKGVKFIIHHSQVLPERIFSDRARLIQILTNLLNNAVKFTEQGTIMLSIDWSVDPATTTQTQAQGELLIKVRDTGAGIRDTQRIWQLFEQEHQGLSKKQSGSGLGLAIVRNLVQLLDGEIEVDSEPNRGTCFSLRLPMYAVYSDDVNHEALDKPKLPTLVPRRILIVDDNPINQLIVSEMLTSLDQHVTKVSSGHEAVEMLKQNTVDVVFMDLHMPTMDGIETTLKIRDLPIHQPHIVALTANAYPETRTHALRSGMDDYLTKPFVKADLARILNRLDKVKN

SEQ ID NO: 26992 - protein, 343 aa, Mesorhizobium loti MAFF303099
MAEFKKPEISEMRPKITVIGVGGGGGNAINNMIAEQLQGTEFIAANTDAQALTMSKATRLIQLGAHVTEGLGAGSLPEIGRAAAEESLDEIMDHLAGTHMCFVTAGMGGGTGTGAAPVIAQAARKAGILTVGVVTKPFTFEGRRRMQMAEEGIERLREAADTVIVIPNQNLFRIADAKTTFADAFVIADRVLYSGVSCITDLIVKEGLINLDFADVKSVMRGMGRAMMGTGEASGESRAMKAAEAAIANPLLDEVSMKGAKGVLVSISGGRDMTLFEVDEAATRIREEVYEDADIIVGAIFDKSMEGRFRVSVVATGLDRAIGDADAGIAHDHSMPSAARILQ

SEQ ID NO: 26993 - protein, 583 aa, Lycopersicon esculentum
MDYSSNKSSRWALPVILVCFFVILLSNNVVFASHKVFIHLQSQNAVNVHTVHRTGYHFQPEKHWINDPNAPMYFNGVYHLFYQYNPNGSVWGNIVWAHSVSKDLINWINLEPAIYPSKPFDQFGTWSGSATILPGNKPVILYTGIIDANQTQVQNYAIPANLSDPYLREWIKPDNNPLIIADESINKTKFRDPTTAWMGKDGHWRIVMGSLRKHSRGLAIMYRSKDFMKWVKAKHPLHSTNGTGNWECPDFYPVSSKGTDGLDQYGEEHKYVLKNSMDLTRFEYYTLGKYDTKKDRYVPDPDSVDSLKGLRLDYGNFYASKSFYDPSKNRRVIWGWSNESDIFPEDDNAKGWAGIQLIPRKVWLDPSGKQLVQWPVEELETLRTQKVQLSNKKMNNGEKIEVTGITPAQADVEVTFSFASLDKAESFDPKWNDMYAQDVCGLKGADVQGGLGPFGLATLATENLEENTPVFFRVFKAQQNYKVLLCSDAKRSTLKFNETMYKASFAGFVDVDLADKKLSLRSLIDNSVIETFGAGGKTCITSRVYPTLAINDEAHLFAFNNGTEPITIESLDAWSMGKAKIQY

SEQ ID NO: 26994 - protein, 251 aa, Arabidopsis thaliana
MVNATVARNIAGICGNVISLFLFLSPIPTFITIYKKKKVEEYKADPYLATVLNCALWVFYGLPMVQPDSLLVITINGTGLAIEVVYLAIFFFFSPTSRKVKVGLWLIGEMVFVGIVATCTLLLFHTHNQRSSFVGIFCVIFVSLMYIAPLTIMSKVIKTKSVKYMPFSLSLANFLNGVVWVIYALIKFDLFILIGNGLGTVSGAVQLILYACYYKTTPNDDEDEEDEENLSKVNSQLQLSGNSGQAKRVSA

SEQ ID NO: 26995 - protein, 477 aa, Mesorhizobium loti MAFF303099
MSRQAQAPTIVLFRRDLRMGDNAALAAAAERGVPVVALYILDETTKGLRAMGAASRWWLHHSLAALGDLLRKAGANLFLAHGRTEDAVAKAIDASGANCVFWNRRYDPSEVAVDARLKAALREKGLTALSFDGALLHEPSLLKTGSGGFYKVFTPFWKAMADKVDVRDPIDTPGQIDGWRGELGGLRLDELDLLPSKPDWAYGLRETWTPGEKGAQARLGQFIEHGLANYERQRDYPGQPSTSRLSPHLTFGEITPFQIFAALRRSKSSGTSKFRAEIGWREFSYHLLFHNPDLSGRNFRPEFDAMSWRDDIRALRTWQRGLTGYPIVDAGMRELWRTGWMHNRVRMIVASFLIKDLMIDWRHGEKWFWDTLVDADAANNPASWQWVAGSGADPAPYFRIFNPVLQGEKFDPHGDYVRQHVPEISALPDRYIHRPWEAPAAVLKDKGIVLGKTYPNPIVDHGAARERALIVYQSLKD

SEQ ID NO: 26996 - protein, 477 aa, Thermus thermophilus
MAKEKGLTPQSQDFSEWYLEVIQKAELADYGPVRGTIVVRPYGYAIWENIQQVLDRMFKETGHQNAYFPLFIPMSFLRKEAEHVEGFSPELAVVTHAGGEELEEPLAVRPTSETVIGYMWSKWIRSWRDLPQLLNQWGNVVRWEMRTRPFLRTSEFLWQEGHTAHATREEAEEEVRRMLSIYARLAREYAAIPVIEGLKTEKEKFAGAVYTTTIEALMKDGKALQAGTSHYLGENFARAFDIKFQDRDLQVKYVHTTSWGLSWRFIGAIIMTHGDDRGLVLPPRLAPIQVVIVPIYKDESRERVLEAAQGLRQALLAQGLRVHLDDRDQHTPGYKFHEWELKGVPFRVELGPKDLEGGQAVLASRLGGKETLPLAALPEALPGKLDAFHEELYRRALAFREDHTRKVDTYEAFKEAVQEGFALAFHCGDKACERLIQEETTATTRCVPFEAEPEEGFCVRCGRPSAYGKRVVFAKAY

SEQ ID NO: 26997 - protein, 280 aa, Thermoanaerobacter tengcongensis MB4
MKRMIIDGKEISNRIKEEVKREIQEFGYKPRLAILMAGDDESSKVYANSKVKACESVGIEAKVYYFSEKEEDKFFDTLEKLNEDKDTHGIMIEMPLPKGFDVDKVYDTINPYKDVDCISNYNMGRLFAGKPLFVPCTPKAIIHILENTGVDLEGKHAVVIGRSNILGKPVAKLLLDKNCTVTVCHSKTKDLAYHTKQADVLVVAAGKMNLVRGDMVKEGVVLIDAGINVHEGKIYGDADFESIKDKASYVTPVPGGVGPVTTAMILKNTLEAFKYAVKSL

SEQ ID NO: 26998 - protein, 324 aa, Coccidioides immitis RS
MDAKEIEVRSKALTKAAGSAEPSSTIISILKDLQNGVRPTEDLLRATKIGITVNRLKTHKHPDVARLASDIVHKWRHEVNKQKTGASPVGSQRSSDSPKQTPNGMATQTSGAEASDKMSKSTVPPDKRSWKADQVNTAHTQNKTRDSCIGLLYDGLCLNSTESPRTVLQKSIEVEAAAYSVFGPETKEQYRTKIRSLYQNLRNKSNPALRVRVLSNEIAPDKFVRMTHDELKSDERREEDRKIEKENMDKAMVAKAERSISKSLQCGKCGQRKVTYTEAQTRSADEPMTLFCTCLACGKSWRHQSIATMTSSHNLESEGVTHVL

SEQ ID NO: 26999 - protein, 481 aa, Candidatus Protochlamydia amoebophila UWE25
MNAELSPFSHESSDYKYGFVTEIETESLPKGLNEETILAISAKKNEPAFLLEFRLKAYQRWLESEEPIWANVNYPKIDYQDITYYSAPKKKPVLNDLSEVDPEIIKTFERLGIPLEEQKRLSNVAVDMVFDSVSIGTTFKKKLEDAGVVLCSISEAMHTHPELIQKYLGSVVPIGDNYFATLNSAVFSDGSFVYIPKGVHCPMELSTYFRINDKESGQFERTLIIAEENSYVSYLEGCTAPAFTNNQLHAAVVELIALDNAQIKYATVQNWYSGNPKTGEGGVFNFVTKRGRCAGVNSKISWTQVEVGAAITWKYPSCILQGDHSVGEFYSVALTNGQMQADTGTKMIHLGKNTKSTIVSKGISADLSHNSYRGLVKVAPRATNARNYTQCDSMLVGDKCSANTFPYIEVGNASSQVEHEASTSKMNEEQLFYFQSRGISKENAVNMIVNGFCKDVIQELPLEFATEAQKLLAIKLENSVG

SEQ ID NO: 27000 - protein, 108 aa, Synechococcus sp. RS9917
MAPAVSDFTDAAFAQEVLQASKPVLVDFWATWCGPCRLMAPLMDWAAATYADRLDVGKLEVDGNPATRDAYRVQGIPTLIIFQNGAELARHEGAIAKPQLQAFLDAHL

SEQ ID NO: 27001 - protein, 167 aa, Brassica napus
MKTIFDLPENLVEDEIFSRLQISSVRSTCRKWNTLCNRIFLGEEAAAKKQFLMMNSSRINLMNFDLSKDDGDPSIEQVSVLDQIQISKVFQCDGLLLCVLEDSSRPLLVWNPYLGQTRWIEPRSSSFHSSYRFSLGYDNNLNHKILRISNEIHPVTSEHVSGFELYD

SEQ ID NO: 27002 - protein, 382 aa, Aspergillus oryzae
MPSPGKPLINVGTIGHTDHGKTTLTAAITAKFGTTCMADDQTDNTLKEIAHVEYETKARRYRHIDWADQAEYTKNMLSGAAQMDGVILVVSAEDGLMPQTREQILVARQAGVSYILAFINKCDMVDDTDQLELVELEVRDLLNSHGFQGDNMPIIKDSARQALEGGLDESDLGERAIVHLVEALDAYIPVSVPAVDRPFLMPVEDVFSVAGRGTIVTGRVERGMIRVGDDVEIVGFGAVVRTTCKGVEIFRKSLDQGRVGETVGVLLRAIRPEDVIRGHVLAKPAQIRMCTDFTAHMYVLRKEEGGRHTPFFNHYQAQFLIRMTEMTGSIMLPEGMVMIVPGDSPSITVKLIAPTAMEEGLRFTIRESGRTVASGVITSILE

SEQ ID NO: 27003 - protein, 441 aa, Candida albicans SC5314
MTRVVVTGMGMVSPLGVGLSRNWKQLIANKSGLISTTTLPDYESAGWDKIPSKVIGKVPHGTISEGHWQVGDHIPASEARRMATFSHYALASTHEALQDARLLTEDNNALNMDTNKVGVAVGSGIGSFEDIYNNSIAYNASGYKKVQPLFIPKLLNNMAAGNISIKYQTKGPLHSVSTACATGLQAIGDGFNFLKMGYGQVMICGGTESSIHPLALAGFARARSVVTDSEFNSNPTKASRPFDKSRNGFVLSEGCGILVLETLSHALERGVTPDQIYGEILGYGVSGDAYHITAPHEDGTGAYNAMNQAIERSGIDPEQIDYVNAHATSTVIGDRAENNAMMRLFNPQKTKVSSTKSSIGHLLGAAGAVESIFTLNAIKTGQIPATLNLDNVGQHEGDEQSQFKFDYVANKSITMDVNYAVCNSFGFGGVNSSLCFAKYHN

SEQ ID NO: 27004 - protein, 510 aa, Gluconobacter oxydans 621H
MTLNLTPTPNSHVELAPRITVIGVGGGGTNAVDNMIASELKGVEFVVANTDAQQLAHSKAERRVQLGPHLTRGLGAGAKPEIGREAAEEAAQEIDRQLEGANLVFITAGMGGGTGTGAAPVIARMARERGVLTVGVVSKPFNFEGRRRTTAAENGIAELQKHVDTLIVIPNQNLFNSATQNTTFREAFRMADNVLNMGVRGITDLMVSPGLINLDFADVKAVMEEMGKAMMGTGEASSEEDAEDRAVLAAERAISNPLLEDASMAGARGLLINITGGEDLTLYEVNAAADRIREEVADDANIIFGALIDEKLNGRVRVSVVATGIDTQPRQDPSAPSAETRQAAAPQTNAGTAAPRESAGTRAAASSFQPGSTYAGGPPRPNFAIDPQQQPAQNTAPQPQQEAPATQPAATETQTPRQENTHQPSPRAGLFSDPSRHAPPLQPEAPRSLFGMVTGAFRSRPPQPQQPPQTTQRTEPSTRDGYPQQAPQQQEQPSGNADDSNLDIPTYLRR

SEQ ID NO: 27005 - protein, 228 aa, Triticum aestivum
  misc_feature (116)..(116): Xaa can be any naturally occurring amino acid
  misc_feature (180)..(180): Xaa can be any naturally occurring amino acid
SVVAAEVRTHLSYLTDPGAQPVNAATATSKQSHPTPHGRSTVELSETIKSSDCCKITREPGPVKGGSTVIAFAQDPDGYMFELIQRGPTPEPLCQVMLRVGDLDRAIMFYEKALGXKLLRKKDVPQYKYTIAMMGYAEEDKTTVLELTYNYGVPEYNKGNAYAQVAIGTDDVYKSAEAVXLVTKELGGKILRQPGPLPGLNTKITFFLDPNGWKVVLVDHADFLKELP

SEQ ID NO: 27006 - protein, 340 aa, Aspergillus oryzae
MSPAAPKYILVTGATGFIGAHVVDNLLARGLTVRAATRSKQKGEQMKAARPQHASRLEFVEIQDFSQIGVFDDIMEGIDGVIHVASPFTYDTKNNEQELIIPAMNGVKSILSASAKQASVKRVVLTSSFASVVDISRKYEGDFTYTGSHWNPLTYEEAIDPATDAVVAYRGSKKFAELEAWKFIEREKPSFDLVTLCPPMTFGPVVHPVNGVAGLNESNAVLWSVASGADPLPTARVSAWIDVRDLAEAHVQALLRSEVGGKRFVPASGEPFSYELAADIIKGRFEWARETVTGNYKSGKKPVQAYKLDGDAVTRELGVEFRSFKETVVDLVGQVKETFA

SEQ ID NO: 27007 - protein, 577 aa, Triticum aestivum
  misc_feature (113)..(113): Xaa can be any naturally occurring amino acid
MAADEAKAKGNAAFSAGRFEEAAGHFGDAIALAPDNHVLFSNRSAAYASLHRYKEALADAERTVALKPDWAKGYSRLGAARLGSGDAAGAVEAYEKGLALDPSNAALKDGLAXAWSAALPRRPASGADAIGKIFQGPDLGSKIAADPTTRAYLDQPDFMQMLRDLQRNPGNLNNYLSDPRMMQVLSLMLNIKVQNQNNDASEPAPAPTPAKSSPPPPQKQPETKPREPEPEPVEMTDEEKERKERKAAAQKEKEAGNAAYKKKDFETAIQHYTKAMELDDEDISYLTNRAAVYLEMGQYDDCIKDCDTAVERGRELRADFKMVSRALTRKGTALAKLAKSSKDYDVAIETFQKALTEHRNPDTLKRLNDAERAKKELEQQEYYDPKIADEEREKGNEFFKQQKYPEAVKHYTEALRRNPKDPKVYSNRAACYTKLGAMPEGLKDAEKCIELDPTFSKGYTRKGAIQFFMKEYDKAMETYQEGLKHDPSNQELLDGVKRCIQQINKANRGELTPEELKERQGKAMQDPEIQNILTDPVMRQVLIDFQENPRAAQEHLKNPGVKQKIQKLVSAGIVQMK

SEQ ID NO: 27008 - protein, 359 aa, Triticum aestivum
  misc_feature (95)..(95): Xaa can be any naturally occurring amino acid
MASDHRLGALKAFDDTKAGVKGLVDAGATAVPAIFHHAPESLNDAPHHHDHQFAIPVIDLAGLATPSGRASAVGAVKAAAETVGFFQVVNHGVPXEAMSAMLAALRCFIEEPAVAKAPYYTRDHGRRVRYQSNFDLFQSPAANWRDTLFMDMAPEPPAPEEIPPACRAIAPEFAGLVQRLGSTLLGLLSEALGLRRGHLEEDAACLEGLSLACHYYPACPEPHLTLGTTKHSDPSFITVLLQDAVGGLQVLVDDDDKQNPAWVDVPAVAGALVVNVGDYLQLLSNDRFKSVEHRVVAKSAGPRVSVACFFGAEGSTRVLAPIVADGGNARYRNTTVDEMARHYRAKGLDGVSSLQHVRI

SEQ ID NO: 27009 - protein, 161 aa, Escherichia coli
MKNKSGNSYYREAVDIHSSLELSFILHKYHLRVDEKKSRNVFSAIRDELILDGDSRQNLATFCQTWIDDEIRELLNLSIDRNMIYKDEYPQMAEPEGRCVRMLSDSWSFPDSRHTLGCSTIGSSEAAMLGRLALKWQWCKKREVQGKSTEPDLRSCANMLA

SEQ ID NO: 27010 - protein, 357 aa, Streptococcus pyogenes MGAS8232
MSGFLEQRLGHCLRQMAEKGLEALLVTHLTNSYYLTGFSGTAATVLITAKRRVLITDSRYTLLAKASVEGFDIIESRTPLKVVAELLGADQIDCLGFEDQVSFSFYQAMQAELSGITLLAQSGFVEHLRLIKDVSEIETIAKACSISDKAFEDALDFIKPGTTTERDLANFLDFRMRQYGASGTSFDIIVASGYRSAMPHGRASDKVIQNKESLTMDFGCYYNHYVSDMTRTIHIGQVTDEEREIYALVFAANKALIAKASAGMTYSDFDGIPRQLITEAGYGSHFTHGIGHGIGLDIHENPFFGKSEQLLQAGMVVTDEPGIYLDNKYGVRIEDDLVITKTGCQVLTLAPKELIVL

SEQ ID NO: 27011 - protein, 319 aa, Eremothecium gossypii
MVHHKVTIIGSGPAAHTAAIYLARAEIKPTLYEGMFANGVAAGGQLTTTTEIENFPGFPDGLTGSDLMERMKAQSVKFGTEVVTETVAKVDLSARPFKLWTEFNEDEEPTTTDAIILATGASAKRLGLPGEETYWQRGISACAVCDGAVPIFRNKPLAVVGGGDSACEEASFLTKYGSKVFMLVRKDHMRASTIMQRRVERNEKIEVLYNTAPVEAKGDGSLLDALRVRDTRTGEESDLPVNGLFYAIGHTPATQLVAGQVDLDESGYVKTVPGSTLTNVPGLFAAGDVQDSRYRQAVTSAGSGCMAALDAEKFLSELE

SEQ ID NO: 27012 - protein, 182 aa, Zea mays
MAAGLAFPVASFQLACVSSHPHPGHRICCAIPSSSSRRIVKSSPLRATTVLSRERRGTGRGASVVCAVQGQDTTIQVPDVTKSTWQSLVIESELPVLVEFSAAWCGPCKMIEPVVGKLSKDYEGKLKCYKLNTDESPDIASQYGVRSIPTTMIFKDGEKKDSVIGAVPESTLVTCIEKFVES

SEQ ID NO: 27013 - protein, 430 aa, Escherichia coli K12
MMNTEGNNGNKPLGLWNVVSIGIGAMVGAGIFALLGQAALLMEASTWVAFAFGGIVAMFSGYAYARLGASYPSNGGIIDFFRRGLGNGVFSLALSLLYLLTLAVSIAMVARAFGAYAVQFLHEGSQEEHLILLYALGIIAVMTLFNSLSNHAVGRLEVILVGIKMMILLLLIIAGVWSLQPAHISVSAPPSSGAFFSCIGITFLAYAGFGMMANAADKVKDPQVIMPRAFLVAIGVTTLLYISLALVLLSDVSALELEKYADTAVAQAASPLLGHVGYVIVVIGALLATASAINANLFAVFNIMDNMGSERELPKLMNKSLWRQSTWGNIIVVVLIMLMTAALNLGSLASVASATFLICYLAVFVVAIRLRHDIHASLPILIVGTLVMLLVIVGFIYSLWSQGSRALIWIIGSLLLSLIVAMVMKRNKTV

SEQ ID NO: 27014 - protein, 95 aa, Shewanella sp. ANA-3
MQINLSGHHIEITESLRAYVEEKFSKLERHFEQINNVHVVLNVEKMQQIAEARINLTGGEVFATSEHADMYAAIDVLIDKLDRQVIKHKEKLTKH

SEQ ID NO: 27015 - protein, 964 aa, Saccharophagus degradans 2-40
MSHGTSLDELFNSRDFIGRHIGPNADQTRAMLDAMGLDSIDQLIDLTVPASIRGEETRALAAPVNEQQALAELKNIAGNNQRFKSYIGMGYHPTYVPPVILRNVLENPGWYTAYTPYQPEIAQGRLEGLLNFQQMIIELTGMDMANASMLDEATAAAEAMAMAKRVARKNKSNTFFADKHCHPQTLAVLQTRASHFGFELVIGDITQDLNKQEVFGAITQYPGTSGEVKDLRPIVNQAHEQDALLIVAADILSLVLLESPGAMGADIVVGSNQRFGIPMGFGGPHAAFFGFREKYKRATPGRIIGVSVDTRGKRALRMAMQTREQHIRREKANSNICTSQVLLAVMSVFYAMYHGSAGVTRIAQRVHTLTKMLAQGLTAQGHKLAFDNYFDTLCVIVNDQQQGLFDRAQQAGVNLRKLDKNALTISLNECTSLEDIHQLLDIFSLGKHSQDVKSLETKALAAEVIPASCRREGPALNHPVFEQYHSETEMLRYLKRLESKDIALNHAMIPLGSCTMKLNATAEMIPVTWPEFGELHPFAPMEQAAGYSTLFTQLQDMLKACTGYDAISLQPNAGSQGEYAGLVAIRKYFEHLGQTERNICLIPASAHGTNPASAQMVEMKVVVVACDNLGNVDLNDLKAKVAQYGETIAALMVTYPSTHGVFEEEITAICDLIHSVGAQVYIDGANMNALVGLAAPGKFGGDVSHLNLHKTFCIPHGGGGPGMGPIGVKSHLAPFLAGHPVQPVPNTLVENGTISAAPWGSASILTISWMYIRMMGAEGMKRATEFAILNANYIAHRLQDHYPILYKGKNGYIAHECLLDLRPLKESSGITEEDIAKRLMDFGFHAPTMSFPVAGTLMIEPTESESQAELDRFCDAMIKIRQEASLVESGELPRDNNPLVNAPHTLDDALDETWTRPYTRDEATRPLPYLHAHKIWPTVNRIDNVYGDRNLICSCPSIESYTEE

SEQ ID NO: 27016 - protein, 416 aa, Triticum aestivum
MMEGGKFPGIIGAVSGQDGGVNFCDMAYYQKLGEGSTMSIDSLNSMQTSMHGGSIMSVDNSSVGSTDSRTGMLNHPSHRGPVAVVSYSVGNSIFRPGRVSHALSDDALAQALMDTRFPTETLKDYEEWTIDLGKLHMGLPFAQGAFGKLYRGTYNGMDVAIKLLERPEADPAQAQLLEQQFVQEVMMLAELRHPNIVKFVGACRKPIVWCIVTGYAKGGSVRNFLNRRQNRSVPLKLAVKQALDVARGMAYVHGLGFIHRDLKSDNLLISGDKSIKIADFGVARIEVKTEGMTPETGTYRWMAPEMIQHRPYNQKVDVYSFGIVLWELISGTLPFPNMTAVQAAFAVVNKGVRPAIPHDCLPALGEIMTRCWDANPNVRPPFTDVVRMLERVEMEVLNNVRKARFRCCIPQPMTLD

SEQ ID NO: 27017 - protein, 126 aa, Zea mays
MAASMISSIALAVAPEGLPPVVRRACCFAYVCSKKKIKTDKPYGIGGGLTGDLTANGRKDKGKGVDQVVDKYGANVGGYSPSYNEDDWSATWDFYGGGTTGLTIWAVTLAGILGGSALRGYNTSYL

SEQ ID NO: 27018 - protein, 272 aa, Glycine max
  misc_feature (46)..(46): Xaa can be any naturally occurring amino acid
SSPLALAQAHETRDKLRASHPDLAEEGAIEIVIIKTTGDKILTQPXDVPTYLPDKTILPCNLPREDVRDAFISLTAASLADLPPASVIGTASLRRKSQILHRYPSLNVQENFRGNVQTRLRKLNEGVVQATLLALAGLKRLSMTENVTSILSIDDMLPAVAQGAIGIACRSNDDKMAEYLASLNHEETRLAVSCERAFLEKLEGSCRTPIAGYASRNEDGNCLFRGLVASPDGIRVLETSRIGPYAFEDMIKMGKDAGEELLSRAGPGFFSR

SEQ ID NO: 27019 - protein, 949 aa, Silicibacter sp. TM1040
MPFEPTDYLPYDFANRRHIGPSPEEMAEMLKVVGADSLDALIDETVPQSIRQKAALDFGRPMSERELLFHMREVAGKNKVMTSLIGQGYHGTVTPPAIQRNILENPAWYTAYTPYQPEISQGRLEALLNFQTMISDLTGLEIANASLLDEATACAEAMTMAERVSKSKAKAFFVDRDCHPQNIAVVKTRAEPLGIEVIVGNPDKMDPEAVFGALFQYPGTYGHVRDFTDHIAKLHEHKGIAVVSADPMSLTLLKEPGAMGADIAVGSTQRFGVPVGAGGPHAAYMATKDAYKRNMPGRIVGVSVDAHGNKAYRLSLQTREQHIRREKATSNVCTAQALLAVMASMYAVFHGPKGLKAIAQRIHRKAVRLAKGLEEAGFKVDPQAFFDTITVDVGPLQAAVMKSAVDEGINLRRVGETRVGISVDETTRPETIEAVWRAFGIVRADDDFTPDYRVPANMHRKSDYLTHPIFHMNRAETEMMRYMRRLADRDLALDRAMIPLGSCTMKLNAAAEMMPLSWPEFSTIHPFAPADQQAGYGEMVEDLSKKLCDITGYDAISMQPNSGAQGEYAGLLTIAAYHKARGEGHRNICLIPMSAHGTNPASAQMVGWKVVVVKSDERGDIDLEDFRAKAEKHADNLAGCMITYPSTHGVFEETVHEVCKITHDAGGQVYIDGANMNAMVGLSRPGDLGGDVSHLNLHKTFAIPHGGGGPGMGPIGVKAHLVEHLPGHPETGGSEGPVSAAPLGSASILTISWAYCLMMGGAGLTQATKVAILSANYLAKRLEGAFDVLYKGPTGRVAHECILDTRPFADSADVTVDDVAKRLMDSGFHAPTMSWPVAGTLMVEPTESETKAELDRFVDAMLSIRDEIKAVESGEMPRENNALKNAPHTMEDLVKDWDRPYSREQGCFPPGAFRVDKYWPPVNRVDNVYGDRHLICTCPPLEDYAEAAE

SEQ ID NO: 27020 - protein, 342 aa, Chlamydomonas incerta
AVSSKSGVRAKAARAVVDVRAEKKIRVAINGFGRIGRNFLRCWHGRQNTLLDVVAINDSGGVKQASHLLKYDSTLGTFAADVKIVDDSHISVDGKQIKIVSSRDPLQLPWKEMDIDLVIEGTGVFIDKVGAGKHIQAGAHKVLITAPAKDKDIPTFVVGVNDADYKHEYPIISNASCTTNCLAPFVKVLEQKFGIVKGTMTTTHSYTGDQRLLDASHRDLRRARAAALNIVPTTTGAAKAVALVLPSLKGKLNGIALRVPTPTVSVVDLVVQVEKKTFAEEVNAAFREAANGPMKGVLHVEDAPLVSIDFKCTDQSTSIDASLTMVMGDDMVKVVAWYDNEW

SEQ ID NO: 27021 - protein, 174 aa, Xanthomonas campestris pv. campestris str. ATCC 33913
MPLTDLQHVPGATAAPADTQGFVFNHTMLRVKDAPRSLDFYTRVLGFRLLDARDFAEAKFSLYFLALLPEGTAVPDDDAARRLWMAGIPGVLELTHNHGTETQDGAVYHDGNSDPRGFGHICISVPDIHAACARFDSLGVPYQKRLEDGRMKHLAFIKDPDGYWVEIISNTPLA

SEQ ID NO: 27022 - protein, 691 aa, Aspergillus nidulans FGSC A4
MAEHYYYGSQSMSSSQPISSLQAFLLPSLCTAFLLCSFPAAVSPTDRVHNHAMPMPFKPLSLPDRQWPNKVIDKPPRWLATDLRDGNQSLPDPMDGEQKLRFFKMLVEIGYKEIEVSFPSASQIDFDFTRSLVETPGLTPDDVWLQVLSPCREDLIRRTVDSLKGAKKAILHIYLATSPCFRRIVFNMDKQQSLEMAVRCTKYARSITKDDPSTAGTEWQLEFSPETFSDTEPEFAAEVCEAVKAAWEPTAERPIIFNLPATVEMTTPNVFADQIEYFCRNVSEREKYVVSVHPHNDRGCAIAAAELAQMAGAQRVEGTLFGNGERTGNVDLVTLALNLYTQGISPKVDFSDINAVIKVVEESNKIPVNERWPYGGQLVVCAFSGSHQDAIKKGFKLREDAGASDDIRWEIPYLPLDPQDIGRTYEAVIRVNSQSGKGGAAWVILRTLELDLPRALQVEFSKIVQKRTEEANRELRPAEIVALFEDAYHLKTNPRFNLVDYNITTDRSQSPAPPEPGKALNTKNLKRRFTGIIEIDGLQHAITGVGNGALSSLANALATLGIDLDVIDYKEHSIGQGAGKGRDVKAATYIHCSAAGSQQKVWGVGIHQDVVQASLIALLSAASSFLTSRAGSPAPFRPIRSNTLTDEDLQALEQLASSNGAGVTVANVSEGQSDSKPTVDLEALTKKAASQ

SEQ ID NO: 27023 - protein, 140 aa, Triticum aestivum
  misc_feature (88)..(88): Xaa can be any naturally occurring amino acid
MDPSYSRRSKSEDEFALFVLPTLEEPSHSSRRPMHTSILTGARRVNEILNGHEDLCKRHFRMEIDIFQALVQKLRENDRLVDGRDVSXEEQVAIFLYALSKNATNDTLADWFQHSGQTISYYFGEVLNAITELYSVYIRP

SEQ ID NO: 27024 - protein, 402 aa, Xanthomonas campestris pv. campestris str. ATCC 33913
MRRVVVTGMGINSCLGNDLDTVSSALRESRSGITALPDHAEAGLRSQVGGAVDIDLDGLIDRKLKRFMGDASAYAYLAMRDAIADAGLSPEQVSDLRTGVIAGSGGGSSQWQVETADLLRARGVRKVGPYMVPRTMCSAVSASLATAFKIRGLSYSLSAACATSAHCIGAAADLIRHGEQDVMFAGGGEELHWTMSVMFDAMGALSTGFNDRPAVASRPYDAQRDGFVIGSGGGMLVLEDYDHAIARGARIHAELLGYGVSSDGADMVAPSGEGAVRCMHMAMQGLDRPIDYLNTHGTSTPLGDATELGAVREVFGDNVPPLSSTKALSGHSLGAASVHEAIYSMLMLRDGFMAGSAHIDELDPRAEGFPILRATREATLNTVMSNSFGFGGTNGVLVFGRV

SEQ ID NO: 27025 - protein, 156 aa, Haemophilus influenzae
NRANTPVLVDGKDVMPEVNAVLAKMKDFCQRIISGEWKGYTGKAITDVVNIGIGGSDLGPYMVTEALRPYKNHLNMHFVSNVDGTHIAETLKKVNPETTLFLVASKTFTTQETMTNAQSARDWLLKATKDESAVAKHFAALSTNAKDVEKFGIDTN

SEQ ID NO: 27026 - protein, 403 aa, Mycobacterium tuberculosis
QVQEDTKVAKAKFQRTKPHVNIGTIGHVDHGKTTLTAAITKVLHDKFPDLNETKAFDQIDNAPEERQRGITINIAHVEYQTDKRHYAHVDAPGHADYIKNMITGAAQMDGAILVVAATDGPMPQTREHVLLARQVGVPYILVALNKADAVDDEELLELVEMEVRELLAAQEFDEDAPVVRVSALKALEGDAKWVASVEELMNAVDESIPDPVRETDKPFLMPVEDVFTITGRGTVVTGRVERGVINVNEEVEIVGIRPSTTKTTVTGVEMFRKLLDQGQAGDNVGLLLRGVKREDVERGQVVTKPGTTTPHTEFEGQVYILSKDEGGRHTPFFNNYRPQFYFRTTDVTGVVTLPEGTEMVMPGDNTNISVKLIQPVAMDEGLRFAIREGGRTVGAGRVTKIIK

SEQ ID NO: 27027 - protein, 496 aa, Coccidioides immitis RS
MKAPKSKTKAPKADDKVLSKVKNGGVTKPSTTPKAKSKEIAKKVASKAEKKLEKKKKAPTPSESSESDSDEEMKSVSSSSESESESESEVNVPKAAADSESESASGSESESESSESSSEEDEKPVQKSGMAKVAESESESESESEEESESEEEQKVAKKNVKASSSESESDSASQSESESESESEEAPAKAKKATKEESASEESEEESEEESGSEEESSEESSSEEAEEPAKTQKRKAESDETPVAKKVKKETADEASAESSNLFVGNLSWNVDEEWLRSEFESFGELSGVRIVTDRDSGRSRGFGYVEFTNAEDASKAFKAKKDAEIDGRTINLDFANARQNAGGARDRAQSRAKSFGDQTSPESDTLFIGNISFNADENAVQETFSSHGSILGIRLPTDPESGRPKGFGYVQFSSVDEARSAFNALQGTELAGRAMRLDFSTPRQNSGGSFGGRGGRGGRGGGRGGARGGGRGGRGGFASRGGFGDFSGKKTTF

SEQ ID NO: 27028 - protein, 199 aa, Prochlorococcus marinus str. MIT 9313
MSIFVGNLPFRAEQEDVIELFAPFGEVANCALPLERDTGRKRGFAFVEMADESAEPAAIEALQGAEMMGRPLRINKAEPRGSAPRRGGGYGGGGGGGGGGYGGGGGGGYGGGGGGYGGGGGGYGGGGYGGGGYGGGGYGGGGGGGDRGSGARGWEDRSYGGASPETSSYDEGRTRRRRGGAAPEGEGGDSYSGYGGAEG

SEQ ID NO: 27029 - protein, 202 aa, Oryza sativa
  misc_feature (150)..(150): Xaa can be any naturally occurring amino acid
  misc_feature (154)..(154): Xaa can be any naturally occurring amino acid
MQYVPLRSKYKIGTRQSELALVQTESVIKQLHQFYPDIEYEVIKIKTIGDKNLLDPLANIGDKGLFTKELEVELDRRSIDFVVHSLKDVPSTILPPNMVIGAILERVDPRDAAVIAPWHNKKSLSELPDGSVIGTSSTRRIAQLKLKYPXISYXNIRGNMNTRWEKLNNRELGYDAMIAAVAGLYRLNWTERISENIRTRSS

SEQ ID NO: 27030 - protein, 554 aa, Salmonella enterica subsp. enterica serovar Typhi str. CT18
MCSIFGVFDIKTDAAELRKKALELSRLMRHRGPDWSGIYACDNAILAHERLSIVDVNAGAQPLYNAKKTHVLAVNGEIYNHQTLRAEYGDRYAFQTGSDCEVILALYQEKGPDFLDDLQGMFAFALYDSEKDAYLIGRDHIGIIPLYMGYDEFGNFYVASEMKALTPVCRTIKEFPAGSYLWSKDGEIRQYYQRDWFDYDAVKDNVTDKNALRQALEESVKSHLMSDVPYGVLLSGGLDSSVISAITKKFAARRVEDQERSEAWWPQLHSFAVGLEGSPDLKAAQEVANHLGTVHHEIHFTVQEGLDAIRDVIYHIETYDVTTIRASTPMYLMSRKIKAMGIKMVLSGEGSDEVFGGYLYFHKAPNAKELHEETVRKLQALHMYDCTRANKAMSAWGVEARVPFLDKKFLDVAMRINPQDKMCGNGKMEKHVLRECFESYLPASVAWRQKEQFSDGVGYSWIDTLKEVAAKQISDQQLETARFRFPYNTPSSKEAYLYREIFEELFPVPSAAECVPGGPSVACSSAKAIEWDEAFKTMDDPSGRAVGVHQSAYQ

SEQ ID NO: 27031 - protein, 399 aa, Ralstonia solanacearum
MGSHFCRRAAANALAGGPLQLPAMSIATVEEIIAEIRAGRMVILVDEEDRENEGDLILAADFVTPEAINFMARFGRGLICLTLTAERCRQLDLPLMVTRNGTPHGTNFTVSIEAAEGVTTGISAADRARTVQVAVARSASPDDLVQPGHIFPLMAQPGGVLMRAGHTEAGCDLASLAGLTPASVICEIMKDDGTMARLPDLVEFAREHGLKIGTIADLIQYRSRTESIVERIGERNMETQFGTFRAVAFRDHAAGRAHLALVKGTPTPATETLVRVHEPLSVLDLLECQRTTHSWSVPAALRAVQAAPTGVVVLLNCGDSPERLFTQFSALDAPQERPRSKPDPRIYGIGAQILKDVGVGKMRVLASPLKLPSMAGYDLEVTAYQSMADTPQATTAATH

SEQ ID NO: 27032 - protein, 464 aa, Oenococcus oeni PSU-1
MKQAIETIPANKKLKYIKKIAILATFGAFLFGYDTGVINGSLSFMARGDELNLSPFMEGLVTSSLLFGAAIGAVIWGRLADRYGRKSILRVLAIIFFFSTLGSSIAPNSYVLIIGRLFMGLAVGGVAGIVPVYLGEMAPSNIRGSLVCQDQMMIVLGQLLAYVMNGILGNAFNVSYIWRFMIALAAIPAIILWIGTYIIPETPRWLAIEKKSDQALVVLRNTRDDKTADQDLKHIEQNIKKESSRGHASLHDFHTPWIKRILIIGITIAVMQQLAGINIMMYYGTTILEKTGFSTKAALIANIGNGVLSVLGTTIYMFFLANRIKRRLAWIGGFCFTTTILAAIAILSHYAAGLSILPYIVITCTMLFVFVDQMTLGPVCWLLLSEIFPLHVRGLGVGIATFGMWIMDFGVGFFFPILIEIFGLSNTFWIFAVIGVICIIISFFIIPETSGRSLEQLEDSFRRS

SEQ ID NO: 27033 - protein, 306 aa, Escherichia coli
MILKKYILHYFICHCITICRSRSKTSLSRYCMTILNKNWPVEFPFPTVIRTVVCSDLDETYIPSDSDKKKLGGVVQLESYITSHAEKKGILAGWITGTNLDSAWRKSRGYISRSPHFICCSLGTEFYWVKNGRLIPSETWAERISRSGYSRQNVNCLVKILMEKEIPLLKQPEDYQGPFKVSYYYPESPSIASDFATIQELADERRIRVVFTRCNPAAGDPPGCYDVEFIPLCCGKDQAVSFLMEETGLPKEAIIAFGDSANDFAMFAQAGSGYLVGNADPFAVSQYGNRLDSAYCHGILSVLKEL

SEQ ID NO: 27034 - protein, 458 aa, Oenococcus oeni PSU-1
MKAHHLNIFFIFVFGALGGLLFGFDTGIISGASSLIESDFSLNIEQTGFITSSVLIGSSIGALSVGSLSDKFGRKKLLILASVLFLIGSGLSMSAVGFVSMVIARIILGFAVGSASALTPAYLAELADAPHRGSLGSMFQLMITLGILLAYVSNLGFLGHNLLGLRDWRWMLGSALIPALILFIGSIVLPESPRYLVEKGRIDEARSVLHYLREKTNEDPDKELADIKKVSNQPKGGFKELFTFARPAVIVAIGLMLLQQLVGINSVIYFLPQVFIKGFGFQAGNAIWISVGIGVVNFLCTVLAYNIMDKFNRRTILLFGSIVMSVSIGILSVLNFTLSIKQAAIPTMILIAIYIFGFAVSWGPICWLMIGEIFPLNIRGVGTSIGSAANWIANFIVSQFFLVLLATFHYNVGGPFAIFTFFAILSIFFVIYLVPETRGKSLEQIEMDMRRKPLPKKN

SEQ ID NO: 27035 - protein, 376 aa, Haemophilus somnus 2336
MGRHCAGDFSRIFWLIHFSRTSQSYIGTQSIAGIGSSNQRDSTPNRSTDEREIEGYRMKKIGIILANLGTPDEPTPKALSRYLWQFLTDPRVVDLPKWRWYPLLKSIILPRRSARVAKIYQTVWTDKGSPLLVISNQQKQALQSHFDEHRINATVEIAMTYGNPSMESAVEKLLKKHVNEIILLPLFPQYSSTTTGAVFDAFAQALKKQRNIVPFQFIHSYHLHEDYIEALVNSINTKHKPDEYLIFSFHGIPLRYENEGDYYRKHCHETVLAVVERLGLRENQWQMTFQSRFGKEEWLQPYTDKVLENIYQRNIQKVAVVCPGFSADCLETIEEINEENRRIFLSHGGASFQYIPALNAEMQHIEMMYKLISSRL

SEQ ID NO: 27036 - protein, 878 aa, Yersinia pseudotuberculosis IP 32953
MNEQYSAMRSNVSMLGTLLGDTIKEALGEHILDRVETIRKLSKSSRAGNEASRQELLTTLQNLSNDELLPVARAFSQFLNLTNTAEQYHSISPHGEAASNPEALAQLFTRLKDKKLSDQDMRSAVDDLSIELVLTAHPTEITRRTLIHKLVEVNTCLSQLDHNDLADYERNKIMRRLRQLVAQSWHTDEIRKLRPSPVDEAKWGFAVVENSLWEGVPAFLREFNEQLENSLDYRLPVEAVPIRFTSWMGGDRDGNPNVTAEITRHVLLLSRWKATDLFLRDIQVLVSELSMSECTPELRELAGGEEVLEPYRQLMKNVRTQLTNTQAYLEARLKGERVLPPHDLLVSNDQLWEPLYACYQSLKACGMEIIANGQLLDTLRRVRCFGVPLVRIDVRQESTRHTDAIAELTRYLGLGDYESWSESDKQAFLVRELNSKRPLVPLKWEPSAETQEVLETCRVIAEAPQGSIAAYVISMAKVPSDVLAVHLLLKEAGCPFTLPVAPLFETLDDLNNADDVMTQLLGIDWYRGLIQGKQMVMIGYSDSAKDAGVMAASWAQYRAQDALIKTCEKAGITLTLFHGRGGSIGRGGAPAHAALLSQPPGSLKGGLRVTEQGEMIRFKFGLPEVTISSLALYAGAILEANLLPPPEPKKEWIEVMDLLSDASCDMYRSYVRENPEFVRYFRAATPELELGKLPLGSRPAKRRPDGGVESLRAIPWIFAWTQNRLMLPAWLGAGAGLQRAIDAGKRDVLATMCRDWPFFSTRIGMLEMVFAKADLWLAEYYDQRLVDKSLWPLGQQLRDQLAADIKVVLAIANDDHLMADLPWIAESIALRNVYTDPLNVLQAELLHRSRQQEHPDACVEQALMVTIAGVAAGMRNTG

SEQ ID NO: 27037 - protein, 247 aa, Zea mays
  misc_feature (76)..(76): Xaa can be any naturally occurring amino acid
MPPRPVPLFSRLRFRLPSCAAVSISTPPSSAAPLHYGHRTPLASPFPLSPPCPRILRAAVAVSSLDLRPITGGFAXYSAWLLASSATSVHDFTVKDASGKDVDLSTYKGKVLLIVNVASQCGLTNSNYTELSQLYEKYKDQGFEILAFPCNQFGGQEPGTNEEIVQFACTRFKAEYPIFDKVDVNGDNTAPIYKFLKSSKGSLFGDNIKWNFSKFLVDKEGHVVERYAPTTSPLSIEKDIKKLLGSY

SEQ ID NO: 27038 - protein, 262 aa, Bacillus cereus E33L
MLQLQNISVDYVTPHVVKISLNRERQANSLSLALLEELQNILTQINEEANTRVVILTGAGEKAFCAGADLKERAGMNEEQVRHAVSMIRTTMEMVEQLPQPVIAAVNGIALGGGTELCLACDFRIAAESASLGLTETTLAIIPGAGGTQRLPRLIGVGRAKELIYTGRRISAQEAKEYGLVEFVVPAHLLEEKAIEIAEKIASNGPIAVRLAKEAISNGIQVDLHTGLQMEKQAYEGVIHTKDRIEGLQAFKEKRTPMYKGE

SEQ ID NO: 27039 - protein, 410 aa, Bacillus cereus ATCC 10987
MKIIVQKFGGTSVRDENGRKHALHHIKKSLDAGYKVVTVVSAMGRKGEPYATDTLLSLVNQEESHISNREQDLLLSCGELISAIVFSNMLNENGIKAAALNGAQAGFVTNDDFTNAKIIEMNCDRIHEELENVDVIVVTGFQGQTKKGDTTTLGRGGSDTSASALGVALHAEYIDIFTDVEGVMTADPRIVKDARHLQTVTYNEICNMAYQGAKVVHPRAVEIAMHAKVPLRVRSTYSDSEGTLISASDGATKGRDVEERPVTGIAHVSNVTQIKVLAKETAYDLQQHVFKEMANEGISVDLINISPTGVAYTVSDNVSNRAVELLQNLGYEPIVTEHCAKVSIVGAGMAGYPGVTAKIVTALAEKGIQILQSADSHTTIWVLVKETDLVEAVNALHSAFELSKEKQLEQ

SEQ ID NO: 27040 - protein, 994 aa, Yarrowia lipolytica CLIB122
MLRTLNRTSRILRLSATKTRFGSTFSAATRPLDTYLRRHVGSESADVNKMLRALDYATAESAMDSFVSDVVPPNVLTKRPLAVKPTQGFSESELTSRLGEIASKNKVFKSYIGKGYVGTVVPPVIQRNVLENPLWYTSYTPYQPEISQGRLESLLNYQTVITELTGMAVANASLLDEGTAASEAVTMAFNAFKGKRGIFLVDKNVHPQTIAVVQSRSVALDVDVKVVDVSDLSNGKSESPIDQVCGVLVQYPTTDGSIVDYQKLSDTLKGEGNGSLLCVAADLLALTLLKPPSDFGADIVLGTSQRFGVPMGYGGPHAAYFAVADGQHRKMPGRLIGMSRDRLGGEAYRLALQTREQHIRREKATSNICTAQALLANMSAFYAIYHGPEGLRKIAERVNLLTSILATAVEAKGVKVENKHFFDTLTLQVQDANKVISAAEAKEINLYKLDDKTVSLTLDETVTHGDLVNLASVFGVSEADLESAADNVTSSIPSDMLRTDKYMQHDVFNKYHSETELLRYMKHLQSKDLSLADAMIPLGSCTMKLNATTQMAPITWPEFGQLHPFVPLNQAQGYKELLIELEDDLADITGFDRMSLQPNSGAQGEYTGLRVIRAYLESQGQGHRNICLIPVSAHGTNPASAVMSGMKVVAVKCKKDGELDLVDLAAKAEKHKDNLAAFMVTYPSTFGVFEPGVKEAIDIVHKNGGQVYMDGANMNAQIGLTSPGEMGADVCHLNLHKTFCIPHGGGGPGMGPIGVKSHLAPFLPAHPVVEMSEVTGLSTEKSIQPVSAAPFGSASILPISWAYIKLMGATGLLKATEIALLNANYMKKRLEPHYPILYTNNKDKCAHEFILDMRPFKASSGIEAIDIAKRLQDYSFHGPTMSWPVANTLMVEPTESESLAELDRFCDALISIRQEIKEIEDGKIPRENNVLKNSPHPQQDLLAETWDRPYTREQAAYPVASLREKKFWPSVARVDDTFGDLNLFCTCEPPALEE

SEQ ID NO: 27041 - protein, 340 aa, Wolbachia endosymbiont strain TRS of Brugia malayi
MKKAVVLLNLGGPDSLSAVRPFLFNLFYDKRIINLPNPFRFFLAKFISAKRENNARKIYEQIGGKSPILENTKMQAEALERELNRSVFCHPSSVTLGPRKENWIPVSRIGMTSKLTKVFICMRYWHPFANEVVKSVKQFDPDEVILLPLYPQYSTTTTLSSIENWQKNAKQYGIKCNTKIIRHHYDNQDFIEAHANLITKHYKLASEVGKPRVLFSAHSLPLSVIKKGDPYALQVEETVKLIVKKLHIKDLDWSICYQSKIGPVKWLEPSTESELLRAKADGVPVVLLPISFVSEHSETLVELDMEYKTIIKDGYYFRIPTLSTNSLFIKCLAGLCINHS

SEQ ID NO: 27042 - protein, 789 aa, Photobacterium sp. SKA34
MKQVKILAQFYVDLMVKLGIVRFSLLLALALVALAVVVQVSVTLVLNGTVNDIDIVRSVTFGLLITPWAVYFLSVVVDQLEDSRQRLSKLVTKLEEMRSRDMELNKQLQDNVAQLNQEIEEREKAEEAREEAMHDLENEVYQRENAQLAVAEQSALLKSFLDASPDLIYYRNEKNQFSGCNRAMSELLGKTEKELVGLTPWDVYPEEVAKKIIKTDEEVFNENSAMTDEQWLVYPNGKRALFELRKVPFYNRNGRRLGLMGFGRDITERKKYEDALEKASSDKTSFISTISHELRTPLNGIVGLSRMLLDTDLTDEQRGYLRTVHVSAITLGNIFNDIIDLDKSDRRRLELMPKPLDFNEFIDEMGNISQLMAEQKGLRFDLECLTELPKNIEVDSTRLRQVLWNLIGNATKFTKQGGVILSVSSEIHEHDADIIFEVEDSGVGIPKSEIDNIFAMYYQVKQGDDNIHAVGTGIGLAVSRQLVQLMGGDIAVHSEVGEGSTFTVKIRVPLVEDVIEEEIVTEVKPELTGLSIFMVEDIELNITVAKSLLESLGHEVTVAMRGDEALAMFKPEDYDLVLLDIQLPDMTGFDIAQKLRERYQDLPALVALTANVISDKTEYLNKGMDEALSKPLSVKAITSVIENLVLSCSYEEDEVTTLVETETKSSKPSDTMVDKLLDLEMLTSYVEIVGTKPVYASIEMFEKMMPDYIAILDSNMVARDQDGIKFEAHKIKGAAGSIGLKHIQQVAQKAQSPELPAWWENINDWVDEIKNGYQNDIDVLKLWLKQYEK

SEQ ID NO: 27043 - protein, 165 aa, Photobacterium sp. SKA34
MKDLLPDLCDHYEQDIYFLPIGCHDYGGRNIFYGQCVTLRCFEDNSLVRDILSQDGTGKVLFIDGHGSCRRALLGDQLALLAIKNNWQGIIVNGAVRDIATLSTLDLGVKALGGCPIKTVKRQMGELNVTLNISEKLVYPGDYIYADLNGIILSKQALDLSVLNG

SEQ ID NO: 27044 - protein, 633 aa, Pseudomonas putida KT2440
MPYLGRHDCSALAAVPLSVYWINRYEAAGERMNVQTTLEQSVPQRLVHVRQAMAAGGIDALLVPSADPHLSEYLPGYWQGRQWLSGFHGSVGTLVVTPGFAGLWVDSRYWEQAAQELKGSGIELMKLLPGKPGALEWLGENVEPNGRVAVDGAVMALASARQLAERLKARGAQLVTDIDLLGQVWDGRPALPGNPVYQHLPPHATVSRAEKLAQLRQGIQAKGADWHFIATLDDIAWLFNLRGSDVSYNPVFLAFALINQQQAILFVGQDKVDEHLRHVLEVDGIEVRDYSEAGKALGTVPAGARLLVDPTRVTCGLLDNLAAEVVLVEGLNPTTLSKSCKGDDDLVHIRQVMEQDGAALCEFFAWFEANLGREVITELTVDEQLSAARARRPNFVSLSFSTIAAFNGNGAMPHYRATEQSHALIEGNGLLLIDSGGQYLGGTTDITRMVPVGNPSQAQKQDCTRVLKGMIALSRATFPRGVLSPLLDAIARAPIWADQVDYGHGTGHGVGYFMNVHEGPQVIAYQAAPAPQTAMQVGMISSIEPGTYRPGLWGVRIENLVVNREAGKSAFGDFLQFETLTLCPIDTRCLLPELLTKEEVEWLNGYHACVHERLAPLLQGDALAWLEMRTAPL

SEQ ID NO: 27045 - protein, 273 aa, Carica papaya
ACENWGFFELVNHGIPIELLDTVERLTKGHYRKCMEQRFKEIMASKGLDGIQTEVTDMDWESTFFIRHLPEPNIAEIPGLDDEYRKVMKEFALKLEKIAEELLDLLCENLGLEKGYLKKAFYGSRGPTFGTKVSNYPPCPKPNLIKGLRAHTDAGGIILLFQDDKVSGLQLLKDGKWVDVPPMRHSIVVNLGDQLEVITNGKYKSVEHRVVAQTDGTRMSIASFYNPGSDAVIYPAPILVEKETEEKKTTYPKFVFEDYMKLYAGLKFQAKEL

SEQ ID NO: 27046 - protein, 1109 aa, Saccharophagus degradans 2-40
MSKQNKNKFTHSIQKTLIQWFLLLSLVPLFLVAFIGYQVARNSLVASAQDHLESDARNTMNFLNNWFEYRLMDSLSGAQDENNIKFLQELHEAAVQTELSIESFHKSIKWAEITASRQGGLVDISRNYDYIYDVFLIDVDGNILFTVAKESDLGTNLVHGKYANTKFGGTVRKTLATGQTLFADFEHYEPSAGIIAGFVVSPLVNSEGQRIGAYAMQFRIDRIINHLKLNSASMYRHYLVGPDGTLRTQRRQSEQLLITQINTAPVKRWLEANETAKHSDKPKLIKYSEADGTVYLGMHQNLTLRNLDWLLVSEVKEADALASSNWLAGVMLLSVWFTAMLLSVLAFFLSIRITNPIKAITIVANKLVKGDFSQRVQVQESNEFGLLANSFNELIQSRKYYELELLAAKNEAESSSRAKSEFLACMSHEIRTPMNGVLGMLGLVLNSSLTPEQERKLLLAQSSGQSLLSVINDILDYSKVEAGKLELEHLDFDPHRLLSDVVQSFNYSAQEKGIELVLDDIGLGGKVLRGDPSRLRQIINNLLSNALKFTSQGEIIVRAKLDSEINGLNQLRCSVTDTGIGIPSDKISGLFDSFTQVDSSTTRRYGGTGLGLSICKMLTRIMGGDIFVVSEVGKGTRFDFVVHVETGSCLPVDNAESDVTGLNVLLVDDNLTNLDVISGQLISWGIHVTKVAGPEQALVLVAEVQDTVFDLVLMDCHMPNINGIDLAERIQGSPCIKPNSVIILSSSADMASRFHMQEVGVVGCLMKPVSAPYLHQAIQYFIQIKKSNKQQFITPALLESVHATTESTANPNIVWGDNVRILVVEDNLVNQQVIAGILEDFGLAFTLVDDGQQAISALKENTGDLRYHFVFMDCQMPVLDGYNATKQIREGAAGEECKIVPIVALTANAMQGDRDKCLRAGMNDYVAKPVDADEVRLALVSWLPAELRTDEAAIENNPETPDTPDILEKKSPPAEENPVEPQVVKVDLGLLKLPKGLVIHTPAMLQPMFKNKPERYVKILTTLLNAHASFNTSLNEAFANNDTEQVRHLVHAMKGSSGNISMGKVHEYCKQVEAQIDADGAASAEYINKLQQLIEAMFDEANQIVELNS

SEQ ID NO: 27047 - protein, 156 aa, Haemophilus influenzae
NRTNTPVLVDGKDVMPEVNAVLAKMKDFCQRIISGEWKGYTGKAITDVVNIGIGGSDLGPYMVTEALRPYKNHLNMHFVSNVDGTHIAETLKKINPETTLFLVASKTFTTQETMTNAQSARDWLLKATKDESAVAKHFAALSTNAKDVEKFGIDTN

SEQ ID NO: 27048 - protein, 445 aa, Gibberella zeae PH-1
MSTAFRSVAPFLRTARQGLRANPVNPLQSAFTKKNASGVLNLYRTYAVFERSKPHVNIGTIGHVDHGKTTLSAAITKRQADKGLANFLEYGAIDKAPEERKRGITISTAHIEYATENRHYSHVDCPGHADYIKNMITGAANMDGAIIVVAASDGQMPQTREHLLLARQVGVQRIVVFVNKVDAIDDPEMLELVEMEMRELLNTYGFEGDDTPVIMGSALMSLQNQRPEIGTQKVDELLAAVDEWIPTPERDLDKPFLMSVEDVFSIAGRGTVVSGRVERGILKRDQEIELVGKGQEVIKTKVTDIETFKKSCEQSQAGDNSGLLIRGVRREDVRRGMVVCAPGTVKSHTQFLASLYVLTKEEGGRHTGFQEHYRPQLYLRTADESIDLTFPEGTEDATSKMIMPGDNTEMVVTMGHPNAIEVGQRFNIREGGRTVATGLCTRIIK

SEQ ID NO: 27049 - protein, 231 aa, Chlamydophila abortus S26/3
MNNKQRPKTLIAPSIMGGDLACIGAEAKRIEESGADLIHIDVMDGHFVPNLTFGPGVIAAINRSTDIFLEVHAMIYTPFDFVEEFVKSGADRIIVHFEASEDLKELLSYIKKCGIQAGLAFSPETSIEFIPPFLPFCDVILLMSVHPGFCGQGFIPDIPDKIRFTKQAIKTMGLEGSCLIEVDGGINETSAKICREAGADILVAASYIFEKNEQTMEEKVLLLRGENHGIK

SEQ ID NO: 27050 - protein, 109 aa, Brassica napus
  misc_feature (44)..(44): Xaa can be any naturally occurring amino acid
LFLPCMIVAGPISAYADLACGTVTSNVAPCIAYITQGVPFHREXCTGVSKLKSMARTTPVSNQDCRCIKIAASTLGPNIKAGGASGIPKACGVIVPFPISTNANCINMK

SEQ ID NO: 27051 - protein, 157 aa, Triticum aestivum
  misc_feature (85)..(85): Xaa can be any naturally occurring amino acid
  misc_feature (119)..(119): Xaa can be any naturally occurring amino acid
  misc_feature (124)..(124): Xaa can be any naturally occurring amino acid
  misc_feature (127)..(127): Xaa can be any naturally occurring amino acid
  misc_feature (132)..(133): Xaa can be any naturally occurring amino acid
  misc_feature (151)..(153): Xaa can be any naturally occurring amino acid
  misc_feature (155)..(155): Xaa can be any naturally occurring amino acid
HIETYDVTTIRASTPMFLMSRKIKSLGVKMVLSGEGSDEIFGGYLYFHKAPNKKEFHEETCRKIKALHLYDCLRANKATSAWGLXEARVPFLRQKLHQMYNGPGFRNPKMIRRDLGRIXKWVCXKAXDDDEXXYLPKHIFTGKKTFNHGVXXXWXDG

SEQ ID NO: 27052 - protein, 320 aa, Synechococcus elongatus PCC 7942
MVSSPARPIRIGSRKSQLALVQTHWVQGELQRLYPDRQFDVQTMSTQGDIILDVALAKIGDKGLFTKELEVAMLAGEVDFAVHSLKDLPTRLPEGLILGCVTEREDPADALVVHDRFKDHQLETLPEGTVIGTSSLRRLAQLRHHYPHLQFKDVRGNLNTRLAKLDAGEYDALILAAAGLQRLSMADRIHQLIPAAVSLHAVGQGALGIECRAEDPEILELLKALEHEPTSQRCLAERAFLRELEGGCQVPIGVNTAIADGTLTLTGMVASLDGQRLLRDQVSGPTSDPEALGLALAAQLKAQGAKEILDEIFATVRPEA

SEQ ID NO: 27053 - protein, 475 aa, Magnetococcus sp. MC-1
MCRSVRLGCSVSRGCRAFLATALVRKLVATLGHYGLSIHFHAVCSCLEHGTAIEAAERVLFVNHRVVITGVGLVTPLGVGNDVTWSRLIAGESGIGLLTSFDTEEYSCKIGGEIKDFNPEQWIEKKEVKKMDRFIHYGLAASQLAWEDSGLEAPDEEASYRYGAIVGSGIGGLIAIQNQAIALKEKGPRRISPFFIPMSLINLVSGQLAIKYGLRGPNHAVVTACATGTHAIGDAYRIVQRGEADVMVAGGAEAAICELGIGGFAAARALSTRNDDPTRASRPWDKGRDGFVQSDGAGVVVVESMEHAKARGARIYAEVVGYGMSGDAYHITAPHPSGDGAARCMAAALKDAQMDPSGIGYINAHGTSTPQGDVIETKAVKKIFGESGAKKVMVSSTKSMTGHLLGAAGGIEAIFTAKALHEGVIPPTINLDDPDPECDLDFVPHTARQEQVEAALSNSFGFGGTNATLVLKRVR

SEQ ID NO: 27054 - protein, 481 aa, Francisella tularensis subsp. tularensis SCHU S4
MVIFEKTRGKNSPSVMPSKKGDVSNIPTDMLRTKKPILPEQAELDVVRHYTQLSRKNFCIDTNFYPLGSCTMKYNPRAAHKYASLAGFLERHPYASAQSVQGTLECLYDLQNLIKELTGMTGVSLAPMAGAQGEFAGVAMIKAYHHKRSDFERDEIIVPDAAHGTNPATAKVCGLKVIEIPTKKDGDIDIEALDKVLGPKTAGIMLTNPSTVGVFERNIAVIAKKVHEAGGLLYYDGANLNAIMGKACPGDMGFDVLHMNLHKTFATPHGGGGPGAGPVAVNDKLKEFLPVPMVGKKDDKFVWLEEKDVSNTIGRLSAFNGNIGVLIRAYIYGAMLGGNGLTEASEIATLNANYMMARLKEEGFTIAYPDRRASHEFIVTLKPEFLNYGVTATDFAKCLIDKGVHAPTMYFPLLVPECLLIEPTETENVDSMEKFIQAMVEIRDIAKKDPQYLKGAPYNLPARRLDDVKATKELDIVWQPK

SEQ ID NO: 27055 - protein, 296 aa, Roseovarius nubinhibens ISM
MTAKIIDGKAFAATIREKVAGHVARLKEEHGITPGLAVVLVGEDPASQVYVRSKGKQTVEVGMNSFEHKLDADTSEADLLALIDTLNKDDSVHGILVQLPLPKHLDEDLVINSISPEKDVDGFHISNVGLLGTGQKSMVPCTPLGSLMMLRDHHGSLSGMNAVVIGRSNIVGKPMAQLLLGDSCTVTIAHSRTKDLAEVVRRADIVVAAVGRPEMVPGDWIKEGATVIDVGINRIERDGKNVLVGDVDFASAKEVAGAITPVPGGVGPMTIACLLANTVTACCRSNDLSEPEGLTA

SEQ ID NO: 27056 - protein, 266 aa, Brassica napus
  misc_feature (145)..(145): Xaa can be any naturally occurring amino acid
MAQTMLLTSGVSANQFLRNKNPLAQPKVHHFFLSGNSHVVLPSRRPSLVPLAIFKPKTKAAPKKVEKVKPKVEDGIFGTSGGIGFTKQNELFVGRVAMIGFAASLLGEALTGKGILAQLNLETGIPIYEAEPLLLFFILFTLLGXAFGALGDRGKFVDDPPTGLEKAVIPPGKGVRSALGLKEQGPLFGFTKANELFVGRLAQLGIAFSLIGEIITGKGALAQLNIETGIPIQDIEPLVLLNVAFFFFAAINPGNGKFITDDGEES

SEQ ID NO: 27057 - protein, 409 aa, Bacillus cereus E33L
METIVQKFGGTSVGSVERIQHVTNLIIEEYERGHSIVSVVSAMGKSTDELVALANAITENPSKREMDMLLSTGEQVTISLLTMALQAKGYNAISLTGWQAGITTESVHSSARITEINTDRIQSYLTKGTIVIVAGFQGVSEDLEITTLGRGGSDTTAVALAAALNAKKCDIYTDVTGVYTTDPRVVKDAYKLDEISYDEMLELANLGAGVLHPRAVEFAKNHNVILEVRSSMEQENGTIVKGECNMEQQSIVKGIAFEDNITRITVKGLEQGSLSTVFSTLAAAHINVDIIIQSITNEGTVHLSFSIHSNDLRETLEVLEQNQEALHYGSVEYENHLAKVSIVGSGMVSNPGVAANMFTTLKEEDIHIKMVSTSEIKVSVVIDRLHLVTGVEALHQSFMAKIEPLVQMS

SEQ ID NO: 27058 - protein, 413 aa, Bacillus cereus ATCC 10987
MIKKYTCKNGVRIVMENIPTVRSVAIGIWIHAGSRNENEKNNGISHFLEHMFFKGTETRSAREIAESFDSIGGQVNAFTSKEYTCYYAKVLDEHAKYALDVLADMFFNSTFDEEELKKEKNVVCEEIKMYEDAPDDIVHDMLTKATYETHPLGYPILGTEETLNTFTGDTLRQYIKDHYTPENVVVSIAGNIDEAFLQTVEQYFGSYEGTTNREQVHSPIFHFNKVARKKETEQAHLCLGYKGLQMGHEDIYNLIVLNNVLGGSMSSRLFQEVREQRGLAYSVFSYHSSYEDTGMLTLYGGTGSQQLDTLYETMQETLETLKNTGITERELMNSKEQLKGNLMLSLESTNSRMSRNGKNELLLRKHRSLDEIIESVNTVTKENVDELIRNMFTDEFSAALISPDGKLPKGIKL

SEQ ID NO: 27059 - protein, 544 aa, Francisella tularensis subsp. tularensis SCHU S4
MAIQTVSTKPFANQKPGTSGLRNKVIAFQQPRYLENFVQSIFNSLDDIEGKTLVVGGDGRYYNDVAIQIIVRMAAANGFAKIIVGQNGIFSTPAVSCVIRKYEAFGGIVLSASHNPGGPKGDFGIKYNVSNGGPAPEKITDRIFSETKKINQYFISDAAKESVDLDKLGTYKIENTTVEVINSVIDYAELMQQIFDFDKVRELFAKGFKVRFDSMCAVSGPYAKYIFETLLKAPAGTVVNAQPLEDFGGFHPDPNPVNAEDLVKHMRSGKYDFGAASDGDADRNMIVGKQIDVSPSDSLAIMAANAHLIPVYSKGIKGVARSMPTSTAVDRVAESLRLPCFETPTGWKFFGNLLDAEKITLCGEESYGTGSNHIREKDGVWAVLFWLNLVAVTGKQVDQLVEEHWQKFGRNFYSRHDYEAIDTAIANSIIDSLRERLSSLVGAQLNDEKVAKADDFSYIDPIDGLVSNHQGIRIIFEDGSRIVFRLSGTGTQGATLRIYLEKYESDSSKFSIPTQQALASLIEIAEDLTNIKSLTGMTEPTVVT

SEQ ID NO: 27060 - protein, 480 aa, Oenococcus oeni PSU-1
MENKKTNISKTNYALNFIKTKSKAERHLKIIALCVTLGGLLFGVDTGVINGALPYMAKKQELNLNPATEGLVTSSITLGAAFGAIFAGRLADRYGRKRILFYLSIVFFFCTAICSLAPNAIIMMIFRFLLGLAVGSASVIVPTFLSEIATVKLRGPLVTQNEIMITGGQLLAFVVNAILGNIFVNVSNIWRYMIAFGMIPSALLFIGTLIVPESPRWLIMKGKTKTALKILKGIRSDKRQSQQEVTQIQATLKKEKEVSHISWYDLKKPWIKKLIILGSGLGIVQQIVGINIIMYYGTTVLIKAGFTHNIALITNIANGIVSVLATYTGMHLMNHINRRKMLLTGIAGTGGALALITLVSQILPHSKLLPVCVVFLTLIFLSFFQGCISPTIWLLMSEIFPQNLRGLGMGISTFFLWMANFLVGFLFPIFLNYFGFSITFGIFVLCNLISFIFVYKFAPETRNKSLERVQLELRTRIDKN

SEQ ID NO: 27061 - protein, 376 aa, Prochlorococcus marinus str. MIT 9313
MTLCQVWAASSSGTAESATYFCMIGGHFPCGFPVFVMTLRVAINGFGRIGRNFMRCWLSRGANTGIDVVGINVTSDPKTNAHLLKYDSILGQIKDAEIGYTDDTFVINGKTIKCFSDRNPLNLPWKEWGIDLVIESTGVFNTDVGASKHIEAGAKKVILTAPGKGDGVGTYVVGVNADQYRHGDFNVLSNASCTTNCLAPIVKVLDQTFGINKGLMTTIHSYTGDQRILDNSHRDLRRARAAAMNIVPTSTGAAKAVALVYPQMKGKLTGIAMRVPTPNVSAVDLVFESGRSTTAEEVNAALKSASQGGMKGIIKYGDLPLVSSDYAGTNESTIVDEDLTMTIGDNLVKVVAWYDNEWGYSQRVVDLAEIVAKNWK

SEQ ID NO: 27062 - protein, 328 aa, Arabidopsis thaliana
MEEEVLSRVPVKSLGKLRLTCKKWNTITKSESFLKKKQRNGIEVVMMMDYRVSLMSVDLLSPSIDPIGNLNADGIKISKIFHCQGDKDSSRVVVWNPYLGQTRYIELPRNSIYHKCVKYALGYEKKNHKILRFVNEYLETSRDRIRELQIYSLYSNSWEVIDDFTPDWYILYKHSGVSLKGNTYWYALEEIPFHAVFGDTVTLASVREEQLAVLFHRASVVEIWITNKIEPNAVSWSNLLFAVDMKPVAGFWFPNVGRSFFVDEEKKVAVVLDKEIIDKCHLPARNIAYIIGNNGILSKVDLGESRDKFCYPLVCSYVPSSVQIPNTP

SEQ ID NO: 27063 - protein, 966 aa, Oryza sativa (japonica cultivar-group)
MARNAADKGTSIDAQLRILAPKKLSEDDKLVEYDALLLDRFLDILQDLHGEDIRETVQECYELAAEYESKVDPKQLDAIGNVLTRLDPGDSIVMTKSFSHMLILANLAEEVQIAYRRRIKLKKGDFADENSATTESNFEETLKRLVGELKKSPHEVFDALKNQTIDLVLTAHPTQSVRRSLLQKHGRIRSCLTKLYAKDITPDEKQELDEALKREIQAAFRTDEIRRAPPTPQDEMRAGMSYFHETIWKGVPKFLRRVDTALKNIGINERVPYNAPLIQFSSWMGGDRDGNPRVTPEVTRDVCLLARMMAANLYYAQIEDLMFELSMWRCSDELRVKADQLHRCAKKNTTKHYIEFWKQVPPSEPYRVILSNVRDKLYNTRERARHLLASGFSEIPDEATFTDVEQFLEPLELCYRSLCACGDNSIADGSLLDFLRQVSTFGLSLVRLDIRQESDRHTDVMDAITQYLGIGSYREWSEEKRQEWLLSELNGKRPLFGPDLPQTDEIADALDTFHVIAELPYDSFGAYVISMATAPSDVLAVELLQRECHVKKPLRVVPLFEKLADLEAAPAALARLFSVDWYRNRIDGKQEVMIGYSDSGKDAGRFSAAWELYKAQEELIKVAKQFGVKLTMFHGRGGTVGRGGGPTHLAILSQPPDTIHGSLRVTVQGEVIEQSFGEEHLCFRTLQRFTSATLEHGMHPPISPKPEWRALMDEMAAVATKEYRSIVFQEARFVEYFRLATPELEYGRMNIGSRPSKRKPSGGIESLRAIPWIFAWTQTRFHLPVWLGFGAAFKHVLQKDIRNLQILQEMYNEWPFFRVTIDLVEMVFAKGDPGIAALYDKLLVSEDLWPFGARLRANYEETKQLLLQVAGHKDLLEGDPYLRQRLRIRDSYITALNVCQACTLKRIRDPGFHVSPRAHLSKDIMDSGKPAAELVKLNTTSEYGPGLEDTLILTMKGIAAGMQNTG

SEQ ID NO: 27064 - protein, 797 aa, Arabidopsis thaliana
MASFIDLFAGDITTQLLKLLALVANTVYSCKGIAERLITMIRDVQPTIREIQYSGAELSNHHQTQLGVFYEILEKARKLCEKVLRCNRWNLKHVYHANKMKDLEKQISRFLNSQILLFVLAEVCHLRVNGDRIERNMDRLLTERNDSLSFPETMMEIETVSDPEIQTVLELGKKKVKEMMFKFTDTHLFGISGMSGSGKTTLAIELSKDDDVRGLFKNKVLFLTVSRSPNFENLESCIREFLYDGVHQRKLVILDDVWTRESLDRLMSKIRGSTTLVVSRSKLADPRTTYNVELLKKDEAMSLLCLCAFEQKSPPSPFNKYLVKQVVDECKGLPLSLKVLGASLKNKPERYWEGVVKRLLRGEAADETHESRVFAHMEESLENLDPKIRDCFLDMGAFPEDKKIPLDLLTSVWVERHDIDEETAFSFVLRLADKNLLTIVNNPRFGDVHIGYYDVFVTQHDVLRDLALHMSNRVDVNRRERLLMPKTEPVLPREWEKNKDEPFDAKIVSLHTGKTSLTLNEFGEMDEMNWFDMDLPKAEVLILNFSSDNYVLPPFIGKMSRLRVLVIINNGMSPARLHGFSIFANLAKLRSLWLKRVHVPELTSCTIPLKNLHKIHLIFCKVKNSFVQTSFDISKIFPSLSDLTIDHCDDLLELKSIFGITSLNSLSITNCPRILELPKNLSNVQSLERLRLYACPELISLPVEVCELPCLKYVDISQCVSLVSLPEKFGKLGSLEKIDMRECSLLGLPSSVAALVSLRHVICDEETSSMWEMVKKVVPELCIEVAKKCFTVDWLDD

SEQ ID NO: 27065 - protein, 369 aa, Gluconobacter oxydans 621H
MSDAYKLLVLAGDGIGPEVMREVARIVHWMSAHRGLKLEITEELVGAASLAVHGVPIRDEVIELARQSDAVLFGSVGDPAWSHVGFDKRPEVAILKLRKELELFANLRPAKLFDALIDASALKPEVVRGLDLMIVRETVGGIYFGEPRGIETLPDGSRRGINTEVYTTSEIERVARVAFDLARKRDNRVCSVEKCNVMESGLLWKEVVTDVHKREYPDVQLSHMLADNCAMQLVRDPNQFDVIVTGNLFGDILSDLASMLTGSLGMLPSATLGPVRADGKRNALYEPIHGSAPDIAGKGIANPLAQILSFAMLLRYSLNRAEDADLIEMAVSNVLASGLRTGDIMSPGMARVGTEMMGQAVLREMEKLA

SEQ ID NO: 27066 - protein, 577 aa, Bacillus cereus E33L
MNRGRDVMSKFTVASNGSLETTLRGVEILSTPFLNKGVAFTQEEREELGLKGLLPPAVLTLEEQARRAYEQFCSQPDDLLKNVYLTALHDRNEVLFYRILTDHLREMLPIVYTPTVGVAIQRYSHEYRKPRGVYLSINDLSGIEEAFANIGATAENIDLVVVTDGEGILGIGDWGVGGINIAIGKLAVYTAAVGIDPSRVLPVILDVGTNREELLDNPFYIGNRHPRITGEAYDEFIDTFVQAVNKQFPKALLHWEDFSSRNARKILDKYRHDICTFNDDIQGTGAVSLAAVLSAVKASGVPLSEHRVVVFGAGTAGIGIADQVRDAMVRVGVSEEESYKRFWCIDRNGLVTDNMEDLLDFQMPYARKEAEVSEWKENGVIGLAEVVKQVKPTILIGTSTVAGAFKEEIIKEMASHVERPIILPMSNPTPLAEAKPADLIEWTEGRALVATGSPFEPVTYNGVTYVIGQSNNALIFPGLGLGTIVVRASVMTDGMFAAAAEAVASMVDTSQPGAPILPEVEELRNISEMVAIEVAKVAVAEGVARENLSDNDIKIAVKEAIWEPEYRQIKAVEKVTI

SEQ ID NO: 27067 - protein, 101 aa, Triticum aestivum
  misc_feature (100)..(100): Xaa can be any naturally occurring amino acid
MAAMFNPPPAPMALGPQPTWMPYEPTRDCSQGLCSMYCPQWCYFIFPPPPPVFDIAGPSGDGDGDDSSGPAFSPLVIAIIGVLASAFLLVSYYTIISKYXG

SEQ ID NO: 27068 - protein, 682 aa, Magnaporthe grisea
MLRTVGRKALRGSSKGCSRTISTLKPATATIAKPGSRTLSTPATATATAPRTKPSASFNARRDPQPLVNPRSGEADESFIGKTGGEIFHEMMLRQNVKHIFGYPGGAILPVFDAIYNSKHIDFVLPKHEQGAGHMAEGYARASGKPGVVLVTSGPGATNVITPMADALADGTPLVVFSGQVVTSDIGSDAFQEADVIGISRSCTKWNVMVKSADELPRRINEAFEIATSGRPGPVLVDPAKDVTASVLRRAIPTETSIPSISAAARAVQEAGRKQLEHSIKRVADLVNIAKKPVIYAGQGVILSEGGVELLKALADKASIPVTTTLHGLGAFDELDEKALHMLGMHGSAYANMSMQEADLIIALGGRFDDRVTGSIPKFAPAAKLAAAEGRGGIVHFEIMPKNINKVVQATEAIEGDVASNLKLLLPKIEQRSMTDRKEWFDQIKEWKEKWPLSHYERAERSGLIKPQTLIEELSNLTADRKDMTYITTGVGQHQMWTAQHFRWRHPRSMITSGGLGTMGYGLPAAIGAKVARPDALVIDIDGDASFNMTLTELSTAAQFNIGVKVIVLNNEEQGMVTQWQNLFYEDRYSHTHQRNPDFMKLADAMDVQHRRVSKPDDVGDALTWLINTDGPALLEVMTDKKVPVLPMVPGGNGLHEFITFDASKDKQRRELMRARTNGLHG

SEQ ID NO: 27069 - protein, 557 aa, Thermoplasma acidophilum
MIEQDTFVKSTASDKRFRKELTTIDLLFLSLGGIIGSGWLFAAAGASMLAGPAAVLSWIIGGLIVLVIALVYAELGGMIPRSGAIVRYGQYSHGGLAGFLFGWAYFLSAVSVPAIEAEGVITYAGTYVKGLVTPTGVLTAVGILLAAILMLGFFFLNYFGIKVMGKTNTGMTWWKLIIPSATVALLLTVHFNIGNFFLKTGFVTYGWSSVFEAISVSGIVFSYLGFRQALDYGGEAKNPQRSVPIATILSVVIGIALYALLQVVFIGQVNWAAVGVAPGQWSALSGGVVTAPFATLASSAGLVFLSYFLFADAYVSPSGTLNVYLGTSQRTLYGLATLGYLGKSMSDVNRKHRVPILPLIASLVIGYIFFAPFPSWYKLVGFISSSTVFTYIVGGSALQVFRREASELKRPFRLKGASILSPIAFVGATLIVYWSGWPLVAYLVIAILIGLIVYAAFYLAGKSAINIFSGKHFKGGAWLLAYMGAITLLSYFGEKAYGGTGLIPFPWDFLVMILVAIGFYFWSVYSGFKTDEITEIIESGMQYLPSEEAAQAPAGKK

SEQ ID NO: 27070 - protein, 382 aa, Ashbya gossypii ATCC 10895
MSNNDETVLGHLADHVFKHSGPIPESFVEVKGIDYSKPDAIDMRASDLIKSMKTMGFQASSLGQACDIIDEMRAWRGKHIDELDEYSRKGSFDENGFQKSTIFLGYTSNLISSGLRETLRYLVQHNMVSAIVTTAGGVEEDIIKCLAPTYLGEFTLKGAALRDKGMNRIGNLLVPNNNYCKFEEWIVPILDAMLAEQEAYVAQQGKDCLGVNTDVDSPIWTPSKLCDRLGKEINDESSVLYWAHKNKIPVFCPAITDGSIGDMLFLHTFRASPQQLRLDLVADIRKINSMSMEASQAGMIILGGGLIKHHIANACLMRNGADYAVYINTGQEFDGSDAGARPDEAVSWGKIKVEAKSVKVYADVTTVFPLIVAATFANGKKN

SEQ ID NO: 27071 - protein, 351 aa, Ashbya gossypii ATCC 10895
MSEVITIRKRRGFQFHRSQYLDDEEEEFDLDVEMEGADSSVIMTPGELITDDPVWMRGHGTYFLENKTYSSVAGTVSRVNRLLSVIPWRGRYTPETGDHIVGRIVEVGNKRWKVDIGGKQHAVLMLGSVNLPGGVLRRKSESDELQMRSFLKEGDLLNAEVQSLFQDGSSALHTRSLKYGKLRNGMFVRVPSSLIVRSKNHTHNLPGNVTVILGVNGFVWLRKTSDIDLSNNHHGSTVSGKAANTLAGVASGEYKPGANSVSITRLEEESSWEIYSDKNDPIPSNIRNTISRYANVIKILAHCEIGITEARIVASYEASMAYGNVGSLIETETMDAIGQDVINGEKMRGNA

SEQ ID NO: 27072 - protein, 291 aa, Mesorhizobium loti MAFF303099
MTDLVLNETRDGVSVLTLNRPEKLNALNYALIDRLLAVLDDIEVDGSVRAVILTGAGERAFSAGGDIHEFSASVAHGTDVALRDFVMRGQRLTARLEAFRKPIIAAVNGIAFGGGCEITEAVPLAVASDRALFAKPEINLAMPPTFGGTQRLPRLAGRKRALELLLTGATFSAERAAELGLVNKIVPHAELMPAAHDLARRIVTHSPAALAGILTAVARGINLGIAEGLLVEAEQFARMAPTADLREGLGAWIERRRPSYDGSWTHIARPDETRRASLRLDQPVGQAKASR

SEQ ID NO: 27073 - protein, 411 aa, Nostoc punctiforme PCC 73102
MGERPLTLRVAVIGSGPAGSSAAETLAASGIETYLFERKLDNAKPCGGAIPLCMVSEFDLPPEIIDRRVRKMKMISPSNREVDINLINEDEYIGMCRREVLDGFLRDRAAKLGANLINATVHKLDIPGNNTDPYTIHYVDHTEGISQGIAKTLKVDLIIGADGANSRVAKEMDAGDYNYAIAFQERIRLPEDKMAYYNDLAEMYVGDDVSTDFYAWVFPKYDHVAVGTGTMHINKASIKQLQAGIRARASEKLAGGKIIKVEAHPIPEHPRPRRVVGRIALVGDAAGYVTKSSGEGIYFAAKSGRMCAETIVEASNSGSRIPTEGDLKIYLKRWDKRYGLTYKVLDILQSVFYRSDATREAFVEMCDDLDVQRLTFDSYLYKTVVPANPITQLKITAKTIGSLIRGNALAP

SEQ ID NO: 27074 - protein, 491 aa, Methylococcus capsulatus str. Bath
MSHELRLDQPGLLRTRCLIDGQWVDADHSKTFSVTDPATGRALADVPAMGAAETMRAIAAAEHAWTGWRGKTAKERAAVLRRWYELILSHTEDLARILTAEQGKPLTEARNEIGYAAGFVEWFAEEAGRAYGETIPSPVPDKRLLVIRQPIGVCAAITPWNFPAAMITRKIAPALAAGCTVVVKPAEQTPLTALALADLAVQAGFPPGVINVVTGDPEAIGGELTSNPLIRKLSFTGSTEVGRLLMAQCAATVKKISLELGGNAPFIVFEDADLDAAVEGALLSKYRNTGQTCVCTNRFLIQDSIYDAFAERLAAKVRRLEVGNGLDEGVVQGPLIDEQALAKVERHIADALDRGARVLAGGGRHPLGGRFFQPTVLVDVTPEMLCTREETFGPVAPLLRFGSEEEALAIANATEYGLAAYFYTRDLARAFRVGEALEYGMVGINTGMLSYDVAPFGGVKQSGIGREGSHHGMDEYLELKYLCLGGMAPSA

SEQ ID NO: 27075 - protein, 112 aa, Azospirillum brasilense
MKLVMAIIKPFKLDEVREALTSLGIQGLTVSEVKGFGRQKGQTEIYRGAEYSVSFLPKVKVEVAVSDDQYEQVVEAIQKAANTGRIGDGKIFVLDIAQAVRIRTGETNTEAL

SEQ ID NO: 27076 - protein, 224 aa, Pueraria montana var. lobata
MAAAAAVATISAVQVEFLEFPAVVTSPASGRTYFLGGAGERGLTIEGKFIKFTGIGVYLEDKAVSSLAAKWKGKPSEELVETLDFYRDIISGPFEKLIRGSKILPLSGVEYSKKVMENCVAHMKSVGTYGDAEAAAIEKFAEAFKNVNFQPGATVFYRQSPDGVLGLSFSEDVTIPDNEAAVIENKAVSAAVLETMIGEHAVSPDLKRSLASRLPAVLSHGIIV

SEQ ID NO: 27077 - protein, 851 aa, Oryza sativa
  misc_feature (215)..(215): Xaa can be any naturally occurring amino acid
MERLFEELAGEAVKELLRAVRGTFFCRSTAERLRRNVEPLLPLVQPQAAQGGGGWGHGRSAGELAELAAQLREALELARRAASAPRWNVYRTAQLARRMEAADTAIARWLSRHAPAHVLDGVRRLRDEADARIGRLERRVEEAMAMMAMDTPPTKGMAVGMEVELPFPDDEEDESMVGGGVRVGKEKVKEMVMSGGGGGWEAVGICGMGGSGKTXTLAMEIFKDHKIRDLFTKDSYFSDRVFFETISQSANLDTIKMKLWEQISGNLVLGAYNQIPEWQLKLGPRDKGPVLVILDDVWSLSQLEELIFKFPGCKTLVVSRFKFPSLVTRTYEMELLDEEAALSVFCRAAFDQESVPRTADKKLVRQVAAECRGLPLALKVIGASLRDQPPKIWLSAKNRLSRGETISDSHETKLLERMAASIECLSGKVRECFLDLGCFPEDKKIPLDVLINIWMEIHDLDEPDAFAILVELSNKNLLTLVNDAQNKAGDLYSSYHDFSVTQHDVLRDLALHMSGRDALNNRRRLVMPRREESLPKDWQRNKDTPFEAQIVSIHTGEMKESDWFQMSFPKAEVLILNFASSVYYLPPFIATMQNLKALVLINYGTISATLDNLSAFTTLSDLRSLWLEKITLPPLPKTTIPLKNLRKISLVLCELTNSLRGSKVDLSMTFPRLSNLTIDHCIDLKELPSSICEISSLESISISNCHDLTELPYELGKLHCLSILRVYACPALWRLPPSVCSLKRLKYLDISQCVNLTDLPEELGHLTSLEKIDMRECSRLRSLPRSSSSLKSLGHVVCDEETALLWREAEQVIPDLRVQDGGTIHSAILTCSVFMQLTLQQQPKLAEKIEP

SEQ ID NO: 27078 - protein, 315 aa, Nostoc sp. PCC 7120
MMPTATDFKDYYAVLGVSKTATPEEIKRAYRKLARKYHPDLNPGDKDAEAKFKDLNEANEVLSDPEKRQKYDRFGQHWNHPGYTDAPPPSSTNVDTTDFDQYGDFDSFINDLLGRTRRKTSTGGFDDFSGGFRSQAPAPDTEAAIALTFSEAFHGVQKRLQLDEETINVRIPPGAKPGSRIRIKGKGRPSPFSQQRGDLYLTIEVLPHPFFRFEGDNLVCEIPIRPDEAVLGAQISVPTPDGSVTMKIPKGVRSGQSLRLRGKGWTLPKGGRGDLFAKLQMVTPQDLSAIEQEYYEKIQANTSFNPRTQLEEIKL

SEQ ID NO: 27079 - protein, 546 aa, Salmonella enterica subsp. enterica serovar Typhi str. CT18
MAIHNRAGQPAQQSDLINVAQLTAQYYVLKPEAGNAEHAVKFGTSGHRGSAGRHSFNEPHILAIAQAIAEERAKNGITGPCYVGKDPHALSEPAFISVLEVLAANGVDVIVQENNGFTPTPAVSNAILVHNKKGGPLADGIVITPSHNPPEDGGIKYNPPNGGPADTNVTKVVEDRANALLADGLQGVKRISLDAAMASGHVKAVDLVQPFVEGLADIVDMAAIQKAGLTLGVDPLGGSGIEYWKRIAEHYKLNLTLVNDQVDQTFRFMHLDKDGAIRMDCSSECAMAGLLALRDKFDLAFANDPDYDRHGIVTPAGLMNPNHYLAVAINYLFQHRPLWGKDVAVGKTLVSSAMIDRVVNDLGRKLVEVPVGFKWFVDGLFDGSFGFGGEESAGASFLRFDGTPWSTDKDGIIMCLLAAEITAVTGKNPQEHYNELAARFGAPSYNRLQAAATSAQKAALSKLSPEMVSASTLAGDPITARLTAAPGNGASIGGLKVMTDNGWFAARPSGTEDAYKIYCESFLGEEHRKQIEKEAVEIVSEVLKNA

SEQ ID NO: 27080 - protein, 621 aa, Listeria innocua
MCGFVGCVHDRITEITGADKETFRQMNSMITHRGPDDEGYFTDDHVQFGFRRLSIIDVENGHQPLTYENERYWIIFNGEVYNYVELREQLVAEGMTFETESDTEVIIATYAKYKEKTAERLRGMFGFVIWDKQEELVYGARDPFGIKPFFYAEEDGKLFMGSEKKSILHALKEKELDEVSLQNYMTYQFVPEPDSLTKNVKRLEPGHQFTKKIGQPMEITTYWKASFAPVTKSEDAWIKEVRDVMYDSVKMHMRSDVPVGSFLSGGIDSSIIAAIAKEYHPAIKTFSVGFERDGFSEIDVAKETADKLGVENISYVISPEEYMKELPKIVWHMDDPLADPAAIPLYFLSREARKQVTVALSGEGADELFGGYNIYNEPNSLAMFNKMPGVFKSMLNSVARIMPEGMRGKSFLERGTTPMEERYIGNAKMFTEKEKQILLPKYQSGHDYTNITDPFYAETKNYHPVERMQYIDIHTWLRGDILLKADRMTMANSLEVRVPFLDKEVYNVARNIPDTMKTTNGTTKYILRKAAATFVPEHVLNRRKLGFPVPIRHWLKDEMNAWVKNIIKESPTDHLINKQYVLGLLDDHCAGKFDYSRKIWTVVIFMIWYDVYVADKYDFGK

SEQ ID NO: 27081 - protein, 295 aa, Wolbachia endosymbiont strain TRS of Brugia malayi
MTIIIDGKKIASGLCEKLSQRIDVLKREHSIFPCLKVIFVGNNPASQVYVRNKQKKAESIGISSETIVLPDNILENELIEKINELNNDRFVNGILVQLPLPNHINASKVINTVSVEKDVDAFHRENVGKLVKGEKNCLVPCTPKGALHLIKLVETNLSGKNAVVIGRSNIVGKPMFHLLLQENCTVTILHSQSKDLAEYCSKADVVVTAVGKPNFVQEGWIKEGAIVIDVGINSVSIEGKTKLIGDVDFDRVKEKTKAITPVPGGVGPMTIAFLMINTVIAACLQKKVDASDFVS

SEQ ID NO: 27082 - protein, 478 aa, Bacillus licheniformis ATCC 14580
MNQDQELRQKAMNRVEEYRDIVNLDPYRLHYHIMPPVGLLNDPNGFIQWKGVYHLFYQWMPFKTGHGAKLWGHYSSADLVNWRHEEIALTPSDWFDKNGCYSGSAIAENDVLHLFYTGNVRDGEGNRETYQCLAVSKDGISFEKQGVVARLPKGYTAHFRDPKVWKKNGSWYMVLGAQTENLEGRAVLFQSDNLKDWQFLGDITGSNTDQLGEFGYMWECPDMFELDGKDVLIVCPQGLEAEEMLYQNVYQSGYFVGELNELKPWFTHGDFEELDRGFDFYAPQTTKDESGRRILVAWMGVPDQDEQSQPTIPHQWVHCMTLPRELHLQNDKIVQKPVEELRTLRQNEKNAAISLNQGTEKLDIVQPDKAELFISPKVIEEGFEISFRGAARLIYNKAEGIITLERNSYVDEKTEARQCRLQELRNLNIFLDASSIEIFVNEGEEVFTARYFPYPGNNDVWISARKEIIMNVTSWTMA

SEQ ID NO: 27083 - protein, 237 aa, Prochlorococcus marinus str. MIT 9313
MAMEQRQELKQAEKTEVANYFNGTGFDRWNRIYSESDDVNKVQRNIRIGHQKTVDDVLAWLQERGDLSAMSFCDAGCGVGSLSLPLAAMGAGSIAASDISAAMVAETKRRAADAQLDLSRLTFTTSDLESLQGCFHTVICLDVFIHYPQQAAEEMVRHLCGLTQESLLVSFAPYTPLLALLKRIGQLFPGPSKTTRAYTLREDGIIKAAMGCGFEPIRSKLNQAPFYFSRLIEFKKI

SEQ ID NO: 27084 - protein, 149 aa, Arabidopsis thaliana
  misc_feature (90)..(90): Xaa can be any naturally occurring amino acid
  misc_feature (94)..(94): Xaa can be any naturally occurring amino acid
  misc_feature (102)..(102): Xaa can be any naturally occurring amino acid
  misc_feature (113)..(113): Xaa can be any naturally occurring amino acid
  misc_feature (115)..(115): Xaa can be any naturally occurring amino acid
  misc_feature (117)..(117): Xaa can be any naturally occurring amino acid
  misc_feature (119)..(119): Xaa can be any naturally occurring amino acid
  misc_feature (123)..(124): Xaa can be any naturally occurring amino acid
  misc_feature (126)..(126): Xaa can be any naturally occurring amino acid
  misc_feature (133)..(133): Xaa can be any naturally occurring amino acid
  misc_feature (138)..(139): Xaa can be any naturally occurring amino acid
  misc_feature (141)..(141): Xaa can be any naturally occurring amino acid
  misc_feature (143)..(145): Xaa can be any naturally occurring amino acid
MASSMLSSTAVVTSPAQATMVAPFTGLKSSASFPVTRKANNDITSITSNGGRVSCMKVWPPIGKKKFETLSYLPDLSDVELAKEVDYLLXNKWXPCVEFELXHGFLYREHGNXPXYXYXRSWXXWXFICWVTXFGQVXXEXMXXXGVPG

SEQ ID NO: 27085 - protein, 338 aa, Prochlorococcus marinus str. MIT 9313
MAGCNGVSDADWLSASFNHGWTYSQRIAAVDAGRGLVELLAVHYTHSSRDVWQQRLQAGQIRLNGELVRLDQLLASGDQVCWQRPPWLEAAVPASWEVIFDDGDLLVVNKPSGLPVIPGGGFLDHTLTGLLQRRCQLDGESRLPRPVHRLGRFTSGLLICARQRETRAKLSAMFRRATAGDQGCKKIYRALAHRNLNVHCDEVATIRVPIVQTAHPMVGKVWVAADSSRQHDSKQSESRVLTALSTVRLLERRQDADLLEVAIQTGRPHQIRIHLAAIGSPLIGDPLYGFDGQISSAATPGDGGYCLHAHRLLDVPYRNRLHGFTACSPRCLQMKTER

SEQ ID NO: 27086 - protein, 257 aa, Rubrivivax gelatinosus PM1
MKGLLVSRDGGLVRLRLDRPEALNALDVDLAQALLAACRDLADDASVRAVLLSGSGRAFAAGGDLSQMRAAPVAAADSLITPMHQALRLLGSIDAPVLVALHGAVAGAGLSLAAAADLAIAAEGTKFNLAYINIATSCDLGASWSLPRLVGLRRALEIALLGESFDARKALEIGLVNRVVAADALEAEAEALAQRLARGPTLAYGHMRRLMRASFERSFTEQLDAERDAFLASAATADFGEGLAAFFDRRPARFQGH

SEQ ID NO: 27087 - protein, 105 aa, Rickettsia rickettsii
MANNVKDNSFKKEVLESDLPVLVDFWAEWCGPCKMLTPIIDEISKELQGKVKVLKMNIDENPNTPSEYGIRSIPTIMLFKNGEQKDTKIGLQQKNSLLDWINKSI

SEQ ID NO: 27088 - protein, 135 aa, Hordeum vulgare subsp. vulgare
DLLIEFHQPVREEKKKEIEGKDVEMGFDITHTKHKGQYALRKLYHGSPRLILVLYTSPTCGPCRTLKPILNKVIDEYDEYVHFVEIDIEEDPEIAEAAGIMGTPCVQFFKNKEMIRTFSGVKMKKEYREFIESNK

SEQ ID NO: 27089 - protein, 828 aa, Photobacterium sp. SKA34
MKMTRRAFVKANAAASAAAVAGISLPASATNLIVSSDETKIKWDKAPCRFCGTGCSVLVGTQNGRVVATQGDPKAPVNKGLNCIKGYFLSKIMYGKDRLQTPMLRMKNGQYDKEGEFTSVSWDTAFDVMAEKWKLALKKQGPSGVGIFGSGQWTVMEGYAASKMMKAGFRSNNIDPNARHCMASAVVGFMRTFGIDEPMGCYDDLEHADVFVLWGSNMAEMHPILWTRMTDRRLSHPHVKVNVLSTYQHRSFELADNGMIFEPQTDLAIANFIANYIIQNDAVNWDFVNKHTHFKRAQNDIGYGLRDDNPLQQQAANPNSGDIFPMNFEEYKASVADYTVEKASEMSGVAPEKLIQLAKYYADPKLKVMSLWTMGMNQHTRGVWMQSLVYNLHLLTGKIATPGNSPFSLTGQPSACGTAREVGTFAHRLPADMVVANPKHREIAEKIWKLPEGTIPPKPGYHAVLQDRMLKDGKLNAYWVMCNNNMQAGPNINEERLPGYRNPENFIVCSDPYPTVTAQASDLILPTAMWVEKEGAYGNAERRTQAWYQQVEAPGEAKSDLWQIMEFSKRFKVEEVWGEELINKMPQYRGKTMYDILFRNGQVDKFPLSEAQELNDDAKAQGFYVQKGLFEEYASFGRGHGHDLAPYDTYHQVRGLRWPVVDGKETLWRFKEGSDPYAKKGTDWDFYGKPDGKAWIISAPYEAPPEVPDSEYDMWLCTGRVLEHWHTGTMTRRVPELYKAVPDALCYLHPDDAKKRGLRRGDEVNVASRRGEVRCRIETRGRNRPPEGLIFIPFFDARILVNKLILDATDPLSKQTDFKKCPVKISKV

SEQ ID NO: 27090 - protein, 572 aa, Robiginitalea biformata HTCC2501
MAEIIKMPRLSDTMEEGTVAKWLKQVGDKIEEGDILAEIETDKATMEFESFYEGTLLHIGIEEGDGAPVDALLAIVGEEGEDISGLIDGAGSGDAGAGEDTKETVAEEAATGDGSEDAETASGDDAGGQAEVPEGVEIIRMPRLSDTMEEGTVASWIKKKGDAVEEGDILAEIETDKATMEFESFYSGTLLHIGIEEGESAPVDAVLAVIGPEGTDVEAVLSAGSGSGKPAATEEKGAEAKKESSEEKAASTDGAAAGREEARSGGSSSGDGRIFISPLARKMAEEKGIDLSDVEGTGDNGRIVKRDIENYTPSAKPAASVGEGAAKAPAEQAVPASAASMAPAGEESVEEVKNSQMRKVIAKRLSESKFTAPHYYLTIEVDMSQAMASRARINELPDTKVSFNDMVVKACAMALRKHPQVNTTWNGDTTKYNGHVHIGVAVAVEEGLVVPVLKFTDQMSLTAIGASVKDLAGRARNKKLTPAEMEGSTFTVSNLGMFGIREFTSIINQPNSAILSVGAIVEKPVVRDGQIVVGHTMTITLACDHRTVDGATGAQFLQTLRAYLEHPVTMLA

SEQ ID NO: 27091 - protein, 360 aa, Arabidopsis thaliana
MRTISDLPVALVEEILSRVPLTSLSAVRSTCKTWNALSKTQIFGKTRQQFLGFMMIDFGLYSIKFDLQGLNYESDFVEPSIKRVSILDQLDIFKVFHCEGLLLCVFRGNRWPVVWNPYLGGTGWIQPISDFHKYQVSDKFAFGYENKNHFFGFYDIYDLNSSAWKVLDVNPDCDIKCGVSLKGKTYFFAKEIAKAPNVKDFLVCFDFTAERFGPRLPLPFHSCGLFSEHVTLSCVRDEHLAVLYRRYNGVMEIYITTKIEPNEVFWSNFLKVDLTTFPDRFYGSRSHYFFIDEEKKVAVVFKNEPEWTMDCSYQTAYIIGKGGYLKSVKFGETPNDRKHNNAWNINSFMLSSYVPSLVQL

SEQ ID NO: 27092 - protein, 489 aa, Citrus unshiu
MWGRQREASMMYKRTSSRDRSSTFDVEETTALVQNGTEVENTNPSWKLSFPHVLVATLSSFLFGYHLGVVNEPLESISLDLGFNGNTLAEGLVVSMCLGGAFIGSTLSGWIADGVGRRRAFQLCALPMIIGASISATTRNLIGMLLGRFVVGTGMGLGPTVAALYVTEVSPPFVRGTYGAFIQIATCLGLMGSLLIGIPVKEIAGWWRICFWVSIVPAAILCLAMVFCAESPHWLYKKGRTAEAEAEFEKLLGGSHVKSSLAELSKLDRGDDGDIVKFEELLYGRHFRVVFIGSTLFALQQLSGINAIFYFSSSVFKSAGLSSGLANVFVGIANLLGSVVAMVLMDKLGRKALLQWSFFSMAVSMAIQVAASSSYIPGSASLYLSVGGMLMFVLTFALGAGPVPSLLLPEIFPSRIRAKAMAVCMSVHWVINFFVGLLFLRLLEQLGPQLLYSIFGTFCLMAVAFVKRNVVETKGKSLQEIEIALLPQE

SEQ ID NO: 27093 - protein, 597 aa, Gibberella zeae PH-1
MAALDQHRGYVQDHYQEVKQERSPEYVDENNAAGYQIVREPLWNKGLAFTPEQRANKNLTGLIPHTIESFDTQCARAMKMIQTRQTPIDKYLYLSTLKDQNTDLFYRLLIDNVRELMPLVYTPTIGDVCLQYSSIYTRPEALYISIKQRKSIRAMLRNWPCQDPEICVVTDGSRILGLGDLGINGVGISIGKLALYTGAAGIHPSKTLPIVLDCGTNNEENLQDPFYLGLRQKRPSYPEQQAFMDEFMEATREVFPNMVVQFEDFDSEKAFGYLDRYRDQYRCFNDDIQGTGAVVLGGYIGAVEQSNVPIEEQRLVFMGAGSAGVGVAKQLVEYYTRRGLSEAAAREKFWLVDTKGLVTKDRGDRLAEHKKYFARTDNNGQQFRTLEEVIEYVKPSALVGLTATFGVFTEPVVRALKSSVQEGGLERRPILFPLSNPLTKAECTFEQAIEWTEGTVLFASGSPFNPVKAKFGDETHHTVYHPNQGNNVYIFPGLGLGAILAKASRVTDEMVYTSAAALAGSLNADEVHKGLIYPRIERVRDASVIVAREVMKAARRGGVSELPESQWAEWEEWGDVALTSFIKQHIYNPLCFADAKL

SEQ ID NO: 27094 - protein, 291 aa, Triticum aestivum
AKSKQNELKTPASSGQATTGSKTLFVGNLSYNVETEQVKQFFGETGEVMDIRFATADDGSFKGFAHVEFATTEAAQKAYELNGGDLAGRPVRLDFARERGAITPGSGRDNSSFKKPGQSSTVFVRGFDSSLGEDEIRSSLQDHFSSCGDIRRVSIPKDYDTGASKGIAYIEFDDISSLPKALELNGSNIGEGLSLFVDEAKPRADNRDGADSGNRSAGRFNGGGGRRGRFDGGGGRRGGRFDGGSGRRGGGRFGRGDRGGRSDRGRGRGGAPPRQSAGTPSAGKKITFGDD

SEQ ID NO: 27095 - protein, 578 aa, Hordeum vulgare subsp. vulgare
MGGGNGIVDGFRRLFHRRTPSGSVLGSSNQSSAGEDSSELEAVEDLDLVGLRPIRVPKRKMPLPVESHKKNIMEKEFFTEYGEASQYQIQEVVGKGSYGVVAAAIDTRTGERVAIKKINDVFEHVSDATRILREVKLLRLLRHPDVVEIKHIMLPPSRREFQDIYVVFELMESDLHQVIRANDDLTAEHYQFFLYQLLRALKYIHGANVFHRDLKPKNILANADCKLKICDFGLARVSFNDAPSAIFWTDYVATRWYRAPELCGSFFSKYTPAIEIWSIGCIFAELLTGRPLFPGKNVVHQLDIITDLLGTPSSETLSRIRNEKARRYLRYMRKKHPVPLTQKFPNADPLAVRLLGRLLAFDPKDRPSAEEALADPYFASLANVEREPSRHPISKLEFEFERRKVTKDDVRELIYREILEYRPQMLEEYMKGGDQISFLYPSGVDRFKRQFAHLEEHYSKGERGSPLQRKHASLPRQRVGASNDSNNEQHISDQEMSAEPDAHGAVSPQKPQDAPGVGQNGLSPTSLSSRTYLKSASISASKCVVVNPNKQPEYDDAISEETEGAVDGLSEKVSKMHA

SEQ ID NO: 27096 - protein, 831 aa, Paracoccus denitrificans
MTISRRDLLKAQAAGIAAMAANIPLSSQAPAVPGGVESLQITWSKAPCRFCGTGCGVMVGVKEGRVVATHGDLLAEVNRGLNCVKGYFLSKIMYGADRLTQPLLRKKDGVYAKDGEFTPVSWEEAFDTMAAQAKRVLRDKGPTALGMFGSGQWTIFEGYAATKLMRAGFRSNNLDPNARHCMASAAYAFMRTFGMDEPMGCYDDFEAADAFVLWGSNMAEMHPILWTRVADRRLGHPHVKVAVLSTFTHRSSDLADIPIVFKPGTDLAILNYIANHIIQTGRVNRDFVDRHTTFVAGATGIGYGLRDDDPREMAARTAEDPAATTPSTFEEFAELVSEYTLDKVSELSGVEPAFLEQLAELYADPDRKVMSLWTMGFNQHVRGVWANQMVYNLHLLTGKISEPGNSPFSLTGQASACGTARQVGTFRHRLPSDMTVTNPERRQDAEEIWRIPHGVIPEQPGLHAVAQDRALHDGTLNFYWIQVNNNLQASPNNDGEAWPGYRNPDNFIVVSDAYPTVTALAADLILPAAMWVEKEGAYGNAERRTHVWHQLVEAPGEARSDLWQMMEFSTRFTTDEVWPEEILAANPNYRGQSLFDVLFRNGSVDRFDLSELNPVTPTAESNAFGFYVQKGLFEEYAPFGRGHGHDLAPYDTYHEVRGLRWPVVDGKETLWRYREGLDPYVEPGAGVQFYGNPDGKARIIAVPYEPPAEPPDEEYNIWLVTGRVLEHWHSGSMTMRVPELYRAFPGARCFMNPEDARDMGFNQGAEVRIVSRRGEIRSRVETRGRNRMPRGVVFVPWFDASQLINKVTLDATDPISKQTDFKKCAVKILPV

SEQ ID NO: 27097 - protein, 339 aa, Thermoanaerobacter tengcongensis MB4
MSAITSRKLTMAKAIAEAISLEMERDPRVFVMGEDVGVYGGIFGATAGLYEKFGPERVIDTPISEAGFIGAALGAAMEGMRPIVELMFVDFFGVAMDQIYNHIAKNTYFSGGNIRVPLVLMTAVGGGYNDAGQHSQCLWGTFAHLPGLKVVVPSTPYDAKGLMISAIRDDNPVIYMFHKGLLGLGWMTLIKDSTGPVPEEPYTIPFGKAEVKREGKDVSIISVAMGVYQALEAAKELEKEGISVEVLDLRTLVPLDREAIINTVKKTHRVLVVDEDYLSYGMSGEVAATIVEHAFDYLEAPVKRLAVPDVPIPYSRPLEQFVLPSSSKIVNAVKELLRS

SEQ ID NO: 27098 - protein, 284 aa, Pseudomonas putida KT2440
MTAHLIDGKAIAASLRQQIAQRVVERRQQGLRTPGLAVILVGTDPASQVYVSHKRKDCEEVGFISQAFDLPSETTQQALTELIDRLNDDPAVDGILLQLPLPAHLDASLLLERIRPDKDVDGFHPYNIGRLAQRIPLLRPCTPKGIMTLLESTGQDLYGMNAVIVGASNIVGRPMAMELLLAGCTVTVCHRFTKDLAGHVGRADLVVVAAGKPGLVKGEWVKEGAIVIDVGINRQEDGKLVGDVVYETALPRAGWITPVPGGVGPMTRACLLENTLYAAEELHK

SEQ ID NO: 27099 - protein, 399 aa, Thermoanaerobacter tengcongensis MB4
MPYEFRMPNVVSNGIEGFVVNWFKDEGQPVQAGELLLEVQFEKAAIELQAPVSGILTKILCPQGHVVKVGQLLCLIEEKSTEVAGGSGSAVPPVHAPEETPHFHGETERTTQSTPVDSQVHSSNTGDVRATPAARKLARELGIPLEAVPGTGPGGRITEEDVKNFAQRSEKTNLTARRVPLTPTQRLVGSRMLQSLRETAQYTLGREVDISALIKVRMELKQKGSPANITDLIHKAVVQAILENPVMQAVIDGDDMVVPAEVHLGFAVARGDELLVPVIKNAHRLNLNEMAVERRRLTDAVLQGIIKPEELQGGTFTVTNLGTYGVDFFTPVLYPKQSAILGIGRIVERPVLENGNIRSAQFMTLSLTVDHQVINGAPAARFLNRLAELLSQPEVLLEL

SEQ ID NO: 27100 - protein, 439 aa, Methanosarcina acetivorans C2A
MFEVKYNSGNYMGRESELKRDLSLLEITLVGIGDILGAGIYVLMGKAAGLAGNMVWASFLFAGFTASLSALSYMELSSMYPRAGAEYVFARKAFGERIGLFVGLLVIYYVAITASAVALGFGRYFSNIFGGGILIGAISLYILLSLVMVYGIKESARLAILMTFIELSGLMIIIYVGIPYLGTVNYFETPSLSGVFEASALIIFAFLGFEDIVRLSQETKDAEKTTPKALLISIFFTIFLYICVAVASVSVLDFQVLGISEIPLAEVAAVAFGEKAFVLLSWIALFSTMNTVLVVMLGGSRIVYGMANSGSLPKILARVHQKLKTPWTAICGIAFFSSLFVFLGDIATVANIANFMIFIVFFIVNISLIKLRYTDPERKRPFRVPVSIGRFPIFPALGALSAVFLFSQIGKEVMLYGFFLAGISALLVLLKTRKRENEL

SEQ ID NO: 27101 - protein, 512 aa, Sulfitobacter sp. EE-36
MDSTLVKDDPNTGVKEGVDQETVDAVREVGGAYKYGWSTDIEMDYAPLGLNADIVKLISEKNEEPEWMLEWRLAAYERWLTKKEPNWAMVDYPEIDFQQQYYYARPKSMAEKPKSLDDVDPKLLETYKKLGIPLKEQAILAGVEGAEKIGDEPRKVAVDAVFDSVSVGTTFQDELKKAGVIFCSISEAIREHPELVKKYLGSVVPVNDNFYATLNSAVFSDGSFVYVPPGVRCPMELSTYFRINAENTGQFERTLIIADKGSYVSYLEGCTAPQRDESQLHAAVVEIIIEEDAEVKYSTVQNWYPGDEDGKGGIYNFVTKRADCRGDRAKVMWTQVETGSAVTWKYPSCILRGDDSQGEFYSIAIANNMQQADTGTKMIHLGKRTKSRIVSKGISAGKAQNTYRGLVTMHPKAKESRNYTQCDSLLIGDKCGAHTVPYIEVKNNSSRVEHEATTSKVDDDQLFYCRSRGMDEEEAVALVVNGFCKDVLQALPMEFAMEAQALVAISLEGSVG

SEQ ID NO: 27102 - protein, 485 aa, Magnaporthe grisea 70-15
MCPSCEPEQAAASNGNANGNGASNGNGNHDGMTGIETRQAQNARYQPSRNPYQPVGDFLSNVNNFKIIESTLREGEQFANAFFDTAKKIEIAKALDDFGVDYIELTSPAASEQSRLDCAAICKLGLKAKILTHIRCHMDDARIAVETGVDGVDIVIGTSSFLMEHSHGKDMTYITNTAIEVINFVKSKGIEVRFSSEDSFRSNLVDLLSIYSTVDKIGVNRVGIADTVGCASPRQVYDLVKTLRGVVSCDIETHFHNDTGCAISNAFCALEAGATHIDTCVLGIGERNGITPLGGLMARMIVGSKDYVLSKYKLHKLKDIEELVADAVQVNIPFNNYITGFCAFTHKAGIHAKAILKNPSTYEIIDPTLFGITRYVHFASRLTGWNAIKSRASQLNIEMTDEQCKECTAKIKLLADIRPIAIDDADSIIHAFHRSINSGQPIQSLGSLLPNMTEEEKAALADVERRESNDAEQPAAKRAKVEAVA

SEQ ID NO: 27103 - protein, 210 aa, Alkalilimnicola ehrlichei MLHE-1
MRAGNVRMTAPRAVGTRSAATRGSGRVSFRVSLRCIIGRLDDNNSEETRMSVPTTDLCDDFADELRVMNPMFRDFGGRVRFHGPVTTVKLFEDNSAVREALSEPGEGRVLVVDGGGSMRCALLGDNLAALGQKNGWAGVVVYGCVRDSAELATIDLGVKALNVHPLKSVKKGIGERDVTVTFAGITIQAGDWLYADEDGIVVARNSLVQA

SEQ ID NO: 27104 - protein, 317 aa, Medicago truncatula
MEKVLRGNEVFGESCNWFKSVVALTLCFGAIHFNLALILFAIFFLSFSKALLLFGFLMLLMILPVDKNSLLGQKLSRFICKHVCSYFPITLHLEDAEAFHLNQPYVFCYEPHSVFPFGIFALHDNIDFMPIPNIRFLVSSAAFYIPYLRQIWTWLGFSYVTKKNLISLLVAGESCIIVPGGMRETLFMEHGCENVYLKERKGFVRIAMEMGHPLVPVFCFGQTNIYKWWKASGKLIQNLASSMKIFPLIFWGKFGSPVPFKNPLYVVVGKPIQVEKIPEPTSEQVAKVHSEFVEALQELFERHKTQAGCTNLELKIV

SEQ ID NO: 27105 - protein, 206 aa, Zea mays
  misc_feature (164)..(164): Xaa can be any naturally occurring amino acid
MHKLGRGSRDKVQQFMAITGASEKAALQALKASDWHLEGAFDVFYSQPQIAVANTRHLEELYNRYKDADMIMVEGISQICNDLQARTSFILVDPQDIVMLVISWHMKASTMCEFTRQEFIGGLQSIGVDSIEKLQAKLPSLRAELKDDHKFHEIYNFAFACARXKGQKSLALQTAIGMWQLLFAERSWPLIDYWCQFLQVRHNKAF

SEQ ID NO: 27106 - protein, 416 aa, Medicago truncatula
MIHRPPSNGRHCSPVISLFKLGNSETIPLDLFTPNIILSIYLNLLGSFVIERGKMEKVFVGSDKFAESSCNSFNTVLALLLWLGAIHFNGVVMVFALFFLPFSKALLVFGFLFVLMVIPIDEKSLFGRKLARYICKHACSYFPVTLHVEDIKAFHPNRAYVFGYEPHSVLPIGVVALADSTGFMPLPKIKVLASSAIFYTPFLRHIWTWLGLTPATKKNFTSLLDADYSCILVPGGVQETFFMEHGCEVGHIKRGEDFGGWDCNERPGSHIVTLMIAFLKARRGFVRIAMEKGKPLVPVFCFGQSDVYKWWKPGGKLILNIARAIKFIPIYFWGIFGSSMVWWLYQCSSLRGSDLQYHFKHPMHVVVGRPIELEKNPKPTPEEVAKVHSQFVEALQDLFECNKTRAGYPNLELRIV

SEQ ID NO: 27107 - protein, 356 aa, Gaeumannomyces graminis
MSRAANPPSNSGSRKISFNVSEQYDIQDVVGEGAYGVVCSAIHKPSGQKVAIKKITPFDHSMFCLRTLREMKLLRYFNHENIISILDIQKPRSYETFNEVYLIQELMETDMHRVIRTQDLSDDHCQYFIYQTLRALKAMHSANVLHRDLKPSNLLLNANCDLKVCDFGLARSAASQEDNSGFMTEYVATRWYRAPEIMLTFKEYTKAIDVWSVGCILAEMLSGKPLFPGKDYHHQLTLILDVLGTPTMEDYYGIKSRRAREYIRSLPFKKKVPFRTLFPQDVGSRLDLLEKLLAFNPVKRITVEEALKHPYLEPYHDPDDEPTAPPIPEEFFDFDKHKDNLSKEQLKQFIYQEIMR

SEQ ID NO: 27108 - protein, 122 aa, Catharanthus roseus
MARSKLFMQKQLLGLVILIWMLAYNPRPSEALTCDDVNNNLISCLSYVAGGGKVPTSCCSGVKNLLSLAKTRNDRQTACSCLKSLAVEANNDQLKRAQTVPKSCSLTIPFPISRDVDCSKVK

SEQ ID NO: 27109 - protein, 473 aa, Salmonella enterica subsp. enterica serovar Typhi str. CT18
MPTHLVWFRRDLRLQDNLALAAACRDASARVLALYISTPAQWQAHDMAPRQAAFISAQLNALQTALAEKGIPLLFHEVADFNASIETVKNVCRQHDVSHLFYNYQYEFNERQRDAAVEKTLPSVICEGFDDSVILAPGAVMTGNHEMYKVFTPFKNAWLKRLKEDIPPCVPAPKIRVSGALSIPLTPVSLNYPQQAFDAALFPVEENAVIAQLRHFCSQGADEYASRRDFPAVDGTSRLSASLATGGLSPRQCLHRLLAEQPQALDGGPGSVWLNELIWREFYRHLMTWYPALCKHQPFIRWTKRVAWQENPHYFQAWQKGETGYPIVDAAMRQLNATGWMHNRLRMITASFLVKDLLIDWRLGERYFMSQLIDGDLAANNGGWQWAASTGTDAAPYFRIFNPTTQRERFDRDGEFIRQWLPALRDIPGKAIHEPWRWAEKAGVVLDYPRPIVEHKQARIATLSAYEAARKGA

SEQ ID NO: 27110 - protein, 568 aa, Aspergillus oryzae
MSGLDVEALLESTAAAAPPQDARQSQERDDRSKADSSDRRDRDRSRDKDRRRRDRSRDRRRDADGDEDMKSPRSEHGSANGSHRSRKRSRSRESDRRRSRRERYGDDYRSGGDYYRGGGRARTRSRSPNDDRYYRPSGRARREERDDDRRSRRERETRRRSPSRERTPELNEDERDRRTIFVQQLAARLRTKELIAFFEKVGPVKEAQIVKDRVSGRSKGVGYVEFKNEDSVAPAIQLTGQKLLGIPIIAQLTEAEKNRQARNPDASSGNNHAAPFHRLYVGNIHFSITENDLQNVFEPFGELEFVQLQKDETGRSRGYGFVQFRDPNQAREALEKMNGFDLAGRAIRVGLGNDKFTPDSSAQRLQSQGANQQNFQGSSFSGHGGRGIQAGGTSNFDRAGGRDSEKGAGASALDDTDVAGVNFNNYSRDALMRKLARTDEPSESSADDKQKVLRPKTETKPLPVNVNMASRCVMLRNMFDPGEEEGESWIKELEDDVRAECEEKYGHVVHIALDPNSQGDIYLKFDRVQGGENAIKGLNGRFFGGKQITAQPVVDAVYSSLFSRTKAI

SEQ ID NO: 27111 - protein, 364 aa, Aspergillus oryzae
MSSYNIVVFGGDHCGPEVTAEAIKVLRAVEKNCDVTFNLQDHLLGGASIDATGSPLTDEALNAAKNADAVLLGAIGGPKWGTGAVRPEQGILKLRKEMGTFGNLRPCNFAAPSLVESSPLRADVCRGVNFNIIRELTGGIYFGERKEDDGSGYAMDTEPYSRAEIERIIRLAAHLALQHDPPLPVWSLDKANVLATSRLWRKVVTEVMAKEFPQLKIEHQLIDSAAMIMVKNPRQLNGIVVTSNLFGDIISDEASVIPGSLGLLPSASLSGIPDGNSKVNGIYEPIHGSAPDIAGKGIVNPVAAILSVAMMMQYSFGLFAEARAIEQAVSNVIESGVRTGDIGGKATTAEVGDAVAAELEKLLK

SEQ ID NO: 27112 - protein, 561 aa, Oryza sativa
MQLSCSGHDTILDHPVLGSCKVTAIYYRYRVINAILLVESSSNCPLQKLASTNVSTAVYEPQKKDGATIVGCSKDSIATNQDGIVGPRSCLNLSSHGSQLWYLVPPRTYMSALPPDCTVVAKGIPIPYNYDRNGPNENQYLDISNLKEKANKVINFGETAFTWHLNKITNACQGCEWNGHHCGFSSQRGQAFCQHQGSQVILIAATSSAATLVVLLLMVGTTIYLSLKTRYNEEIHLKVEMFLKTYGTSKPTRYSFSEVKKITRRFREKIGHGGYGNVYKGELPNGVPVAVKMLENSRGDGQEFINEVATIGRIHHANVLRLLGFCSEGTRRTLIYEFMPNDSLEKYIFSQGPNVSREFLVPDKMLDISLGIARGMEYLHQGCNQRILHFDIKPQNILLDYSFNPKISDFGLAKLCARDQSIVTLTAARGTMGYIAPELYSRNFGVISYKSDVYSFGMLVLEMVSGRRNLDPGIDNQHEVYFLEWIYEKVFTGQNLLIGTEMTQDEKYKVRKLAIVALWCIQWNPKNRPSTTQVVNMLTGRLQDLQMPPKPFVSSASESIP

SEQ ID NO: 27113 - protein, 247 aa, Glycine max
MYIASMGRSFKDSLKLLEADIHHANTLASDFPREYDGTCLQMRMSYSPAAHLFLFFVQWTDCNLAGALGLLRILIYKVYVDGTTTMSTLERKASIREFYAIIYPSLVQLQESVADTEDKKQKAVCMERYRKRDDEEHRQPSDIDIEREEECGICMEMNSKIVLPDCNHVMCLTCYHEWRTRSQSCPFCRNSLKRVNSGDLWVFTDNRDVVDMATATRENLRRLFMYIDKLPLVIPDFLFDTYDSHLR

SEQ ID NO: 27114 - protein, 117 aa, Brassica napus
MSYNNNGNVVPAADPLPGKKTKLQSSRSWVSIVATGESETLDVDKYAIMHRVQIHARDLRILDPNLSYPSTILGRERAVVLNLEHIKAIITADEVLLRDPSDENVIPVLKELERRLP

SEQ ID NO: 27115 - protein, 446 aa, Desulfitobacterium hafniense DCB-2
MNYVPNTVDQQEQILTRIGVGSLEELFADIPESVRRQAQLKIREGLSELELVKYMGRLAAENKTVEEYTSYLGAGAYEHFIPSYVDQLLLRSEFYTAYTPYQPEISQGTLQAIYEFQTLVCELTGMDGANASMYDGASALAEAALMSCDATRRKKVLVPQTIHPEYREVLRTYLLPRGVEILEIPYQEGAVDSEALEKALNTEVAAVLIQSPNFFGMIEKAVEIGQMAHAKGGLLVMAVNPVSLGLLKSPGELGADIVVGEGQPFGNPLNFGGPYLGFLACREKYVRRMPGRIVGATKDKNGKKGYVLTLQAREQHIRREKAASNICSNEALCALAFTIHLSGLGKRGLKEMARLNLQKAHYGAEEIGKLPGMSLAFQGPFFHEFVIKTEVSPRKINEALLSHKIIGGLELSRFYPELDQHLLFCVTETKTKEDIDRLVAGMGEIK

SEQ ID NO: 27116 - protein, 487 aa, Desulfitobacterium hafniense DCB-2
MRALEPLIFELSREGRTGVSLPSCDVPEIPLEDLIPQEFLRDKEPELPEVSEVDVVRHFTRLSSFNHGVDTGFYPLGSCTMKYNPKVNEKLARLPGFSQIHPYQPEELTQGALGLMVELQEELAEITGMDAFTLQPAAGAHGEMTGILIIKAYHDHRQDVKRRKVIVPDSAHGTNPATGAMAGYDIVQVPSNERGGVDIEALRQVANDEVAALMLTNPNTLGLFDENILEIAEIIHSVGGLIYYDGANANAIMGIARPGDMGFDVVHLNLHKTFSTPHGGGGPGSGPVGVKEFLAPYLPKPVAIRTPEGRYSWDEDRPLSIGRVRAFQANFGVLVKAYAYIRALGGEGLKAASQNAVLNANFLMSILKEHYHLPYDRVCMHEFIITPKNLKNYGIHTLDIAKRLLDYGYHPPTIYFPLIVEEAMMIEPTETESLETLEQFARVMIQIAEEVKQDAEMVKNAPHDTLVTRLDETGAARKPDLRWRKPQ

SEQ ID NO: 27117 - protein, 438 aa, Bacillus cereus G9241
MFGKTAGEALVDLLIDWGVEHIYGMPGDSINSIIEALRKKQDKIKFIQVRHEEAGALAAAAYAKLTGKLGVCMAIAGPGAIHLLNGLYDAKLDKAPVLAISGQVETDLLGTDFFQEINLERMFDDVAVYNQRIMSAEQLPAVVNQAIRMAYTKKGVSVLTIPDDVPKFEVKNGVRVTNTSFTLPELFPQKEDLNAAKFAINEAKKPVILAGKGTKHARESLLALAEHIGAPIVLTLPAKGIIPDEHPLCIGGLGLIGTKPSYEAMKHADTLIMVGTSYPFTGFLPEKAKTIHIDTDPAQIGKRYATDIGLAGDADKTLRWLIENVEEHTDHSFLEHHQDMMKKWEEKLHDQEEDSSIPIKPQRVMHALQQVAHDNAILSVDVGNVTVWTARHFRMTNQQFVISSWLATLGCGLPGALAGKIAFPDKQVFAVCVMADLE

SEQ ID NO: 27118 - protein, 412 aa, Enterococcus faecalis
MEFSLDNNINNGAVIKVIGVGGGGGNAVNRMIEENVKGVEFITANTDVQALKHSKAETVIQLGPKYTRNLGAGSQPEVGQKAAEESEQVISESLQGADMIFITAGMGGGTGTGAAPVVAKIAKELGALTVGVVTRPFSFEGPKRGRFAAEGIALLKENVDTLLIISNNRLLEVVDKKTPMLEAFREADNVLRQGVQGISDLITAPGYVNLDFADVKTVMENQGTALMGIGVASGEERVIEATKKAISSPLLETSIDGAEQVLLNITGGLDMTLFEAQDASDIVTNAASGDVNIILGTSINEDLGDEIRVTVIATGIDESKKDRKPLTPSNKTSGSHQCNKQLNLWKWINQNHKKKQVLLAIGIFAENKIHVQKLMNLSLEQVDKKEFDTFHREEPNHNDDELSTPPFFRRKR

SEQ ID NO: 27119 - protein, 128 aa, Zea mays
MAASMISSSALAVAPQGLPPLGRRASSFAVVCSKKKIKTDKPYGIGGGLTVDVDANGRKGKGKGVYQFVDKYGANVDGYSPIYNEDDWSPTGDVYVGGNTGLLIWGGTLPGILRGGGLLVYNNNGLSG

SEQ ID NO: 27120 - protein, 376 aa, Oryza sativa
MATAAAASLQYALHGAASASAKPRSAAPGRSVRVVAARRSASADATAESKSGGHEVLLFEALREALIEEMKEDPTVCVFGEDVGHYGGSYKVTKGLAEMFGDLRVLDTPIAENSFAGMGVGAAMKGLRPIVEGMNMGFLLLAYNQISNNCGMLHYTSGGQFKIPIVIRGPGGVGRQLGAEHSQRLESYFQSIPGLQMVACSTPYNAKGLMKAAIRSENPVVLFEHVLLYNLKEKIPDEEYICCLEEAEMVRPGEHVTILTYSRMRYHVMQAAKTLVNKGYDPEVIDIRSLKPFDLHTIGNSIKKTHRVLIVEECMRTGGIGASLRSAIIDNFWDYLDAPIMCLSSQDVPTPYAATLEDATVVQPAQIVAAVEQICQ

SEQ ID NO: 27121 - protein, 280 aa, Fagus sylvatica
DACENWGFFELVNHGLPHELLDTVERLTKEHYKKCMEQRFKELVTAKGLEGVQTEVNDLDWESTFHVRHLPQSNISEIPDLEDEFRKVMKEFALKLEKLAEELLDLLCENLGLEKGYLKKAFHGSKGPNFSTKVSNYLPCPKPDLNKGLRAHTDAGGIILLFQDDKVSGLQLLKDGQWIDVPPMRHSIVINLGDQLEVITNGKYKSVLHRVIAQTNGNRMSIASFYNPGGDAVIYPATALVEKEAEEKNNVYPKFVFEDYMKLYAGLKFQAKEPRFEAMK

SEQ ID NO: 27122 - protein, 184 aa, Arabidopsis thaliana
MAEVLRPEMLDISNDTSSLASPKLLHVLAVDDSMVDRKFIERLLRVSSCKVTVVDSATRALQYLGLDGENNSSVGFEDLKINLIMTDYSMPGMTGYELLKKIKESSAFREIPVVIMSSENILPRIDRCLEEGAEDFLLKPVKLADVKRLRDSLMKAEERAFKNIMHKRELEANDIYSQLKRAKI

SEQ ID NO: 27123 - protein, 325 aa, Methylococcus capsulatus str. Bath
MHPTAARTGVLLINLGTPEAPTPKAVRRYLREFLSDPRVVEIPRVLWWPILNLVVLRTRSRKSAHAYRTIWTERGSPLLAYTQDLRDRLAADGRFAAVEIAMRYGNPSVRLKLEELRNRVETIVVLPLYPQYSAATTGSAFDAVCDTLKTWRHIPSLHFIGDYHRSPKYLEAVAASIRSFWQEHGRPERLVFSFHGLPKCCIDRGDPYASQCQATAQGIARLLELSDDEWLLTYQSRFGRAEWLRPYCIDTLRELPSQGIRHVDVVCPGFAVDCLETLEEIAIANRNEFLGAGGKNYRYIPALNASPAHADILIGLLEPYLALTA

SEQ ID NO: 27124 - protein, 466 aa, Thermoanaerobacter tengcongensis MB4
MPLNRSKKKTPMPTQKPEVRRRNFNEVALGYSEEEAVSEAQRCLQCKKPGCVEGCPVQVQIPQFIKRIAERDFEGAIKIIKETNSLPAICGRVCPQETQCEKNCVLGKVGEPVAIGRLERFAADWERAKGIRPPVIPKKLGKKVAIIGSGPAGLTCAGDLAKLGYDVTIFEALHKPGGVLVYGIPEFRLPKIIVEQEVKFIQQLGVEIKTNMVMGKVLTIDDLFEMGYEAVFISTGAGLPKFMGIPGENYLGVYSANEFLTRINLMKAYSFPNTDTPIKVGKKVAVIGGGNVAMDAARSALRMGADEVHIVYRRSEEEMPARKEEFENAKEEGIIFDFLTNPVRIIGNENGWVKGIECIRMELGEPDASGRRRPVPITGSEFIMDVDTIVIAIGTGPNPLLTKTTEGLELTKHGYIAVDEEGRTSREGVWAGGDIVTGSATVILAMGAGKKAARSIHEYLQNKKWR

SEQ ID NO: 27125 - protein, 319 aa, Fagus sylvatica
MENFPVINLEKLNGEERGTTMEKIKDACENWGFFELVNHGLPHELLDTVERLAKEHYKKCMEQRFKELVTAQGLEGVQTEVNDLDWESTFHVRHLPQSNISEIPDLEDEYRKVMKEFALKLEKLAEELLDLLCENLGLEKGYLKKAFHGSKGPNFGTKVSNYPPCPKPDLIKGLRAHTDAGGIILLFQDDKVSGLQLLKDGQWIDVPPMRHSIVINLGDQLEVITNGKYKSVLHRVIAQTNGNRMSIASFYNPGGDAVIYPATALVEKEAEEKNNVYPKFVFEDYMKLYAGLKFQAKEPRFEAMKAVESNVTVGPIATA

SEQ ID NO: 27126 - protein, 383 aa, Cryptococcus neoformans var. neoformans JEC21
MSSCCGGNNSNGCCKSNSQQESNAAVPLLRGNKNSNVNSRPSSSNGTSYGAIWSVDNAAHPSNRTQQLQDVLGDVQPLGSKCGAHESGGQCCKDLKGDDERHLVSPEIVRDVVIGLSDGLTVPFALTAGLSSLGSSSLVVTGGLAELCAGAISMGLGGYLASQAELDHFHYLRRQTQARVLRSCSGEMEREIHSILGPLGVKEPLSRLVAEDLRSVEDEIYGSSGAEGSEGVMSGANVVSESGNKKWALLNWRPKKVEEEDGGMRGNEEMGMTAFLLKFGEGMEEVPVSRLYISALTIGLSYFIGGLIPLIPYMATSTAEEGLLYSAIVTSIILFIFGGFKTYFTGATGGWYGYAYGAISTMIVGGCAAGAAFGLVKVLDVQD

SEQ ID NO: 27127 - protein, 226 aa, Hordeum vulgare subsp. vulgare
SLQAFIVHHPNGVAFYGVVLDGPGGSVATVTEYMANGSLRQALQRHEKIFDRRRRLLIVMDVAFGMEYLHGKNIVHFDLKSNNLLVNLRDPQRPICKVGDLGLSKVKCQTLISGGVRGTLPLMAPELLNGSSNLVSEKVDVFSFGIVMWELLTGEEPYADLHYGAIIGGIVNNTLRPLVPESCDPQWRSLMEQCWSAEPTERPSFTEVVKRLRAMATSPTKPLLQK

SEQ ID NO: 27128 - protein, 574 aa, Thiomicrospira crunogena XCL-2
MNTEIKFSDLGLSAPILKTLEEIGYETPSPIQEQAIPVLLKGGDILGMAQTGTGKTAAFALPILSKIDLKQKDPQVLVLAPTRELAIQVAEAFQTFSRGVKGLHVLPIYGGSEYGTQIRALKRGVHVVVGTPGRVMDHIKKGTLKLDTLKVMILDEADEMLRMGFIDDVEWILKHTPDTRQIALFSATMPKEVHRIANTYLQDPTEVIIKQKAATASLIEQKYWLVSGLHKLDALTRILEAETFDGIIIFVRTKTATVELAEKLEARGYAAAALNGDVAQNQRERTVDQLKKGKLDILIATDVVARGLDVERISHVINYDIPYDNESYVHRIGRTGRAGRSGTAILFVAPRERRLLRSIEASTKKKITQMELPTAQEINDSRITRFKDKIVDAAQGTDLDFYQKMVESIESDNNIPAIEIAAGLAKLLQGDVPFFLDEKPVKHKEFKERDGGRERNPRRAKGERSERGDRGNRSRRQTPPNEGMARFRVEVGRQHGVKPGNIIGCIANEAGLDGEFIQKLTIEDNYSMVDLPSDMPKNVFNELKGAWVCGQQLKINPVKDVSQSAKRRLKPRKK

SEQ ID NO: 27129 - protein, 391 aa, Silicibacter sp. TM1040
MAKEKFERNKPHVNIGTVGHVDHGKTTLTAAITKYFGDFKAYDQIDGAPEEKARGITISTAHVEYETEGRHYAHVDCPGHADYVKNMITGAAQMDGAILVVNAADGPMPQTREHILLARQVGVPALVVFMNKVDQVDDEELLELVEMEIRELLSSYDFPGDDIPIIAGSALAAMEGRDPEIGENKIKELMAAVDEYIPTPERAVDQPFLMPIEDVFSISGRGTVVTGRVERGVINVGDNIEIVGIKDTTTTTCTGVEMFRKLLDRGEAGDNIGALLRGIDREAVERGQVLCKPGSVTPHTKFEAEAYILTKEEGGRHTPFFANYRPQFYFRTTDVTGTVTLPEGTEMVMPGDNLKFEVELIAPIAMEDGLRFAIREGGRTVGAGVVSKILA

SEQ ID NO: 27130 - protein, 427 aa, Alkalilimnicola ehrlichei MLHE-1
MEAIPLSTLFIALGVLIVLSGCFSGSETGLMAVNRYRVRHLARQGHRGARLAERLLERPDRVLGVILLGNNLVNIAASSLATLIAIRLMGEAGIALAAVLLTITILIFSEVTPKTLAAVNPERVAFPAAYALTPLLLVSYPVVWMVNTVANGLLRLFRVRVTDTGDDSLSREELRTVVNEAGNLIPRRHQKMLLSILDLEYATVEDIMVPRNEVVGLDLDAPWAQTVEMLINTQYTRLPVYRGAIDNLVGMIHVRQLLADLLRSDFTRSDLESRVGEAYFIPEGTGLHQQLLNFQRRRERIGLVVDEYGDIMGLAALDDILEEIVGEFTTDPGSALANMHQEPDGSWMVEGQTTVRELNRVLKWGLPANGPRTLNGLILEHLESIPEAGTSLLIQGWPVTILQTQDNRVKMARVQPHHKRRRQPRRH

SEQ ID NO: 27131 - protein, 515 aa, Saccharophagus degradans 2-40
MQKDKLVIFDTTLRDGEQSPGASMTQEEKIRIAKMLEKMRVDVIEAGFAIASPGDFAAVKAVAEAVKDSRVCSLARALDGDIDRAAEALKGANASRIHTFIATSPIHMKHKLKMEPDAVLAQAIHAVKRARSYTDDVEFSLEDGSRSEFDFMCRITEAAIAAGARTINVPDTVGYGEPGEYGAMFKRLIEAVPNSDLAIFSTHCHNDLGLAVANSLSAVMNGVRQIECTINGLGERAGNAALEEVVMAVRTRKDLFPVETNIVTEHIVPTSRLVSTITGFPVQPNKAIVGANAFAHESGIHQDGVLKHRETYEIMRAEDVGWNTNKIVLGKHSGRAAVKARFEDLGITFDTPEALSEAFARFKALADKKHEIFDQDLQALVSEADNASREEKYKLVALEVVCKTGQNPHAQLTLSIGGELVEASSEGGGPVDAAYKAIESVVNSHTDLLLYSVNNITQGTDSQGEVTVRLERNGNIVNGIGADTDIVTASIKSYLDALNLLESNKSRAHPQREGV

SEQ ID NO: 27132 - protein, 917 aa, Prunus persica
MDSAPTALLVGKIMDILENEAYSIAAVRDEVDEIKQELVSMTSFLEDVEGKKTQTETQKAWVTSVKDLTSDVEDIIDEFMYHTYEQQSRGRFARWLHRTIHIPKNLFYRRKIANKLHKITKMIKAIPERNRRYALDGVVGTSWDDISKWVKNQAVSSLFINKDELVGIDGKKQTLTAWLLNEEQHLTVVSVVGMGGSGKTTLVAKTFANETVKRHFDSYAWITVSQTYVIEDLFRSLIKELHQTRKEDVPADPISMSYRDLLQLLVNYLESKRYLVVLDDVWDIKLWREIRIALPDRQLGSRIMLTTRKEDIASHCFGVESHVHCMQPLEKNYAWELFSRKSFSTFDGKCCPPELEKLAWELMEKCKGLPLAIIALGGLMSSKKLAAEWSKVYNGLNWHLTSHHLLEPVKSILLLSFNDLPYRLKHCFLYCSLFPEDYLIRRKRLIRLWIAEGFVEHARGVTPEQVADSYLMELIFRNMLQVVERNETGRPKSCKMHDLMRELALSTSEKEKFSIVHDGKEVLEDIGARRLSIQTTQGGIESCIGMSRPRSFLVFVTGIFSFSFSKSLPSGFKLLRVLDLEDVQIDKLPHNLVYLFNLRYLSLKGTQIKELPKAIGLLRNLQTLNILNTKIEVLPRGISKLQNLRHLIMLRHSGEYMAFKTAHGTRVPFNISKLKKLEVLSCVESEGNIIRLIGNMTQLTRIGITNVKERDAMDLCDSIQKLKLLQCLALRVSGEEEFLDVNALSSPPPHLRKLIFGSKLQKVPPWFSSLQNLTYLYLHWTRLDEDLLPHIEALPCLGRLLLVNAYVGNELCFNRGFPKLTILELFNFPLLNKITIAEGVMRNLRLLTLARCMELKALPQGFEYLSKLETLELLSVSMQLIESIQEGGVDHPTVKHITVITNYSLKCLIRAHHSSST

SEQ ID NO: 27133 - protein, 717 aa, Azospirillum brasilense
EFTPISWDQAFDIMATKWKETLKKKGPTAVGMFGSGQWTIMEGYAASKFMKAGLRSNNLDPNARHCMASAVVGFMRTFGMDEPMGCYDDMEQADAFVLWGSNMAEMHPILWTRVTDRRLTHEGCKVAVLSTYEHRSFDLADIGLVFTPQSDLAILNYIANHIIKTGRVNQEFIAKHVNFKRGRDDIGYRLRPEHPLEQKAKNVAKANESDPISFEEFAKFVEPYTLEKAHELSGVPKNRLEALAELYADPKVKVMSFWTMGFNQHTRGVWANNLVYNIHLLTGKISQPGCGPFSLTGQPVRCGTAREVGTFSHRLPADMVVTNPEHRKHAEEIWKLPEGTIPDKVGYHAVQQDRMLKDGKLNAYWVQCNNNMQTAPNTANETYLGYRNPENFIVVSDAYPTVTALAADLILPTAMWVEKEGGYGNAERRTQVWHQLVGAPGEARSDLWQIIEFSKRFAIEEVWPEELIAKKPEVRGKTLYDVLYCNGQVNAFPLSDCDPAYENRESQAFGFYVHKGLFEEYATFGRGHGHDLAPYDMYHQERGLRWPVVNGKETKWRYREGFDPYVPAGEGVRFYGNKDGKANIFALPYEPAAESPDKDYPFWLCTGRVVEHWHSGSMTLRVPELRKAFPSAVVFIHPDDAKDLNLRRGQEVRIASRRGEVRVRVETRGRNKPPRGLVFVPFFDHTVLINKVTLDATDPLSKQTDFKKCAVKIIPVA

SEQ ID NO: 27134 - protein, 575 aa, Zea mays
MASHIILPPDDADENHNHQAAAAAEEEEEERDELGRDDDDDEHGVPPALPPKAALPFSATCVRISRDSYPNLRALRNASSVSLADAAYVKISEADFGYVLDDVPHFTDYLPDIPTYPNPLQDHPAYSTVKQYFVNEDDTVPQKVVVQKNSRRGVHFRRAGPRQRVYFGTDEVKACIVTCGGLCPGLNTVIRELVCGLSHMYNVSSIFGIQNGYKGFYSSNYLPLTPKSVNDIHKRGGTVLGTSRGGHDTKKIVDNIQDRGINQVYIIGGDGTQKGAYEIFKEIRKRGLKVSVAGVPKTIDNDIAIIDKSFGFDTAVEEAQRAIDSAHVEACSAENGIGLVKLMGRYSGFIAMYATLASRDVDCCLIPESPFYLDGEGGLLQYVEKRLKENKHMVIVVAEGAGQDLIAKSLATSDQQDASGNKLLLDIGLWLTHKIKDYFKSKKMEMTIKYIDPTYMVRAIPSNASDNVYCTLLAHSAIHGAMAGYSFTVGMVNGRHTYIPFYRVTSTRNKVKVTDRMWARLLSSTNQPSFLSQKDIDEASEADRLANRPPLPTGASSRVVRSFDQSSSCSSNGEI

SEQ ID NO: 27135 - protein, 645 aa, Oryza sativa
MAAAARDALLDELRALMAAHSPPLHALVVPSEDAHQSEYVSERDKRRQFVSGFTGSAGLALITMKEALLWTDGRYFLQAEQQLSDRWKLMRMGEDPPVEVWIADNLSDEAVVGINPWCISVDTAQRYEHAFSKKHQTLFQLSSDLIDEIWKDRPSAEALPVFVQPVEYAGRTVTEKLKELREKLLHEKARGIIIAALDEVAWLYNIRGDDVHYSPVVHSYSIVTLHSAFFYVDKRKVSVEVQNYMTDNGIDIKDYNMVQSDASLLASGQLKGSAVNGSSYGENDMNENSKVWIDSNSCCLALYSKLDQDQVLMLQSPIALPKAVKNPVELDGLRKAHIRDGAAVVQYLAWLDNQMQENYGASGYFSEAKGSQKKQHMEVKLTEVSVSDKLEGFRASKEHFKGLSFPTISSVGPNAAVIHYSPEASSCAELDADKIYLCDSGAQYLDGTTDITRTVHFGKPSEHEKSCYTAVLKGHIALDSAVFPNGTTGHALDILARTPLWRSGLDYRHGTGHGIGSYLNVHEGPHLISFRPSARNIPLQASMTVTDEPGYYEDGSFGIRLENVLIVKEANTKYNFGDKGYLAFEHITWAPYQTKLIDTTLLTPAEIEWVNAYHADCRKILQPYLNEQEKEWLRKATEPIAVSCC

SEQ ID NO: 27136 - protein, 336 aa, Magnaporthe grisea 70-15
MVKCGINGFGRIGRIVFRNAIEHPDCEIVAVNDPFIEPKYAKYMLEYDSTHGRFKGTVEVSGSDLVVNGKKVKFYTERDPANIPWSETGAEYVVESTGVFTTTDKASAHLKGGAKKVIISAPSADAPMYVMGVNEKSYDGSASVISNASCTTNCLAPLAKVINDKFGIVEGLMTTVHSYTATQKTVDGPSAKDWRGGRGAAQNIIPSSTGAAKAVGKVIPALNGKLTGMSMRVPTANVSVVDLTCRLEKGASYEEIKAAIKEAADGPLKGILEYTEDDVVSSDMIGNNASSIFDAQAGIALNDKFVKLVSWYDNEWGYSRRVIDLVTYISKVDGGK

SEQ ID NO: 27137 - protein, 162 aa, Halobacterium sp. NRC-1
MNVALGGTFDPIHDGHRKLFERAFDRGDVTVGLTSDDLAADTRHVDRHVRSFDARHADLDDELAALAETHDREYTIRTLDSPTGIATEPHFDVLVVSPETAAGGERINELRAQDGTDPLEIEVVDHVDAADGDIISSTRIVRGEIDEHGALTPGREGRDPRQ

SEQ ID NO: 27138 - protein, 493 aa, Chlamydomonas reinhardtii
MASFGLMQRTVHCPQLVEERCSPVAGCSGRGLPVIQRQRRGVCSATNGVQRGRVLRRTAASTDVVSFVDPNDIRKPAAAAAGPAVDKVGVLLLNLGGPEKLDDVKPFLYNLFADPEIIRLPAAAQFLQPLLATIISTLRAPKSAEGYEAIGGGSPLRRITDEQAEALAESLRAKGQPANVYVGMRYWHPYTEEALEHIKADGVTRLVILPLYPQFSISTSGSSLRLLESLFKSDIALKSLRHTVIPSWYQRRGYVSAMADLIVEELKKFRDVPSVELFFSAHGVPKSYVEEAGDPYKEEMEECVRLITDEVKRRGFANTHTLAYQSRVGPAEWLKPYTDESIKELGKRGVKSLLAVPISFVSEHIETLEEIDMEYRELAEESGIRNWGRVPALNTNAAFIDDLADAVMEALPYVGCLAGPTDSLVPLGDLEMLLQAYDRERRTLPSPVVMWEWGWTKSAETWNGRIAMIAIIIILALEAASGQSILKNLFLAE

SEQ ID NO: 27139 - protein, 488 aa, Bacillus cereus E33L
MTVQTAPQIVKNYIGGEWVESISTKMEAVYNPATGEVIAQVPLSTKVDVEQAVSAANEAFKSWSKTAVPKRARILFKYQQLLVDNWEELAKLITIENGKSYNEAYGEVLRGIECVEFAAGAPTLMMGKQLPDIATGIESGMYRYPIGVIGGITPFNFPMMVPCWMFPLAIACGNTFVLKPSERTPLLAARLAELAEEAGLPKGVLNIVNGAHDVVNGLLEHKLVKAISFVGSQPVAEYVYKKGTENLKRVQALAGAKNHSIVLNDANLELATKQIISAAFGSAGERCMAASVVTVEEEIADQLVGRLVEEANKIVIGNGLDEDVFLGPVIRDNHKERTIGYIDSGVEQGATLVRDGREDTAVKGAGYFVGPTIFDHVTKEMKIWQDEIFAPVLSIVRVKSLDEAIEIANESRFANGACIYTDSGASVRQFRETIESGMLGVNVGVPAPMAFFPFSGWKDSFYGDLHANGTDGVEFYTRKKMLTSRWEK

SEQ ID NO: 27140 - protein, 482 aa, Zea mays
MASSDHGSTTAPKDVPGSYGLPLVGAVRDRLDFYYFQGQDKYFESRVERYGSTVVRMNVPPGPFMARDPRVVAVLDAKSFPVLFDMDKVEKKDLFTGTYMPSTSLTGGYRVCSYLDPSEPTHTKVKQLLFSLLLSRKDDVIPTFRSNFSSLLATVEAELAKGGKAEFNKLNDVTSFDFIGEAYFGVRPSATELGKGGPTKAAKWLIWQLHPLVTLGLPMVLEEPLLHTFHLPPFLVKGDYRALYKYFSTVAKQALDTAEGLGLSREEACHNLLFATTFNSYGGLKVLFPGLLANVASGGEKLHERLVAEIRGAVADAGGKVTLAAVERMELAKSVVWESLRLDPPVKFQYGHAKKDLLVESHDAVFQVRKGEMLFGYQPCATKDPRVFGDTAGDFVPDRFLGEEGSKLLQYVYWSNGRETENPSVDNKQCPGKNFVVLVGRLLLVELFLRYDTFTAEVGKELLGTSVIFTGVTKATSGPGSE

SEQ ID NO: 27141 - protein, 829 aa, Vibrio parahaemolyticus RIMD 2210633
MKMTRRAFVKANAAASAAAVAGITLPASAANLIASSDQTKITWDKAPCRFCGTGCSVLVGTQNGKVVATQGDPEAPVNKGLNCIKGYFLSKIMYGQDRLTQPLLRMKDGKYHKDGEFTPVSWDVAFDTMAEKWKASLEKKGPTSVGMFGSGQWTVMEGYAAAKMMKAGFRSNNIDPNARHCMASAVVGFMRAFGIDEPMGCYDDFENADAFVLWGSNMAEMHPVLWTRITDRRLSHPHVRVNVLSTYYHRSFELADHGYIFNPQSDLAIANFIANYIIENDAVNWDFVNKHTNFTQADTDIGYGLRDDDPLQKAAKNPNSGKLTSISFEEYKKSVAPYTVEKASEISGVEKEKLIELAKQYADPNTKVMSLWTMGMNQHTRGVWMNNLVYNIHLLTGKIATPGNSPFSLTGQPSACGTAREVGTFAHRLPADMVVANPKHRQIAEKIWKLPEGTIPPKPGFHAVLQDRMLNDGVLNCYWVQCNNNMQAGPNINTERLPGYRNPENFIVVSDPYPTATAQAADLILPTAMWIEKEGAYGNAERRTQAWYQQVGTVGDAKSDLWQVMEFSKRFKMEEVWPEELLAKAPQYRGKTMYDMLFKNGQVDKFPLEEARELNDDSHHFGFYVQKGLFEEYATFGRGHGHDLAPYDVYHTVRGLRWPVVDGKETQWRFKEGSDPYAKAGSGWDFYGNADGKAKIISAPYEAPPEVPDSEFDLWLCTGRVLEHWHTGTMTRRVPELYKAVPDAVCYMHPEDAKARNVRRGEEVVIANKRGEVRVRVETRGRNRPPKGLVFVPFFDARILINKLILDATDPLSKQTDFKKCPVKITKVA

SEQ ID NO: 27142 - protein, 440 aa, Polytomella sp. Pringsheim 198.80
MFLPQTRKISSSVCLAFQKNGISPLLNSSFHSASTPKDAKIDSTYSSENVKNISSPSSPNEKLGVFLLNMGGPSTVKDVEPFLYNLFNDPDIIRMPPVANMFQPIVAKIISSTRASKSAKGYESIGGGSPLYPLTKDQGDALQNSLEKRGISAKMYIGMRYWHPFTEDSIKQIKADGITKLVALPLYPQYSISTTGSSLRCIRDEFNSDPYLSQVPLAVISRFSSRPGYIQSMADLVQLELKKFQNPSEVHIFFTAHGVPKKYVTDFLDPYQQEMEECVSLIMADLKARGVSNSHLLAYQSRVGPTEWLKPYTSEAIPALGALGCKGLLAVPISFVSEHIETLDEIDEEYRELALHSGIKEWGRVPALCSYPPFIEDLADAVQDAFSDTKPIVERNVELDGKPDNKVVMAMGKVLRTWQGQVAAVSSVVGSSTYLWSNLF

SEQ ID NO: 27143 - protein, 387 aa, Oenococcus oeni PSU-1
MIKKIQFFDTTLRDGEQTIGVNFSIEEKIAIAQQLEKWGIDVIEAGFPIASKGDFQAVQAVASSIKKARVTALARANKKDIDACVQATAPAIHKQIHIFIATSPIHRQSKLHMTKKEVLEKIKGSIEYAHHFFEIIEFSPEDATRTERTFLVQAIETAITAGASVINIPDTVGYTNPAEFADLFTYLRKNIPTFDEVIFSVHCHDDLGMAVANSLASIENGATRIEGTINGIGERAGNAALEEIAAALYVRKDYYHATDNINLKDTQATSEMISRYSKMPLPKNKAVVGNNAFAHESGIHQDGMLKNPQTYEILRPETVGGKSTRLPLGKLSGSHAVMEKLKEMGYPFDHESMKIIFPIFKERADKKALIDEKDLQVIMQQISEVKR

SEQ ID NO: 27144 - protein, 481 aa, Zea mays
MPEPGGRCLGDLGGQRQVLKGWPDLWLVGDKPGLRALSTAAMAAAPQPPPLEADQTLALPDVLLLRVLACLPEPQLTGAASLVCRRWTRLAGRLRRRLAVRDWAFVAHRLPYRFPDLADLDLFPASIAAPTTAVPHGAAASPLLTCGVVSLTLDTSADPPLGACRFIDDDALDRGLAAVAASFPNLSRLSATAASESGGLMAIAVGCPTLQELELHRCTDLALRPVSAFAHLQILRIVAASPALYGTAEGGGVTDIGLTILAHGCKRLVKLELQGCEGSYDGIAAVGRCCAMLEELTIADHRMDGGWLAALAFCGNLKTLRLQSCSRIDDDPGPAEHLGACLTLESLQLHRCQLRDRSALHALFLVCEGAREIQFQNCWGLEDDMFALAGLCRRVKILLLEGCSLLTTRGLESVITSWGDLQSLEVVTCNKIKDEEITPTLAELFSNLKELKWRPDNKSLLAASLVGTGMGKKGRVFFKRV

SEQ ID NO: 27145 - protein, 949 aa, Robiginitalea biformata HTCC2501
MKTAQFASRHLGIRPGDLPAMTGRIGVENLEQLIYETLPDGIRLKGPMQLDPPMAEHEFLQHIHELGRENDLMKSYIGLGYHPTITPSVIKRNILENPGWYTAYTPYQAEIAQGRLEALLNFQTVVSDLTGMELANASLLDESTAAAEAMAMIFELRSREQKKTGCVKFFVSEGVLPQTLALLETRSAPLGIELVPGAPETARLDGDFFGALLQYPAADGSVGEFGDFVAQAHSLDIKVAVAADLMSLCLLVPPGEFGADVVVGSTQRFGIPMGYGGPHAAFFATREAYKRQIPGRIIGLSKDVDGKPALRMALQTREQHIKRDKATSNICTAQVLLAVMAGAYAVYHGPDGLRRIAGNIHAAAASLAEGLEKMGVSLRHSSFFDTVTAEVPAGAVRKEAEAAGINLNYFGDGVSVSLNETTGPWDIADILEVFARALGTDSPGCTDFSAESRIPAGLRRATDFLGQDVFNRYHSETEMMRYLKKLERKDLALNHSMISLGSCTMKLNAATQMLPLSMAEWGNLHPFVPVSQATGYQKMLRKLEAYLTEITGFAATSLQPNSGAQGEYAGLMVIRAYHESRGEGHRNVCLIPASAHGTNPASAVMAGMKVVVTKTDDKGNIDVADLEEKVAAHSDSLAALMVTYPSTHGVFESSIRQVTQLIHDNGGQVYMDGANMNAQVGLTNPATIGADVCHLNLHKTFAIPHGGGGPGVGPICVAPQLAEFLPKNPLVETGGKHGIPAISAAPWGSALVCLISYAYIRMLGAEGLTQATKIAILNANYIKERLREAYPILYTGELGRAAHEMIIDCRPFKKMGIEVTDIAKRLIDYGFHSPTVSFPVAGTMMIEPTESESLEELDRFCDALLSIRREIDLSGEQPNPILKNAPHTADMVTADTWDYPYSRAEAAFPLPHVRENKFWPSVRRVDDAFGDRNLMCTCAPLEAYAETVE

SEQ ID NO: 27146 - protein, 180 aa, Vitis pseudoreticulata
MASSMVSSATVATINRATPAQANMVAPFTGLKSLSTFPGTRKANTDITSIASNGGRVRCMKVWPTEGLMKFETLSYLPPLTDEQLSKEVDYLLRMNWIPCLEFTKLYPYPHREHNRSPGYYDGRYWTMWKLPMFGCTDSAQVIKEVQEARTEYPNAHIRIIGFDNNRQVQCIAFIAYKPS

SEQ ID NO: 27147 - protein, 375 aa, Zygosaccharomyces rouxii
MDSEVAALVIDNGSGMCKAGFAGDDAPRAVFPSIVGRPRHQGIMVGMGQKDSYVGDEAQSKRGILTLRYPIEHGIVTNWDDMEKIWHHTFYNELRVAPEEHPVLLTEAPMNPKSNREKMTQIMFETFNVPAFYVSIQAVLSLYSSGRTTGIVLDSGDGVTHVVPIYAGFSMPHAILRIDLAGRDLTDYLMKILSERGYSFSTTAEREIVRDIKEKLCYVALDFEQEMQTAAQSSSVEKSYELPDGQVITIGNERFRAPEALFHPSVLSLESSGVDQTTYNSIMKCDVDVRKDLYGNIVMSGGTTMFPGIAERMQKEITALAPSSMKVKIIAPPERKYSVWIGGSILASLTTFQQMWISKQEYDESGPSIVHHKCF

SEQ ID NO: 27148 - protein, 547 aa, Thiomicrospira crunogena XCL-2
MSLSPYAGKPAPLSLLENIPKLMTDYYNLIPDASNPDQAVAFGTSGHRGCASNTAFNENHIAAIAQAIVEYRDEQGISGPIFIGMDTHALSEAAHATAIEVFAGNSLNVIIQGNGRYTPTPVVSHAILTYNQNRTQALADGVIITPSHNPPQDGGFKYNPTNGGPADTDATTVIQDRANDILMNDMSAINRMPLADALASEFVSAEDLIMPYVKDLENVVDMKAIKDAGLKLAIDPMGGAAIDYWQPIADHYGLNLEIVNQHVDPTFSFMSVDKDGKIRMDCSSPYAMAGLIALKDNYDIAFGNDPDVDRHGIVTKSVGLMNPNHYLAVAIHYLCTHRPQWSDSVKIGKTLVSSSMIDRVVTSLGKNLSEVPVGFKWFVDGLVSGDFAFGGEESAGASFLRMDGTTWSTDKDGIIMNLLAAEITAVTGKDPGQLYQELTEQFGHPVYSRIDAPANREQKAILKNLSPDMVKADTLAGEPILDKLTHAPGNGAAIGGLKITTENGWFAARPSGTEDIYKIYAESFKGQSHLDEILKEAQAIVTDALNG

SEQ ID NO: 27149 - protein, 353 aa, Coccidioides immitis RS
MVQPGAQGGSRKISFNVSDQYDIQDVIGEGAYGVVCSALHKPSGQKVAIKKITPFDHSMFCLRTLREMKLLRYFNHENIISILDIQKPRNYESFTEVYLIQELMETDMHRVIRTQDLSDDHCQYFIYQTLRALKAMHSANVLHRDLKPSNLLLNANCDLKVCDFGLARSAASTDDNSGFMTEYVATRWYRAPEIMLTFKEYTKAIDVWSVGCILAEMLSGKPLFPGKDYHHQLTLILDVLGTPTMEDYYGIKSRRAREYIRSLPFKKKIPLKALFPKTSDLALDLLEKLLAFNPVKRITVEEALRHPYLEPYHDPDDEPTAEPIPEEFFDFDKNKDSLSKEQLKVLIYEEIMR

SEQ ID NO: 27150 - protein, 552 aa, Chlamydophila abortus S26/3
MQSNSNDLNDVVIPGTPPLPRELQKFPSLIPTNDLRFSPKFDADVAKLFPNTYDSPYLKFTSGTPDQPVRPLKVGVMLSGGPAPGGHNVIWGLLHSLKKIHPDSSLIGFLNNGQGILNNHTIEITEEFMECFKNSGGFNCIGTGRTNIITEENKAVCLKTVQALDLDGLVIIGGDGSNTATAILAEYFSQHHPKTCVVGVPKTIDGDLQHLFLDLTFGFDSATKFYSSIISNISRDTLSCKAHYHVIKLMGRSASHIALECTLQTHPNITLIGEEIAEKNVPLNTIIHKVCSIIADRAAMGKYYGIILIPEGIIEFIPEINNLVKEIERIPEHADKFSSLSRESQKLLKSFPETIAKQLLNDRDAHGNVYVSKISVDKLLIHLVDNHLKKHFKNVPFNAISHFLGYEGRSCLPTKFDNTYSYALGYGAGVLTYNRCNGYLTVIESLINIVDKWRLRAMPIVKMFTTKKKSDGTIKPLIKKSLIDISSPAFVKFKLYRKIWALEDSYRVLGPLQIDTPPNSHSDHFPPLTLLLNHNEWQKRCSICMEIPDCDY

SEQ ID NO: 27151 - protein, 465 aa, Chlamydomonas reinhardtii
MGSCLAKPAESAEQKKASSVPSPPPAPAPQPVQQAAAPAPKDSGDVKPGQQATPVPPPSPPPQPKPAPPAQPAPAPAAKVVEAIPAVADEKSPQGKQPRRSQEHDNGVKAEEIELVKQKSTEPQPSASATAAVATPKAIEPAMEPKVAAPSAPAAAPAPAQAPAAAPTPARPGSKLRTDVKLRDLYKLGKTLGTGGFSVVKLATDRGTGVEYACKIMALPPVGQEVGENENTREDIFKEIDLLCGMNHENVIFLKEYFEEGNKVYLITELLTGGELLEAVLKRGSYTEAEARLCFVQVLRGIEYLHSKNVVHRDLKLENLLLAKQDDISLVKIADFGLAKHAVNGMQTICGTPQYVAPEVIVGAKGHVYGPGVDMWSAGVVLYILLGGYPPFWSDSEPQLFDMIRKGKYSFGDPVWNKVSEGAKDLIRKLLVVDPTKRLSATEALQHQFILEGNFNPPSTPKGPR

SEQ ID NO: 27152 - protein, 541 aa, Chlamydophila abortus S26/3
MELLSVNKSYFELQRLHYRPETLRFLQGITSLHIVDSVSTASPQVPKDLQEHIPYLCNIPEVTIEKGKAKPSQPLKIGVLLSGGQAPGGHNVVIGLFEGLRAFNPKTKLFGFIQGPLGLTRGLYKDLDISVIYDYYNVGGFDMLSSSKEKIKTKEQKSTILTTVKKLKLDGLLIIGGNDSNTDTAMLAEYFLKNNCHIPIIGVPKTIDGDLKNFWIETPLGFHTSCRIYSEMIGNLEKDALSIKKYHHFVRLMGQKASYTTLECGLQTLPNITLISEHLAMRKISLQKLSEHLAMGLVNRYRSGKNYSTILIPEGLLEHIFDTKKLINELNVLLLDNTLNFDNVNKQLSPESLKTFSALPTEIAQQLLIARDSYGNVRVSKIATEELLAALIKKEIQKIEPKMEFQSVNHFFGYESRAGFPSNFDANYGLALGIVSALFLVRQRTGYMVTINNLALPYSEWSGGATPLYKMMQLEQRLGEEIPVIKTDSVNPNAPEVQYLLNQSDTCLMKDMYSFPGPLQYFGEERLIDQRPLTLLWGNKT

SEQ ID NO: 27153 - protein, 565 aa, Streptomyces avermitilis MA-4680
MFEARHTMDAPTTTSADNGTSGGTGGAGWFTPRKQPETPQGGGQEAPEGSRLAAMRPVGRPSAGEGTEQQRIPPTEEAVVAPTQPMSGEPLRSLPDPAAPAPARHLGATLTEETRPAPAPIAASQPESAHEALRPLAGQPQFGQPQSGPVQPQPAAALPERGIPQREPGPPEPGSPRPGPDPQVPTPGPAPGPEASPDAVLIRRTMAEVGPVAGKVTSYFYALLFVRHPDLRSLFPAAMDTQRDRLLKALLTAAEHIDNTEVLVAYLQNLGRGHRKYGTRPEHYPAVGECLIGALSRYASGIWDEETEAAWVRAYTTISQVMIDAAAADELRAPAWWYAEVVSHDLRTPDIAVITVRPDQPYPFLAGQYTSLETPWWPRIWRHYSFASAPRSDGLLSFHVKAVPAGWVSNALVHRARPGDIIRLGPPAGSMTVDHTTESGLLCLGGGTGIAPIKALVEDVAEHGERRPVEVFYGARRDHDLYDIDTMLRLQQSHPWLSVRPVVDQRAHLQLPDVIREYGPWNEYDAYLSGPPGMIRSGVDALRGIGIPPDRIRHDSVEELVAAGD

SEQ ID NO: 27154 - protein, 988 aa, Vibrio parahaemolyticus RIMD 2210633
MLLATASIGRKLLLSFIAMAMLVMLSALIGVSGFSLVAKTERNVVDAAIPAMIEARQVSELSTRIISSVQMLSNAQNEQERKEAGRVLFEQLESLLTHIKELGGESFDSKLLDALESNVQNVINNLAELGVTVERKLWLAKEIDTRVEEMRLLSEELEQLTRTQVQNTSTIAVANVTHIYDLLEANKKDQVYQALDALVEVDLDLTERLHELHLLAFKMLNQIEEARTLTNVDRIQQIQTAFENNLKIMKRRVLAVEDPTRSKQMSQLLTELGKRQVVFTILLQQYENNEQSQQLMQKTLELFSELNSTVNKLVDDSNKTTTFAVDQLTNTLKFAQWSLTVISIVGLIVVVLILWRVVYVSVVKRLAEYSAALLSVAQGNLAVELEVKGKDELAHMGQAIITARNTAQALKVVAEGEAKAKRELEEHKEHLEELIEQRTSQLRQANLRLNEEVVNHAQARNEAEQASRAKSAFLATMSHEIRTPMNGVLGTARLLMDSGLNPIQKRYAEIINRSGKTLLAILNDVLDYSKIEAGHLEIRRLGFDLHQMVEDTFQLMNSRAQEKQLLFSYHIESDVSRYWKGDVTRISQVLNNLVGNAIKFTEDGEIDIYVSLNPEDESQVLFEVSDTGIGISKKDQKTLFDAFTQAEGGLNQIGGTGLGLAISKRIVEAMGGVLEVDSEEGEGSRFWFSIPLEESEPVEIGVVASARCKVKAKVLLVEDNEVNRVVAEGFLQSMGHQVVMAEDGLQAERIIDKQDFDIALVDINLPDCDGTDLIQRLKRIERNKPGDKALSPTPMIAVSAHVFAEEVERYLAAGFDGYLPKPVEKEALATLIQDVLDGKQLLLPQSGECLPLSETSDTNLTIENQVEQDHQQREEPEMVIINPSVIQSDMKILGREKMLHIIDLFRNTSADVLGQLVESAEKNDSLAVKNLAHKLKGSAGSLGLTALMNTCQSIEIAAEPLDTYNAQQGLLDEQVATSVNALDELMAE

SEQ ID NO: 27155 - protein, 708 aa, Suaeda japonica
MAVSTIALYASPPSSVCSTPHPCSINSHSTSYDFDLSGRSPSTSSQSSSSTSQRPIIGGLSCLLKHSSSLATNDDFQKVGIDDHHHHYCNLSSSFRYSNCSSLSSSLKRDIQSPVSVLQGPVSVSSSCNSVASGSFSGSNSFRVNNTTNLLLNGFVRNSLGSCLDHDVEELTFNMEDHFVFGDAVEELLASAQIRHKIFYDQFVIKAFYEAEKAHRGQVRASGHPYLHHCMETAVLLASIGANATVVAAGLLHDTIDDSFVTYDYILNIFGSGVADLVNGVSKLSHLSKLARENNTASKTIEADRLHTMFLAMADARAVLIKLADRLHNMMTLDALPSHKQQRFAKETLEIFAPLANRLGISTWKEQLENLCFKHLYPNQYDELSSKLVKSFDQARIQSAIDKLEEGLKDEDLSYHDLSGRHKSLYSIHCKMSKKKLTMDQIHDIHGLRLIVENEDDCFRALKVVHQLWSEVPGKFKDYIHCPKCNGYQSLHTVVVGEGMVPLEVQIRTKEMHLQAEYGFAAHWRYKEGESKHSSFVLQMVEWARWVVNWQCETMNKDRSSFGYVDSLKSPCKFPTHSEGCPYSYNPQPNHDGPVFVILIENEKMSVKEFPLNSTMMDLLEATGHGSPRWTTHGFPVKEDLRPRLNHFPVSDPTCKLKMGDVIELTPALPDKSLIEYREEIQRMYNRGLSVSTPAPAATNTSVAGWRS

SEQ ID NO: 27156 - protein, 917 aa, Pseudomonas fluorescens
MLKKLGIKGRVLLLTLLPTSLMALVLGGYFTWMQQSDLHAQLLQRGEMIAEQLAPLVAPAMSRQDTDLLERIATQSLEQADVRAVTLLAPDRTPLAHAGPTMLNRAPEGNSAQLQQRTGNDATRYLLPVFGKHRNLAGELIPEEADRLLGWVELELSHSGMLLSGYRSMFASLLLIAVCLGLTALLALRMGRTINRPLSQIKHAVAQLKDGHLETRLPPLGSQELDELASGINRMAGTLQNAQEELQHSIDQATEDVRQNLETIEIQNIELDLARKEALEASRIKSEFLANMSHEIRTPLNGILGFTHLLQKSELTPRQLDYLGTIEKSADSLLGIINEILDFSKIEAGKLVLDNIPFNLRDLLQDTLTILAPAAHAKQLELVSLVYRDTPLSLVGDPLRLKQILTNLVSNAIKFTREGTIVARAMLEDEHEDSVQLRISIQDTGIGLSNQDVRALFQAFSQADNSLSRQPGGTGLGLVISKRLVEQMGGEIGVDSTPGEGSEFWISLRLPKTRDDAEDLPGPPLLGRRVAVLENHELARQALQHQLEDCGLQVTPFNTLESLTNGITVAHQTDQAIDLAVLGITSNDMPPERLNQHIWDLEHLGCKVLVLCPTTEQTLYHLSVPNPHSQLQAKPACTRKLRRSLSDLVNPRPTRSEPHEPVASRAPKVLCVDDNPANLLLVQTLLEDMGAKVLAVESGYAAVKAVQKETFDLVLMDVQMPGMDGRQNTEAIRQWESERHCTPLPIVALTAHAMANEKRALLQSGMDDYLTKPISERQLAQVVLKWTGLALRNQSPDRGGDAQGNGSELLVLDHEEGLRLAAGKADLAADMLAMLLASLEADREAIRQASEANDHNALIERVHRLHGATRYCGVPQLRAACQRSETLLKQQDPKAAAALEELERAINRLASEARISA

SEQ ID NO: 27157 - protein, 115 aa, Triticum aestivum
MARSAVAQVVLVAVVAAMLLAVTEAAVSCGQVSSALSPCISYARDNGASPSAACCSGVRSLASSARSTADKQAVCKCIKSAAAGLNAGKAAGIPTKCGVSVPYAISSSVDCSKIH

SEQ ID NO: 27158 - protein, 332 aa, Buchnera aphidicola (Acyrthosiphon pisum)
MTIKVGINGFGRIGRVLFRLAQKRSDIEIIAINDLLAPEYIAYMLKYDSTHGVFKKHITFDKDNIIINGKNIRVTSIKDPEKLMWHDLSIDVVIESTGLFLKREQAYKHILAGSKKVVVTGPSKDDIPMFVRGANFHKYQGESIVSNASCTTNCLAPLSKVIDDNFGIIEGLMTTVHASTATQKIVDGASDKDWRGGRGALQNIIPSSTGAAIAVGKVLPNLNGKLTGMAFRVPVSNVSVVDLTVRYKKSATYSEICQKIQQASQKEMKGIMGYTEDEVVSTDFNGEELTSIFDAKAGLSLNKNFVKLIAWYDNETGYSSKVLDLVSLVSKK

SEQ ID NO: 27159 - protein, 109 aa, Triticum aestivum
MAATGEETVRASHILIKHEGSRRKASWKDPEGRVISATTRADAAARLGDLRAQILAGRGSFADLAAQHSDCSSARRGGDLGPAALLILAAPSLNEEKCLVSSHHFATAI

SEQ ID NO: 27160 - protein, 586 aa, Musa acuminata
MGMGRPSGAWSTPWLVVVLVHWLLCATERRRGAVVEASHVEFASLQSVPASVVDNRLRTGYHFQPPRNWINDPNGPMYFNGVYHLFYQYNPNGSVWGNIVWAHSVSTDLVNWIALDPAIRPSKPFDINGCWSGSATVLPGNRPVIVYTGIDPQQRQLQNVAYPKDLSDPYLREWVKPDYNPVIAPGDGINASAFRDPTTAWRGPGTHWKLVVGSKWNRRGKAILYRSRDFVHWVKAKHPLHTVKDTGMWECPDFYPVAVKGRRGLDTSAYGDGVKHVLKVSLDLRKYEYYTLGKYYHYQDKYVPDNTSADDHTGLRYDYGNFYASKTFFDPKKQRRILWGWAKESDAEDVDVAKGWAGIQAIPRTIWLDSSGRQLIQWPIEELESLRGKHVVVEHKKVSGGNSFEVEGINSSQADVEVAFEVSGLEKAEAFDPSWATDAEALCGQKRADVKGGVGPFGLLVLASAKMEEKTAVFFRIFKAEHKHVVLMCHDPSRSSMRPNLYRPTFAGYVDVDIAKTGKISLRSLIDHSVVESFGAEGKTCITSRVYPSLAIGKDAHLFVFNNGSADVKVSELKAWEIRRPLMNGS

SEQ ID NO: 27161 - protein, 600 aa, Arabidopsis thaliana
MNSLVRRKQVDSVHLIKNDGPHQLAKKLSAVDLVAIGVGTTIGAGVYILVGTVAREHTGPALAVSFFIAGVAAALSACCYAELASRCPSAGSAYHYAYICLGEGIAWLVGWALVLDYTIGGSAIARGITPNLASFFGGLDNLPVFLARQTIPGVGIVVDPCAALLIMIVTILLCFGIKESSTVQAIVTSVNVCTLVFIIVVGGYLACKTGWVGYDLPSGYFPFGLNGILAGSAVVFFSYIGFDTVTSTAEEVKNPQRDLPLGIGIALLICCILYMLLSVVIVGLVPYYSLNPDTPISSAFGDSGMQWAAYILTTGAITALCASLLGSLLAQPRIFMAMARDGLLPAFFSEISPRTQVPVKSTIAIGVLAAALAFFMDVAQLSEMVSVGTLMAFTAVAVCVLVLRYVPPDGVPLSSSSQTLSDTDESRAETENFLVDAIESSDSPLLGNETARDEKYFGKRRKIAAWSIALVCIGVLGLASAASAERLPSFPRFTICGVSAVILLGSLITLGYIDEDEERHNFGHKGGFLCPFVPYLPVLCILINTYLIINIGAGTWIRVLIWLLIGSMIYIFYGRSHSLLNNAVYVPTMTCTRKTTDHLA

SEQ ID NO: 27162 - protein, 508 aa, Nicotiana tabacum
MMSTAAVIGLSAGKRLLSSSFYYSDLNEKLTCTSDHSLPCHHVPSIKNVITAKKSSDYSPSCVSSRKSQSAKSLKEHVDITADPSDVPSWFEMYEQLQNESDDEDESVEVLLLLQKSMLEKQWNLSLEQTLTASPQHEKKSKKMHITCSGTSARRRRMDSRQRVLDRHSSATPTSAAKPLRSIIGPELLQNRLKGYVKGVVSEELLTHAEVLQLSKKIQVGLYLEEQKSRLKERLGCEPSDDQLAVSLKMSRTDLQSTLIECSLARERLAMSNVRLVMSIAQRYDNVGAEMADLVQGGLIGLLRGIEKFDPSKGYKISTYVYWWIRQGVSRALVENSRTLRLPTYLHERLSLIRNAKARLEEKGITPSVNNIAASLNMSQKKVRNATEASSKMYSLDREAFPSLNGLPGETLHSYIADNHLENNPWHGVDVWALKDEVNNLISSTLRDREREIIRLYYGLDNECLTWEDISKRIGLSRERVRQVGLVALEKLKHAARKRQLDAMLIKQ

SEQ ID NO: 27163 - protein, 1175 aa, Arabidopsis thaliana
MLSSIKPSSSSFSTAISGSVRRSIPTKLKFSPLLIIKNCHNQSFNANVVSHQKPLHISSASNFKREVKVEAYEADRSRPLDINIELPDEQSAQKLKIGIYFATWWALNVVFNIYNKKVLNAFPYPWLTSTLSLACGSLMMLVSWATRIADAPKTDLEFWKTLFPVAVAHTIGHVAATVSMSKVAVSFTHIIKSGEPAFSVLVSRFFMGETFPLPVYLSLLPIIGGCALAAITELNFNITGFMGAMISNLAFVFRNIFSKKGMKGKSVSGMNYYACLSMMSLVILTPFSIAVEVPQMWAAGWQNAVSQVGPNFVWWVVAQSVFYHLYNQVSYMSLDQISPLTFSIGNTMKRISVIVASIIIFHTPIQPVNALGAAIAIFGTFLYSQTGGRFGEINYLGIKYYNIFIDALISRGIKPFVTLNHVDYPQELEDRFQSWLNPEMQKEFGYLADICFKHFGNRVKYWTTLNEPNQQLILGYLTGKFPPSRCSSPYGNCSQGNSETEPFIAAHNMILAHAKAKEQKGSIGIVVQTSWFEPISDSNADKEAAERAQSFYSNWILDPVIYGKYPKEMVDILGPALPQFSSNEVKNLEKSRADFVGINHYTSYFIQDCLTSACNTGHGAFKAEGYALKLDRKGNVTIGELTDVNWQHIDPTGFHKMLNYLKDRYPNMPMFITENGFGDLQKPETTDKELLNDTKRIQYMSGYLEALQAAMRDGANVKGYFVWSLLDNFEWLFGYKVRFGLFHVDLTTLKSSCLHQTSDDSSPFPSDFLFGTASSAFQYEGAFLTDGKGLNNWDVFAHENPGITPFVTLNHFDYPQELENRFKSWLSSEMQKDFGYLADICFKHFGDRVKHWITINEPNQHISLAYRSGLFPPARCSMPYGNCTHGNSETEPFIAAHNMILAHAKAIQIYRTKYQREQKGIIGIVVQTSWFEPISDSIADKNAAERAQSFYSNWILDPVVYGKYPEEMVNLLGSALPKFSSNEMNSLMSYKSDFLGINHYTSYFIQDCLITACNSGDGASKSEGLALKLDRKGNVSIGELTDVNWQHIDPNGFRKMLNYLKNRYHNIPMYITENGFGQLQKPETTVEELLHDTKRIQYLSGYLDALKAAMRDGANVKGYFAWSLLDNFEWLYGYKVRFGLFHVDFTTLKRTPKQSATWYKNFIEQNVNIEDQIDK

SEQ ID NO: 27164 - protein, 289 aa, Salmonella enterica subsp. enterica serovar Typhi str. CT18
MSVLINKDTNVICQGFTGSQGTFHSEQAIAYGTQMVGGVTPGKGGTTHLGLPVFNTVREAVEATGATASVIYVPAPFCKDSILEAIDAGIKLIITITEGIPTLDMLTVKVKLDEAGVRMIGPNCPGVITPGECKIGIMPGHIHKPGKVGIVSRSGTLTYEAVKQTTDYGFGQSTCVGIGGDPIPGSNFIDILKLFQEDPQTEAIVMIGEIGGSAEEEAAAYIKDHVTKPVVGYIAGVTAPKGKRMGHAGAIIAGGKGTADEKFAALEAAGVKTVRSLADIGEALKAIIK

SEQ ID NO: 27165 - protein, 483 aa, Rhodopseudomonas palustris CGA009
MLTPASSRPLIVWFRDDLRLADHPALHAAAQSGAPVLCVYVLDEVSDDVRALGGAVRWWLAQSLRALESELRALGGALILRRGPTAAVLAELAQQHDAAAVHWNEIEIAAHRAVADALADALTVAGIAYHRHRGDTLVEPSAIRSKDGRGMRVFTPFWRRVLSLGDPPQPLPRPTTLRPAPAVPTEQLSDWQLEPTAPDWAGGLRQTWTPGEAAAQTRLAAFLAMQPGYAEGRDYPDRHITSGLSPHLRFGEISPRQVWYAARFAAAERPAIAPDIDKFLSEVGWREFCRHLLFDHPDLASRNLQPAFDAFPWQSDDAVLTAWQRGRTGYPIVDAGMRELWHSGVMHNRVRMVVGSFLVKHLLIDWRLGEQWFWDTLVDADPGSNPGNWQWVAGCGADAAPYFRVFNPVLQSEKFDAGGAYIRRWVPELARLPNDLIHQPWTATPLELAAAGIKLGGNYPGPIVDHKTGRQRALSAYAELRQR

SEQ ID NO: 27166 - protein, 595 aa, Prochlorococcus marinus str. MIT 9313
MALLVQKFGGSSVGNVERIQAVAERIATSKDLGHDLVIVVSAMGQTTDELTALAKVISSNPPQREMDMLLATGEQVSISLLSMALHELGIPAISMTGAQVGIVTESAYGRARILDVRTERLQSLLSTGKVVVVAGFQGTSLSSVGTAEITTLGRGGSDTSAVAIAAALGADACEIYTDVPGVLTSDPRQVSDAQLMQEVSCDEMLELASLGASVLHPRAVEIARNFGVALVVRSSWSNEAGTKLTSKSKRPIGREGLELGRPVDGVELAEGQAVIALSHVPDQPGVAATLFENLSSDGVNVDLIIQSTHEGNSNDIAFTVAEADLAKAHSLCEGLLKSVGGQLSAEAGMSKLSISGAGIMGRPGIAASLFDTISRAGINLRLIATSEVKVSCVIDATLGSKALRAVSTAFELSDSQVRINPLGNGKGEPEVRGVALDQGQAQLSVRGVPNRPGTAAALCSAMAEAGISLDAIVQSERQHDDGSRDISFTLKRDEREQANKTLAPLLAQWPGANLEDGPAIARVSAVGAGMPATAGTAGRMFRALADAKINIAMIATSEIRTSCVVAEPDGVKALQSVHKGFGLGEEADHPVQSNS

SEQ ID NO: 27167 - protein, 221 aa, Triticum aestivum
QLISVLQLSWIPSSDAIYSSDVALQAGFDTSYSNYGMLDDLSAFPCAQDKSLPRADKQFNDNYPFNEQKNVNVYGEQAYQGGAMELLSTDQICNGDGNLDMIRERYSSENALQQLEDRKFSVSSGSQLSSSQNLLKHKAPLQMKPSPSNITSDCYSDRNCQFSPSGSFAQRNLMVQKQVADLQPGQLINDEGQLGQQTLTRRASYPCENYEVEKKGFGKRK

SEQ ID NO: 27168 - protein, 320 aa, Schizosaccharomyces pombe
MSNTNKSEPNHSCKVVYASRVAETFVEQLKQHVNLFEFAPKLVGFLSNSDPAARMYADWTNKTCTEIGFQYELREVPKDDLEDAIVEANNDPSVNGIMIYFPVFNDGQDQYLQQVVSPDKDVEGLCHKYVMNMYHNIRHLDPEKTKKSILPCTPLAIVKILEYLGVYNKIINYGNRLYGKTITIVNRSEIVGRPLAALLANDGAKVYSVDIHNVQCFTRGAGIRSKKHDVADTNFKLEDVAPISDVIICGVPSANYKFPSNLVRDGAVCICFSSEKNFDAASLKEHAGIYVPSIGKVTIAMLLRNLIRLTSYQLNKPVDI

SEQ ID NO: 27169 - protein, 294 aa, Xanthobacter autotrophicus Py2
MSVLIDANTRVITQGFTGKNGTFHAQQAIAYGTKMVGGTSPGKGGTTHLNLPVFDTVIEAKEATGADASVIYVPPPGAADAILEAIDAEIPLIVCITEGIPVLDMVKVKRALSGSKSRLVGPNCPGIVTAGQSKIGIMPANIFKTGSVGVVSRSGTLTYEAVFQTSQEGLGQTSAVGIGGDPVKGTEFIDVLEMFLADPKTESIIMIGEIGGSAEEEAAQFIADEAKKGRKKPMVGFIAGRTAPPGRRMGHAGAIISGGKGGAEDKIAAMEAAGIRVSPSPARLGKTLVEVLKG

SEQ ID NO: 27170 - protein, 136 aa, Mycobacterium avium subsp. paratuberculosis
MKILARFRKAEPASIYDRIGGHEALEVVVENFYVRVLADEQLSGFFTGTNMNRLKGKQVEFFAAALGGPHPYTGAPMKQVHQGRGITMHHFGLVAGHLADALTAAGVPSETVSEILGAIAPLAPEIATGEAGKVTV

SEQ ID NO: 27171 - protein, 290 aa, Bacillus cereus G9241
  misc_feature (260)..(260): Xaa can be any naturally occurring amino acid
MLEFDTTQDQLANIKVIGVGGGGNNAVNRMIEHGVQGVDFIAVNTDAQALNLSKAETKMQIGGKLTRGLGAGANPEVGKKAAEESKEQIQEALRGADMVFVTAGMGGGTGTGAAPVVAQVAKELGALTVGVVTRPFTFEGRKRATQAASGIAAFKENVDTLIVIPNDRLLEIVDKNTPMLEAFREADNVLRQGVQGISDLIATPGLINLDFADVKTIMSNRGSALMGIGSGNGENRAAEAAKKAISSPLLETSIDGAQGXIMNITGGANLSLYEVQEAADIVASASDPEV

SEQ ID NO: 27172 - protein, 139 aa, Glycine max
METPTVTIPKIGPKPSKKLKLPTPKELISHYESQGMDSQDASLKVIEDLQKALFGVISSGKGKHDKLLTESSRKIDAISNRLTVLDMKLDSKPGYVETFAIGLASGAALKGIGAIVPHIIAPLFQIWNSVFTATKSSPQ

SEQ ID NO: 27173 - protein, 467 aa, Triticum aestivum
MGRRSGGRKLPFFSAASSSSSTKRTRSARRLPSLPKPSSPPPPSPTTPPPAPQTTTSPPAPSPGGSAAVAGVSGKVGKKKAGARLWMRLDRWGSSEILELDKASIIRRAGVPPRDLRILGPVFSHSSNILAREKAMVINLEFIRAIVTAEEVLLLDPLMQEVLPFVDQLRQHLPLRSLVGGNGEHGGDSNGVKQDGSPGDQVPCLNEATGAEHELPFEFQVLEVGLEAVCSTLDSSVADLERRAIPVLDELTKNVSTKNLERVRSLKSDLTRLLARVQKVRDEIEHLLDDNEDMAHLYLTRKQAQNQQVEAIMTSAASNSIVPAGASLPRLNSSFRRSVSIATSIYLDNDVEDLEMLLEAYFMQLDGIRNRILSVREYIDDTEDYVNIQLDNRRNELIQLQLTLTIASFGIAVNTFIAGAFAMNIPCHFYDTDGSFFWPFVGGTSSGCFVISVVLLGYAWWKKLLGP

SEQ ID NO: 27174 - protein, 149 aa, Brassica napus
  misc_feature (11)..(11): Xaa can be any naturally occurring amino acid
  misc_feature (16)..(16): Xaa can be any naturally occurring amino acid
  misc_feature (35)..(35): Xaa can be any naturally occurring amino acid
  misc_feature (45)..(45): Xaa can be any naturally occurring amino acid
  misc_feature (47)..(47): Xaa can be any naturally occurring amino acid
  misc_feature (52)..(52): Xaa can be any naturally occurring amino acid
  misc_feature (60)..(60): Xaa can be any naturally occurring amino acid
  misc_feature (62)..(62): Xaa can be any naturally occurring amino acid
  misc_feature (65)..(65): Xaa can be any naturally occurring amino acid
  misc_feature (79)..(79): Xaa can be any naturally occurring amino acid
  misc_feature (89)..(89): Xaa can be any naturally occurring amino acid
  misc_feature (91)..(91): Xaa can be any naturally occurring amino acid
  misc_feature (93)..(93): Xaa can be any naturally occurring amino acid
  misc_feature (98)..(98): Xaa can be any naturally occurring amino acid
  misc_feature (102)..(102): Xaa can be any naturally occurring amino acid
  misc_feature (108)..(108): Xaa can be any naturally occurring amino acid
  misc_feature (115)..(116): Xaa can be any naturally occurring amino acid
  misc_feature (126)..(126): Xaa can be any naturally occurring amino acid
  misc_feature (130)..(130): Xaa can be any naturally occurring amino acid
MASSMLSSAAXGTSPXQATMVAPFTGLKTSAAFPXTRKANNDITXIXSNGGXVSCMKVWXPXGKXKFETLSYLPDLTEXVELGKEDDYXLXAXRGIPXVEFXLEHGFXVYREHEXXPRNYDGRYWXTMGXLPLVKLTLLGKGPKREKGP

SEQ ID NO: 27175 - protein, 588 aa, Saccharophagus degradans 2-40
MKYDGHQRIKQVEKLSGGDMLIRALADEGVEYLFGYPGGAALHIYDAVFRQKRVQHILVRHEQAATHAADGYARSTGKVGTVLVTSGPGATNAITGIATAYMDSIPMVVISGQVASDKIGEDAFQETDMVGVSRPIVKHSFLVKHAKDIPEIVKKAFYIASTGRPGPVVIDIPKDITNPVDKFEYSYPDKVKIRSYTPAAKGHTGQIKKAVQLLLGARRPIIYAGGGVVQGNASNQLTEIAKLLNFPVTNTLMGLGAFPGTDKQFLGMLGMHGTVEANTAMHHADVIFAVGARFDDRVTNTPSKFCPSAKIIHIDIDPASISKTVTADVPIVGPVEGVLDEMLELVKATKERPDTSAIASWWKQIDEWRDRYSIIDTPRYDTGGMIKPQEVVRMVHEVTGGDAYVCSDVGQHQMFSAQYYQFDKPRRWINSGGLGTMGFGLPAAMGVQIAHRDANVVCVTGEGSIQMCIQELSTCTQYHLPVKIICINNQALGMVRQWQDMQYESRYSESLYEDSLPDFVKLMEAYGHVGMKVTKREELKSKLEECFAMKDKTVFMDIYVDPNEHVYPMQVAPNGSMRDMWLSKSERT

SEQ ID NO: 27176 - protein, 276 aa, Thermoplasma acidophilum
MKILRGEEIAEKKAENLHGIIERSGLEPSLKLIQIGDNEAASIYARAKIRRGKKIGIAVDLEKYDDISMKDLLKRIDDLAKDPQINGIMIENPLPKGFDYYEIVRNIPYYKDVDALSPYNQGLIALNREFLVPATPRAVIDIMDYYGYHENTVTIVNRSPVVGRPLSMMLLNRNYTVSVCHSKTKDIGSMTRSSKIVVVAVGRPGFLNREMVTPGSVVIDVGINYVNDKVVGDANFEDLSEYVEAITPVPGGVGPITATNILENVVKAAEFQKNNL

SEQ ID NO: 27177 - protein, 313 aa, Magnaporthe grisea 70-15
MAAVFKALSKGAGGDKSSEAASAPRKNKQRVLILSSRGVTFRHRHLLNDLAAMLPHGKKDVKFDSKSKLYQLNELAELYNCNNVLFFEARKGQDLYVWASKVPNGPTVKFHLQNLHTMDELNFTGNCLKGSRPVLSFDSAFDKDPHYRVIKELFLHIFGVPEGARKSKPFVDHVMGFSIADGKIWVRNYQINEVEKTKGEDGEDGEAKKEKKSSRKPDAKDTDINLVEIGPRFVLTPVVIQEGAFGGPIIYENKQFVSPNQVRADLRRKKAGRHQMRSGQQADLMAKKDGLGLRTEGSKKQREDELDTRKIFA

SEQ ID NO: 27178 - protein, 502 aa, Nicotiana tabacum
MMAIIGLSAGNRILSSSFYYSVLTEKFCVSDHALPCHHFPSPKNVINAKNSSNYSPSYVSNRKKQSVKALKEHVDIASNRDSDTEPWVQMFKQLQNGSCSEEDSVEVLLLLQKSMLEKQWNLSAEKAMTNENNCKKKMQITCSGTSARRRRMDTRKRDLLPKNSATSDSSSKRLRSVIGPELLQNRSKGYINGVVGQELLTHTEVVQLSKKIKFGLYLEEQKSRLKERLGCEPSDDQLAISLKISRADLRSTLIECSLAREKLAMSNVRLVMSIAQRYDTNGTEMADLIQGGLIGLLRGIEKFDHSRGFKISTYVYWWIRQGVSRALVENSRTLRLPIHLHERLSLIRNAKIKLKENGITPSIEKIAECLNMSQKKVRNATEASSKVFSLDREAFPSLNGLPGETLHSYIADNRLENIPWHGVDEWMLKDEVNNLISSTLREREREIVRLYYGLDNECLTWEDISRRIGLSRERVRQVGLVALEKLKHAARKRRLDAMLVKH

SEQ ID NO: 27179 - protein, 87 aa, Oryza sativa
MSSRRSSRSSVSEEEINELISKLQSLLPSSRRRGANQASTTKLLKETCSYIKSLHREVDDLSDRLSDLMAGMDHNSPGAEIIRSLLR

SEQ ID NO: 27180 - protein, 245 aa, Bacillus cereus E33L
MIKLVLIRHGQSLWNLENRFTGWTDVDLSENGLSEAREAGAILKKNGYTFDVAYTSVLKRAIRTLWIVLHEMNLAWVPVHKSWKLNERHYGALQGLNKDETAQKYGEEQVHIWRRSIDVRPPALTEDDPRYEMNDPRYKALKKGEFPLTECLVDTEKRVLDYWHSEIAPKLKNGNKVIISSHGNTIRSLVKYLDNLSSDGVVSLNIPTSIPLVYELDENLRPIRHYYLSMDGEVPEGEIPKHISF

SEQ ID NO: 27181 - protein, 574 aa, Sulfitobacter sp. EE-36
MIVQALIDQGVDTVFGYPGGAVLPIYDEVFQQNSIKHVLVRHEQGAVHAAEGYARSTGKPGVVLVTSGPGATNAVTGLTDALLDSIPLVVLTGQVPTFMIGSDAFQEADTVGITRPCTKHNWLVKETDKLGGVLHEAFHVATSGRPGPVLVDIPKDVQFATGEYTPKKPSTSHYQPPVKGDMTEITELVAAIETAKRPIFYTGGGVINSGPAASQLLRELVEATGFPITSTLMGLGSYPASGDKWLGMLGMHGLYEANMAMHDCDLMINIGARFDDRITGVVDMFSPKSKKAHIDIDPSSINKIIRVDIPIVGDVGHVLEDLLKVWKSRGRKTNTEAVGKWWKKIEEWRNVDCLKFEQKGKIIKPQYALSRLEALTKGRDRYVTTEVGQHQMWAAQYLGFEDPNRWMTSGGLGTMGYGFPASIGVQMAHPEALVINVAGEASWLMNMQEMGTAMQYGLPVKQFILNNERLGMVRQWQELLHGERYSQSWSESLPDFVKLAEAFGAKGIICSDPDDLDDAIMEMLDYDGPVIFDCLVEKHENCFPMIPSGKAHNDMMLAGVDTQGVIDAKGSVLV

SEQ ID NO: 27182 - protein, 154 aa, Paracoccidioides brasiliensis
MVRYAAQSIQSTKSARSRGSYLRVSFKNTRETAQAINGWKLQRAVAYLENVMAHKEAVPMRRYAGSTGRCAQGLLRNIGKQFGVSKARWPVKSAEFLLSLLKNAEANADTKGLDTSNLIVQHIQVNQAPKQRRRTYRAHGRINPYMSSPCHIEL

SEQ ID NO: 27183 - protein, 95 aa, Vibrio fischeri
MQINIAGQNVELTDSLREYVNTKFQKLERFFEHINNVHVVLKLEKVQHVAEATLHVNQGDIHAHSDSEDMYAAIDGLVDKLIRQLNKHKEKLSSH

SEQ ID NO: 27184 - protein, 216 aa, Zea mays
MNSLAIRVSKLLRSSPISPPLGNQSPLLSPKSSGSVAVTAWRSWFSTGPIDEEGLEEDFEETISERPAELQPHGVDPRKGWGFRGVHRAIICGKVGQAPLQKILRNGRTVTIFTVGTGGMFDQKLMGATNQPKPAQWHRIAVHNEVLGSYAVQKLAKNSSVYVEGDIETRVYNDSISSEVKSIPEICIRRDGKIRLIKYGESVSKISFDELKEGLI

SEQ ID NO: 27185 - protein, 112 aa, Shewanella oneidensis MR-1
MKLITAIIKPFKIDDVREALTQLGIHGMTVTEVRGFGRQKGHTELYRGAEYAVDFLPKMKLEIAIHSELEEAVIEAIIQAAHTGKVGDGKIFVTPLEQVIRVRTAEEGVDAI

SEQ ID NO: 27186 - protein, 539 aa, Arabidopsis thaliana
  misc_feature (268)..(268): Xaa can be any naturally occurring amino acid
MAYASRIINHSKKLKDVSTLLRRENAATIRYYSNTNRAPLNREDTFNSRLGYPPLERISICSTSTLPVSIIFSTTRSNLSSAMGRPIFGKEFSCLMQSARGFSSGSDLPPHQEIGMPSLSPTMTEGNIARWLKKEGDKVAPGEVLCEVETDKATVEMECMEEGYLAKIVKAEGSKEIQVGEVIAITVEDEEDIGKFKDYTPSSTADAAPTKAEPTPAPPKEEKVKQPSSPPEPKASKPSTPPTGDRVFASPLARKLAEDNNVPLSGTXGTGPEGRIVKADVDEFLASGGKGATAKPSKQVDSKVPALDYVDIPHTQIRKVTASRLAFSKQTIPHYYLTVDTCVDKMMGLRSQLNSFQEASGGKRISVNDLVIKAAALALRKVPQCNSSWTDEYIRQFKNVNINVAVQTENGLYVPVVKDADKKGLSTIGEEVRFLAQKAKENSLKPEDYEGGTFTVSNLGGPFGIKQFCAVINPPQAAILAIGSAEKRVVPGTGPDQYNVASYMSVTLSCDHRVIDGAIGAEWLKAFKGYIETPESMLL

SEQ ID NO: 27187 - protein, 337 aa, Haloarcula marismortui ATCC 43049
MSDHTDERETFHHDPIGHAEARAGMTVGELANSYGEAGIGASDIHEAVDIYSQMLDDDVTTFFGLAGAMVPTGMRAIVSELIRDGHIDVLVTTGANCTHDSIEAIGGKHHHGEVTPEGQTEREHDETLRDEGVDRIYNVYLPQEHFVLFENHLRDEVFSTLEDEGPVSIQRMTEELGRANSEVNEREDVPEDAGVLAAAYENDVPVYCPAFQDSVLGLQAWMYSQTSEFTIDALADMTQITDIAYEADSAGAMVVGGGVPKNYVLQTMLVSPDAYDYAVQLTMDPSNTGGLSGATLDEARSWGKLEKDARNVSVYADATITLPLVVAAARERHSTEA

SEQ ID NO: 27188 - protein, 725 aa, Methylobacillus flagellatus KT
MSTPDERPIYIMMISMHGLIRAENLELGRDADTGGQITYVVELARALGKHPMVEKVDLITRRIEDENVSKDYSVPEEQLEQNARIIRLPCGPRRYLRKESLWPHLDQMVDQCLHFLRSQGGRLPDLLHTHYADAGYVGRQLSLLLGIPQVHTGHSLGHPKRQRLLAAGRKASSIERQFNFERRIAAEESILEHASMIVTSTQQEIDEQYSMYRHFDYQRFRVIPPGTDTTRFSPPGRRKISSELQAQIDRFFSNPDKPLILTICRPEVRKNLKGLIAAFGESTELQQQANLLIVAGARDDIRQLEESQQQVMLELLLDIDRYDLWGKVAIPKHVSQDNIPELYRLAARRRGVFVNAALTEPFGLTLIEAAASGLPFVAPDDGGPRDIVQNCRSGLLANTLDSNAIASALLDLLSDKKRWRTWAKNGLAGIRRHYNWPAHVNTYMKQVSQVLRRDRKRWRRQLVITLDSGKSYMPLVNSALISDIDNTLLGDKRSLRQLVHWLKERKGKFAFGIATGRTIESAVNILRQWQVPIPEVLITSVGSEIHYGARLIPDTGWANHIRHKWRRDALEEAMKYFPGLTLQAEENQREFKLSYIVDPDKMPPLEEINLHLRSQQLFAQLIYSHNEFLDLLPIRASKGHAIRYLAYKWGVPVRHFLVAGDSGNDHEMLVGDTLGVVVGNHSQELEQLRGMEQVYFAKGHYAAGILEGIAHYRFDEIEPSPVSEH

SEQ ID NO: 27189 - protein, 284 aa, Ricinus communis
AIAQIGWIAGPAVMFLFSLVTYYTSTLLSACYRSGDPVNGKRNYTYMDAVRTNLGGAKVKLCGFVQYLNLFGVAIGYTIASSISMMAIKRSNCFHKSGGKNPCHINANPYMIAFGIAEIIFSQIPDFDQLWWLSILAAVMSFTYSTIGLGLGIAQVVENGKAMGSVTGISIGANVTPTQKIWRSFQALGDIAFAYSYSIILIEIQDTVRSPPSESKTMKKATLISVAVTTLFYMLCGCFGYAAFGDMSPGNLLTGFGFYNPYWLLDIANVAIVVHLVGAYQVFA

SEQ ID NO: 27190 - protein, 448 aa, Lactobacillus johnsonii NCC 533
MSSKQIKINQLSFQYQDKLIFKNLDFTINQGDFILLTGPSGSGKSTLLKLVAGLEPTSNSKITTGSLNQPFTNWGMVFQDPNRQFTMATPREELIFALENRLIDRVTAQKIIDEVSHKTNISHLLDRPFLHLSGGEKQHVALAVLIAMQSDLFLLDEPFANCDSHNRNFLLNCLDSLHQEGKTILISDHNFANYEKIDPKIFAIKNQRIQTTPLPSQEEVVTNFSLPHPKQESVYSFNSFSLSFPEKELLSSTNLKIYSGKATLLTGENGSGKTSLFKALSKVITYQGELLFKDKEVKKWRRRPYLSKVGQIFQNPDDQFLNVTVKEELDFSLKYNQNPSLNESKLQSILTKLNLENMDDQVVYSLSGGQKRKLQILVMLMAYPDVLLLDEPFSGLDQKSVSEVIFLLKNYFLDENHSLIVISHQLDQIQNLCDYHLVLKDQQLFYAK

SEQ ID NO: 27191 - protein, 495 aa, Oryza sativa (japonica cultivar-group)
MAAAAPAGAQNRCVFVGNIPYDATEEQLVQICEEVGPVVSFRLVIDKETGKPKGYGFCEYKDEETALSARRNLQGYEINGRQLRVDFAENGRNADRNREKGRGGPGMASSVDTQKQLAGTPVVGDTGLHQPVGLPSAIHAASVMAGILGGSQTANVQNGLPVQYGLGNDPLTHYLARMSKHQLYEIMSELKSLTSQNKDVANKLLQGIPQLSKALFQSQIMLGMVTPQMMQMAKSQQPSSSLAQSSSHISEPFPQPDAMISSVPRPSASLPNPNVLQDPSAQLHNFPQYPHSSQPAGTIFPHGSQSGVGIHPPIVSQLLGASSSVPPLPLATSGSLISQVQPPFMPHHPRPPAMPAGMQQLPLTHPHVPQVPAIPDIAQKEMRFPEQANRSTEFAHHPKLRKLEDGTSTPGIVNNNPAVYPAPSQGMLPGGPSGSYNSAAVSFQQPENEVPQLTPDVESALLQQVLQLTPEQLSSLPVEQQQQVIQLQKMLSAGK

SEQ ID NO: 27192 - protein, 345 aa, Thermoplasma volcanium GSS1
MDNSNNSEEDIWTNDEKLQKIIEELNFRIKVFGFGGSGSNTINRLMRENLSGVKLIACNTDAAHLLRIRAHSKILLGKNLTRGLGAGADPSVGEMAAKESESEILKQIDETSIVFITAGLGGGTGTGAAPYVAKLAKDRGALTISFATLPFSTEGFVRMKNAYEGVRKLVKNSDAAVIIPNDKLIEKFNDVPVYKAFKFEDEVIATGIKGITDLIMSTGTINLDFNDLRKVMKDAGYSAIGMGSSSQAVNDRIVEALEKALDSPFMDVDISKAKGAIINVTGGRDLQLQEAQQAADILKKKIARDATIMWGTVVDESIRSSVKILVIVAGVKPNFKFEPGIEEVG

SEQ ID NO: 27193 - protein, 593 aa, Photobacterium sp. SKA34
MQQKSTQKISLSQAYVKSAGINLDRRFMIALTDGSMITSRRYPQLLLITTTIESNGLLFNYPNKTPLSLSFEQLALLATSTAVWNDNCEAYTTSNDADQWVSEIIGQPAQLLYNGVESQRMGGKAQVKVSFADNFPVMIVSEASLNELNDRTQEIHSMDKFRANLVVSGVNAFAEDSWKRIRIGEVELEIKAPCSRCVLVNYDPNSSKKADNNEPLATLMTFRSDKVIPTNVNFGMNAIVVKEGIVRQGDQVEVLEHRTPETYPDQRVALTCVKREIIAKDFVSFSFKAQKDTALAPYLPGQYLPIRIAINGNVVERCYTLSSSPLEQEYTISVKRIEQGTVSNWLHDNLQVGDTIWSEKPSGQFYLEPHKQQNTLLLSAGSGVTPMMSMLRSLISERNTQGLTFYHYCKTQADIPFADELAEIQRHHPEISIHICLTQDNDTSHAYHGRICAEHFANIDVKDNCHVYVCGSSGFNQIAQELFSNQGLPTDRFHQEQFNKALTKPEQEQSLNIQYKQQQFTGNNQTSLLDQIEAAELPIKSGCRAGLCGRCKVKVTEGNVLQQDSAALSEEEKQQGVILACCSIPTSNITIEQ

SEQ ID NO: 27194 - protein, 396 aa, delta proteobacterium MLMS-1
MAKEKFERTKPHVNVGTIGHIDHGKTTLTAAITRVLSNKGYASATAFDQIDKAPEEKERGVTISTAHVEYESDNRHYAHVDCPGHADYIKNMITGAAQMDGAILVVGADDGPMPQTREHILLARQVGVPSIVVFLNKCDMVDDPELIELVEMELRELLSKYDFPGDDTPIIHGSALQALENPDDEAAAKPIWDLMAALDDFIPAPERDVDKPFLMPVEDVFSISGRGTVATGRIERGIVKVGDEIEIVGIRDTQKTTVTGVEMFRKILDEGQAGDNVGILLRGTKREEIERGQVLAKPKSITPHTMFKAECYILSKEEGGRHTPFFNGYRPQFYFRTTDVTGVVTLGEGVEMVMPGDNVTVDAELITPIAMDEGLRFAIREGGRTVGAGVINKIIS

SEQ ID NO: 27195 - protein, 521 aa, Debaryomyces hansenii CBS767
MFKNSIAKQARSNVAYAKSFIRMSSNLPLQVSIKLPNGTTYEQPTGMFINNEYVYPKQKKTFDVISPSTEEHITDVYEALEEDIDTAVEAASAAFKSSWSTGDPSVRANALLKLADLVDANADTLAHIEALDNGKSLMCSRGDVALTAMYFRSCAGWADKILGTVPETGSTHFNYTRREPIGVCGQIIPWNFPLLMLAWKVGPATATGNTIVLKTAESTPLSGLFLTGLIKEAGFPPGVVNILTGFGKNAGNAIASHPKIKKVAFTGSTATGRHIMKSAAESNLKKVTLELGGKSPNIVFNDADVQKSAQSLITGIFYNTGEVCCAGSRIYVQEEIYDNVLEELKNASSKIKIGNPFEEDTFMGAQASSQQLDKILKYIETGKNEGAKLISGGERVQGKGYFIKPTIFGDVTEDMQIVKEEIFGPVVTITKFKTIDEVVDLANDSEYGLAAGIHTENINTAIGVANRLQAGTVWVNTYNDFHPMVPFGGYGQSGFGREMGAEALDNYTQVKAVRIGLTEKH

SEQ ID NO: 27196 - protein, 371 aa, Methylococcus capsulatus str. Bath
MTLNTIEEIIEDIRQGRMVVIMDDEDRENEGDLVMAAGHVRPEDINFMARYGRGLICLTLTRERCQQLRLPLMVNENRTPHSTNFTVSIEAATGVTTGISASDRARTIQCAVAPDARPDDLVQPGHIFPLMAQPGGVLNRAGHTEAGCDLARLAGLVPAAVIVEILNEDGSMARRADLEKFAAVHGLKIGTIADLIHYRMQNEQTVERICECDFPTEHGRFRLHAYQDRLDNKLHLALTLGDVAGGEPVLVRVHGRNLLTDLFGVRRGDIGISLRAAMKRIADEGRGVLVVIRNEEDDRCLVERIHQYQMEDHGVDIGQREDPGVDWRTTGTGAQILADLGVRKLRVLGAHKKYLGLSGYGLEVVDYVTTD

SEQ ID NO: 27197 - protein, 317 aa, Sulfitobacter sp. EE-36
MTVNLPTPENPMRIGTRGSPLAMAQAYETRARLAAAFEIPQAAFEIVVIKVTGDVIQDRPLKDIGGKGLFTREIEEDLLAGKIDIAVHSMKDMPTIQPGGLLLDTYLPREDPRDAFVAPTLSALDQLAEGAVVGTSSLRRRAQLLHQRPDLQVVEFRGNVQTRLKKLADGVAECTFLAVAGLNRLGMQHVPATPIDDTLMLPAVAQGAIGIERRAGDLDTEAMLAAIHDTPTGQRLAAERAFLLTLDGSCETPIAGLATLDGDTLHLRGQVLRPDGSEAIAGDRSGPIAQGGQMGVDLAQDLLAQAGPGFFDWHVKG

SEQ ID NO: 27198 - protein, 87 aa, Arabidopsis thaliana
ANEDGYHQDAFLAASMLSSAAEVTSPGGATMIAQFTGLTQCPGFPVTRKTTTDLTFIPSNGGRVRCMKVWPPIAKKKLETLYYRRDL

SEQ ID NO: 27199 - protein, 417 aa, Rubrobacter xylanophilus DSM 9941
MPVEIRVPELGESVTDATVGRWLKKEGEAVKSGEPIVEVETDKINFEIEAEQDGVLESIAKGEGETVGVGDVIGTIAEGDGRAAAAAEEEEEPEEREEAPAAEAPAGREEAAEEGFRASPSVRRLAQEYGVDLAEVSGTGSGGRITREDVERLIRERSRPPAAPEEDGRREERPAPPPERAPGREALEERVRFSRRRQTIAQRLVESQRNAAMLTTFNEVDMSAVMDLRRRRKESFQERTGARLGFMSFFTKASVAALKAFPQVNAELAGNELVLKKYYDIGVAVSTDEGLVVPVVRDADRKSFAEIEKEIADLAVRAREGRLTLEDLRGGTFTITNGGVFGSLLSTPILTLPQVAILGMHKVQERPVVVDGEIQVRPMMYVALSYDHRVIDGAEAVSFLVRIKELVEDPETLLLEG

SEQ ID NO: 27200 - protein, 383 aa, Chlorobium tepidum TLS
MLYDVAIIGGGPSGAAAAEILARAGHSTILIERNLANVKPCGGAIPLGLIEEFDIPDELVEKKLTRMSVRSPKGETIFMHMPNGYVGMVRRERFDRYLREKAQKAGAEVVEALVKKIERSVDRFTLQLFNKEGEALPPVEASYVIGADGANSKTADELGFPPNDLKVIAMQQRFHYCDELKPYEELVEIWFDGEVSPDFYGWIFPKTDHIAIGTGTEEHRNDIKQLQHRFVEKIGIAEKPYLNEAAKIPMKPRRSFTQERAILVGDAAGLVTPANGEGIFFAMRSGKLGAEAMIERIRNNTPLSSYEKKFRKLYSPIFFGLQVLQSVYYKSDRLRESFVAICRDKDVQGITFDSYLYKKMVPAPWSVQMKIMAKNIYHLAKGS

SEQ ID NO: 27201 - protein, 280 aa, Ralstonia solanacearum
MSDVTSQNFAQEVIETSRQVPVLVDFWAPWCGPCRTLGPMLEKLEHEYAGKWKLAKVNSDESPELSAHFNVRSIPHVVAFVDGKPVDQFVGVLPESQLRGFLDRVIPQPAEVAYREGLAAHQANALAHAREAFQNALAYDPGFDAARFALIDLLLDTGDVRAAQNEFALLSSRAPQDERHAPLQTRLEAAEHAGALPDADALHRRIAAAPDDLQARLDLAQQYIARQDYEAALEQLLAIVERDRAFRDDIGRKTMVSVFDLMRDPQAVSLWRRQLASRLN

SEQ ID NO: 27202 - protein, 523 aa, Yarrowia lipolytica
MSNALNLSLALGVFLLAYYGFSVIQYRIKTRKLEKKWKCGKPKDISRFPFSASFFIPFLVESKKNRLLEFVQWMFESQVYPGYTCKTTVFGVDMYHTVDPENLKAVLATQFKDFCLGERHAQFLPVLGNGIFTLDGQGWQHSRAMLRPQFARDQVSDVEMIEEHIQYMTSRIPKDGSAFDAQELFFNLTLDTATEFLFGQSVGSQTVETNPTAVPTDMPVHLRKSFQEDFNTAQEHLGQRARLQMFYWAWRPRELYSSGERVHAFVDHYVKKALEESEKHVDDGKYVFLRELAKETKDPIVLRDQALNILLAGRDTTASLLSWCLYLMARRPEVYAKLREEVIENLGDGEDLSTITFESLKRCDYLRYVLNEVLRLYPSVPANMRYATRDTTLPRGGGPDGMQPIVVRKGNLVSYHVFTTHRLKEFWGEDAEEFRPERWYEDGASQAKGWEYLPFNGGPRICLGQQYALTEAGYALARIAQLYDTIENADDKPEPPVKFHALTMCHHTGVLVKLYNSKTTKAQ

SEQ ID NO: 27203 - protein, 250 aa, Salmonella enterica subsp. enterica serovar Typhi str. CT18
MAVTKLVLVRHGESQWNKENRFTGWYDVDLSEKGVSEAKAAGKLLKEEGFSFDFAYTSVLKRAIHTLWNVLDELDQAWLPVEKSWKLNERHYGALQGLNKAETAEKYGDEQVKQWRRGFAVTPPELTKDDERYPGHDPRYAKLSEKELPLTESLALTIDRVIPYWNDTILPRMKSGERVIIAAHGNSLRALVKYLDNMSEDEILELNIPTGVPLVYEFDENFKPIKHYYLGNADEIAAKAAAVANQGKAK

SEQ ID NO: 27204 - protein, 114 aa, Streptococcus pneumoniae TIGR4
METKTMSFRDTIILAMSEEMRRDENVFLMGEDVGVFGGDFGTSVGMLEEFGPERVRDCPISEAAISGAAAGAAMTGLRPIVDMTFMDFSVIAMDNIVNQAAKHVTCLVVKVRFQ

SEQ ID NO: 27205 - protein, 101 aa, Rhodopseudomonas palustris CGA009
MTARIYKPAKNAMQSGTAKTREWQLDYEPETPRTIEPLMGWTSSSDMQQQVSLRFHTRDEAVAYCEREGIPYQLIEPKEPVRRRAAYADNFAFRRPEPWTH

SEQ ID NO: 27206 - protein, 116 aa, Streptococcus pneumoniae TIGR4
MLRRVVQAAEELAEEGISVEIVDPRTLVPLDKDIIINSVKKTGKVVLVNDAHKTSGYIGEISAIISESEAFDYLDAPIRRCAGEDVPMPYAQNLENAMIPTVESIKDAIRKTYNKE

SEQ ID NO: 27207 - protein, 46 aa, Brassica napus
  misc_feature (10)..(10): Xaa can be any naturally occurring amino acid
  misc_feature (12)..(12): Xaa can be any naturally occurring amino acid
  misc_feature (26)..(26): Xaa can be any naturally occurring amino acid
DRSSIILPLXGXRQFHEVIGHFVEIXKDKIDGMTGANVRTIDPPHR

SEQ ID NO: 27208 - protein, 357 aa, Zea mays
  misc_feature (356)..(356): Xaa can be any naturally occurring amino acid
MRALGTVAWAWLLLLQQLAGASHVVYENLEVEAATAAAVRPSIVDPLLRTGYHFQPRKNWINDPNAPLYYKGWYHLFYQYNPKGAVWGNIVWGHSVSRDLINWVALQPAIEPSIPSDRYGCWSGSATTLADGTPAIMYTGVNRPDVNYQVQNVAYPRNRSDPLLREWVKPSHNPIIVPGGGINATQFRDPTTAWRGAGDGLWRLLIGSVTEARHGVAYVYRSRDFRRWTRARRPLHSAATGMWECPDFYPVGAPGRRAGVETETSAASDGDGGSPRRREQSKYVLKNSLDLRRYDYYTVGTYDRAAERYVPDDPAGDERHLRYDYGNFYASKTFFDPVKRRRVLWGWANESDTAAXD

SEQ ID NO: 27209 - protein, 669 aa, Oryza sativa
MAPAAVPNGEASSANDNITRFAPPSRAFTPQPDHKLFHPKTRCFAYGMQTKAVQGMLDFDFICKRKQPSVAGIIYTFGGQFVSKMYWGTTETLLPVYQSTANAMAKHPDVDTVVNFASSRSVYQSTMELMEFPQIKSIAIIAEGVPERRAREILHVAQKKGVTIIGPATVGGIKPGAYKIGNTGGMMDNIVASKLYRKGSVGYVSKSGGMSNELNNIIAQTTDGVYEGVAIGGDRYPGTTFIDHMLRYQANPECKVLVLLGEVGGVEEYRVIEAVKAGTITKPIVAWAIGTVAGMLTTEVQFGHAGSFANSQLETAAVKNQTMREAGFHVPETFEDLPAVLSKVYKDLVSQGSIKPQPEPAVPKIPIDYSWAQELGLIRKPAAFISTISDDRGQELLYAGMPISDVFKDNIGIGGVMSLLWFRRRLPDYAAKFLEMVLMLTADHGPAVSGAMNTIITTRAGKDLISALVSGLLTIGSRFGGALDGAAEEFTRAYDKGLSPRDFVDTMRKENKLIPGIGHRVKSRNNPDLRVSLVKEFCQANFPSTKLLDYAIAVETVTTSKKDNLILNVDGAVAVCFVDLMRNCGAFSPEEAEDYLKMGVLNGLFVLGRSIGLIAHFLDQKRLRTGLYRRPWDDITYLLPELSQGTAPGQASRVEVSANSVKLIILQGF

SEQ ID NO: 27210 - protein, 222 aa, Zea mays
MAGASLLSPSCTLLRLIPSASHFKRFDRVRRFAPAAMATSSGPKEAPANNPGLQTEVDPATKGYFLQQTMLRVKDPKVSLDFYSRVMGMSLLKRLDFEEMKFSLYFLGYEDVTLAPDDHIKRTEWTFRQKATLELTHNWGTENDPEFKGYHNGNSDPRGFGHIGVTVDDVHKACERFERLGVEFVKKPDDGKIKGIAFIKDPDGYWIEIFDQTIGTVTSSAS

SEQ ID NO: 27211 - protein, 332 aa, Saccharomyces cerevisiae
MIRIAINGFGRIGRLVLRLALQRKDIEVVAVNDPFISNDYAAYMVKYDSTHGRYKGTVSHDDKHIIIDGVKIATYQERDPANLPWGSLKIDVAVDSTGVFKELDTAQKHIDAGAKKVVITAPSSSAPMFVVGVNHTKYTPDKKIVSNASCTTNCLAPLAKVINDAFGIEEGLMTTVHSMTATQKTVDGPSHKDWRGGRTASGNIIPSSTGAAKAVGKVLPELQGKLTGMAFRVPTVDVSVVDLTVKLEKEATYDQIKKAVKAAAEGPMKGVLGYTEDAVVSSDFLGDTHASIFDASAGIQLSPKFVKLISWYDNEYGYSARVVDLIEYVAKA

SEQ ID NO: 27212 - protein, 482 aa, Gloeobacter violaceus PCC 7421
MTTSTQTIEQLAGKEYQYGFVTDIEQETVPPGLSEEVIRLISAKKQEPEFMLEWRLKAYRHWLSMTTPEWANVHYPPIDYQNIVYYAALKPKTDGPKSLDEVDPELLRTYEKLGIPLQERAALAGVAVDAVFDSVSVATTFKDKLGAMGIIFCSFSEAVREHPELVRKYLGSVVPTGDNFYAALNSAVFTDGSFVYVPKGVRCPMELSTYFRINAKNTGQFERTLIIADAGSYVSYLEGCTAPMRDENQLHAAVVELIAHDDATIKYSTVQNWYPGDKEGKGGIYNFVTKRGRCEGRNSKISWTQVETGSAITWKYPSCILKGDNSVGEFYSVALTNNYQQADTGTKMIHIGKNTKSTIVSKGISAGHGQNTYRGAVKILSGADGARNYSQCDSLLIGEDCGAHTFPYIDVQNPTARMEHEASTSKIGEDQIFYCNQRGIATEDAVSMIVNGFCKEVFRELPMEFAVEAQKLLEVSLEGSVG

SEQ ID NO: 27213 - protein, 198 aa, Staphylococcus aureus
SDSDSDSDSDSNSDLDSDSGSDSDSDSDSDSDSDSDSDLDSDSDSDSDSDSDSDSDSDSDSDSDSDSDSDSDSDSDSDSDSDSDSDSDSDSDSDSDSDSDSDSDSDSDSDSDSDSDSDSDSDSDSDSDSDSDSDSDSDSDSDSDSDSDSDSDSDSDSDSDSDSDSDSDSDSDSDSDSDSDSDSDSDSDSDSDSDSDSD

SEQ ID NO: 27214 - protein, 576 aa, Schizosaccharomyces pombe
MQPQEVDLMENSTMRNGARVLPPEAISKRHIGPYIIRETLGEGSFGKVKLATHYKTQQKVALKFISRQLLKKSDMHMRVEREISYLKLLRHPHIIKLYDVITTPTDIVMVIEYAGGELFDYIVEKKRMTEDEGRRFFQQIICAIEYCHRHKIVHRDLKPENLLLDDNLNVKIADFGLSNIMTDGNFLKTSCGSPNYAAPEVINGKLYAGPEVDVWSCGIVLYVMLVGRLPFDDEFIPNLFKKVNSCVYVMPDFLSPGAQSLIRRMIVADPMQRITIQEIRRDPWFNVNLPDYLRPMEEVQGSYADSRIVSKLGEAMGFSEDYIVEALRSDENNEVKEAYNLLHENQVIQEKSHLSKSKRVDSFLSVSPPAFSEYTSELQKKSKQELIDPTLEGPRWTVSDPPTYAKQTIDSNICVLVPTAEKNKLEMRTLADAASAVDTSQSTRKKSRRNKWHFGVRCRGDAPEILLAVYRALQRAGAQFTVPKPVNGKYRSDMYTIKSRWEIPHCKREGKNTYAYIELQLYEVMPGCFMLDVKSNGYKDIYSHPERTADHGMDDLKSSSPFSDLCAMLVCKLFSA

SEQ ID NO: 27215 - protein, 323 aa, Streptomyces avermitilis MA-4680
MSDVRNVIIIGSGPAGYTAALYTARASLKPLVFEGAVTAGGALMNTTEVENFPGFQDGIMGPELMDNMRAQAERFGAELVPDDVVAVDLTGEIKTVTDTAGTVHQAKAVIVTTGSQHRKLALPNEDALSGRGVSWCATCDGFFFKGQDIAVIGGGDTAMEEATFLSRFAKSVTIVHRRDTLRASKAMQERAFADPKIKFVWDSEVAEIKGDPKLAGLSLRNLKTGEISELPVTGLFIAIGHDPRTELFKGQLDLDEEGYLKVDAPSTRTNLSGVFGAGDVVDHTYRQAITAAGTGCSAALDAERFLSALAAAEDAAEPEKTTV

SEQ ID NO: 27216 - protein, 478 aa, Glycine max
MASSDSKLPLKPIPGSYGLPFFGPMSDRHDYFYNQGRDKFFAERIKKYNSTVIRTNMPPGPFISSNPRVIALLDGVSFPILFDNSKVDKRDVLDGTFMPSTSFTGGYRACAFQDTTEPSHALLKRFYLNFLASKHETFLPLFRNNLSDHFSDLEDKLAGKSGKASFNSSVGSATFNFLFRLLSDKDPSETIIGSDGPSLVQTWLAAQLAPLATLGLPRIFNYVEDFLIRSIPFPAWTVKSSYKKLYEGLSTAGTAILDEAERVGIKRDEACHNLVFMLSFNAQGGLVNQFPILIKWLGLAGEGLHKQLAEEIRTVVKDEGGVSLRALDQMTLTKSVVYEVLRIEPAVPFQYAKAREDLVVESHDAAYEIKKGEMIFGYQPFATKDPKIFENAEDFVAHRFLGHDGEKLLRHVLWSNGPQTEEPTPDDKQCPAKNLVVLMCRLYLVEFFLRYDTFTFDFKPVVLGPDVTIKSLAKASSF

SEQ ID NO: 27217 - protein, 130 aa, Methylococcus capsulatus str. Bath
MRILHTMLRVGDLQKSLWFYTEVLGMRLLRQMEFPDGEFTLAFVGYGDEAHDAVIELTYNWGVSKYELGTGFGHIALGVDDIHAAVERIRALGGEIVREPGPMKHGTTVIAFVADPDGYRIELIEHKPAG

SEQ ID NO: 27218 - protein, 110 aa, Streptomyces avermitilis MA-4680
MAGTLKNVTDDSFEQDVLKSDKPVLVDFWAAWCGPCRQIAPSLEAIASEYGDKIEIVKLNIDENPGTAAKYGVMSIPTLNVYQGGEVAKTIVGAKPKAAIVRDLEDFIAE

SEQ ID NO: 27219 - protein, 1116 aa, Magnetococcus sp. MC-1
MSKLNEILMVAVVYFITARLGQLLAISPGNVTPVWLPSGICLAWVLLRGRHLWPGIFLGAFAGNIWAYFDTNTLSAILKSILAGSANGLGDVIAIVGAAWMINTISPATALFNNSKNTTIFLIYGGIIGPFISASIGIFGLLLTGNILPNDAFFSLITWWTGDAMGVLFITPVILELYHLKNIQTIRPNRDVILHFVLFLSITTTVFFLSSNQDPSIWIVFLAPMLVWATLRFSQVILFSELFILSTISIVATATQHGPLLILDDLASTLIHLQVFLGSVALSVFYLNSVNRELRASKHNLELNVIERTKDLQVLNSNLLKEIRSRQHAEDSLKESQKALLEAQNIAQVGNWTWTIETNTLSWTDEIYRIFGLIPQETPPTYQAFLSAIHPEDRLFVQNAVNQALEQLNTPYQVEHRIIRPNGDLRTVVELGRVERDQQGTPFRMIGTVQDITARKQTEALLLSSEIRFRSLFDSMNEGGALHAMVFNEHGNPIDYRILEVNKAYTEILGITKEQAEGRLATEIYGQTSPPYLELYNRVVKTGQSLRFETEYSPMVRNFEISVFSPGENQFATVFTDITERKKTLQKLNGALDELEKKSNFLQSLVQNLPDLIWMKDPEGVFLTCNPAFERFVGSQEQQIKGKTDYDFVDQKLADFFRMNDLLAIEKGGPVINQEWVTFAADGHKALLETTKTPMFDKQGRIIGVLGVAHDITATKQAEQDLIHAKEKAEAAYQAKSEFLATMSHEIRTPMNVIIGLSDILMETPIDHEQRDHLLRLQKANKTLLDLVDSILDLSRIEANQISLKQEPLNLALMVEETMSMMSIVADQKGLRLESQVTQATDDYWSLGDESRIRQILVNLIGNAVKFTEKGSIWVTLELFTDTLERTLVRLCVKDTGIGIGPEHLETIFDKFTQVDSSYARRYSGTGLGLAITRRIIQLMGGKVWVESNPSQGSLFCVELPFIPVQPIALKEDTTLQNDVNRSTNRPLRILLAEDSEDNQMLVQTYLRRTHHELVIVMDGQQAVDAACSKPFDLILMDIQMPIMDGYQATGIIRDDQHRHNKPHTPILALTAHALDEDVAKSLAAGCDGHLTKPIRKAKFLQCIERYQPITFLDES

SEQ ID NO: 27220 - protein, 1166 aa, Magnetococcus sp. MC-1
MIKELTAYHDISSPKKRMAGIAFKLLVLVLLFATAFENYPLFHILAELFSVIIAITFFVITWNSRRFFDNHFLLFIGISFLFVGILDLIHALGYKGMMIFERKDANLATQIWIATRFLESFSFLGAFLFIRRKVVPELLMALYGIITTLLLLSIFEWNLFPDCLVEGQGLTPFKIYSEYGVSLLLVVGMLLLHHHRDRFNKSVLGYLHWAMLITICAELCFTSYLHAYGVSNLLGHVFKIIAFYLLYKAVVETSLKTPFQTLYHNILLGQEALESANQALIHQNIQLEMVQTVAHLGHWFWEIKPDRFVLSTEAYHILAIDPAIAQPTVEMIHNHIPDPYKQQVIEQLEQVLTGNAVHFQTEHPVRHADGRLTHVFARAEVIWESGVAVKMIGTVLDVTEQKLREQELDEGKLKLRTALEEREKALQCAEQANLAKSDFLANMSHEIRTPLNAIINLSYLILQTPLTSKQSNYLEKIESAGRTLLGVINDILDYSKIEAGHLVLDHVAFQLDDVISNVANIAIARKEDKDLDLLYHVTPSTPTQMMGDPMRLGAVLINLTNNAIKFTEHGEVVIRVDAKQQREQHYLLHFSVQDTGIGISAEQQKRLFQSFSQADSSISRRYGGTGLGLAISKKLVELMGGTLSLQSVVGQGTTFEFTIPLQAVEIKPDEVPSATSLNGVRVLVVDDNATAREILEEQLNAFHMEVCSVASGEAALDVLHHEPRPELILLDDQMTGLSGVETVRRLRGQINLARIPEVLMLSDHGREKVRQEAEALGITHFMCKPISPSVLLETLLEVRGECLPRKQRSRRPLIHPELRDGLSAIAGARVLLVEDNAINQEIAIELLGYAGVAVTPAASGQSALDLLNSEAPFDLVLMDIQMSDMDGYATTRQLRQDPRFKTLPVVAMTAHAMVSDREKALQLGMQDHIPKPIEPEQLFAALVQWIKPRQANQQPLNLSPQAPRPLEEMVLPELTGVDVQAGLARVGGNAELLRKLLVRFAQENSAITQKISNLATENPAQAGELIHSFKGVAGNLGMPQVAKSARAVELALKGSESLDAALHGLTRVLDPILKGLSKLDTTLEEAYSEAQPLEPARVLSRIEEMSAMLEQDFAVAQHVQGQLQTLLQQSRYAHKFQQVVAAMDEFDTDRVQALLTEIAGQLSQPA

SEQ ID NO: 27221 - protein, 103 aa, Listeria innocua
MVKEITDATFEQETSEGLVLTDFWATWCGPCRMVAPVLEEIQEERGEALKIVKMDVDENPETPGSFGVMSIPTLLIKKDGEVVETIIGYRPKEELDEVINKYV

SEQ ID NO: 27222 - protein, 1423 aa, Streptococcus mutans
MEEETVCKNWFMRKSGKSWIFGCAVFFVLGLATALPVAAEEISQTTAADTAVTEVRTEDSSQTSSQETAVTETTQSEETASKQLTTPAVADQTTEPTDNEPISSSDGASSPYQVTDTTEPQQTLTPADSEPQAKADVQQAAAPKKEEINPVTNLEDMSHDTNGTWEVREDGIHSNAIGKGDSFLYSQSSGKNFVYATDVTFKQNSGAAALVFRSNNDSNNKNMYAVNVDIGGHKAKFWRWVDNKDIQLIDERDVVPTADNRYTLKVVAVNNWISYYVNDVLMASTGDYVLQKADKGQNTVIPEGHFGLLNWNGDMVFQNTKFALLDDTTAPLIDNITVRSDRGNVEKQGQFFSEEPLHIQYVSNDASQVSLDIAKHNPAATVTVEDKTGRVYTDPSHLPVNVGANYFTVKSTVIDSFGRTVTLTYRINVHRRQNDEVYYNELYRDQYHYSVKDGWANDPNGLVYYNGVYHLFHQFYDDTKWGPMHWAHATSTDLIHWKEEPIAFYPDSNGYMFSGCVVVDEHNSSGLFKTAKGGLVAIITANGNGQRMELAYSEDEGKTWQKYDRIVADWSNDPLQNQDFRDPKVFHWNNQWFMVLAGGPLRIYSSNNLKDWKVESTYPDLHTECPDMYPIVANDGVLKWVLSRGGRFYKVGDFKQVDGKWTFIADDAYKDKDQVMNFGKDSYAAMTYYVHDFGTETRPTIPKLTEVNWMNTWEDYCNLVADTVGQDFNGTFNLNLDLGLINENGQYILTQTPVKAYDSLRDVNTALHFKDVTVDANNTLLKDFKGDSYEIVSHFRPDEKTTKVGFNLRVGNGQATKVIYDLQTETLSIDRSQSGTILSAAFAKVNSQHVTKNADGSIDLHIYVDRASVEVFSKNNTVAGANQIFPNPEAVGASIIVEGGKAQADISVYQMKTIWTDKKDTAKPVAMNTTTAKELALQVGQTQDLQVYLAPASVRQDVEWTISDPSLVRTSQKGNVLHLTAVKKGKLTITAISKENPSLSKIFTISITLNNFKTNLKGLQSVTGKWYVDDETLYDSNTSSNDYYMASQKPGFKEYDYDIDLKYQRGLINLFVASGNIDPSQAYSVQFGDSETVRLYRFAGDTIAEANMGKRINDDQYHHIKVTKTKNSIIISVDGQEVMSHNFDQVDSYFNDAYVGLGLWDGAVEFQNFFVTDHATTPKPDSDPTPQPDAPEALAQERELIDPATGVRVILQKGELASIVRVKVSHIETNDAHTPAVLNAKDYDLFNITPIDKNEKVVAITKPATVLLPIDAGKVVDKVVYLPNTDKEESLPFTIVSLTDSNGKKQSYVRFTAEHFSEYGLVYQAENQTNLKSKEKQDNVAISYPLNLEQEVKVSSISRKYAANKTADVNSVQQTEPSVMSSSSKATLPDTGDHKTDLSQLGVLAMIGSFLVEIASYFKKSKD

SEQ ID NO: 27223 - protein, 182 aa, Glycine max
  misc_feature (45)..(45): Xaa can be any naturally occurring amino acid
  misc_feature (68)..(68): Xaa can be any naturally occurring amino acid
  misc_feature (86)..(86): Xaa can be any naturally occurring amino acid
  misc_feature (109)..(109): Xaa can be any naturally occurring amino acid
IYPNEKSSPVHIGGGGRLCGDNDIYIARPIVKIARRWGCDDVHFXSEHAGTSDREILYEMLGEPIKSXCTTLNIPDTAGITMPMEXQKLTVDIKVCGLGMRNDTMSTRXHSDLRLTTANTIYGARASATQLNMTIYGIGETAAYAHTAYDVMVYACCSHVTGPLYGGTRTKSIYVTSTHVAD

SEQ ID NO: 27224 - protein, 252 aa, Escherichia coli
MNQTLLSSFGTPFERVENALAALREGRGVMVLDDEDRENEGDMIFPAETMTVEQMALTIRHGSGIVCLCITEDRRKQLDLPMMVENNTSAYGTGFTVTIEAAEGVTTGVSAADRITTVRSDSDGAKPSDLNRPGHVFPLRAQAGGVLTRGGHTEATIDLMTLAGFKPAGVLCELTNDDGTMARAPECIEFANKHNMALVTIEDLVAYRQHMSVKPAENRCLIYCLNQETEVVAGFGFYFSLLCKMLIPLLFL

SEQ ID NO: 27225 - protein, 861 aa, Arabidopsis thaliana
  misc_feature (53)..(53): Xaa can be any naturally occurring amino acid
  misc_feature (69)..(69): Xaa can be any naturally occurring amino acid
  misc_feature (77)..(77): Xaa can be any naturally occurring amino acid
  misc_feature (83)..(83): Xaa can be any naturally occurring amino acid
  misc_feature (92)..(92): Xaa can be any naturally occurring amino acid
  misc_feature (100)..(100): Xaa can be any naturally occurring amino acid
MAITDFFAGEIATELLKQLFTISTTAWRYKNTAKQLLTLIDSIRPTIKEIQYXAGVELPAHRQAQIGMXLFDTFRRXGKKAHXTKSLASKRXWNLYRQLXTLARKMEKLEKTISNFLKNEVFTHILADVHHLRADTSVRLDRVDMSLDRVIQQVGSMKIGGGGLISEAMKRAEAMEIETNDDSEKFGVGLELGKVKVKKMMFESQGGVFGISGMGGVGKTTLAKELQRDHEVQCHFENRILFLTVSQSPLLEELRELIWGFLSGCEAGNPVPDCNFPFDGARKLVILDDVWTTQALDRLTSFKFPGCTTLVVSRSKLTEPKFTYDVEVLSEDEAISLFCLCAFGQKSIPLGFCKDLVKQHNIQSFSILRVLCLAQVANECKGLPLALKVTGASLNGKPEMYWKGVLQRLSKGEPADDSHESRLLRQMEASLDNLDQTTKDCFLDLGAFPEDRKIPLDVLINIWIELHDIDEGNAFAILVDLSHKNLLTLGKDPRLGSLYASHYDIFVTQHDVLRDLALHLSNAGKVNRRKRLLMPKRELDLPGDWERNNDEHYIAQIVSIHTGKCFSTLQIFLVLSCNNHQDHNVGEMNEMQWFDMEFPKAEILILNFSSDKYVLPPFISKMSRLKVLVIINNGMSPAVLHDFSIFAHLSKLRSLWLERVHVPQLSNSTTPLKNLHKMSLILCKINKSFDQTGLDVADIFPKLGDLTIDHCDDLVALPSSICGLTSLSCLSITNCPRLGELPKNLSKLQALEILRLYACPELKTLPGEICELPGLKYLDISQCVSLSCLPEEIGKLKKLEKIDMRECCFSDRPSSAVSLKSLRHVICDTDVAFMWEEVEKAVPGLKIEAAEKCFSLDWLDE

SEQ ID NO: 27226 - protein, 404 aa, Listeria innocua
MGLVVLKFGGTSVSTVDKIGKTADQAIYEKKQGNKVIVVVSAMGKSTDKLVAMAEEISEAPDKREMDMLLSTGEQITIALLAMTLKEKGHDAISYTGWQAGIETEAVHSNARIADIDSARIESALEAGQIVIVAGFQGITTDGEITTLGRGGSDTTAVAIASALKAEKCAICTDVVGVFTTDPRYVKKAQKLEQLTYDEMLELANLGAGVLHPRSVEYAKNFRIPLEVRASHELEPGTMIEEDLTMENTKVVRGIAFEDQITRVTIHWKQKEAMRVSKVFTKLAENNIDVDIIIQGITGLGHGNLSFTIKTSELLATLAVLEESKELLQIEKLESEQELAKVSIVGSGMVSNPGVAAKMFEALTENNIPIKMISTSEIKVSTVVPARKMVEAAQVLHDQFELDK

SEQ ID NO: 27227 - protein, 474 aa, Pseudomonas fluorescens PfO-1
MQTKLLINGQLVNGEGPAQPVLNPARGEVLVEINEATEAQVDAAVRAADSAFAEWSQTTPKDRSLLLLKLADAIEAHGEELAKLESDNCGKPYNAALNDEIPAIADVFRFFAGASRCMSGSAGGEYLPGHTSMIRRDPVGVIASIAPWNYPLMMVAWKIAPALAAGNTVVLKPSEQTPLTALRLAELASDIFPAGVLNLVFGRGPSVGSPLVTHPKVRMVSLTGSIATGSNIISSTADSVKRMHMELGGKAPVIIFDDADIDAAVEGIRTFGFYNAGQDCTAACRIYAQQGIYDKFVEKLGAAVSSIKYGLQDDPSTELGPLITAQHRDRVAGFVERAVAQPHIRLITGGKAVDGNGFFFEPTVLADAQQDDEIVRREVFGPVVSVTKFTDEAQALEWANDSDYGLASSVWTADVGRAHRLSARLQYGCTWVNTHFMLVSEMPHGGQKLSGYGKDMSMYGLEDYTTVRHVMFKH

SEQ ID NO: 27228 - protein, 133 aa, Rhodopirellula baltica SH 1
MTWRVYNVLKFSVRMFVGAAPVKKVEAIVRHFKLEDVKNALTEQGIHGMTVSEVRGFGRQKGHTEIYRGTEYAIDFVPKVKIEVVCTSDNLQTVIDTILQTAQTGQIGDGKIFVTNLEESVRIRTGERGEEAL

SEQ ID NO: 27229 - protein, 373 aa, Medicago truncatula
MCGIIKGSEWMKGKMVGCGSFGSVHLAMNKSTGGLFVVKKAHSEAGRDALENEVNILNTLNSSPSPYIVQCLGTDYDHQDNQLHVFMEYMSGGSLADVSHKFGGSLNEDVVRVYTRQIVHGLYHLHQHGIVHCDLKCKNVLLASSGNVKLADFGCAKRVKKNMNMNKSSSCIIANGGTPLWMAPEVLLMKNNSSINDESRVVDFAAADIWSLGCTVIEMATGRPPWVDDDLISISNPMAAMFKIACGDGIPQFPIHFSQEGFDFLRRCLVRDPKKRSTALELLNHPFLVSTTLTHHKHYSASSPASVLEVHQFEDTYDDDDDDDDSDDNDELISPAGGNHFFITKELLCPQGTTMWQLEDSASGNHWITIRSR

SEQ ID NO: 27230 - protein, 495 aa, Pseudomonas fluorescens PfO-1
MAIQEKRSRKMAGAQTHMHTALLIDGELVAGQGFVEPILNPATGEVLTQIAEASTEQVEAAILAAHRAFAEWSRTTPQQRSNLLLEIANAVEKHADHLARLEALNCGKPLHLARQDDLTATIDVFRFFAGAVRCQTGQLSGEYVPGYTSMVRRDPIGVVASIAPWNYPIMMAAWKIAPALAAGNTLVFKPSEHTPLSILALAPALAEILPRGVINIVCGGGEGVGSHLVGHPKVRMVSLTGDIVTGQKILQAAAKTLKRTHLELGGKAPVIVCNDADLKAVVEGVRTYGYYNAGQDCTAACRIYAQAGIHDKLVAELGAAVSSLRFAGKRDADNEIGPLISTRQRDRVASFVERALGQPHIERVTGAAVHSGAGFFYQPTLLAGCKQSDEIVQREVFGPVVTVTRFDELAQAVDWANDSEYGLASSVWTQNLDKAMQVAARLQYGCTWINSHFMLASEMPHGGLKRSGYGKDLSSDSLQDYSVVRHIMARHGQHL

SEQ ID NO: 27231 - protein, 452 aa, Oryza sativa (japonica cultivar-group)
MAAAVAAAACHSPARLVVTCSSSATPAPPRRPLRVAVVGGGPAGASAAEALASAGAQAFLLERNPSGAKPCGGAIPLCMLDEFAIPRDLVDRRVTRMRVLSPSNLAADFSRALPPGAHIPMLRREVLDSFLRRRAADAGATLVPGLVTSLSLPADPATDPYLVHYISSDSGGPSSSRCVLEVDAVIGADGANSRVAREVGAGDYSTAIAFQERIRLPDEAMAYYDDLAEMYVGGDVSPDFYGWVFPKCDHVAVGTGTVAAKPEIKRLQSGIRARAAGKVAGGRVVRVEAHPIPEHPRPRRVVGRVALVGDAAGYVTRCSGEGIYFAARSGRLCGRAMADEWRLTGAVTEAGIRAGYLRRWDDEFRPTFRFLDLLQRVFYGGNAGREALVEMCADEHVQRRTFDSYLHKRMAPAEPWGDLRLLWRTAAAMVRCGVLGREVERLRRLEQQAADQ

SEQ ID NO: 27232 - protein, 384 aa, Salmonella enterica subsp. enterica serovar Typhi Ty2
MSQNTLKVHDLNEDAEFDENGVEAFDEKALSEEEPSDNDLAEEELLSQGATQRVLDATQLYLGEIGYSPLLTAEEEVYFARRALRGDVASRRRMIESNLRLVVKIARRYGNRGLALLDLIEEGNLGLIRAVEKFDPERGFRFSTYATWWIRQTIERAIMNQTRTIRLPIHIVKELNVYLRTARELSHKLDHEPSAEEIAEQLDKPVDDVSRMLRLNERITSVDTPLGGDSEKALLDILADEKENGPEDTTQDDDMKQSIVKWLFELNAKQREVLARRFGLLGYEAATLEDVGREIGLTRERVRQIQVEGLRPSARNSADAGAEYRSAVPRVSTLVKKRPVDRLAFFLPFVFCQQRRDTRHHWRVINIFLRHAKRLWIVFAAGTA

SEQ ID NO: 27233 - protein, 534 aa, Haloarcula marismortui ATCC 43049
MARLESAEMLDAPQQEAIPTLADDEAGTVVWHREHLRIRDQGAVARAAASEYVLPLFVFDPAFYGADGLACDSRIRFLHDCLADLSDQYHTATGCGLTYAHGDPVDVLGRFREAGWDIVTMAAPTGRYGRERDRRVREQCDVTFVDGDGLVRDRAATRDGWQDDVSAWFAADQHDWDPSTVTSRSFDSGIDISTIEDHYDIAPSKSDVPRGGTGPARERLSAFAERIDDYPGNISAPVDARDGTSGLSPYLAFGCLSVRQVIQYIDEHAPDGRGKEMFVSRLFWNKHYEQKLEDWPGWLETAVNPVLEGFNAEQYDPDLVAAWKHGQTGFPMVDASMRCLRQTGWLNFRMRSMSASVYYHLLQQPWRIGADWFYHHLIDASAAINYTQWQSQCGLVGKPALRLYNPRKQVRDQDPDGEFIRQWVPELESLPDEYLDRPEQTPVHVQASCGVDIGDDYPHPVVDYDAARQAFHRRYEAVRPDAADALHDPTIARRVSFSGGREAAARIAAEHGTDASNGTENSRTQASLDSFGDE

SEQ ID NO: 27234 - protein, 320 aa, Escherichia coli CFT073
MRQTKTGILLANLGTPDAPTPEAVKRYLKQFLSDRRVVDTSRLLWWPLLRGVILPLRSPRVAKLYASVWMEGGSPLMVYSRQQQQALAQRLPETPVALGMSYGSPSLESAVDELLAEHVDHIVVLPLYPQYSCSTVGAVWDELARILARKRSIPGISFIRDYADNHDYINALANSVRASFAKHGEPDLLLLSYHGIPQRYADEGDDYPQRCRTTTRELASALEMAPEKVMMTFQSRFGREPWLMPYTDETLKMLGEKGVGHIQVMCPGFAADCLETLEEIAEQNREVFLGAGGKKYEYIPALNATPEHIEMMANLVAAYR

SEQ ID NO: 27235 - protein, 430 aa, Burkholderia vietnamiensis G4
MTLRVVVTGIGIVSPLGCGKELVWQRLIGGGSGLRRLGDDIAGELSAKVGGTVQDVAEDPEGGFDPERSVPHKELRKMDRFIQMAMVAADEALAEAGWAPEAEQQRERTATVVASGIGGFPGLAEAVRIGETRGVRRLSPFTIPFFLSNLAAGQISIKHRFRGPLGCPVTACAASVQAIGDAMRMIRTGEADVVLAGGAEAAFDKVSLGGFAAARALSTGFSEEPVRASRPFDRDRDGFVMGEGAAMVVVESLDHALARGARPIAEIIGYGTTADAYHMTAGPDDGSGAMRAMKLALRMGDVAPEQVDYVNAHATSTPVGDAGEIEALKTVFGVGAGPAISSTKSATGHLLGAAGAIEAAFSILALRDGVLPGTLNLEHPDPAADGLDLIGPAARHVPVEIALSNGFGFGGVNASVLFRRYPSDRSAEAH

SEQ ID NO: 27236 - protein, 631 aa, Oncidium Gower Ramsey
MEGCDCIEPQWPADELLVKYQYISDFFIALAYFSIPLELIYFVKKSSFFPYRWVLIQFGAFIVLCGATHLINLWTFTMHSRTVAIVMTVAKVSTAGVSCATALMLGHIIPDLVSVKTRELFLRNKAEELDREMGLIRTQEETGRHVRMLTHEIRSTLDRHTILKTTLVELGRTLDLAECALWMPLRTGLHLQLSHTLNNKIPVGSVVSINLPIVNQIFNSSRAGRIPNTCPLARFQPYTGRYVPQEVVAVRVPLLHLSNFQINDWPELSPKSFAVLVLMLPSDSARKWHAYELELVEVVADQVAVALSHAAILEESMRARDLLMDQNVALDLARREAEMAIRARNDFLAVMNHEMRTPMHAIIALSSLLLETELTPEQRLMVETILKSSNLLATLINDVLDLSKLEDGSFELEATIFNLHTVFREAVNLIKPIAAVKKLSLFVSLAPDLPSCAIGDEKRLLQIMLNVVGNAVKFTKEGTIFITVNIAKPDSLRDPDFYPAPTDGHFYLRVQVKDTGCGISPQELPHLFTKFAHTQNGSDKGYSGSGLGLAICKRFVNLMKGHIWLESEGIGKGCTTIFIVKLGMSEDPTLRYQQKLLPPIRAGQAEADPFGLKPAALKDELMPKIRYQRSL

SEQ ID NO: 27237 - protein, 242 aa, Bacteroides fragilis YCH46
MFQEAIAQYLKQNHYESIQLKSVLFDMDGVLFDSMPYHAEAWHKTMKAHGLNLSREEAYMHEGRTGAGTINIVCQRQLGRDATQEEIESIYLEKSIEFNKHPQAERMPGAWELLQKIKAEGIIPTVVTGSGQASLLDRLEHNFPGMFRQELMVTAFDVKYGKPNPEPYLMALEKGGLKPNEAIVIENAPLGVEAGHKAGIFTIAVNTGPLNGEILLNAGADLLFPSMQALCESWEKLVRLLH

SEQ ID NO: 27238 - protein, 519 aa, Candidatus Kuenenia stuttgartiensis
MKMYNKFMIGVWLLLIMGLFAFGTGVAEAAGDPNGSDTYSESIEGLKISINVVWTLIAAFLVFSMQAGFAFLGGFLRQKNMLNYLAHCFIDSTLGACVFYFFGFAVMFGGSQAYSGLDRGWPGIGWDGFMLLGDAYDVKTVMFWLFQMVFATKTVTIIAGAVAERMKFVPYIIYSCLMCGIIYPLYGHWVWGGGWLSTLPIGAGVVDFAGCAVVHTVGGIMALMGAWAVGPRKGKYNPDGSPNAIPGHNMTYVVIGCFILAFGWFGFNAGSTVAGTDLRIAIIATNTFLAAAAGASIMLFFTWKRQGFVDVSFVCNGALAGLVAITAPCAYVAPWAAVVIGVLAGLIMRGAVALVEVVFKIDDPLGAVAVHGANGMWGMLAVGLFADGTYGINGLILGTGEQLLAQFIGTVVAFAYAFAFGGAVFFGLKGTIGLRVSDLEEEEGLDIAYHGTSCYPVEGGFFGAVGEHLIDVQAEKEQISLLEEAISKDRSRERIYSEKLGRWVYGKAKQEKQSSNSKK

SEQ ID NO: 27239 - protein, 112 aa, Candidatus Kuenenia stuttgartiensis
MKKIEAIIRPEKFNIVRDAMTEMGYPGMTVTEVKGHGSQKGISEVWRGRRYRVDLLSKIKLEIVVKDEDVQKIVDTITTEAQTGSIGDGKIFVINVENVYRIRTKEKDATAI

SEQ ID NO: 27240 - protein, 493 aa, Methanosarcina mazei Go1
MCGIAGMFGTPDSNTKVKKMLAILGHRGPDACGIHTEGKLSIGNTLLKITGDMPQPLTGTGSLVLNGEIYNFRELAAEIGLKTDSDTELLFTLIERKVRKGIKPTNAVFSVLSKVNGDYALAYACGTELVLARDPSGVKPLYYFYEKSMVKPGLAFASEKKALAFTGREVKPFPQGGIMGFSTENGKIAEKFTEKSLKITQPEKRISAEKEAIIYLKAALEKAVELRLTPVSGIAFSGGIDSTFLAALAKRIDPYVSLYAVGLPDSHDIAQAEYAAEAIGMKRNLKTHFLSPEEIEAAVPEVIYATESTDPMKVAIGLPLHIVAKTAREEGKRVLLTGQGADELFGGYSRHEGFFEQGADVLDREIYSDLENISAINLERDDMVAMANSVELRVPFLDKEVIKTGLAISPELKVRKKEGVYIRKYILRKAAEGLLPPKILWKEKKAVQYGTGVQKTLDRLARDSGFSKKQGGHIEKYLSQIASEKGFDFINEM

SEQ ID NO: 27241 - protein, 631 aa, Oncidium Gower Ramsey
MEGCDCIEPQWPADELLVKYQYISDFFIALAYFSIPLELIYFVKKSSFFPYRWVLIQFGAFIVLCGATHLINLWTFTMHSRTLAIVMTVAKVSTAVVSCATALMLVHIIPDLLSVKTRELFLRNKAEELDREMGLIRTQEETGRHVRMLTHEIRSTLDRHTILKTTLVELGRTLDLAECALWMPLRTGLHLQLSHTLNNKIPVGSVVSINLPIVNQIFNSSRAGRIPNTCPLARFQPYTGRYVPQEVVAVRVPLLHLSNFQINDWPELSPKSFAVLVLMLPSDSARKWHAYELELVEVVADQVAVALSHAAILEESMRARDLLMDQNVALDLARREAEMAIRARNDFLAVMNHEMRTPMHAIIALSSLLLETELTPEQRLMVETILKSSNLLATLINDVLDLSKLEDGSFELEATIFNLHTVFREAVNLIKPIAAVKKLSLFVSLAPDLPSYAIGDEKRLLQIMLNVVGNAVKFTKEGTVFITVNIAKPDSLRDPDFYPAPTDGHFYLRVQVKDTGCGISPQELPHLFTKFAHTQNGSDKGYSGSGLGLAICKRFVNLMKGHIWLESEGIGKGCTTIFIVKLGMSEDPTLRYQQKLLPPIRAGQAEADPFGLKPAAPKDELMPKIRYQRSL

SEQ ID NO: 27242 - protein, 251 aa, Treponema pallidum
MKLVLIRHGESEWNRLNLFTGWTDVPLTPRGESEAQEGGRVLQEAGFDFDLCYTSFLKRAIRTLNFVLQALDREWLPVHKSWKLNERHYGDLQGLNKTETAQKYGEQQVRVWRRSFDVAPPPLTVGDARCPHTQASYRGVCASGRTPVLPFTESLKDTVARVVPYFEEEIKPQMISGQRVLIVAHGNSLRALMKHIESLDETQIMEVNLPTGVPLVYEFEADFTLCGKRFLGNEADVAARAQAVADQGKSN

SEQ ID NO: 27243 - protein, 342 aa, Sporidiobolus salmonicolor
  misc_feature (71)..(71): Xaa can be any naturally occurring amino acid
  misc_feature (191)..(191): Xaa can be any naturally occurring amino acid
  misc_feature (226)..(227): Xaa can be any naturally occurring amino acid
  misc_feature (241)..(241): Xaa can be any naturally occurring amino acid
AKIDNAVLPEGSLVLVTGANGFVASHVVEQLLEHGYKVRGTARSASKLANLQKRWDAKYPGRFETAVVEDXLKQGAYDEVIKGAAGVAHIASVVSFSNKYDEVVTPAIGGTLNALRAAAATPSVKRFVLTSSTVSALIPKPNVEGIYLDEKSWNLESIDKAKTLPESDPQKSLWVYAASKTEAELAAWKFXDENKPHFTLNAVLPNYTIGTIFDPETQSGSTSGWXXSLFNGEVSPALALXPPQYYVSAVDIGLLHLGCLVLPQIERRRVYGTAGTFDWNTVLATFRKLYPSKTFPADFPDQGQDLSKFDTAPSLEILKSLGRPGWRSIEESIKDLVGSETA

SEQ ID NO: 27244 - protein, 186 aa, Arabidopsis thaliana
  misc_feature (142)..(142): Xaa can be any naturally occurring amino acid
MAAFTCTSRPPISLRSETRIVSSSPSASSLSSRRMFAVLPESSGLRIRLSLSPASLTSIHQPRVSRLRRAVVCEAQETTTDIQVVNDSTWDSLVLKATGPVVVDFWAPWCGPCKMIDPLVNDLAQHYTGKIKFYKLNTDESXNTPGQYGVRSIPTIMIFVGGEKKDTIIGAVPKTTLTSSLDKFLP

SEQ ID NO: 27245 - protein, 631 aa, Oncidium Gower Ramsey
MEGCDCIEPQWPADELLVKYQYISDFFIALAYFSIPLELIYFVKKSSFFPYRWVLIQFGAFIVLCGATHLINLWTFTMHSRTLAIVMTVAKVSTAVVSCATALMLVHIIPDLLSVKTRELFLRNKAEELDREMGLIRTQEETGRHVRMLTHEIRSTLDRHTILKTTLVELGRTLDLAECALWMPLRTGLHLQLSHNLNNKIPVGSVVSINLPIVNQIFNSSRAGRIPHTCPLARFQPYTGRYVPLEVVAVRVPLLNLSNFQINDWPELSPKSFAVLVLMLPSDSARKWHAYELELVEVVADQVAVALSHAAILEESMRARDLLMDQNVALDLARREAEMAIRARNDFLAVMNHEMRTPMHAIIALSSLLLETDLTPEQRLMVETVLKSSNLLATLINGVLDLSKLEDGSFELEATIFNIHTVFREAVNLIKPIAAVKKLSLFVSLAPDLPSCAIEDEKRLLQIMLNVVGNAVKFTKEGPIFITANTAKPDSLRDPDFYPAPNDGHFYLRVQVKDTGCGISPQEFPPLFTKFAHTQNGSDKGYSGSGLGPAICKRFINLMKGHIWLESEGTGKGCTTIFIVKLGMSEDPTLRYQQKLLPPIRAGQSEADPFGLKPAAPKGELLPKIRYQRSL

SEQ ID NO: 27246 - protein, 415 aa, Thermus caldophilus
MLRLDTRFLPGFPEALSRHGPLLEEARRRLLAKRGEPGSMLGWMDLPEDTETLREVRRYREANPWVEDFVLIGIGGSALGPKALEAAFNESGVRFHYLDHVEPEPILRLLRTLDPRKTLVNAVSKSGSTAETLAGVAVFLKWLKAHLGEDWRRHLVVTTDPKEGPLRAFAEREGLKAFPIPKEVGGRFSALSPVGLLPLAFAGADLDALLMGARKANETALAPLEESLPLKTALLLHLHRHLPVHVFMVYSERLSHLPSWFVQLHDESLGKVDRQGQRVGTTAVPALGPKDQHAQVQLFREGPLDKLLALVIPEAPLEDVEIPEVEGLEAASYLFGKTLFQLLKAEAEATYEALAEAGQRVYALFLPEVSPYAVGWLMQHLMWQTAFLGELWEVNAFDQPGVELGKVLTRKRLAG

SEQ ID NO: 27247 - protein, 451 aa, Candidatus Kuenenia stuttgartiensis
MKRCLLFITLIVIVTCLANDMFAGDPSGKETYSDSIQGLKFSVNFAWILMSAFLVFNMQVGFVFLGAGFVQKKNTLNYGTMSFMDFCAGAIIFWLFGFALMFGGSQLAPGLTNGNKFIGYSGFLLIGDSYDVHISALWLFQVMFASTASTIVTGAIAERCKFHAHVLNSIFLCGILYPVYGHWMWGYGWLETLPFGVGARDFAGSGVVHGVGGLIAFVAAWRVGPRYGKYNPDGSSNVIRGHNLLYIVIGTLILIFGWFGFNAGSTLAVTELRVSIIATNTFLAAAAGALTLLYISYFMTKTFGVSMACNGALAGCVAITASGAYVPHWAAIVIGAIGSALTCFSLDFIENKLKIDDPVGAISVHGVNGIWGLLAVGVFADGTYCEVRGLITGSGWQLLSQFIASITLIVWCLGMGFLFLSFLKRVIGLRDPISAEQKGLDLYEHGSGCYQ

SEQ ID NO: 27248 - protein, 574 aa, Oncidium Gower Ramsey
FGAFIVLCGATHLINLWTFTMHSRTLAIVMTVAKVSTAVVSCATALMLVHIIPDLLSVKTRELFLRNKAEELDREMGLIRTQEETGRHVRMLTHEIRSTLDRHTILKTTLVELGRTLDLAECALWMPLRTGLHLQLSHTLNNKIPGGSGGSINLPIVNQIFNSSRAGRIPNTCPLARFQPYTGRYVPQEVVAVRVPLLHLSNFQINDWPELSPKSFAVLVLMLPSDSARKWHAYELELVEVVADQVAVALSHAAILEESMRARDLLMDQNVALDLARREAEMAIRARNDFLAVMNHEMRTPMHAIIALSSLLLETELTPEQRLMVETILKSSNLLATLINDVLDLSKLEDGSFELEATIFNLHTVFREAVNLIKPIAAVKKLSLFVSLAPDLPSCAIGDEKRLLQIMLNVVGNAVKFTKEGTIFITANIAKPDSLRDPDFYPAPTDGHFYLRVQVKDTGCGISPQELPHLFTKFAHTQNGSDKGYSGSGLGLAICKRFVNLMKGHIWLESEGIGKGCTTIFIVKLGMSEDPTPRYQQKLLPPIRAGQAEADPFGLKPAAPKDELMPKIRYQRSL

SEQ ID NO: 27249 - protein, 115 aa, Candidatus Kuenenia stuttgartiensis
MVVMKKIEAIIRDQKLTAVKDALKAIGVAGMTVSEVKGHGTQKGITEVYRDKQYSVDLLPKIKIEIITTDENVDKITKTIVDAAQTGSIGDGKIFIYDIRDVIRIRTGDTGEKAI

SEQ ID NO: 27250 - protein, 545 aa, Silicibacter sp. TM1040
MSEPLLKVRDLKIGATVYPPGEKPHDIEIVHGVSFDLMPGKVLGLIGESGAGKSTIGLSSMAYGRGGVKITGGEVWVNGRDILKSKLSDIRKLRGGEVTYVSQSAAASFNPAKTIMEQVIEASVEQGKFSRRVAEDRARALFAKLGLPDPDNIGARYPHQVSGGQLQRCMTALALCPEPDLVVFDEPTTALDVTTQIDVLMAIKEAIRDTGVAALYITHDLAVVAQVSDDIMVLRHGNTVEYGSVDQIINNPQEEYTQALVSVRSIEHEEKAPTEEPILSVRNITARYKGTKFDVLHNVNVDLYPGQTLAVVGESGSGKSTLARVITGLLPPREGEIYFNGRTLTPDFNNRSREDLRELQMIYQMADVAMNPRQTVGTIIGRPLEFYFGLKGAEKRKRIIELLDEIELGEGFIDRYPAELSGGQKQRVCIARALAAKPKMIICDEVTSALDPLVADGILKLLLNLQKIEDVAFLFITHDLATVRAISDNIAVMYKGKVQRYGGKTQVLSPPFDDYTDLLLSSVPEMKLGWLEEVIANRKMESAGN

SEQ ID NO: 27251 - protein, 443 aa, Zea mays
  misc_feature (68)..(68): Xaa can be any naturally occurring amino acid
MPVPKPMERKQAAYSNLDERYAIQGEKYQGQQYSHIYFTRLHHMRNLLHALVPSWKPQLPGKLFPAHXVTTVLGLEEGKDCIIVGTLYKHMKLKPSILDEYAKERSAIPLVKPHNFMHPDDHLILEDESGRVTLAGAIPPAAFVTGVVVALHGKETSAGNFLVEDVLEAGLPPQSALSSAEEDKYVVFISGLSVGSDTFNPLQFQLLIDHVTGHLGDENEQSIASNIVRIVVVGNSVHISPRFVNGQTVPSKDQSRIAEPIKELDIMLTQLVASLPVDMMPGCHDPANFSLPQQPLHRCLFSGASTYNTFSSCSNPHQFELDSVQFLGTSGQNIDDLYKYSDAKDKLEFMERTLRWRHLAPTAPNSLGCYPYTDKDPFLVESCPHVYFVGNQDKYETRLLEGQEKQKVRLISIPRFSESGVAVMLNLRNLECSTLSFSTSFDA

SEQ ID NO: 27252 - protein, 608 aa, Legionella pneumophila subsp. pneumophila str. Philadelphia 1
MFVRICAMFGFVSDLLTAAVSSLDELLQDTPAHQIILGTAALYFLYNQYHNPSISRWYRSRNNASMKQRIIDSAYALAKNLPGVNQIIEKELNKELSSTREKLRIQRSGMTLREEIPEEGLSPQDILSAFDVDVEKCHFDFLSVTNDSPEREFLVERGDGKDSGALYAIHPKELTELLKEVYGATALTNPLHDKWPRINAMQAEVIRWCQNLFHGSKECYGLLTHGGTTSIIEAMAAYVIRARAKGIDYPEIVVPETAHAAFKKAAELTGAILITVPVDKKTGAVNPKVMSSYITRNTAVIVGSAPSFMNGIHDPVSELGQLAKKKNVPFHVDACLGGFLTAFLDTSSEPMDFRVPGVTSISADLHKYGCCPKGTSVCLFSEDSPALSVYAALNWSGGLYATPGILDGSTSGARVAEVYATLSYYGKNKYQEIAKSIITLRNAIQKELTTLLEEGNGLTSEDIYVYGNPQWSILGFRSNTCNAHFIADELEKRGWKLNLLQNPDGFHLCLTHVHTLVKGFETQFIKDLREAVIDVKNYPPGKKPSGNVKVYGAVGMMPIELQREICKQYQKARLNYTSASPGSLRIFTNVPVEEDEGLRNRKTEKYKV

SEQ ID NO: 27253 - protein, 481 aa, Oceanospirillum sp. MED92
MSDSVFRNYIAGEWVEGSKGSVANISPADTSDVIGHYAQADKVQTEAAIAAAQEGQKEWQKSGLEQRYSVLMAIGDELIARKDELGEILAREEGKTLAEGVGETYRSGQFFHYYAAEVLRQMGETADSVRPGIEIETRREPVGVVGIITPWNFPTATGAWKIAPALAFGNAIVWKPANQVPASAWALTEIISRQNLPAGTFNLVMGPGAEVGDVLINSRDINALTFTGSLETGRKVAAATAVNLVKCQLEMGSKNALVVLDDADLENAVECAVGGAYGGTGQKCTASSRLIVTEGIHDRFVEAMVERMKKLVVGHPLKAGVHIGAVADARQMEQNLEYLELAKKEGGNLVYGGEVLNEETEGYFMQPALFTETTNAMTINRDEAFAPIACVIKVKDYDEALATLNDTNFGLTGGICTQSLKHASDFKRNAKTGCVMVNLPTAGTDYHVPFGGRKDSSFGPREQGTYAKEFYTVVKTTYISA

SEQ ID NO: 27254 - protein, 587 aa, Porphyridium sp.
MTHIEKSNYQEQTGAFALLDSLVRHKVKHIFGYPGGAILPIYDELYKWEEQGYIKHILVRHEQGAAHAADGYARATGEVGVCFATSGPGATNLVTGIATAHMDSIPIVIITGQVGRSFIGTDAFQEVDIFGITLPIVKHSYVIRDPRDIPRIVAEAFSIAKQGRPGPVLIDVPKDVGLETFEYQYVNPGEARIPGFRDLVAPSSRQIIHSIQLIQEANQPLLYVGGGAITSGAHDLIYKLVNQYKIPITTTLMGKGIIDEQNPLALGMLGMHGTAYANFAVSECDLLITLGARFDDRVTGKLDEFACNAKVIHVDIDPAEVGKNRIPQVAIVGDISLVLEQWLLYLDRNLQLDDSHLRSWHERIFRWRQEYPLIVPKLVQTLSPQEIIANISQIMPDAYFSTDVGQHQMWAAQFVKTLPRRWLSSSGLGTMGYGLPAAIGAKIAYPESPVVCITGDSSFQMNIQELGTIAQYKLDIKIIIINNKWQGMVRQWQQAFYGARYSHSRMEDGAPNFVALAKSFGIDGQSISTRQEMDSLFNTIIKYKGPMVIDCKVIEDENCYPMVAPGKSNAQMIGLDKSNNEIIKIKE

SEQ ID NO: 27255 - protein, 617 aa, Glycine max
TGESGRRTQKGTLVFIVSIVFLLSFIIINLQSHEPSFENNITTVPLLPIARGVAEGVSAKSNPYLSQKASYNWTNAMLSWQRTAFHFQPQRNCACLLVLSASDPNGPLFYMGWYHVFYQYNPDSAVWGNITWGHAVSRDLIHWLYLPIALFPDKWFDVNGVWSGSATLLPDGKILMLYTGSTDQNVQVQNLAYPANLSDPLLLDWVKYADNPVLVPPPGIGPKDFRDPTTAWIGPDEKWRITIGSKLNKTGLSLLYKTQDFIHYEQSDRYLHQVPGTGMWECVDFYPVSVNGPNGLDTSENGPDVKHVLKASLDDTKVDHYAIGTYFIENDTWVPDNPNEDVGIGLKLDYGRYYASKTFYDQQKQRRILWGWINESDSETADLKKGWASLQTIPRTVVFDKKTRTNLLHWPVEEVESLRLSNSEFEGVVVKPGSVVPLDIGPATQLDIFAEFEIEDLASKGIGKDNVDCGNGAVDRSAFGPFGILAIADDQLSELTPIYFHLSSTTKDGSLTTSFCVDETRSSKAPDVSKLIFGSKAPVLSDEKLSMRVLVDHSIIESFAQGGRTVITSRVYPTEAIYGAARLFLFNNATDINIKASLKIWQLNSAFIRPFPFDQKL

SEQ ID NO: 27256 - protein, 520 aa, Pyrus communis
DVQYLTGHVDERKPPQLADFLNWFLHDKKGTSTLSKPSSTGHRPHHVRVTGRLSTSCHLVDEDRELLLPRRHHNDDDHDNHVSSIFIDQSLTDGGEGGQIIKETSLLPGDQTRFGLESSLMRLELKGNSPHCLVQSDIPPCVQGDASEALDVTATAVASLEECARLSEENDVVQQAYRKEIVVSRNQVIRNSVEQPKVTLYNQSDLEGVHSELVKQGRITAVTNPRYLNLEPTLAMDWLEISWDELNIKERVGAGSFGTVHRAEWNGSDVAVKVLTVQDFHDDQLKDFLREVAIMKRVLHPNVVLFMGAVTKRPHLSIVTEYLPRGSLYRLIHRPASGELLDQRRRLRLALDVAKGINYLHCLNPPIVHWDLKSPNLLVDKNWTAKVCDFGLSRFKANTFISSKSVAGTPEWMAPEFLRGEPSNEKSDVYSFGVILWELATMQQPWGNLNPAQVVAAVGFKNKRLEIPRDLNPNVAAIIEACWANEPWKRPSFAVIMDSLTPLIKAPVTQPSRADMPLLT

SEQ ID NO: 27257 - protein, 753 aa, Magnetococcus sp. MC-1
MQGWDTIYEGVISYHAEADLSPLKRVVDLFEEIQWPAETIDRDSPIHPLVIAKTLLKMRMDVASLACALLVHPYSQRRFELDTVKQRFGDDIAFLLEGISRISLLSLRTPEKKQKETTIEEPEEGASLEDGPPTPRSVGEMIGEIHHGTILVRDENQAEGFRKLVLAMAKDIRVILIRLVLCLHQLRLAMRMGPVASVANLSHEVMEIYAPIAHRLGVYWLKNELEDLAFRMQWPGQYDAIRAKVLERRKGGEDVVQKVIAILGDKLVSHHIQGQVFGREKHLYSVWSKINRKQITLDDMFDLIAYRIIVPNKEDCYRTLGMIHSEFKPIPGRFKDYVAIPKRNGYQSLHTVVFGPFGNRIEIQIRTEKMHQIAESGVAAHWSYKGKGGGGNSTTGYAWLKDLLALQESVDDPGQFVENVRFDLFPEEIYVFTPNGEIITLPSKATPVDFAYAVHSQVGNSCQGAKINGRIVPLKTPLVTGDTISIITGKNREPNPNWLQFVVTSKAKYWIGRFVKEKQRQQSIGLGREILEREGRKVGSSITEKQLRVVLETFRCENIDDLYYNIGISRVSALQVVHKLFPGSAPAFTERKNQVARAGVERRGDKLALTGALEGIAVQAARCCSPLPGDVVVGIINTGRGITLHRISCNNLKSMEDQPERWVEDINWGGDKLLAHTARIRAMVSNRRGLLTPISQVITEAKANLLDVHVQDRDRDPCMVVLEVEVINHDHLERVLANLRSVPEVRSVDRMNA

SEQ ID NO: 27258 - protein, 313 aa, Novosphingobium aromaticivorans DSM 12444
MQPNLDCLIIGGGPAGLTAAIYLARFHLRIAVVDAGGGRAAMIPRTRNHSGFPGGISGRDLLARMEEQAAEFGVVVEQTTVEAIDRVDGAFRAVAQGREWIAQTVLVATGVINNRPPILPEVHDRALQQGLLRYCPICDGYEVTDRDVGVIGTGDHGRGEALFLRAYTANITLIAPDGPHDLDAEARRELEDVGVRLIDGPCHALRIDGGNIFASTPVAELGFHTIYPALGSKICSDLARSLGAEASEDGCLVIDRHQRTSIEGLYAAGDVTKGLDQISHAMGEAAVAATAIRNDLRARRPLLRRRAAPLTTD

SEQ ID NO: 27259 - protein, 741 aa, Pyrus communis
MEACNCIEPQWPADELLMKYQYISDFFIALAYFSIPLELIYFVKKSAVFPYRWVLVQFGAFIVLCGATHLINLWTFNMHSRTVAIVMTTAKVLTAVVSCATALMLVHIIPDLLSVKTRELFLKNKAAELDREMGLIRTQEETGRHVRMLTHEIRSTLDRHTILKTTLVELGRTLALEECALWMPTRTGLELQLSYTLHQQNPVGYTVPIHLPVVNQVFSSNCAVKISPNSPVARLRQLAGKHIPGEVVAVRVPLLHLSNFQINDWPELSTKRYALMVLMLPSDSARQWHVHELELVEVVADQVAVALSHAAILEESMRARDLLMEQNIALDLASREAETAIRARNDFLAVMNHEMRTPMHAIIALSSLLQETDLTPEQRLMVETILKSSNLLATLINDVLDLSRLEDGSLQLDIATFNLHSIFREVHNMIKPVASIKRLSVALNIAADLPVYAIGDEKRLMQIILNVVGNAVKFSKEGSISITAYVAKSESLRDFRAPDFFPVQSDNHFYLRVQVKDSGSGINPQDIPNLFTKFTQTQTLASQNSGGSGLGLAICKRFVNLMEGHIWIESEGLGKGCTATFIVKLGFPERSNESKQPFAPKLQANHVQTNFPGLKVLVMDDNGVSRSVTKGLLVHLGCDVTTVSSIDEFLHVISQEHKVVFMDVCMPGIDGYELAVRIHERFTKRHERPVLVALTGSIDKMTKENCMRVGMDGVILKPVSVDKMRSVLSELLEHRVLFEAM

SEQ ID NO: 27260 - protein, 308 aa, Streptococcus pyogenes M49 591
MSKIVVVGANHAGTACIKTMLTNYGDANEIVVFDQNSNISFLGCGMALWIGEQIAGPEGLFYSDKEELESLGAKVYMESPVQSIDYDAKTVTALVDGKNHVETYDKLIFATGSQPILPPIKGAEIKEGSLEFEATLENLQFVKLYQNSADVIAKLENKDIKRVAVVGAGYIGVELAEAFQRKGKEVILIDVVDTCLAGYYDRDLTDLMAKNMEEHGIQLAFGETVKEVAGNGKVEKIITDKNEYDVDMVILAVGFRPNTTLGNGKIELFRNGAFLVNKRQETSIPGVYAIGDCATIYDNATRDTNYIA

SEQ ID NO: 27261 - protein, 355 aa, Ralstonia eutropha JMP134
MKIAVLPGDGIGPEIVAEAVKVLNALDEKFEMETAPVGGAGYEAEGHPLPENTLKLAKEADAILFGAVGDWKYDSLERALRPEQAILGLRKHLQLFANFRPAICYPELTGASSLKPELVAGLDILIVRELNGDIYFGQPRGVREAPDGLFKGAREGFDTMRYSEPEIRRIAHVAFQAAAKRGKKLCSVDKANVLETFQFWKDIVIDVSKEYPDVELSHMYVDNAAMQLVKAPKSFDVIVTGNMFGDILSDEAAMLTGSIGMLPSASLDANNKGLYEPSHGSAPDIAGKGVANPLATILSAAMMLRYSLNKAEQADRIENAVKKVLAQGYRTGDILTPGCKQVGTREMGEAVLAAL

SEQ ID NO: 27262 - protein, 472 aa, Oryza sativa (japonica cultivar-group)
MSTQLVFPSASNGGCPLGVSRNNFRKVVLGVGAGHLQGKKCFSGGSSRPSKLECSANSRRVGPRRTKDALYDLHPEISMLYGEDNGAVAAPGKEQDIVKTTERLEDVSASHRYSEPRIKVIGVGGGGSNAVNRMIESDMKGVEFWIVNTDFQAMRMSPIDPDNKLQIGQELTRGLGAGGNPEIGMNAAKESQELVEQAVSGADMIFVTAGMGGGTGTGGAPVIAGIAKSMGILTVGIVTTPFAFEGRRRALQAQEGIASLRSNVDTLIVIPNDKLLTAVSPNTPVTEAFNLADDILRQGVRGISDIITVPGLVNVDFADVRSVMSDAGSSLMGIGTATGKTRARDAALNAIQSPLLDIGIERATGIVWNITGGNDLTLTEVNAAAEVIYDLVDPGANLIFGSVIDPSYTGQVSITLIATGFKRQEEAESRQAGGDNSRSHSSWFSSSSQEEGPTLQIPEFLQRKGRSGFSRG

SEQ ID NO: 27263 - protein, 235 aa, Arabidopsis thaliana
MPKSKRDRPVTLSKTKKKGREHKECIVNGIREAVEKYSSVYVFSFENMRNIKFKEFRQQFRHNGKFFLGSNKVMQVALGRSAEDELRSGIYKVSKLLRGDTGLLVTDMPKEEVESLFNAYEDSDFSRTGSIAVETVELKEGPLEQFTHEMEPLLRKLEMPVRLNKGTVELVADFVVCEEGKQLSPKSAHILRLLRMKMATFKLNLLCRWSPSDFELYREDLSELYREDLSDVETS

SEQ ID NO: 27264 - protein, 562 aa, Shewanella oneidensis MR-1
MDDNKRPLYLPFAGPAILEAPLINKGSAFSEEERIFFNLEGLVPYAIETIEEQASRAYDQFRSFNNDLDKHIYLRNIQDTNETLFYRLVQNHISEMMPIIYTPTVGLACERFSKNYRRNRGLFISYPNKDRIDDILNNSTRQKVKIIVVTDGERILGLGDQGIGGMGIPIGKLSLYTSCGGISPAYTLPITLDVGTDNPQLLEDPMYMGWRHPRIGGEEYAEFIEAFMQAVHVRWPDTLIQFEDFAQKNAMPILERYKERYCCFNDDIQGTAAVTVGSLLAACKAAGTELNKQRVAFLGAGSAGCGIAEAIVAQMVSEGISDEQARSQVCMVDRWGLLLDNMPNLLPFQQKLAQKCADISHWNNFSDNISLLDVVNNAKPTVLIGVSGAPGLFTEEIVRAMHSHCPRPIIFPLSNPTSRVEATPKDILHWTSGQALVATGSPFEPVVVDGETYEIAQCNNSFIFPGIGLGVLASGARHVSDAMLMASSRALAECSPLAINGSGPLLPKLEDIHSVSKHIAFAVGKVAIEQGLSLPASDELLMQSIEDNFWKPEYRRYKRTSF

SEQ ID NO: 27265 - protein, 430 aa, Escherichia coli CFT073
MMNTEGNNGNKPLGLWNVVSIGIGAMVGAGIFALLGQAALLMEASTWVAFAFGGIVAMFSGYAYARLGASYPSNGGIIDFFRRGLGNGVFSLALSLLYLLTLAVSIAMVARAFGAYAVQFLHEGSQEEHLILLYALGIIAVMTLFNSLSNHAVGRLEVILVGIKMMILLLLIIAGVWSLQPAHISVSAPPSSGAFFSCIGITFLAYAGFGMMANAADKVKDPEVIMPRAFLVAIGVTTLLYISLALVLLSDVSALELEKYADTAVAQAASPLLGHVGYVIVVIGALLATASAINANLFAVFNIMDNMGSERELPKLMNKPLWRQSTWGNIIVVVLIMLMTAALNLGSLASVASATFLICYLAVFVVAIRLRHDIHASLPILIVGTLVMLLVIVGFIYSLWSQGSRALIWIIGALLLSLIVAMVMKRNKTV

SEQ ID NO: 27266 - protein, 574 aa, Oncidium Gower Ramsey
FGAFIVLCGATHLINLWTFTMHSRTLAIVMTVAKVSTAVVSCATALMLVHIIPDLLSVKTRELFLRNKAEELDREMGLIRTQEETGRHVRMLTHEIRSTLDRHTILKTTLVELGRTLDLAECALWMPLRTGLHLQLSHTLNNKIPVGSVVSINLPIVNQIFNSSRAGRIPNTCPLARFQPYTGRYVPQEVVAVRVPLLHLSNFQINDWPELSPKSFAVLVLMLPSDSARKWHAYELELVEVVADQVAVALSHAAILEESMRARDLLMDQNVALDLARREAEMAIRARNDFLAVMNHEMRTPMHAIIALSSLLLETELTPEQRLMVETILKSSNLLATLINDVLDLSKLEDGSFELEATIFNLHTVFREAVNLIKPIAAVKKLSLFVSHAPDLPSCAIGDEKRLLQIMLNVVGNAVKFTKEGTIFITANIAKPDSLRDPDFYPAPTDGHFYLRVQVKDTGCGISPQEFPHLFTKYAHTQNGSDKGYSGSGLGLAICKRFVNLMKGHIWLESEGIGKGCTTIFIVKLGMSEDPTPRYQQKLLPPIRAGQAEADPFGLKPAAPKDELMPKIRYQRSL

SEQ ID NO: 27267 - protein, 138 aa, Shorea maxwelliana
EKNIPVLLGLLSIWNVSFLGYPARAILPYSQALEKFAPHIQQVSMESNGKGVSIDGVPLPYEAGEIDFGEPGTNGQHSFYQLIHQGRVIPCDFIGSAKNQQPIHLKGEVVSNHDELMSNFFAQPDALAFGKTPEELHK

SEQ ID NO: 27268 - protein, 546 aa, Saccharophagus degradans 2-40
MAIHERAGKPVIDSDLINIPRLISEYYTKKPQEGALVSFGTSGHRGSSFNGTFTESHILAICQALAEYRASKSITGPMYVGIDTHALSESAFITAVEVLVANGVALKVQAGRGYTPTPVISHAILTHNQGLTSNLADGIVITPSHNPPQDGGFKYNPPNGGPADTDITDWIQKRANELIAAELAGVKRTEYTAACESELVEEVDLIQPYVDDLGSVIDMEAIAKAGVRIGVDPLGGSGIAYWDVIANTYGLNIEMVSRKVDPTFSFMTLDKDGKIRMDCSSPYAMAGLIGLKDKFDVAIGNDPDYDRHGIVTPSGLMNPNHYLAVAIQYLFSHRPQWSADLVVGKTLVSSSMIDRVAASIGRKLAEVPVGFKWFVDGLYEGTCGFGGEESAGASFLRRDGSAWSTDKDGIILGLLAAEITAVTGMDPAAHYQKLTEQFGAPVYTRIDAPASGPQKSVLKALNAQSVIAQSLAGEPITQKLTHAPGNGAAIGGLKVCTENGWFAARPSGTEEIYKIYAESFKGEEHLQQILTEAQAIVSETFKAAGV

SEQ ID NO: 27269 - protein, 395 aa, Pseudomonas syringae pv. syringae B728a
MFELVDNVPQSPVIKVIGVGGGGGNAVNHMVKSNIEGVEFICANTDAQALKNIGARTILQLGTGVTKGLGAGANPEVGRQAALEDRERIAEVLQGTNMVFITTGMGGGTGTGAAPIIAEVAKEMGILTVAVVTRPFPFEGRKRMQIADEGIRMLSESVDSLITIPNEKLLTILGKDASLLSAFAKADDVLAGAVRGISDIIKRPGMINVDFADVRTVMSEMGMAMMGTGCASGPNRAREATEAAIRNPLLEDVNLQGARGILVNITAGPDLSLGEYSDVGSIIEAFASEHAMVKVGTVIDPDMRDELHVTVVATGLGAKIEKPVKVIDNTLQTTQQAPAQQASRQEAPSVNYRDLDRPTVMRNQAHAGATAAAKMNPNDDLDYLDIPAFLRRQAD

SEQ ID NO: 27270 - protein, 187 aa, Schizosaccharomyces pombe
MVRYSAAPALETKCAKARGAYLRTHFKNSREVAFTINGMNLKKAFIFLDNVKEHKQAVPFRRFNGGVGRTAQGKEFGVTQARWPVKSVNFFYDLLKNAEANAEAKGLDMDKLIIKHVQVNAAPKQRRRTYRAHGRVTAYLSSPSHIEIIVAEEEEAVPKANDTVSRVSLKQGAKARNLAARKAITSA

SEQ ID NO: 27271 - protein, 162 aa, Debaryomyces hansenii CBS767
MDKTSFYDFKPLDVYGEVYDFSQLKGKVVVIVNVASLCGFTLQYKDLEYLYKTYKERGFVVLGFPCNQFGSQEPYTEREILQICEKKFGVTFPIMDKIEVNGECEDPLYGYLKNEQRTSLGFKGIKWNFEKFLISRSGRVVKRYDSTVAPLNFEKAIVELLE

SEQ ID NO: 27272 - protein, 280 aa, Saccharophagus degradans 2-40
MSALILDGKALAKKTEDELTQCVDKLKASSGHTPILATILVGDDPASATYVKMKGNACSRIGMESLKVEMPTSTTTEQLLAKINELNANPAVHGILLQHPVPEQIDERACFDAIALEKDVDGVTCLGFGRMAMGEEAYGCATPKGIMRLLEAYNIELNGKHAVVVGRSPILGKPMAAMLLNANATVTICHSRTQNLEAHIKQADIVVGAVGKPEFIKAEWIKDGAVVVDAGYHPGGVGDIELAPLADRAAAITPVPGGVGPMTINTLIYQTVDSAQKKLG

SEQ ID NO: 27273 - protein, 644 aa, Oryza sativa (japonica cultivar-group)
MATTAAAAAAALSAAATAKTGRKNHQRHHVLPARGRVGAAAVRCSAVSPVTPPSPAPPATPLRPWGPAEPRKGADILVEALERCGVSDVFAYPGGASMEIHQALTRSPVITNHLFRHEQGEAFAASGYARASGRVGVCVATSGPGATNLVSALADALLDSVPMVAITGQVPRRMIGTDAFQETPIVEVTRSITKHNYLVLDVEDIPRVIQEAFFLASSGRPGPVLVDIPKDIQQQMAVPVWDTSMNLPGYIARLPKPPATELLEQVLRLVGESRRPILYVGGGCSASGDELRWFVELTGIPVTTTLMGLGNFPSDDPLSLRMLGMHGTVYANYAVDKADLLLAFGVRFDDRVTGKIEAFASRAKIVHIDIDPAEIGKNKQPHVSICADVKLALQGLNALLQQSTTKTSSDFSAWHNELDQQKREFPLGYKTFGEEIPPQYAIQVLDELTKGEAIIATGVGQHQMWAAQYYTYKRPRQWLSSAGLGAMGFGLPAAAGASVANPGVTVVDIDGDGSFLMNIQELALIRIENLPVKVMVLNNQHLGMVVQLEDRFYKANRAHTYLGNPECESEIYPDFVTIAKGFNIPAVRVTKKSEVRAAIKKMLETPGPYLLDIIVPHQEHVLPMIPIGGAFKDMILDGDGRTVY

SEQ ID NO: 27274 - protein, 441 aa, Salmonella enterica subsp. enterica serovar Paratyphi A str.
MYHGQLKNILLLSLRFIMDKLSYASDSSTSAWNTYLQQIERVAPYLGELSPWVDTLRHPKRALIVDIPVQMDDGTIRHFEGYRVQHNLSRGPGKGSVRYHPDVDLNEVMALSAWMTIKCAALNLPYGGAKGGIRVDPFSLSEGELEHLTRRYTSEIGIIIGPQKDIPAPDVGTNGKVMAWMMDTYSMNHGTTITGVVTGKPIHLGGSLGREKATGRGVFVSGLEAARRANIAVEGARVAVQGFGNVGSEAARLFAGAGARVVAIQDHTATLFNATGIDMKALTAWQTEHKQIAGFPGAETIASDAFWRLEMDILIPAALEGQITRQRAEALTCKLVLEGANGPTYPDADDVLASRGILVVPDVVCNAGGVTVSYFEWVQDMASFFWSEEEINARMDKIMTDAIVHVWEKAAEKSCSLRTAAYIVACERILLARKDRGIYPG

SEQ ID NO: 27275 - protein, 427 aa, Gibberella zeae PH-1
MRRVVVTGLGAITPLGVGVKRTWTRLLSGECGIVSVADLEPQTRWKELTSTVSGLVPSGDGEGQWRASDWLSANEQRRMSKFTQYAIAASDMALKDAGWEPKSEEQLEATGVCLGSGIGNLDEIYDTSLVHHKDGYKKVSPLFVPKILINMAAGHIAMKYGFQGPNHAATTACTTGAHSIGDASRFISMGDADIMVAGGSESCIHPLTFAGFGRARSLSTAYNNNPTASCRPFDADRNGFVVSEGAAVLILEELEHAKARGARIYAEIKGYGCSGDAHHMTAPREDGRGAFLAMKKALKNAGVKPSQVDYINAHATATNVGDVAETSAIRRLMLGEEGHEKESDITVSSTKGAVGHLLGAAGAIEALFSVLAIHQRVVPATLNLQKPDVGAAFNFVPNAAQERNVGVAVSNSFGFGGTNSSLVFSKY

SEQ ID NO: 27276 - protein, 122 aa, Gloeobacter violaceus PCC 7421
MTLFVGNLPFSATEQEIVEAFTEYGEVKSVKIPMDRETGRPRGFAFVDLESETAEQAAIDDLDGATWNNREIRVNKAEPRPDRRAGGGGGGGNRSGGGGGGYRGSGGGGGGAGGGGGRDRRY

SEQ ID NO: 27277 - protein, 133 aa, Arabidopsis thaliana
MAVPLLTKKVVKKRSAKFIRPQSDRRITVKESWRRPKGIDSRVRRKFKGVTLMPNVGYGSDKKTRHYLPNGFKKFIVHNTSELELLMMHNRTYCAEIAHNISTKKRKAIVERASQLDVVVSNKLGRLRSQEDE

SEQ ID NO: 27278 - protein, 431 aa, Rubrobacter xylanophilus DSM 9941
MPLLRVPQDGGRGGPPQARRGGAQAARGGRTAEGRRGAAEGPRAGDGEGLGRRPGARPQPTGERLRAPVARSLCYIGVEEEDEREGEVIRMDKGQLESTARALVAPGKGILAADESFGTIGKRFKAVGIESTEDTRRRYRQMLFTTPGIGEFLSGVILFDETIRQKADDGRPLPRVLEDQGVIPGIKVDKSTTALPLSPQEKFTQGLDGLRERLEEYRGMGARFTKWRAVITIGEGIPTERCIGANAHGLALFAAFSQEAGLVPIVEPEVLIDGDHTIERCYEVTEWTLNRTFDYIYEMGVELSGMLLKPNMVISGKDCPEQAGVEEVARMTVECLKRSVPAAVPGIVFLSGGQSDIQATAHLNAMNRLYDDLPWELSFSYARALQGRPMEIWKGDDANVEAAQKAFYHRAKMNSAARSGSYSEEMEKEAA

SEQ ID NO: 27279 - protein, 967 aa, Oceanospirillum sp. MED92
MAVETRTLSDLQQANEFTHRHIGPDAEQTQEMLSYLGVDSVEDLMTQTVPDSIRLDDALDMTDSVSEADALAYLKQLAAKNKVNKSYLGMGYSNTLVPNVILRNVMENPGWYTAYTPYQPEIAQGRLEALLNFQQMVMDLTGMELANASLLDESTAAAEAMTLCKRSNRKKSNTFFVADDVHPQTIDVIKTRAEYFGYDIVVGNPLTDLEAADPFGVQLQYPSTYGDITDIKSVIDAAHGQKAMVSVAADILALVLLKSPGELGADIVLGSSQRFGVPMGFGGPHAAFFAASEKLKRSVPGRIIGVSIDVNGNQALRMAMQTREQHIRREKATSNICTAQALLANMASFYVVYHGPEGLKRIAERVHRLTAILANGLKAKGVQVNDTYFDTLTVTLPETQEVVYQRALEEGCNLRKIGSDKLGISLDETTLPADVAVLLDVILGDAHGQTVEALDAAIVAGEATGISADARREDAILTHPTFNSYHSETDMLRYMKKLENKDYSLVHGMIPLGSCTMKLNATAEMIPVTWPEFANIHPFAPADQVAGYHQMLNELEEQLVEITGYDKVSLQPNSGASGEYAGLLAIRKYQESIGEGHRNVCLIPSSAHGTNPASAAMMDMKIIVTKCDDNGNVDVADLRAQAELHKDDLSCLMITYPSTHGVYEEDIVEICDIIHKNGGQVYMDGANMNAQVGISKPGLIGSDVSHLNLHKTFAIPHGGGGPGMGPIGVKSHLAPFLASHKVSPVEGLNPENGAVAAAPYGSASILPITWMYNVMLGKSGLKASTQMAILNANYMTEKLAEHYPVLYRGRNNKVAHECIVDIRPLKEESGVTEEDIAKRLMDYGFHAPTMSFPVAGTLMIEPTESESKVEIDRFVDAMVQIREEIAKVQNGEWPADNNPLFNAPHTQADVMNGAWDRPYTREEAVFPNEATRTNKFWPMTNRIDNVYGDRNFICSCPGIEAYQDQEG

SEQ ID NO: 27280 - protein, 143 aa, Gloeobacter violaceus PCC 7421
MQVILREINWTDLWLWLLFEEAPAERQRLYLEQVLDAWYSLGLLGGFNASRLPLHEAAEDLSLSYATYDLGAEDVMPALMHNMGDIEYDGRTAKCWFDLGTADSLSLDVLINAVQTLNQEYLPVERLVIGGSGDAPPWGNLDE

SEQ ID NO: 27281 - protein, 477 aa, Oceanospirillum sp. MED92
MHTVEKIGGTSMSRFEELMDTILVGKRTAPEELYNRIFVVSAYGGITNYLLEHKKTGEPGVYARFANAESEEAWVEELNNVQARMGEINAELFGDAEFERNAADSFVIERLNDVRDCMKSLQHLCTYGHFQLDEHLMKVREMLASIGEAHSAYNSVLALRKAGINARFVDLTGWHMDQPLPFEEMIQSQFEGVEIDKEMVIATGYTHCEEGLMKTFDRGYSEMTFSMIATVTGAGEAIIHKEYHLSSADPMLVGTDNVVTIGATNYDVADQLSNLGMEAIHPKAAKGLRRNGVKLRVKNAFEPEHEGTTISQDYHSEAPRVEIIAGRKDVFGIEIFDQEMLGDAKYDIEISKLLAQLKLYVINKDADANSITYYVGGSRKMVNRAANLMENMYPEGQIRLHNLAIVSAIGSHMKVKGILARTVSALAEADINVMALHQSIRQVEMQCVVSEEDYEKAIIALHAALIERGIDDIGSAA

SEQ ID NO: 27282 - protein, 577 aa, Oryza sativa (japonica cultivar-group)
MGTRLLALAPWLLLLLLQLAGASHVVHRSLEAEQAPSSVPASIVSPLLRTGYHFQPPMNWINDPNGPLYYKGWYHLFYQYNPKGAVWGNIVWAHSVSQDLINWIALEPAIKPDIPSDQYGCWSGSATILPDGTPAILYTGIDRPNINYQVQNIAFPKNASDPLLREWVKPAYNPVATPEPGMNATQFRDPTTAWYADGHWRMLVGGLKGARLGLAYLYRSRDFKTWVRAKHPLHSALTGMWECPDFFPLQAPGLQAGLDTSVPSSKYVLKNSLDLTRYDYYTVGIYNKVTERYVPDNPAGDYHRLRYDYGNFYASKTFFDPVKHRRILLGWANESDSVTYDKAKGWAGIHAIPRKVWLDPSGKQLLQWPIEELETLRGKSVSVFDKVVKPGEHFQVTGLGTYQADVEVSLEVSGLEKAEALDPAFGDNAERLCGAKGADVRGGVVFGLWVLASAGLEEKTAVFFRVFKPAGHGAEPVVLMCTDPTKSSLSPDLYKPTFAGFVDTDISSGKISLRSLIDRSVVESFGAGGKTCILSRVYPSMAIGDKAHLYVFNNGEADIKISHLKAWEMKKPLMNGA

SEQ ID NO: 27283 - protein, 115 aa, Arabidopsis thaliana
  misc_feature (53)..(53): Xaa can be any naturally occurring amino acid
  misc_feature (61)..(61): Xaa can be any naturally occurring amino acid
  misc_feature (91)..(91): Xaa can be any naturally occurring amino acid
MSGVWVFNNGVIRLVENPNQSGGVSTQSHGRRNVLVYLPTGEAVSSYSSLEQXILRSLGWXERYFNGDSDLIQYHKRSSIDLISLPRDFSXKFNSVYMYDIVVKNPIPFHVRDFN

SEQ ID NO: 27284 - protein, 449 aa, Pseudomonas fluorescens Pf-5
MEIEEFGYKQELKRGLSLRDLVVYGMIFMIPIAPFGVYGYVNQEAPGMVPLAYIIGMVAMVFTALSYGAMARAFPIAGSVYSYAQRGLNPHVGFLAGWLMLLDYLLIPPLLYVYAAMALNHLYPEVPKVGFILAFLVSATFVNLRGITFTARMNILFLLAQLAVLGIFLFYAWNALHGGAGNGQLTLAPLYNPENFHFGMLMQGVSIAVLSFLGFDAISTLAEEVKGDPGRSVGRAALITLVVMGAIFVVQTWIATDLAAGMGFKSADTAFYEIAELAAGSWLATLTGVATALAWGVAVAITSQAAVSRLLFGMARDGKLPKVLAKVHPKHNTPHISIYLVAVLSLLICYLFINSVDTLTSLVNFGALSGFMLLHITVINFYWRRQKSGQVVRHLICPVIGFVIVSAIMYNMGVDAQKLGAIWILAGLVYLFLLNKLGSGAALPDPLKH

SEQ ID NO: 27285 - protein, 507 aa, Agrobacterium tumefaciens str. C58
METGMQTTAEAIKGKRLGLFIDGRFVEPRSGKFVDSYDPTTGEAWYQFAEGGADDVDLAISSAQRAFRDPSWRRMTQTARGKLVRRLADLVLEHAEDLALLETRDNGKLIKEMRAQMRAIPDSYLYFAGMADKLQGDTIPVNKLDQLNFNMREPLGVIGMVTPWNSPLMLLTGTLAPCLAIGNTVVIKPSEHATASTLALAELIVEAGFPAGVVNVVTGGGAVTGEALTRHNGIAKFVFTGSTATGRRIAANAAANLVPCQMELGGKSPHVVFSDVDIEKTVNGVVSGVFAAAGQTCVAGSRCFVEANIYDRFIEALVERTRNIKLGDPMDDATDIGPLALESQLSKLEGYVASGVREGSRIAIGGKRPQSEELSRGWYFEPTVMADATNDMSFMRHELFGPMVGVMPFSSEEEMISLANDTNYGLASGIWTQNIDRAMRFANQIDAGTVWINTYRSAAYMSANGGFKESGYGRRGGFDVMREFSRAKNVVIDYSGAMQDPFVIRLR

SEQ ID NO: 27286 - protein, 543 aa, Candida tropicalis
MSSSPSIAQEFLATITPYVEYCQENYTKWYYFIPLVILSLNLISMLHTKYLERKFKAKPLAVYVQDYTFGLITPLVLIYYKSKGTVMQFACDLWDKKLIVSDPKAKTIGLKILGIPLIETKDPENVKAILATQFNDFSLGTRHDFLYSLLGDGIFTLDGAGWKHSRTMLRPQFAREQVSHVKLLEPHMQVLFKHIRKHHGQTFDIQELFFRLTVDSATEFLLGESAESLRDESVGLTPTTKDFDGRNEFADAFNYSQTNQAYRFLLQQMYWILNGSEFRKSIAIVHKFADHYVQKALELTDEDLEKKEGYVFLFELAKQTRDPKVLRDQLLNILVAGRDTTAGLLSFLFFELSRNPEIFAKLREEIENKFGLGQDARVEEISFETLKSCEYLKAVINETLRIYPSVPHNFRVATRNTTLPRGGGEGGLSPIAIKKGQVVMYTILATHRDKDIYGEDAYVFRPERWFEPETRKLGWAYVPENGGPRICLGQQFALTEASYVTVRLLQEFGNLKQDPNTEYPPKLQNTLTLSLFEGAEVQMYLIL

SEQ ID NO: 27287 - protein, 876 aa, Pseudomonas fluorescens PfO-1
MTDIDARLREDVHLLGELLGNTIRDQYGEAFLDKIEQIRKGAKADRRGSMDAELSASLNQLSEDELLPVARAFNQFLNLANIAEQYQLIHRREETQAAPFESRVLPELLARLRNEGHSAESLARQLARLEIELVLTAHPTEVARRTLIQKYDAIAAQLAAQDHRDLTTAEREQIHNTLQRLIAEAWHTEEIRRTRPTPVDEAKWGFAVIEHSLWQAIPHHMRKADQALFAATGLRLPLEAAPIRFASWMGGDRDGNPNVTAAVTREVLLLARWMAADLYLRDVDHLAAELSMQQASDALKARAGDSAEPYRAVLKQLRERLRATRNWAHASLTATTPAPADVLHNNRDLLDPLELCFNSLHECGMGVIADGPLLDCLRRAVTFGLFLVRLDVRQDSSRHSAAMTEITDYLGLGKYEEWDEEQRISFLTRELQNRRPLLPAHFKPSADTAEVLATCKEIAAAPGASLGSYVISMAGAASDVLAVQLLLKESGVLRPMRVVPLFETLADLDNAGPVIERLLLLPGYRARLQGPQEVMIGYSDSAKDAGTTAAAWAQYRAQERLVEICREQQVELLLFHGRGGTVGRGGGPAHAAILSQPPGSVAGRFRTTEQGEMIRFKFGLPDIAEQNLNLYLAAVLEATLLPPPPPTPEWRHLMDELAADGVAAYRAVVRENPQFVEYFRQSTPEQELGRLPLGSRPAKRRAGGIESLRAIPWIFGWTQTRLMLPAWLGWETALSKALERGEGELLGQMREQWPFFRTRIDMLEMVLAKADADIALSYDERLVEPDLLPLGAHLRDLLSQACSVVLGLTGQSQLLAHSPDTLEFIRLRNTYLDPLHLLQAELLARSRRQNVEQGSPVEQALLVSVAGIAAGLRNTG

SEQ ID NO: 27288 - protein, 654 aa, Festuca arundinacea
MESSAVVPGTTAPLLPYAYAPLPSSADDARENQSSGGVRWRVCAAVLAASALAVLIVVGLLAGGRVDRGPAGGDVASAAVPAVPMEIPRSRGKDFGVSEKASGAYSADGGFPWSNAMLQWQRTGFHFQPEKHYMNDPNGPVYYGGWYHLFYQYNPKGDSWGNIAWAHAVSKDMVNWRHLPLAMVPDQWYDSNGVLTGSITVLPDGQVILLYTGNTDTLAQVQCLATPADPSDPLLREWIKHPANPILYPPPGIGLKDFRDPLTAWFDHSDNTWRTVIGSKDDDGHAGIILSYKTKDFVNYELMPGNMHRGPDGTGMYECIDLYPVGGNSSEMLGGDDSPDVLFVLKESSDDERHDYYALGRFDAAANIWTPIDQELDLGIGLRYDWGKYYASKSFYDQKKNRRIVWAYIGETDSEQADITKGWANLMTIPRTVELDKKTRTNLIQWPVEELDTLRRNSTDLSGITVDAGSVIRLPLHQGAQIDIEASFQLNSSDVDALTEADVSYNCSTSGAAVRGALGPFGLLVLANGRTEQTAVYFYVSKGVDGALQTHFCHDESRSTQAKDVVNRMIGSIVPVLDGETFSVRVLVDHSIVQSFAMGGRITATSRAYPTEAIYAAAGVYLFNNATGATVTAERLVVYEMASADNHIFTNDDL

SEQ ID NO: 27289 - protein, 138 aa, Shorea falciferoides
EKNIPVLLGLLSVWNVSFLGYPARAILPYSQALEKFAPHIQQVSMESNGKGVSIDGVPLPYEAGEIDFGEPGTNGQHSFYQLIHQGRVIPCDFIGSAKSQQPIHLKGEVVSNHDELMSNFFAQPDALAFGKTPEELHK

SEQ ID NO: 27290 - protein, 281 aa, Rhodopseudomonas palustris CGA009
MALLAANTSPSLGAPPAAAASLYVGEVMHARLKPVGHRFQYRVMSLLIDLDRLDEADRMSPLFGVNRRALYSFHEADHGPRDASSLRAYAQASAEAKGVDLTGGRVLLLTYPRIAGYTFNPLSVYFCYDASGALAVVIYEVRNTFGDIHPYVLPVHAGEMGPAGLRQEQDKLFYVSPFIEMAMRYHFRIVPPGEIVRLRILETDVDGPVLAATFAGTHRVLSTASLLQAFLALPLMTLKVIAAIHWEALRLWIKGAKLVPRPAPPSPPTGFAAGGHDAYTH

SEQ ID NO: 27291 - protein, 210 aa, Salmonella enterica subsp. enterica serovar Typhi str. CT18
MILHPSLASADPLRYAEALTALHDAPLGSLHLDIEDTSFINNITFGMKTIQAVAQYSRHPLSFHLMVSSPQRWLPWLAAIRPGWIFIHAESVQNPSEILADIRAIGAKAGLALNPATPLLPYRYLALQLDALMIMTSEPDGRGQQFIAAMCEKVSQSREHFPAVECWADGGITLRAARLLAAAGAQHLVIGRALFTTANYDVTLSQFTAL

SEQ ID NO: 27292 - protein, 137 aa, Triticum aestivum
  misc_feature (88)..(88): Xaa can be any naturally occurring amino acid
MAPTVMASSATSVAPFQGLKSTAGLPVSRRSNGASLGSVSNGGRIRCMQVWPIEGIKKFETLSYLPPLSTEALLKQVDYLIRSKWVPXALEFSKVGFIFREHNASPGYYDGVLACGNCLFRCTDPHSVNEWRSQEDT

SEQ ID NO: 27293 - protein, 138 aa, Shorea havilandii
EKNIPVLLGLLSIWNVSFLGYPARAILPYSQALEKFAPHIQQVSMESNGKGVSIDGVPLPYEAGEIDFGEPGTNGQHSFYQLIHQGRVIPCDFIGSAKSQQPIHLKGEVVSNHDELMSNFVAQPDALAFGKTPEELHK

SEQ ID NO: 27294 - protein, 112 aa, Methylococcus capsulatus str. Bath
MKLITAIIKPFKLDDVREALSDIGVSGLTVTEVKGFGRQKGHTELYRGAEYVVDFLPKVKLEIAVADTLVDAAVDAIVKAANTGKIGDGKIFITSIDQAIRIRTGETGDQAL

SEQ ID NO: 27295 - protein, 156 aa, Brassica napus
  misc_feature (86)..(86): Xaa can be any naturally occurring amino acid
MCNRGGGGLLTLLAEKKRRMGQEEAERNMQILLGFLRCVRRQKVDELNEGQTELQWGGEEINAGERHRIDLYRARDRDSVKLRMLXDDPSTRNGWAPEKSHTGFNSNSLRIRGGNPPANFQNKKVEGKAQGSSHGISKKEAQSGSDSQRLNQSSGS

SEQ ID NO: 27296 - protein, 188 aa, Zea mays
MRPLDEKETTQVFEKLFKFTGPNLKHLLERPAVEGPDAEPGRYCLRLHRNRVYYASEALVRRATAVSRPRLAGVGTPIGKFTHHGAFHLTVHALDLLAAHARRRVWLKPDTERSFLFGNSVPKSSLARITENTKAGDGVVVMSMADVPLGFGIAARSAQDCRKADTNAVVVLHQSDAGEYLRKEEELM

SEQ ID NO: 27297 - protein, 555 aa, Borrelia burgdorferi
MNTSLFKQERQKYIPKLPNILKKDFNNISLVYGENTEAIQDRQALKEFFKNTYGLPIISFTEGESSLSFSKALNIGIILSGGPAPGGHNVISGVFDAIKKFNPNSKLFGFKGGPLGLLENDKIELTESLINSYRNTGGFDIVSSGRTKIETEEHYNKALFVAKENNLNAIIIIGGDDSNTNAAILAEYFKKNGENIQVIGVPKTIDADLRNDHIEISFGFDSATKIYSELIGNLCRDAMSTKKYWHFVKLMGRSASHVALECALKTHPNICIVSEEVLAKKKTLSEIIDEMVSVILKRSLNGDNFGVVIVPEGLIEFIPEVKSLMLELCDIFDKNEGEFKGLNIEKMKEIFVAKLSDYMKGVYLSLPLFIQFELIKSILERDPHGNFNVSRVPTEKLFIEMIQSRLNDMKKRGEYKGSFTPVDHFFGYEGRSAFPSNFDSDYCYSLGYNAVVLILNGLTGYMSCIKNLNLKPTDWIAGGVPLTMLMNMEERYGEKKPVIKKALVDLEGRPFKEFVKNRDKWALNNLYLYPGPVQYFGSSEIVDEITETLKLELLK

SEQ ID NO: 27298 - protein, 470 aa, Listeria innocua
MNNLKLSEEIKRAINELGYKEATPVQKAVIPVALTGEDIVAKSQTGSGKTAAFAIPIAEQVVWEENKPQALIIVPTRELAMQVKTECTNIGRFKRIKAAAIYGQSPFAKQKLELSQKNHIVVGTPGRLLDHIEKGSLNVDKVAHLVLDEVDEMLSMGFIDQVEDILSRLPKQRQNLFFSATLPEEMQDLIKRYQDNPMVIEMASEKTNPIFHVEMQTDNKEKTLKDVLITENPDSAIIFCNTKNQVDELTDLLDVKASKIHGGLRQEDRFRAMDDFKSGKSRFLIATDVAGRGIDVDNVSLVINYDLPIEKENYVHRIGRTGRAGKSGKAISFVKTNENPLLRDIEEMLNITIEKKRKPTIIEVKANEEAFRKKQQKRPTIKKARGEKLNKNIMKLYFNGGKKKKIRAVDFVGTISKLEGITAEDIGIITIEDHVSFVEILNGKGPAVLEMMRSRKVKGRRLKVNEARKR

SEQ ID NO: 27299 - protein, 122 aa, Triticum aestivum
  misc_feature (78)..(78): Xaa can be any naturally occurring amino acid
  misc_feature (111)..(111): Xaa can be any naturally occurring amino acid
MAAPRGAALVLAMVLAAMVVAPPATVHAISCSTVYSTLMPCLQYVQQGGSPARGCCTGIQNLLAEANNSPDRRTICGXCLKNVANGASGGPYITRAAALPSKCNVALPYKXISPSVDCNSIH

SEQ ID NO: 27300 - protein, 483 aa, Arabidopsis thaliana
MIARRIWRSHRFLRPFSSSSVCSPPFRVPEYLSQSSSSPASRPFFVHPPTLMKWGGGSRSWFSNEAMRTDSNSGLIDVPLAQTGEGIAECELLKWFVKEGDSVEEFQPLCEVQSDKATIEITSRFKGKVALISHSPGDIIKVGETLVRLAVEDSQDSLLTTDSSEIVTLGGSKQGTENLLGALSTPAVRNLAKDLGIDINVITGTGKDGRVLKEDVLRFSDQKGFVTDSVSSEHAVIGGDSVSTKASSNFEDKTVPLRGFSRAMVKTMTMATSVPHFHFVEEINCDSLVELKQFFKENNTDSTIKHTFLPTLIKSLSMALTKYPFVNSCFNAESLEIILKGSHNIGVAMATEHGLVVPNIKNVQSLSLLEITKELSRLQHLAANNKLNPEDVTGGTITLSNIGAIGGKFGSPLLNLPEVAIIALGRIEKVPKFSKEGTVYPASIMMVNIAADHRVLDGATVARFCCQWKEYVEKPELLMLQMR

SEQ ID NO: 27301 - protein, 369 aa, Vibrio fischeri ES114
MAISSAKDIIEDIRLGKMVILMDDEDRENEGDLIIAAEKITPEAINFMATHGRGLICLTMTKDRCEKLGLPPMVQDNNAQFTTNFTVSIEAAEGVTTGISAADRSRTVEAAVAKNAVAADLVQPGHIFPLAAQEGGVLTRAGHTEAGCDLARLAGYEPAGVIVEILNDDGTMARRPDLEIFAEKHGIKLGTVADLIEYRNNNETTIERVAECKLPTEFGEFDLVTYRDTIDNQLHYALKKENTSSEAPLVRVHLQDTFTDILHSDRCAERSWTLPTAMQRIANEGGVLVILGNEESTDSIVHKVKVLERQDSGEAPTMAKKQGTSRRVGVGSQILADIGISDMRLLSSTSKRYHALSGFGLNVVEYVTK

SEQ ID NO: 27302 - protein, 314 aa, Rumex palustris
MEFPIINLEKVNGDERKATMDMIKDACENWGFFELVNHGIPVEVMDTVERLTKEHYKKSMEQRFKELVASNGLVDASAEVNDVDWECTFHLKHLPDSNISELPDLEDKYRKVMKDFALRLEKLAEDLLDLLCENLALEKGYLKEAFYGARGPTFGTKVANYPPCPKPELIKGLRAHTDAGGIILLFQDDRVSGLQLLKDDEWIDVPPMRHSIVVNLGDQLEVITNGKYKSVLHRVIAQTEGTRMSIASFYNPGSDAVIYPAPELVEDAQEKTQVYPKFVFEDYMKLYSALKFQAKEPRFEAMKADVSMGPIATA

SEQ ID NO: 27303 - protein, 224 aa, Zea mays
TNNQRPNQPQGRISNRQVGPVRMQNFPTPLDSRTTAPAEEPTDGRSGREAMAAAWGQKALGALPQLVKSLRSDPVSGSARHRRLPSLRRTFSLYDQINLIDSVPEDELRFQSYDDTGFKINNVKYEGSVLIVENKIMTWAPKTFSEITPESLSIFKVVHPIPEIFILGCGRHVQLVSPELRMFIRSTGMKLEAVDSRNAASTYNILNEEGRPVAAAVLPYGVTC

SEQ ID NO: 27304 - protein, 486 aa, Streptococcus pyogenes SSI-1
MKFTIITNYDTLSRKSFTIEGDNMTIFRKKKKYSNKTEMQRHFKVIDLIFLGLGSMVGTGIFTVTGIGAAKYAGPALTISIIISAIAIGILALFYAEFASRMPSNGGAYSYVYATLGEFPAWLVGWYIIMEFLTAISSVAVGWGSYLKGLLANYNIVLPNALNGTFNLKNGTYIDILPVLVMFFVTGIVLMNSKLALRFNSFLVILKFSALALFIFVGIFFIDHNNWFHFAPYGVGQITGGKTGIFAGASVMFFAFLGFESISMAVDEVKEPQKTIPKGIILSLIIVTALYIVVTTILTGIVHYTKLNVPDAVAFALRNIRLYWAADYVSIVAILTLITVCISMTYALARTIYSISRDGLLPKSLYTLTKKNKVPQNATLVTGLLAMICAGIFPLSSLAEFVNICTLAYLIILSGAIIKLRRIEGEPKANEFKTPLVPFLPMLAIIICLSFMSQYKAFTWIAFAIATIIGTLIYLAYGYTHSIENK

SEQ ID NO: 27305 - protein, 140 aa, Brassica napus
PIPGSTHASASVTLKPAGFTGEKMSARGLPSLTRTSFKIVASGVKKIKTDKPFGVNGSMDLRDGVDASGRKGKGYGVYKFVDKYGANVDGYSPIYNEEEWSPGGDVYKGGVTGLAIWAVTLAGILAGGALLVYNTSALAQ

SEQ ID NO: 27306 - protein, 384 aa, Schizosaccharomyces pombe
MSVSSYSSDASSTVMDESPPNGVTKSVSGKGPTAVVMMNMGGPSNLDEVGPFLERLFTDGDIIPLGYFQNSLGKFIAKRRTPKVQNHYSDIGGGSPILHWTRIQGSEMCKILDKKCPESAPHLPFVAFRYAPPLTEDMLDELKKANVSRAVAFSQYPQWSCATSGASLNELRRKLIEKGMEKDFEWSIVDRWPLQQGLINAFAENIEETLKTYPEDVRDDVVIVFSAHSLPMSQVAKGDPYVYEIAATSQAVMKRLNYKNKFVNAWQSKVGPLPWMSPATDFVIEQLGNRGQKNMILVPIAFTSDHIETLKELEDYIEDAKQKGITGVKRVSSINGSMTAIQGMADLVAEHLKAKVPYSRQFTQRCPGCTSESCAERINFFQDF

SEQ ID NO: 27307 - protein, 952 aa, Sorghum bicolor
MASERHHSIDAQLRALAPGKVSEELIQYDALLVDRFLDILQDLHGPSLREFVQECYEVSADYEGKKDTSKLGELGAKLTGLAPADAILVASSILHMLNLANLAEEVELAHRRGTSKLKHGDEASATTESDIEETLKRLVSLGKTPAEVFEALKNQSVDLVFTAHPTQSARRSLLQKNARIRNCLTQLSAKDVTVEDKKELDEALHREIQAAFRTDDFRRAQPTPQDEMRYGMSYIHETVWNGVPKFFRRVDTALKNIGINERLPYDVPLIKFCSWMGGDRDGNPRVTPEVTRDVCLLSRMMAANLYINQVEDLMFELSMWRCNDELRARAEEVQSTPASKKVTKYYIEFWKQIPPNEPYRVILGAVRDKLYNTRERARHLLAIGFSEISEDAVFTKIEEFLEPLELCYKSLCECGDKAIADGSLLDLLRQVFTFGLSLVKLDIRQESERHTDVIDAITTHLGIGSYRSWPEDKRMEWWCRVKGKRPLLPPDLPMTEEIADVIGAMRVLAELPIESFGPYIISMCTAPSDVLAVELLQREMWHSPAVPVVPLFERLADLQAARPSVEKLFSTDWYINHINGKQQVMVGYSDSGKDAGRLSAAWQLYVAQEEMAKVAKKYGVKVTLFHGRGGTVGRGVGPTHLAIRAQPPDTINGSILVTVQGEVIEFMFGEENLCFQSLQRFTAATLEHAMHPPVSPEWRNMEEMPVVAKEEYVVVVKEPRFVEYFRSATPETEYGKMNIGSRPAKRKPGGGITTLRAIPWIFSWTQTRFHLPVWLGVGAAFKWAIDKDIKNFQVLKEMYNEWPFFRVTLDLLEMVFAKGDPGIAGLYDELLVAEELKPFGKQLRDKYVETQQLLLQIAGHKDILEGDPFLKQGLRLRNPYITTLNVFQAYTLKRIRDPSFKVTPQPPLSKEFADENKPAGLVKLNGERVPPGLEDTLILTMKGIRAGMHNTG

SEQ ID NO: 27308 - protein, 138 aa, Shorea materialis
EKNIPVLLGLLSIWNVSFLGYPARAILPYSQALEKFAPHIQQVSMESNGKGVSIDGVPLPYEAGEIDFGEPGTNGQHSFYQLIHQGRVIPCDFIGSAKSQQPIHLKGEAVSNHDELMSNFFAQPDALAFGKTPEELHK

SEQ ID NO: 27309 - protein, 292 aa, Robiginitalea biformata HTCC2501
MNLLDGKKLSNEIKDEIAGEVARMKEKGEKVPHLAAVIVGEDGASLTYVGSKVRACERIGFESTLKKLPESTTEQELLAVVRELNADPAIDGYIVQLPLPDHIDEQKILMAVDPDKDVDGFHPANFGKMAMELESFISATPYGIIEMLRRNGIETSGKHAVVIGRSHIVGRPISILLSQKGPAGNATVTLAHSRTKNLAHLTRQADIVVSALGVPNFLKADMVKEGVVVIDVGITRVPDASRERGYYLCGDVDFKAVSKKASWITPVPGGVGPMTIAMLLKNTLLARQRHRG

SEQ ID NO: 27310 - protein, 121 aa, Arabidopsis thaliana
  misc_feature (83)..(83): Xaa can be any naturally occurring amino acid
MASFMVFFTGGGTFPAQATMVASFTGLESFASFPGTRKGHHHLTFITSHGRRSSCVKGGPPIGKKKVETFFYLPDLNDLELAXKEVTTLFRTRGFPGVKSKWNPELGSRNPGTLPGSYNGQ

SEQ ID NO: 27311 - protein, 514 aa, Methylococcus capsulatus str. Bath
MHDRLIIFDTTLRDGEQSPGASMTRDEKVRIARALERLKVDVIEAGFPAASPGDFEAVQAVARTIKDSRVCGLARALDRDIDRAGEALKDAQRARIHTFIATSPIHMRHKLQMSPDQVVEYAVKAVKRARQYTDDVEFSPEDAGRSEEDFLCRILEAVIDAGATTLNIPDTVGYAFPEQFGHMIGRLIERIPNSDKAVFSVHCHNDLGLAVANSLAAVLHGARQVECTINGLGERAGNAALEEIVMAVRTRKDIFPCHTDIETREIVACSKLVSSITGFPIQPNKAIVGANAFAHESGIHQDGVLKSRETYEIMSAEDVGWSTNRMVLGKHSGRNAFRTRMQELGIEFASEEELNSVFQRFKVLADKKHEIFDEDLQALITEAGAEAEDERVKLVALRVCSETGEIPHAQVTIKVDNEERTGTSSGGGAVDASLKAIESLLHTDTALTLYSVNNITSGTDAQGEVTVRLEKGGRIVNGQGADTDIVIASAKAYVNAVNKLLAPIQRTHPQVGDV

SEQ ID NO: 27312 - protein, 579 aa, Silicibacter sp. TM1040
MTRAAKLTPDPYDVQLRELGLVQRQPDSDIDNLTRLAAQVLDAPTALVSVVQRSLDRQFFKSCVGLPELSSVLRQTPLSHSFCQFVQDANQPLIVPDSRNDAQLRDNAAVIDLKMVAYLGVPIHLPDGTPIGALCVIDRVPRQWSSDNLKTLQHLAVAVDNVIALKHARELAAEAERTAKREAEARKTYLAHMSHEIRTPLNGIIGSVDLLLREASRVNLDPREQNDLLRTINRSARNLQHLLNDALDIAKIDAGKLELAPAAFDLHETVDDVMKLFSAQACEKGVELNHSFRGIEAQEQRYGDRFRLAQILGNLLSNAIKFTDDGSVSLQINGTPDALHLTLRDSGCGIAPDRLDKLFLPYTQASADVAQTKGGTGLGLTIVHQMVELMQGRIRAESVPGRGTVFHLYLPLPLTTSAPEAEKVHDPARDGIGDTAPVASPPPAPSNAPLSGKRVLIADDSPANRLVLQKMLENLGATVDKAFDGGDAFGRAVARAYDVLLLDIHMPGQTGTEVVKKLRADPRHQAHDALCIAVTGSTEKQEVEHYLDSGFDAWIGKPLRQSDLMRVLSPLLLEPPSRA

SEQ ID NO: 27313 - protein, 741 aa, Pyrus communis
MEACNCIEPQWPADELLMKYQYISDFFIALAYFSIPLELIYFVKKSAVFPYRWVLVQFGAFIVLCGATHLINLWTFSMHSRTVAIVMTMAKVLTAVVSCATALMLVHIIPDLLSVKTRELFLKNKAAELDREMGLIRTQEETGRHVRMLTHEIRSTLDRHTILKTTLVELGGTLALEECALWMPTRTGLELQLSYTLRQQNPVGYTVPIHLPVINQVFSSNRAVKISPNSPVARLRQLAGRHIPGEVVAVRVPLLHLSNFQINDWPELSTKRYALMVLMLPSDSARQWHVHELELVEVVADQVAVALSHAAILEESMRARDLLMEQNIALDLARREAETAIRARNDFLAVMNHEMRTPMHAIIALSSLLQETELTPEQRLMVETILRSSNLLATLVNDVLDLSRLEDGSLQLEIATFNLHSVFREVHNLIKPVASVKKLSVTLNIAADLPMYAIGDEKRLMQTILNVVGNAVKFSKEGSISITAFVAKSESLRDFRAPDFFPVQSDNHFYLRVQVKDSGSGINPQDIPKLFTKFAQTQTLATRNSGGSGLGLAICKRYVNLMEGHIWIESEGLGKGCTATFIVKLGFPERSNESKLPFGPKLQANHVQTNFPGLKVLVMDDNGVSRSVTKGLLAHLGCDVTAVSLIDESLHVISQEHKVVFMDVSMPGIDGYELAVRIHEKFTKRHERPALVALTGSIDKITKENCMRVGVDGVILKPVSVDKMRSVLSEILEHRVLFEAM

SEQ ID NO: 27314 - protein, 477 aa, Arabidopsis thaliana
MKAICDRFVPSKCSSSSTSEKRDISSPTSLVSDSASSDNKSNLTLCSDVVASSSPVSQLCREASTSGHNPVCTTHSSWTVILKTASMASGAIRRFQDRVLGPSRTGISSSTSEIWLLGVCYKISEGESSEEADAGRVLAAFRQDFSSLILMTYRRGFEPIGDTTYTSDVNWGCMLRSGQMLFAQALLFQRLGRSWRKKDSEPADEKYLEILELFGDTEASAFSIHNLILAGESYGLAAGSWVGPYAVCRSWESLARKNKEETDDKHKSFSMAVHIVSGSEDGERGGAPILCIEDVTKTCLEFSEGETEWPPILLLVPLVLGLDRVNPRYIPSLIATFTFPQSLGILGGKPGASTYIVGVQEDKGFYLDPHDVQQVVTVKKENQDVDTSSYHCNTLRYVPLESLDPSLALGFYCQHKDDFDDFCIRATKLAGDSNGAPLFTVTQSHRRNDCGIAETSSSTETSTEISGEEHEDDWQLL

SEQ ID NO: 27315 - protein, 598 aa, Triticum aestivum
AASPAATSAAPPATALRPWGPSEPRKGADILVEALERCGIVDVFAYPGGASMEIHQALTRSPVITNHLFRHEQGEAFAASGYARASGRVGVCVATSGPGATNLVSALADALLDSIPMVAITGQVPRRMIGTDAFQETPIVEVTRSITKHNYLVLDVEDIPRVIQEAFFLASSGRPGPVLVDIPKDIQQQMAVPVWDTPMSLPGYIARLPKPPSTESLEQVLRLVGESRRPILYVGGGCAASGEELRRFVELTGIPVTTTLMGLGNFPSDDPLSLRMLGMHGTVYANYAVDKADLLLAFGVRFDDRVTGKIEAFASRSKIVHIDIDPAEIGKNKQPHVSICADVKLALQGLNDLLNGSKAQQGLDFGPWHKELDQQKREFPLGFKTFGEAIPPQYAIQVLDELTKGEAIIATGVGQHQMWAAQYYTYKRPRQWLSSSGLGAMGFGLPAAAGAAVANPGVTVVDIDGDGSFLMNIQELALIRIENLPVKVMILNNQHLGMVVQWEDRFYKANRAHTYLGNPENESEIYPDFVTIAKGFNVPAVRVTKKSEVTAAIKKMLETPGPYLLDIIVPHQEHVLPMIPSGGAFKDMIMEGDGRTSY

SEQ ID NO: 27316 - protein, 491 aa, Escherichia coli
MMSRMAEQQLYIHGGYTSATSGRTFETINPANGNVLATVQAAGREDVDRAVKSAQQGQKIWASMTAMERSRILRRAVDILRERNDELAKLETLDTGKAYSETSTVDIVTGADVLEYYAGLIPALEGSQIPLRETSFVYTRREPLGVVAGIGAWNYPIQIALWKSAPALAAGNAMIFKPSEVTPLTALKLAEIYSEAGLPDGVFNVLPGVGAETGQYLTEHPGIAKVSFTGGVASGKKVMANSAASSLKEVTMELGGKSPLIVFDDADLDLAADIAMMANFFSSGQVCTNGTRVFVPAKCKAAFEQKILARVERIRAGDVFDPQTNFGPLVSFPHRDNVLRYIAKGKEEGARVLCGGDVLKGDGFDNGAWVAPTVFTDCSDDMTIVREEIFGPVMSILTYESEDEVIRRANDTDYGLAAGIVTADLNRAHRVIHQLEAGICWINTWGESPAEMPVGGYKHSGIGRENGVMTLQSYTQVKSIQVEMAKFQSIF

SEQ ID NO: 27317 - protein, 598 aa, Triticum aestivum
AASPAATSVAPPATALRPWGPSEPRKGADILVEALERCGIVDVFAYPGGASMEIHQALTRSPVITNHLFRHEQGEAFAASGYARASGRVGVCVATSGPGATNLVSALADALLDSIPMVAITGQVPRRMIGTDAFQETPIVEVTRSITKHNYLVLDVEDIPRVIQEAFFLASSGRPGPVLVDIPKDIQQQMAVPVWDTPMSLPGYIARLPKPPSTESLEQVLRLVGESRRPILYVGGGCAASGEELRRFVELTGIPVTTTLMGLGNFPSDDPLSLRMLGMHGTVYANYAVDKADLLLAFGVRFDDRVTGKIEAFASRSKIVHIDIDPAEIGKNKQPHVSICADVKLALQGLNALLNGSKAQQGLDFGPWHKELDQQKREFPLGFKTFGEAIPPQYAIQVLDELTKGEAIIATGVGQHQMWAAQYYTYKRPRQWLSSSGLGAMGFGLPAAAGAAVANPGVTVVDIDGDGSFLMNIQELALIRIENLPVKVMILNNQHLGMVVQWEDRFYKANRAHTYLGNPENESEIYPDFVTIAKGFNVPAVRVTKKSEVTAAIKKMLETPGPYLLDIIVPHQEHVLPMIPSGGAFKDMIMEGDGRTSY

SEQ ID NO: 27318 - protein, 350 aa, Buchnera aphidicola
NAVEHMVRERIEGVEFFSVNTDAQALRKIEVEQTIQIGNNITKGLGAGANPEIGRTSAEEDKELLKSALDGSDMVFIAAGMGGGTGTGAAPVVAEIAKELGILTVAVVTKPFNFEGKKRMIVAEQGIIELSKYVDSLITIPNDKLLKVLNRGISLLDAFSAANNVLKGAVQGIAELITRPGLMNVDFADVRTVMLEMGYAMMGTGISSGENRAEEAAEIAISSPLLEDIDLSGARGVLVNITAGFDLKLDEFETVGNTIRSFSSDNATVVIGTSLDPDMNDTLRVTVVATGIGMEKNSDINQIKNKSSRELLMDYRYQYLNISPKKIDKITKNQEKTKTENKTHKEPEYL

SEQ ID NO: 27319 - protein, 503 aa, Methanosarcina acetivorans C2A
MVLYSLFQGDFVVQEYKLHIGGESRDSATGETFDNINPATLENLATVQVAGSEDVDRAVEAAEEGFRVWSEVPAPRRAEVLFRTARILQERKEDLARLMTEEMGKVLPETRGDVQEAIDIAIYAAGEGRRMFGETTTSELKDKFCMTVLRPIGVVGMITPWNFPLAIPGWKIMPALIAGNAIVFKPASDTPLLAIKLVEILMEAGLPPGVVNLVTGPGGSTGKAIVQHPRIKAISFTGSLETGKWIMEECAKTMKRVSLELGGKNPVIIMDDADLELALEGVLWGAFGTTGQRCTATSRLILHEKIKDEFTARLLAKTKLLRVGNGLLPETDIGPIINKAQLEKIERYVRIGMEEGATLLLGGKAIDPGLPGYFFEPTVFTDVRPDMRIAQEEIFGPVLSIITVSGLEEAIEVANNTRYGLSSAIYTENVGKAFRAVKKIEAGITYVNAPTIGAEVHLPFGGVKGTGNGFREAGTEAIKEFTEIKAVYIDYSGRLQRAQIDME

SEQ ID NO: 27320 - protein, 816 aa, Glycine max
MALNDFFAGEIATELLKMLISISRKSLLCRASADQLISYIHDLLPSIEEIKYSGVELPALRQSQLDRLSEILRSGVELSHKVLSSSRWNVYRNLQLAKKMDKLEKNVSKFLLGPLQAHMLADIHHTRFEMTERFDRVDNSVQRLEKYFGNMKIGVGGGGWVEEAVRSVDEDVVDSSSAVGLGFGKNKVREMVVGRDDLWVVGISGIGGSGKTTLARELCKDDQVRCYFRDRILFLTVSQSPNVEQLRTNIWEYIMGNERLDANYMVPQWMPQFECRSEARTLIVLDDVWTLSVVDQLVCRIPGCKFLVVSRPKFQTVLSYEVELLSEEDALSLFCHHAFGQKSIPLAANENLVKQVVTECGRLPLALKVIGASLRDQTEMFWLSVKNRLSQGQSIGESHEINLIDRMAISINYLPEKIKECYLDLCCFPEDKKIPLDVLINIWVEIHDIPETEAYAIVVELSNKNLLTLMKEARAGGMYSSCFEISVTQHDVLRDLALNFRNRESIDERRLLVMPKRENGMPKEWLRYRHKPFEAQIVSIHTGEMKEVDWCNLEFPKAEVLIINFTSTEYFLPPFINRMPNLRALIIINYSATYACLHNVSVFKNLSNLRSLWLEKVSTPELSSIVLENLGKLFIVLCKVNDSLVEKEVDLAQVFPNLFELTLDHCDDLTQLPSSICGMKSLQNLSLTNCHNLTELPVELGKLRSLEILRLYACPYLKTLPNSICDMMRLKYIDISQCVNLTCFPEKIGRLVSLEKIDMRECSMIRNVPKSAVSLQSLRLVICDEEVSGIWKEVAKPDNVHIQVSEQYFDLDWLKE

SEQ ID NO: 27321 - protein, 373 aa, Candida maltosa
MSVKTKTITILPGDHVGTEIVNEAIKVLEAIEAATPYQKIHFDFKHHLIGGAAIDATGVPLPDDALESAKNSDAVLLGAVGGPKWGTGALRPEQGLLKIRKELNLYANIRPCNFASDSLLELSPLRPEVVKGTNLIIVRELVGGIYFGDREEQEESADKQTAWDTEKYTVDEVTRITRMAAFMALQHTPPLPIWSLDKANVLASSRLWRRTVDKVISEEFPTLSVQHQLIDSAAMILIQNPTKLNGIIITSNMFGDIISDEASVIQGSLGLLPSASLASLPDTNTAFGLYEPCHGSAPDLPANKVNPIATILSAASMLRLSLDCVKEAEALEEAVKQVLDKGIRTADLRGTSSTTEVGDAIVEAVTKILKEKA

SEQ ID NO: 27322 - protein, 197 aa, Brassica napus
MAASIAKPISATSLRFYSDRKNNISFSDCISISSGFRHSPPSSLDLVAKPPPTKARVSHLVRAQSSYDYIPDSKFYKVEAIVRPWRIQHVSSALLKIGIRGVTVSDVRGFGAQGGSKERHGGSEFSEDKFVAKVKMEIVVKKEQVESVINTIIDGARTGEIGDGKIFVLPVSDVIRVRTGERGEQAEKMTGDMLSSS

SEQ ID NO: 27323 - protein, 257 aa, Candida albicans
IIFRKRLDSDRNIDASLYFGNIDPQVTELLMYELFIQFGPVKSINMPKDRILKTHQGYGFVEFKNSADAKYTMEILRGIRLYGKALKLKRIDAKSQSSTNNPNNQTIGTFVQSDLINPNYIDVGAKLFINNLNPLVDESFLMDTFSKFGTLIRNPIIRRDSEGHSLGYGFLTYDDFESSDLCIQKMNNTILMNNKIAISYAFKDSSVDGKKSRHGDQVERKLAESAKKNNLLVTKTSKAGTTKGNKRKNKPHKVTKP

SEQ ID NO: 27324 - protein, 598 aa, Triticum aestivum
AASPAATSAAPPATALRPWGPSEPRKGADILVEALERCGIVDVFAYPGGASMEIHQALTRSPVITNHLFRHEQGEAFAASGYARASGRVGVCVATSGPGATNLVSALADALLDSIPMVAITGQVPRRMIGTDAFQETPIVEVTRSITKHNYLVLDVEDIPRVIQEAFFLASSGRPGPVLVDIPKDIQQQMAVPVWDTPMSLPGYIARLPKPPSTESLEQVLRLVGESRRPILYVGGGCAASGEELRRFVELTGIPVTTTLMGLGNFPSDDPLSLRMLGMHGTVYANYAVDKADLLLAFGVRFDDRVTGKIEAFASRSKIVHIDIDPAEIGKNKQPHVSICADVKLALQGLNDLLNGSKAQQGLDFGPWHKELDQQKREFPLGFKTFGEAIPPQYAIQVLDELTKGEAIIATGVGQHQMWAAQYYTYKRPRQWLSSSGLGAMGFGLPAAAGAAVANPGVTVVDIDGDGSFLMNIQELALIRIENLPVKVMILNNQHLGMVVQWEDRFYKANRAHTYLGNPENESEIYPDFVTIAKGFNVPAVRVTKKSEVTAAIKKMLETPGPYLLDIIVPHQEHVLPMIPNGGAFKDMIMEGDGRTSY

SEQ ID NO: 27325 - protein, 352 aa, Buchnera aphidicola
NAVEHMVKEHIEGVEFLAVNTDVQALRKIEVGKTIQIGNNITNGLGAGANPKIGKNAAEEDKENLKLVLDGADMVFIASGMGGGTGTGAAPVIAEITKDLGILTVAVVTKPFNFEGKKRMVYANQGITELSKHVDSLIIIPNDKLLQVLSKGISLLDAFSSANNILKGAVQGIADLITKPGLINVDFADIRTVMSEMGYAMMGTGISSGENRAKEATEISISSPLLEDVNLSGAQGILVNITSGFNMKLDEFETVGNIIRSFSSDNATVVIGTSLDIEMNDTLRVTVVATGIEINKKSEKLQHWENTKFKKIPFNFTKNNNVILHKSESMTHNENEKIKKKLLLKENSTNYL

SEQ ID NO: 27326 - protein, 394 aa, Borrelia garinii PBi
MAKEVFQRTKPHMNVGTIGHVDHGKTTLTAAISIYCSKLNKDAKALKYEDIDNAPEEKARGITINARHIEYETANRHYAHVDCPGHADYIKNMITGAAQMDAAILLVAADSGAEPQTKEHLLLAQRMGIKKIIVFLNKLDLADPELVELVEVEVLELVEKYGFSANTPIIKGSAFGAMSNPEDPESTKCVKELLESMDNYFDLPERDIDKPFLLAVEDVFSISGRGTVATGRIERGVIKVGQEVEIVGIKETRKTTVTGVEMFQKILEQGQAGDNVGLLLRGVDKKDIERGQVLSAPGTITPHKKFKASIYCLTKEEGGRHKPFFPGYRPQFFFRTTDVTGVVALEGKEMVMPGDNVDIVVELISSIAMDKNVEFAVREGGRTVASGRILEILE

SEQ ID NO: 27327 - protein, 352 aa, Buchnera aphidicola
NAVEHMVREHIEGVEFFAINTDTQALRKIEVGKTIQIGSHITKGLGAGADPKIGRNAAEEDRDNLKSILEGSDMVFIASGMGGGTGTGAAPVIAEITKELGILTVAVVTKPFNFEGKKRTTYAEQGIIELSKFVDSLIIIPNDKLLAVLNKGISLLDAFSSANDILKGAVQGIAELITKPGLINVDFADIRTVMSEMGYAMMGTGISSGENRAKEAAEIAISSPLLEDINLSGAQGILINIASGLNMKLDEFETVGNIIRSFSSDNTTVVIGTSLDTEMNDTIRVTVVATGIRTEKASTDLNFSQNTYSRKELFNFKMMEHKLQNTHDNIQNINKQNKKNKTLLNKNDINYL

SEQ ID NO: 27328 - protein, 102 aa, Lavatera thuringiaca
MAISKALIASLLISLLIIQIVEADHQLVTSAGKGNSSPKKIDCGGACAARCQLSSRPHLCKRACGTCCARCACVPPGTAGNQEMCPKCYASLTTHGGKRKCP

SEQ ID NO: 27329 - protein, 304 aa, Arabidopsis thaliana
KPLAMADSSSSTIFSHPSISSTISSSRIRSSSVSLLTGRINLPLSFSRVSLSLKTKTHLKKSPFVSFVAQTSDWAEEGGEGSVAVEETENSLESQDVSEGDESEGDVSEGAVSERAEFPEPSEEAKLFVGNLAYDVNSQALAMLFEQAGTVEIAEVIYNRETDQSRGFGFVTMSSVDEAETAVEKFNRYDLNGRLLTVNKAAPRGSRPERAPRVYEPAFRVYVGNLPWDVDNGRLEQLFSEHGKVVEARVVYDRETGRSRGFGFVTMSDVDELNEAISALDGQNLEGRAIRVNVAEERPPRRGY

SEQ ID NO: 27330 - protein, 184 aa, Arabidopsis thaliana
  misc_feature (21)..(21): Xaa can be any naturally occurring amino acid
  misc_feature (46)..(46): Xaa can be any naturally occurring amino acid
  misc_feature (88)..(88): Xaa can be any naturally occurring amino acid
  misc_feature (101)..(101): Xaa can be any naturally occurring amino acid
  misc_feature (130)..(130): Xaa can be any naturally occurring amino acid
  misc_feature (145)..(146): Xaa can be any naturally occurring amino acid
MAISMLSSATMDASPDRVTMXAPFKVIHSSAAFPATRRAKKDITSXITINGRRVNCMPGCSPMGRKKFETLSYLPDHTESKLDIVDDXLMLMKGMPCGEFXLEQGFGYREDVISPRYYDCDGHCTMWKLXMIGCTDSAQVSNELXXCYKEYPNVLLYGFVGFEHTRQALCINCIGYHSEASQKS

SEQ ID NO: 27331 - protein, 508 aa, Oryza sativa (japonica cultivar-group)
MDGNAKGGGHSEALKNYNLGRTLGIGSFGKVKIAEHKLTGHRVAIKILNRRQMRNMEMEEKAKREIKILRLFIHPHIIRLYEVIYTPTDIYVVMEYCKFGELFDYIVEKGRLQEDEARRIFQQIISGVEYCHRNMVVHRDLKPENLLLDSKYNVKLADFGLSNVMHDGHFLKTSCGSPNYAAPEVISGKLYAGPEVDVWSCGVILYALLCGTLPFDDENIPNLFKKIKGGIYTLPSHLSALARDLIPRMLVVDPMKRITIREIREHQWFQIRLPRYLAVPPPDTAQQAKMIDEDTLQDVVNLGYGKDHVCESLRNRLQNEATVAYYLLLDNRFRATSGYLGADYQESLERNFNRFASSESASSNTRHYLPGSSDPHASGLRPHYPVERKWALGLQSRAQPREIMIEVLKALQDLNVSWKKNGQYNMKCRWSVGTQATDMLDVNNSFVDDSIIMDNGDVNGRLPAVIKFEIQLYKTRDEKYLLDMQRVTGPQLLFLDFCADFLTKLRVL

SEQ ID NO: 27332 - protein, 509 aa, Exiguobacterium sibiricum 255-15
MALAADIKAQLAQYLDLLEGDLVLAVSAGTDSVSLEMSELVEEIASMSTRISIEQAALPRTPSFSVNRVGEESGITFAGIPLGHEFTSLVLALLQVSGRAPKIDAALIEQIKGIKETYHFESYISLSCHNCPDVVQALNVMSVLNPNISHTMIDGGAFKQEVEAKEIMAVPTVFVNGEAFGNGRMSLEEILAKLGTGVDASDFADKDPYDVLVVGGGPAGASAAIYAARKGIRTGIVAERFGGQVMDTMSIENFISMKYTEGPKLVASLEEHVKEYGIDVMNLQRATRLEKKDLVELELENGAVLKTKSLILSTGARWRNIGVPGELEFKNKGVAYCPHCDGPLFEGKRVAVIGGGNSGVEAAIDLAGLVKHVTVLEFAPELKADAVLQDRLASLPNVTVVANAQTKEITGTDKVNGITYVERETGAEHHVELEGVFVQIGLVPNTDWLGETIERNKFGEILVDRHGATNIPGVFAAGDCTDSAYKQIIISMGSGATAALGAFDYMIRN

SEQ ID NO: 27333 - protein, 688 aa, Magnaporthe grisea 70-15
MPPAQESDLGSQGGNNNSSDFFCNPTVNAGALTQNSIQNDRFTKEILPQHFKHSNFASFVRQLNKYDFHKVRNTDDNAQYGPNAWEFRHTEFARGQSHNFDIIKRKAPTTRKPAPAEAAFDTNQHVGLMNESLHAVIQQMHELQTANHNLAMANRILTDEVSGHQKSLKLFTQYFHEIMNHLDNQDERRRKTTQANGASGSAQGFTAGGMSLLPGSDDEPAPELRRAREVLESITSNIDASRNSNALERLAQQQHNNVASPPDSTTSSAALLSQQQAFNMTFSGVDIFADQKPMVYPVGQTTGIDPFHADHINNIPYSQPPALGAIDAPAQATPPPAAGVAAAVWETKPCILLVEDDKVCQRIGSKFLTHFGCDVETAMNGFDAVSKFSSNPNRYSLIFMDIIMPEMDGVSATSSIRQRGAVIPIIAMTSNIRQEDITTYFEFGMNDVLAKPFTKEGMVRIVKKHLSHMLKFPAHSHEEDSAFAGEMAGQAPSAVSSAPFTPAGPQMMMPQSVQMPPQMATPPAHGMQQHMAAQQQSHHQIKFEGTSGGAIPATPIKFESTHSPASVGTVGWGSPMMSHSGAAMDGSTGFLGAGNGGGTMNLGTSGTQQRSPAPFNGMMTMPGQAGMQGGAAMAVPGGSHAALGPNSMHRLPEHMAPNNMQMRRMMDHQDDQANKRQRVHAGASTGYH

SEQ ID NO: 27334 - protein, 496 aa, Ustilago maydis 521
MASTGLPSSLGDRSSGSVSPTQTVDVEKNGASHDEPVKVSQTQPATQTEFGEKREQYRSEEDYMYEQQKRSEGDHKFHRLGWKKLTVCLIVEAIALGALSIPSAFATLGMVAGVIVCIGIGLIAIYTSYIVGQVKVKFPQVSHYADAGQLMMGRFGYELVGAMFALQLTLLVGSHCLTGTIAFLNLSNNAICSLAFGVISAIILFIVAVPPSFSEVAILGYIDFASIIIAIGVVIIGTGIRKSQPEHALTLTEWSAWPKEGTTFADAWVALTNIVFAYSFAVCQFSFMDEMHTPTDYVKSIWALGIIEIVIYTVTGALIYAFVGTEVKSPALLSAGTTLSKVAFGIALPVIFISGSINTTVVARYVHGRMFKNSVIRYINTKMGWLTWLGLVALITVIAWVIAEAIPFFSDLLGIMSALFISGFTFYLPALMWFLLIKEGKWNATRWNTILSVVNAIVFVLGLLILVCGTYASVQDIIDQYNKGTVRGSFTCGPIG

SEQ ID NO: 27335 - protein, 167 aa, Klebsiella oxytoca
KHFSTTAPEKNLPVLLALIGIWYNNFFGAETEAILPYDQYMHRFAAYFQQGNMESNGKYVDRNGNAVDYQTGPIIWGEPGTNGQHAFYQLIHQGTKMVPCDFIAPAITQNPLSDHHPKLLSNFFAQTEALAFGKSREVVEQEYRDQGKDPAALEHVVPFKVFEGNRP

SEQ ID NO: 27336 - protein, 334 aa, Arabidopsis thaliana
MATATSHQSVVSFASLRSSPSSTISQCGFKIDSSLSFTSKKTNFCKIKAMASSVSFNNTLLSPSKTIPDNSQKKSNEAALILIRHGESLWNEKNLFTGCVDVPLTEKGVEEAIEAGKRISNIPVDVIFTSSLIRAQMTAMLAMIQHRRKKVPIILHDESEQAKTWSQVFSDETKNQSIPVIPAWQLNERMYGELQGLNKQETAERYGKEQVHEWRRSYDIPPPKGESLEMCAERAVAYFQDNIEPKLAAGKNVMIAAHGNSLRSIIMYLDKLTCQEVISLELSTGIPLLYIFKEGKFMKRGSPVGPTEAGVYAYTKRLAQYRQKLEDDSEVLCA

SEQ ID NO: 27337 - protein, 419 aa, Solanum tuberosum
MAILGLSNPAELASSPSSSLTFSHRLHTSFIPKQCFFTGVRRKSFCRPQRFSISSSFTPMDSAKIKVVGVGGGGNNAVNRMIGSGLQGVDFYAINTDAQALVQSAAENPLQIGELLTRGLGTGGNPLLGEQAAEESKEAIANSLKGSDMVFITAGMGGGTGSGAAPVVAQIAKEAGYLTVGVVTYPFSFEGRKRSVQALEAIEKLQRNVDTLIVIPNDRLLDIADEQTPLQDAFLLADDVLRQGVQGISDIITIPGLVNVDFADVKAVMKDSGTAMLGVGVSSSKDRAEEAAEQATLAPLIGSSIQSATGVVYNITGGKDITLQEVNRVSQVVTSLADPSANIIFGAVVDERYNGEIHVTIIATGFTQSFQKTLLSDPRGAKLLEKGSGIKESMASPVTLRSSNSPSTTSRTPTRRLFF

SEQ ID NO: 27338 - protein, 353 aa, Zea mays
MRSRVPLICSLSCPSVPFHSNSIPGKRKPRESGRRTYHEDRQPRAMAAGLSGAAMTGFVAKNPLLAAAARRRALPPLAGRALPFSPLTTARAPRRRGLGTVTCFVPQDTEHPAAAPAPVAPVPETALDEEARAAAARRVAERKARKRSERRTYLVAAVMSSLGVTSMAVAAVYYRFSWQMEGGAVPVSEMFGTFALSVGAAVGMEFWARWAHRALWHASLWHMHESHHRPREGPFELNDVFAIVNAVPAISLLAYGFFHRGLVPGLCFGAGLGITLFGMAYMFVHDGLVHRRFPVGPIANVPYFRRVAAAHKIHHMDKFEGVPYGLFLGPKELEEVGGLDELEKELARIGRTI

SEQ ID NO: 27339 - protein, 306 aa, delta proteobacterium MLMS-1
MSDEISDVLIVGSGPAGLQAAIHAVRKKVTVTVLGKPRRSSIYKAHVENYLGVDGVSLGSDLLDIGLNQARRFGVEVIEADLLNIEEDGTVFKAHIEDGRDLQARSVIFATGTSRKKLKVKGEKELSGKGVSYCVDCDANFYRGAKVAVVGNQSAAVDGAVTLTRYASEVHLVASKLEVSEQLRAELDKSPAQLHEGVWVKEIAGEQGVEALLLDNDQRLAVEGVFVELGAKGAMDLATILGVALDSETFSYITTNKKQETNIPGVYAAGDIAGPPWQMAKAVGEGCVAGWEAANHVQARKRGARK

SEQ ID NO: 27340 - protein, 373 aa, Triticum aestivum
  misc_feature (187)..(187): Xaa can be any naturally occurring amino acid
  misc_feature (207)..(207): Xaa can be any naturally occurring amino acid
  misc_feature (216)..(216): Xaa can be any naturally occurring amino acid
MPSTESAAGVAWDRRRELQAFDDTKAGVKGLVDAGVTALPPIFRHSPESLEGITSSNHVAGAIPTVDLAAPRREDAVALVRHAAGTVGFFQVVNHGVPAELMAGMLEGVRRFNEGPAEAKQAIYSRDQARKVRFASNFDLFSSAAANWRDTLFFHLAPDPAPSEELPEAVRDVVTEYGHAVTKGGAXVLELLSESLGLSSDHLRDMXCAENLHAVXQYYPRGPEPYLTWGTKRHTDPGFLTVLLQDGMGGLQVLVDGKTWVDVPPVPGAFIMNIGDLLQLVSNDQFRSVEHRVLANKSKDTARVSVASFFNTNIERSTRLYGPITDGHNPPIYRSVTAREFIATFNRIGLDGRSLDHYRLDRDTPTPAVEGCE

SEQ ID NO: 27341 - protein, 299 aa, Brucella suis 1330
MAQLIDGKKLAEDVVSTVKTETEKLVAATGVVPGIAVVIVGEDPASQVYVASKSRKAKECGFHSVQHDLPETASEQELLNLIEGLNNDPAIHGILVQLPLPGHIDSGRVIQTIAPEKDVDGFHFINVGKLGTGEVETAFVPCTPAGAMIMIERVHGRDLSGLNAVVIGRSNIVGKPMFNLLLAANATVTVAHSRTKDLPAIARNADILVAAVGRPQMVKGDWVKPGATVIDVGINRIPAPERGEGKTRLVGDVDFAEAEKVAGAITPVPGGVGPMTIAMLMANTLTAACRSAGMKKPVF

SEQ ID NO: 27342 - protein, 598 aa, Triticum aestivum
AASPAATSVAPPATALRPWGPSEPRKGADILVEALERCGIVDVFAYPGGASMEIHQALTRSPVITNHLFRHEQGEAFAASGYARASGRVGVCVATSGPGATNLVSALADALLDSIPMVAITGQVPRRMIGTDAFQETPIVEVTRSITKHNYLVLDVEDIPRVIQEAFFLASSGRPGPVLVDIPKDIQQQMAVPVWDTPMSLPGYIARLPKPPSTESLEQVLRLVGESRRPILYVGGGCAASGEELRRFVELTGIPVTTTLMGLGNFPSDDPLSLRMLGMHGTVYANYAVDKADLLLAFGVRFDDRVTGKIEAFASRSKIVHIDIDPAEIGKNKQPHVSICADVKLALQGLNALLNGSKAQQGLDFGPWHKELDQQKREFPLGFKTFGEAIPPQYAIQVLDELTKGEAIIATGVGQHQMWAAQYYTYKRPRQWLSSSGLGAMGFGLPAAAGAAVANPGVTVVDIDGDGSFLMNIQELALIRIENLPVKVMILNNQHLGMVVQWEDRFYKANRAHTYLGNPENESEIYPDFVTIAKGFNVPAVRVTKKSEVTAAIKKMLETPGPYLLDIIVPHQEHVLPMIPNGGAFKDMIMEGDGRTSY

SEQ ID NO: 27343 - protein, 576 aa, Methylococcus capsulatus str. Bath
MELSGAEIVVQCLKDEGVEYIFGYPGGAVLHIYDALFKQDDVKHILVRHEQGATHAADGYARSTGKPGVVLVTSGPGATNAVTGIATAYMDSIPLVVITGQVPLPVIGSDAFQEADIVGITRPCVKHNFLVKDIHKLAETFKKAFYIATTGRPGPVVIDIPKDVTDPNVKIPYEYPRSVSLRSYNPSVKGHPIQIKKAVELMLSARRPMIYSGGGVILGNAADELTTLTRLLDFPITNTLMGLGGYPATDRQFVGMLGMHGTYEANMAMHDCDVLLAVGARFDDRVTGKIAEFCPGAKIIHIDVDPASISKTVKVDIPIVGDVAPVLADMIELIKTSGRTPDAEALKAWWARIDQWRSLDCLRYDRSSDRIKPQFVIEQLWELTRGDAFVASDVGQHQMWAAQYYKFDKPRRWVNSGGLGTMGFGLPAAIGIKLAHPQEEVICITGEASIQMCIQELATALQYRTPVKIVNLNNGYMGMVRQWQEFIYESRYSHSYLETLPDFVKLAEAYGHVGMRIDRPADVRPALEEALKLKDRTVFMDFLTDPTENVYPMVESGKAHHEMRLAPGTAVDRELA

SEQ ID NO: 27344 - protein, 85 aa, Brassica napus
  misc_feature (66)..(66): Xaa can be any naturally occurring amino acid
  misc_feature (68)..(69): Xaa can be any naturally occurring amino acid
LLYVEGCSLLTTSGLESVILQWHELEHLKVVSCKNVKDSEISPLMSALFSDLVELQWRPDTRSHLXSXXAGAGIGGKGAKFFKKT

SEQ ID NO: 27345 - protein, 741 aa, Pyrus communis
MEACNCIEPQWPADELLMKYQYISDFFIALAYFSIPLELIYFVKKSAVFPYRWVLVQFGAFIVLCGATHLINLWTFNMHSRTVAIVMTTAKVLTAVVSCATALMLVHIIPDLLSVKTRELFLKNKAAELDREMGLIRTQEETGRHVRMLTHEIRSTLDRHTILKTTLVELGRTLALEECALWMPTRTGLELQLSYTLHQQNPVGYTVPIHLPVVNQVFSSNCAVKISPNSPVARLRQLAGRHIPGEVVAVRVPLLHLSNFQINDWPELSTKRYALMVLMLPSDSARQWHVHELELVEVVADQVAVALSHAAILEESMRARDLLMEQNIALDLASREAETAIRARNDFLAVMNHEMRTPMHAIIALSSLLQETDLTPEQRLMVETILKSSNLLATLINDVLDLSRLEDGSLQLDIATFNLHSIFREVHNMIKPVASIKRLSVALNIAADLPVYAIGDEKRLMQIILNVVGNAVKFSKEGSISITAYVAKSESLRDFRAPDFFPVQSDNHFYLRVQVKDSGSGINPQDIPNLFTKFTQTQTLASQNSGGSGLGLAICKRFVNLMEGHIWIESEGLGKGCTATFIVKLGFPERSNESKQPFAPKLQANHVQTNFPGLKVLVMDDNGVSRSVTKGLLVHLGCDVTTVSSIDEFLHVISQEHKVVFMDVCMPGIDGYELAVRIHERFTKRHERPVLVALTGSIDKMTKENCMRVGMDGVILKPVSVDKMRSVLSELLEHRVLFEAM

SEQ ID NO: 27346 - protein, 321 aa, Gloeobacter violaceus PCC 7421
MTQKYGPKTTTDEVLSGIELKGKRFLITGASSGIGLETARSLVSHGASVVGAVRNLAKAEPATASVRDAASQGGSLELINLDLASLQSVRACADKLLADGQPFDAIIANAGVMATPFGRTIDGFEVQFGTNHLGHFALINQIEPLLANDGRLVVLSSLAHRGADIDLDDPNFEQQAYDPWVAYSRSKTANSLFAVEFDRRYRDRGIRAASVMPGNSLTDLPRHLSPEDLQGLLQTVDAARTEAGLPPKELKEISQAAATSVWAAVVANKDEIGGHYLEDCAVVPIDDTPNPFADGVRSYALDANRAKQLWAKSEELISAAS

SEQ ID NO: 27347 - protein, 258 aa, Sulfitobacter sp. EE-36
MAYETITVDVDNHIALVTLNRPDAMNALNDQLMTELADALKSAQENEKVRCIVITGSEKAFAAGADIAMMRDKSFVDVFAGDLFTPETDQIMRVRKPIIAAVSGYALGGGCELAMMCDFIICSESAKFGQPEINLGVVAGIGGTQRLTRAIGKSKAMDMNLTGRFMDAAEAERAGLVSRVVPVKKLMEEAMAAAAKIAEKSMISTMVVKEAVNRSFEVPLREGLLFERRIFHSLFATEDQKEGMSAFLEKREAQFRDK

SEQ ID NO: 27348 - protein, 461 aa, Mycobacterium tuberculosis CDC1551
MATATTQRPLKGPAKRMSTWTMTREAITIGFDAGDGFLGRLRGSDITRFRCAGRRFVSISHPDYVDHVLHEARLKYVKSDEYGPIRATAGLNLLTDEGDSWARHRGALNSTFARRHLRGLVGLMIDPIADVTAALVPGAQFDMHQSMVETTLRVVANALFSQDFGPLVQSMHDLATRGLRRAEKLERLGLWGLMPRTVYDTLIWCIYSGVHLPPPLREMQEITLTLDRAINSVIDRRLAEPTNSADLLNVLLSADGGIWPRQRVRDEALTFMLAGHETTANAMSWFWYLMALNPQARDHMLTELDDVLGMRRPTADDLGKLAWTTACLQESQRYFSSVWIIAREAVDDDIIDGHRIRRGTTVVIPIHHIHHDPRWWPDPDRFDPGRFLRCPTDRPRCAYLPFGGGRRICIGQSFALMEMVLMAAIMSQHFTFDLAPGYHVELEATLTLRPKHGVHVIGRRR

SEQ ID NO: 27349 - protein, 571 aa, Buchnera aphidicola
MEILSGAEMVVRSLIDQGIQHIFGYPGGAVLDIYDALKTVGGIEHILVRHEQAATHMADGYSRSTGKTGVVLVTSGPGATNAITGIATAYMDSIPMVVISGQVASSLIGYDAFQECDMIGISRPIVKHSFLVKKTEDIPIVFKKAFWLASSGRPGPIVIDLPKDILKKDNKYLYKWPDNINIRSYNPTTKGHIEQIKKALHTLLKAQRPVIYAGGGIISSNSSEELRIFAEKINCPVTTSLMGLGSFPGTHDQNISMLGMHGTYEANMTMHHADVIFAIGVRFDDRTTNNLNKYCPNAIVLHVDIDPTSISKTVSANIPIVGDAKHVLQKMIELLKKEKKISLLEDWWNTIKKWKKINSLQYNQLSNKIKPQTVIKTLFKLTKGTSYITSDVGQHQMFTALYYPFNKPRRWINSGGLGTMGFGLPAALGVKLALPKETVICITGDGSIQMNIQELSTARQYNLAVLILNLNNSSLGMVKQWQDMIYSGRHSHSYMDSLPDFVKLSESYGHFGIQITEPIELEEKLMLALSKLSDGHLVFVDVQIDNSEHVYPMQIQGGGMNEMRLRKKEVA

SEQ ID NO: 27350 - protein, 313 aa, Nicotiana tabacum
MATSHFILKLFLVISFCNVCFASRKLTALVQEPENQLLQYHKGALLFGKISVNLIWYGKFKPSQRAIVSDFITSLSSSTPSKTDPSVAKWWKTTEKYYHLANSKKSLSLYLGKQVLVENYSLGKSLTQKQIVQLASKGEQKDAINIVLTASDVAVDGFCVNRCGTHGSSKGAIIRGKTYKFAYIWVGNSETQCAGYCAWPFHQPIYGPQSPPLVAPNNDVGVDGMVINLASLLAGTATNPFGNGYYQGEADAPLEAASACPGVYAKGAYPGYAGDLLVDKTTGASYNAHGTNGRKYLLPALYDPSTSTCSTLV

SEQ ID NO: 27351 - protein, 368 aa, Agrobacterium tumefaciens str. C58
MECSGLYPRRNRSSHNQSEFQVSFMATELSALPANHPRVTFGKVGVLLVNLGTPDGTDYWPMRRYLAEFLSDKRVIEWSRLYWYPILYGIVLNKRPQKVGKAYEEIWNHERNESYLRTYTRSQGELMAAALKDFPNVVVDWAMRYGQPSIASRIDALKEQGCEKILLFPLYPQYAASTTATVNDKAFEHLMKLRWQPAIRTVPPYHDDPAYIEGLAASVKNHLATLDWEPEMLITSFHGIPQSYFKKGDPYYCHCQKTARLLREALGRTEKNFMITFQSRFGPEEWLQPYTDKTVEKLASEGIKRIAVMNPGFVSDCLETLEEIAGEAGEIFLHNGGEKFTHIPCLNDSTEGMNVLEKVVRRELQGWV

SEQ ID NO: 27352 - protein, 108 aa, Triticum aestivum
VQSQPQCLCSALGGDSSSLGGMTINKTRALELPKACNVQTPPASKCNGGGTAPGAATPTTPEVQTPAGSGSKTTPSAYLQENGGSSLQGPAGLVLALAAAAVYAVSSL

SEQ ID NO: 27353 - protein, 263 aa, Bartonella grahamii
NAVNNMINAGLQGVDFVVANTDAQALAMSKAERVIQLGAAVTEGLGAGALPEVGQAAAEECIDEIIDHLADSHMVFITAGMGGGTGTGAAPVVARAAREKGILTVGVVTKPFQFEGARRMKTAESGIEELQKSVDTLIVIPNQNLFRIANDKTTFADAFAMADQVLYSGVASITDLMIKEGLINLDFADVRSVMHEMGRAMMGTGEASGDGRALAAAEAAIANPLLDDTSMRGARGLLISITGGRDMTLFEVDEAANRIREEV

SEQ ID NO: 27354 - protein, 542 aa, Novosphingobium aromaticivorans DSM 12444
MTRTVPSTPCSGQKPGTSGLRKKVKVFQQPNYAENFIQSVFDVVERAPGSALVVGGDGRYHNRTVIQQAIRIAAANGYGKVLVGRGGILSTPAASNVIRKYGASGGLILSASHNPGGPDEDFGIKYNIANGGPAPEAVTEAIYARTQTIDRWLTVDAPDVDLDRLGSTQVEAMTVDVIDSVSDYAELMESLFDFNAIRANVEGGFTMAFDAMSAVTGPYAIEILENRLGFPKGTVRNGIPLEDFGGHHPDPNMVHAHELFDTMFGPDAPDFGAASDGDGDRNLIVGRHRFVTPSDSLAMLAANAHLAPGYAGGLNGIARSMPTSAAADRVAEALGLPCFETPTGWKFFGNLLDAGMATICGEESAGTGSDHVREKDGLWAVLLWLNILAVRRIGVDQLAREHWARFGRNYYARHDYEALPTDRADALMAELNQSLSSLSGKPFGNLTISTADNFSYLDPVDGSTSSNQGVRILFEGGSRVVFRLSGTGTEGATLRVYLERYEPVGGDLDRETPEMLADLIRAADAIAGIARHTGRTAPDVVT

SEQ ID NO: 27355 - protein, 263 aa, Bartonella doshiae
NAVNNMINAGLQGVDFVVANTDAQALAMSKAERIIQLGAAVTEGLGAGALPEVGQAAAEECIDEIIDHLADSHMVFITAGMGGGTGTGAAPVVARAAREKGILTVGVVTKPFQFEGARRMKTAEAGIEELQKSVDTLIVIPNQNLFRIADEKTTFADAFAMADQVLYSGVASITDLMIKEGLINLDFADVRSVMHEMGRAMMGTGEASGEGRALNAAEAAIANPLLDDTSMRGARGLLISITGGRDMTLFEVDEAANRIREEV

SEQ ID NO: 27356 - protein, 263 aa, Bartonella koehlerae
NAVNNMINAGLQGVDFVVANTDAQALAMSKAERVIQLGAAVTEGLGAGALPEVGQAAAEECIDEIIDHLADSHMVFITAGMGGGTGTGAAPVVARAAREKGILTVGVVTKPFQFEGARRMKTAEAGTEELQKSVDTLIVIPNQNLFRIADEKTTFADAFAMADQVLYSGVASITDLMIKEGLINLDFADVRSVMHEMGRAMMGTGEASGEGRALAAAEAAIANPLLDDTSMRGARGLLISITGGRDMTLFEVDEAANRIREEV

SEQ ID NO: 27357 - protein, 263 aa, Bartonella taylorii
NAVNNMINAGLQGVDFVVANTDAQALAMSKSERVIQLGAAVTEGLGAGALPEVGQAAADECIDEIIDHLADSHMVFITAGMGGGTGTGAAPVVARAAREKGILTVGVVTKPFQFEGARRMKTAEAGIEELQKSVDTLILIPNQNLFRIADDKTTFADAFAMADQVLYSGVASITDLMIKEGFINLDFADVRSVMHEMGRAMMGTGEASGEGRALAAAEAAIANPLLDDTSMRGARGLLISITGGRDMTLFEVDEAANRIREEV

SEQ ID NO: 27358 - protein, 465 aa, Bacillus licheniformis ATCC 14580
MAKKMPDIGEYKYGFADKDVSIFRSERGLTKEIVEEISRMKEEPQWMLDFRLKSLEHFYNMPMPQWGGDLNSLNFDEITYYVKPSERSERSWDEVPEEIKQTFDKLGIPEAEQKYLAGVSAQYESEVVYHNMKEDLESQGIVFKDTDSALKENEDIFREHWAKVIPPTDNKFAALNSAVWSGGSFIYVPKGVKVDTPLQAYFRINSENMGQFERTLIIVDEGAHVHYVEGCTAPVYTTNSLHSAVVEIIVKKGGYCRYTTIQNWANNVFNLVTKRAVCEENATMEWIDGNIGSKLTMKYPAVILKGEGARGMTLSIALAGKGQHQDAGAKMIHLAPNTSSTIVSKSISKQGGKVTYRGIVHFGRKAEGARSNIECDTLIMDNKSTSDTIPYNEILNDNISLEHEAKVSKVSEEQLFYLMSRGISEEEATEMIVMGFIEPFTKELPMEYAVEMNRLIKFEMEGSIG

SEQ ID NO: 27359 - protein, 525 aa, Glycine max
MDSSSSSPNNNNHHKLGFQPARSRSRLAMASPANTSEPKIVTGTAGYILEDVPHFTDYIPNLPTYPNPLQDNPAYSVVKQYFVHVDDSVPQKVVVHKDGARGVHFRRAGPRQKVYFEADEVQAAIVTCGGLCPGLNTVIRELVCGLHHMYGVKKVLGINGGYRGFYARNTITLTPKSVNDIHKRGGTVLGTSRGGHDTKKIVDSIQDRGINQVYIIGGDGTQKGASAIFEEVRKRGLKVSVVGIPKTIDNDIPVIDKSFGFDTAVEEAQRAINAAHVEAESVENGIGVVKLMGRNSGFIAMYATLASRDVDCCLIPESPFYLEGPGGLYEYIEKRLKENGHMVIVIAEGAGQELVSESVQSMSKQDASGNKLFQDVGLWISQKIRDHFAAQKTLPITLKYIDPTYMIRAIPSNASDNVYCTLLAQSAVHGAMAGYTGYTSGLVNGRQTYIPFYRITERQNHVVITDRMWARLLSSTNQPSFLDAKGDNEEKEEEEALNQLPDGHCAKDTSLASKEINSSIYPTAC

SEQ ID NO: 27360 - protein, 466 aa, Nostoc punctiforme PCC 73102
MSSTTVRRKSNTFYVILIAGAAALGGFLFGFDTAVINGAVLSLAKAFNTSSWVTGLAVSLALLGSAVGAFFAGQIADRYGRVKAMVVASVLFTISAIGSGMAFTIWDFIFWRVLGGIGIGVASVIAPAYIAECSPTHLRGRLGSLQQLAIVVGIFVALLSDYFIATSAGSADSPFLFGVAAWRWMFWTAVPPAVFYGMVALTIPESPRYLVAKGRESEAVNVLTKILGGDVLPKIEEIRQTVLRERQPKFSDLLSRSGGLLPIVWIGIGLSVLQQFVGINVIFYYSSVLWRAVGFSEKDSLSITVITGAVNIITTLIAIAFVDKFGRKPLLIIGSIGMTLTLGTMAYIFGNAPLDAAGNPSLAGSAGTVALIAANLYVFCFGFSWGPIVWVLLGEMFNNKIRAAALSVAAAIQWVANFLISTTFPPILQYFGLGSAYGLYTIAAATSFFFILFFIKETKGIELEDM

SEQ ID NO: 27361 - protein, 437 aa, Bacillus licheniformis ATCC 14580
MTLETKLSVDREYVKSFSEKHQEPAWLQDLRLEALEKAEDLPLPKPDKTKITNWNFTRFDKHTVENKPLDSLDDLSDEVKSLIDLGNEDKTLYVQRDQTPAYLSLSKELQDKGVIFTDIHTAFREHGELVKKYFMKDGVKADEHKLTALHAALLNGGAFLYVPKNVELEAPVQAVYVHESNDTTLFNHVLVVADDNSAVTYVENYISTVNPKEAVFNIVSEVITGANARVQYGAVDNLSAGVTAYVSRRGTALGRDSKIEWALGLMNDGDTISENTTNLHGDGTFGDTKTVVVGRGEQTQNFTTQIIHHGKHSEGYILKHGVMKDSASSIFNGIGKIEHGASKSNAEQESRVLMLSEKARGDANPILLIDEDDVTAGHAASVGRVDPVQLYYLMSRGIPKEEAERLVIYGFLAPVVNELPIEGVKKQLVSVIERKVK

SEQ ID NO: 27362 - protein, 537 aa, Candidatus Pelagibacter ubique HTCC1002
METKMSKEQLFIFDTTLRDGAQTQGVDFSVDDKLKIASALDNLGVDYIEGGWPGANPTDTEFFQKKHSFNNAKLTSFGMTKRTGRSADNDPGLSALLNSNTPAVCIVGKSWDFHVDIALGISNEENLENIKETAKHFVKENKEFMFDAEHFFDGYKANPSYALSCLKSAFDEGARWIVLCDTNGGTLPHEVTKIVTEVSKTIPGKNLGIHAHNDTGNAVANSLAAVWAGVRQVQGTINGLGERCGNANLMSLIPTFFLKEDFATNFELKIKPDNIKKLTECSRLLDEILNRKPNKHLPYVGAAAFSHKGGLHVSAVQKDPKTYEHIDPVEVGNSRNIVVSDQSGKSNIISRLKIIGIEIEESDPKIKKLLDEVKDREFIGYSYDGADASFELLARRIISKIPRYILIKEYDVSVKKDSSGTIVSSAKAQLEVDGEKIMCTGEGNGPVNALDNAIRQNVDRLNKYSKYLKDLKLVDYKVRILNTGTEAITRVSIESTDSKGKNWFTIGVSANIIDASFKALVDSLDYKLFKDKAPASL

SEQ ID NO: 27363 - protein, 121 aa, Kluyveromyces marxianus
GHVDVALPCATQNEVSGAEAEHLVANGVKYVAEGSNMGSTQEAIDIFEGARLKTASATAPAVWYAPGKAANMGGVAVSGLEMAQNSSRVQWTRETVDAELKKIMTTCFDDCVATAQEYSNE

SEQ ID NO: 27364 - protein, 440 aa, Zymomonas mobilis
MSIEVKMPALSPTMTEGTLAKWLVKEGDAVKAGDILAEIETDKAIMEFETVDAGIIAKILVPEGSENIAVGQVIAVMAEAGEDVSQVAASASSQISEPSEKADVAQKETADSETISIDASLDKAISNAGYGNKTENMTASYQEKAGRIKASPLAKRLAKKNHVDLKQVSGSGPHGRIIKADIEAFVTGANQASSNPSVSTPEVSGKITHDTPHNSIKLSNMRRVIARRLTESKQNIPHIYLTVDVQMDALLKLRSELNESLAVQNIKISVNDMLIKAQALALKATPNVNVAFDGDQMLQFSQADISVAVSVEGGLITPILKQADTKSLSALSVEMKELIARAREGRLQPQEYQGGTSSISNMGMFGIKQFNAVINPPQASILAIGSGERRPWVIDDAITIATVATITGSFDHRVIDGADAAAFMSAFKHLVEKPLGILAQ

SEQ ID NO: 27365 - protein, 282 aa, Saccharomyces cerevisiae
MLLLALSDAHIPDRATDLPVKFKKLLSVPDKISQVALLGNSTKSYDFLKFVNQISNNITIVRGEFDNGHLPSTKKDKASDNSRPMEEIPMNSIIRQGALKIGCCSGYTVVPKNDPLSLLALARQLDVDILLWGGTHNVEAYTLEGKFFVNPGSCTGAFNTDWPIVFDVEDSDEAVTSEVDKPTKENQSEDDDAKGGSTGKEQPGSYTPKEGTAGERENENESNVKPENQFKEDEVDMSDSDINGSNSPSFCLLDIQGNTCTLYIYLYVNGEVKVDKVVYEKE

SEQ ID NO: 27366 - protein, 165 aa, Oryza sativa (japonica cultivar-group)
MAGGGRADDERRIGVAMDYSASSKRALDWAIANLLRRGDHLVVLHVLHHGGEEAKHALWGKSGSPLIPLSEFRDPTAMQQYGVHCDAEVLDMLDTAARQLELTVVAKLYWGDAREKLCDAVEEQKIDTLVMGSRGLGSIQRILLGSVTNYVLSNASCPVTVVKGK

SEQ ID NO: 27367 - protein, 138 aa, Shorea isoptera
EKNIPVLLGLLSIWNVSFLGYPARAILPYSQALEKFAPHIQQVSMESNGKGVSIDGVPLPYEAGEIDFGEPGTNGQHSFYQLIHQGRVIPCDFIGSAKSQQPIHLKGEVVSNHNELMSNFFAQPDALAFGKTPEELHK

SEQ ID NO: 27368 - protein, 423 aa, Arabidopsis thaliana; identical to SEQ ID NO: 491

SEQ ID NO: 27369 - protein, 353 aa, Xanthobacter autotrophicus Py2
MTANVPAFSPDTTHLPPDHPKVAFGRIGVLIVNLGTPEATDYWSMRAYLKEFLSDPRVIEVNRAVWWFVLNAIILTKRPGPKGRDYASIWNKERNEGPLKTITRDQAEQLAAQLSGLDSRIVVDFAMRYGKPPIAERLAALQAQGCERILLVPLYPQYSAATSATVCDKAFDALKAMRWQPTLRVAPPWHDDPVYIDALATSLERHLAALDFEPEVILASFHGVPKSYLLKGDPYHCQCAKTARLLRARLDLDDKRFRLTFQSRFGRDEWLRPYTDATVKALAESGVKRLAVVNPGFVADCLETLEEIGVENREIFEHHGGEKFAAIPCLNANAEGMRVLAHVVERELKGWVG

SEQ ID NO: 27370 - protein, 688 aa, Saccharomyces cerevisiae
MPVSEAFAKLCVNEKPPAESAVAVKSLVFKPKTPKSATPVPIVVVALQSTTTPSALIANATSSKDPRLARDDLVKQAFQSESARAFILGDLANATSNFHLLIDHELGTVDGDTILQLNDSTYMKKSDMMKFLNNFEDSQKVVDFSQEVSKETATEGKKQQKKQQPSKAGTAAAAAAAALEDAKLIGITVDKALDFPGWYQQILTKGEMLDYYDVSGCYILRPPSYAIWENIQKWFDDKIKAIGVQNAYFPMFVSSRVLEKEKDHVEGFAPEVAWVTRAGSSELEEPIAIRPTSETVMYPYYAKWVQSYRDLPLKLNQWNSVVRWEFKHPQPFLRTREFLWQEGHTAHLTAKDAEEEVLQILDFYAGVYEELLAVPVVKGRKTEKEKFAGGDFTTTCEGYIPQTGRGIQGATSHHLGQNFSKMFNLSVENPLGSDHPKIFAYQNSWGLSTRVIGVMVMIHSDNKGLVIPPRVSQFQSVVIPVGITKKTSEEQRKHIHETARSVESRLKKVGIRAFGDYNDNYTPGWKFSQYELKGIPIRIELGPKDIEKNQVVVVRRNDSKKYVVSFDELEARIPEILEEMQGDLFKKAKELFDTHRVIVNEWSGFVPALNKKNVILAPWCGVMECEEDIKESSAKKDDGEEFEEDDKAPSMGAKSLCIPFDQPVLNEGQKCIKCERIAVNYCMFGRSY

SEQ ID NO: 27371 - protein, 408 aa, Saccharophagus degradans 2-40
MSLFVQKFGGTSVGTVERIKAVAKKVAGFRDQGHDIVVAVSAMSGETNRLIALAKEMQATPDPREMDVLVSTGEQVTIALMCMALKDLGYDARSYTGTQVKILTDSSHMKARIQDIDVAPMKADLAAGRVVVVAGFQGVDENGNITTLGRGGSDTTGVALAAALKADECQIYTDVDGVYTTDPRVVSSAKRLERITFEEMLEMASLGSKVLQIRSVEFAGKYNVPLRVLSTFDDGPGTLITLDEEYSTMEQPVVSGIAFNRDEAKVSILGIPDAPGVASKILAPIGDANIEIDVIVQNVAADNTNDLTFTVNRADVDKARAVVERVATELGAREVVTDDKIAKISIVGVGMRSHAGVASTMFKSLAADAINIQMITTSEIKISVIIDERYLELAVRGLHTAFGLDKDQ

SEQ ID NO: 27372 - protein, 487 aa, Saccharomyces cerevisiae
MDALLTKFNEDRSLQDENLSQPRTRVRIVDDNLYNKSNPFQLCYKKRDYGSQYYHIYQYRLKTFRERVLKECDKRWDAGFTLNGQLVLKKDKVLDIQGNQPCWCVGSIYCEMKYKPNVLDEVINDTYGAPDLTKSYTDKEGGSDEIMLEDESGRVLLVGDFIRSTPFITGVVVGILGMEAEAGTFQVLDICYPTPLPQNPFPAPIATCPTRGKIALVSGLNLNNTSPDRLLRLEILREFLMGRINNKIDDISLIGRLLICGNSVDFDIKSVNKDELMISLTEFSKFLHNILPSISVDIMPGTNDPSDKSLPQQPFHKSLFDKSLESYFNGSNKEILNLVTNPYEFSYNGVDVLAVSGKNINDICKYVIPSNDNGESENKVEEGESNDFKDDIEHRLDLMECTMKWQNIAPTAPDTLWCYPYTDKDPFVLDKWPHVYIVANQPYFGTRVVEIGGKNIKIISVPEFSSTGMIILLDLETLEAETVKIDI

SEQ ID NO: 27373 - protein, 473 aa, Zea mays
  misc_feature (287)..(287): Xaa can be any naturally occurring amino acid
TPPQTTMATTVTLKSFTGLRQSSTEQTNFVSHVPSSLSLPQRRTSLRVTAARATPKLSNRKLRVAVIGGGPAGGAAAETLAQGGIETILIERKMDNCKPCGGAIPLCMVGEFNLPLDIIDRRVTKMKMISPSNIAVDIGRTLKEHEYIGMVRREVLDAYLRERAEKSGATVINGLFLKMDHPENWDSPYTLHYTEYDGKTGATGTKKTMEVDAVIGADGANSRVAKSIDAGDYDYAIAFQERIRIPDEKMTYYEDLAEMYVGDDVSPDFYGWVFPKCDHVAVGTGTXTHKGDIKKFQLATRNRAKDKILGGKIIRVEAHPIPEHPRPRRLSKRVALVGDAAGYVTKCSGEGIYFAAKSGRMCAEAIVEGSQNGKKMIDEGDLRKYLEKWDKTYLPTYRVLDVLQKVFYRSNPAREAFVEMCNDEYVQKMTFDSYLYKRVAPGSPLEDIKLAVNTIGSLVRANALRREIEKLSV

SEQ ID NO: 27374 - protein, 332 aa, Saccharomyces cerevisiae
MVRVAINGFGRIGRLVMRIALQRKNVEVVALNDPFISNDYSAYMFKYDSTHGRYAGEVSHDDKHIIVDGHKIATFQERDPANLPWASLNIDIAIDSTGVFKELDTAQKHIDAGAKKVVITAPSSTAPMFVMGVNEEKYTSDLKIVSNASCTTNCLAPLAKVINDAFGIEEGLMTTVHSMTATQKTVDGPSHKDWRGGRTASGNIIPSSTGAAKAVGKVLPELQGKLTGMAFRVPTVDVSVVDLTVKLNKETTYDEIKKVVKAAAEGKLKGVLGYTEDAVVSSDFLGDSNSSIFDAAAGIQLSPKFVKLVSWYDNEYGYSTRVVDLVEHVAKA

SEQ ID NO: 27375 - protein, 536 aa, Arabidopsis thaliana
MTTISDLPEDVVEEILPRVPLTSLSAVRSICKTWNTLSKNRVLCKAAVKKQFLGFIMMDYRVCSMKFHLRNDEGGDLVDDLSIKQVGILDQIEISEVLHCDGLLLFVTKDNSSLVVWNPYLGQTRLIQPSNNFHCSDRYAIGYDNNRNLKILRNFSDYGSSGSNKRGVSFKGNTYILAQGKIRVDSRWKIEAILLSFDFTTERFGPRLQLPFGFYYPQDLFSLSCVREEQLVVLHQSWMVSGELEIWITNKIDPGVVSWTKFLRSISCCRISIQAGSFFINEENQVAVVFDLDEYKGSETCRNQTAYIIGQDEYFKSVNIGEAPNLGRPEKYAPHIYCRPLGNTYILAQGKIRVDSRWKIEAILLSFDFTTERFGPRLQLPFGFYYPQDLFSLSCVREEQLVVLHQSWMVSGELEIWITNKIDPGVVSWTKFLRSISCCRISIQAGSFFINEENQVAVVFDLDEYKGSETCRNQTAYIIGQDEYFKSVNIGEAPNLGRPEKYAPHIYCRPLVCSSYVPSLVPLQINQPDTRKESDD

SEQ ID NO: 27376 - protein, 470 aa, Arabidopsis thaliana
MRGEIDEANLAPETSLINKENQDSSATITTTLLLTTFVAVSGSFVFGSAIGYSSPVQSDLTKELNLSVAEYSLFGSILTIGAMIGAAMSGRIADMIGRRATMGFSEMFCILGWLAIYLSKVAIWLDVGRFLVGYGMGVFSFVVPVYIAEITPKGLRGGFTTVHQLLICLGVSVTYLLGSFIGWRILALIGMIPCVVQMMGLFVIPESPRWLAKVGKWEEFEIALQRLRGESADISYESNEIKDYTRRLTDLSEGSIVDLFQPQYAKSLVVGVGLMVLQQFGGVNGIAFYASSIFESAGVSSKIGMIAMVVVQIPMTTLGVLLMDKSGRRPLLLISATGTCIGCFLVGLSFSLQFVKQLSGDASYLALTGVLVYTGSFSLGMGGIPWVIMSEIFPIDIKGSAGSLVTVVSWVGSWIISFTFNFLMNWNPAGTFYVFATVCGATVIFVAKLVPETKGRTLEEIQYSIGYVEL

SEQ ID NO: 27377 - protein, 574 aa, Kluyveromyces lactis
MNATATENPHVHQNQHEIQKALSNYDTSFLSDDEEDLCPLCIEPLDVMDKHFKPCPCGYQICQFCYNNIRQNPELNGRCPACRRKYDDESVEYIVLSPEELKMERSKQARKERDRKQRERERRENDTHNRKQLAGMRVIQKNLVYVIGLNPPYPYEELPSILRSDKYFGQYGKINKIVINKKTGHEHHSVSNSSSHINSGYGIYVTFSRKDDAAKCIQAIDGIYIDGHQVKAAYGTTKYCSSYLRGQPCPNPNCMFLHEPGEEADAFNNARKEHAHHSHAPPTLAKPSTSASSTPKLAHASLRTDDFTVPAAATSSSKQTAPVLTPAPVPSGSNPWGISQAPTPVSTIFNKTSTSTTFPTLSSSLGETLNSPGPGTPTTTGSAPTANSSSNVSSKKKGEKTYEDPYDPMATCVKFLDQTFKFLSDIPERSYTFNSNLLDDETYQSYPSLFSFEKIGCSEQSEGVLGAKLCDLLTIKPVDHMSSLLPFIQNKATPTMLPPGIAVQQPQLVQQQKQQLQQQQLQQQQQQLSLQMQLQAQQGMAQQGMAQQVMSQPQSNSSDLLNQLIHGKKQTAAV

SEQ ID NO: 27378 - protein, 722 aa, Rubrobacter xylanophilus DSM 9941
MGGGHDAPRLQGGLRALGDGGLPLRLRRHRRGGRGLDVPRGDEEVPARRGGEALYAGVQPLGAQGHRRAAARGRRARPVGRARPAGPGGDKAHLPAGRGPAGGGRRVICYPFSAIVGQDDLKLSLLLNAVSPEVGGVLIRGEKGTAKSTAARALASLLPPIRVVSGCPFSCDPKAPNLECPAGPHPPDAPSAERPVRLVELPVGASTDRLTGTLDLEKALTEGRRAFEPGVLAAAHRGILYVDEVNLLPDHLVDALLDAAAMGTNHVEREGVSVRHPARFVLVGTMNPEEGELRPQLLDRFGLSVEVAGSPEPGERAEVVSRRLLYEADPGGFAALWEGEERELSRRVLRARGLLPSVRLPEEMLRRVSEVCSALGVDGLRGDIVTAKTARALAAWEGRGEVSEEDVRRAALLALPHRRRRAPFEQPGLEPEELDGLLSGGEEPDPPEGGGEPGGERPGSGERRFSASGSFDPAGIEAPGRGQRGAPGRRSRAAGEHGHPVGAREAGREIRDLAPAATLRAAAPHQAERGREGGGLVLRPEDLREKVREGREGNLLVLVVDSSGSMAARSRMSAVKGAVRALLEDAYRRRDRAAVISFRGEEARLLVPPASGVEAAAARLEELPTGGRTPLAAGLELAAETVLREASREPERRPLLVVITDGRATAGEDPLAAARRLRERGVPSVVVDTEGGFVRLGLAAELAGALGARYVRLEELEERRSA

SEQ ID NO: 27379 - protein, 122 aa, Zea mays
MAAVLNSRKTAQVVAVLVAAALLASSASAAITCGQVGSSLAPCIPYATGRASALPASCCSGVKSLNSAARTSADRQAACRCLKSLANSVKSVNMGTVATIPGKCGVSVGFPISMSTDCNKIS

SEQ ID NO: 27380 - protein, 168 aa, Arabidopsis thaliana
MEMGLVFLTVFMAVMSSTMVSAQSSCTNALISMSPCLNYITGNSTSPNQQCCNQLSRVVQSSPDCLCQVLNGGGSQLGINVNQTQALGLPRACNVQTPPVSRCNTGGGGGGSTSDSPAESPNSSGPGNGSKTVPVGEGDGPPSSDGSSIKFSFPLIAFFSAVSYMAIF

SEQ ID NO: 27381 - protein, 144 aa, Pseudomonas fluorescens PfO-1
MTDPLLIPCPSCNGLNRIPAERLNDHPKCGRCKSEVLLNKPFELKQGDYASQIKGDLPLLVDVWADWCGPCKSFAPVFEQAAAQLAGKCRLAKLDSEANQQLSAQLGIRSIPSLILLRNGREVARQSGAFPLPQLMAWLRSQGI

SEQ ID NO: 27382 - protein, 271 aa, Triticum aestivum
ENGHAAAPMEQVAVAPVGGSSAEAAAPPDAVMRELPPPVPYVFAPQVPVAPLQIPNEFSPVFNHSWMNGSDESTNNNPPEIEIPTLITWSQGGNEVFVEGSWDNWTSRKVLERSGKDHAVLLVLPSGIYHYRMIVDGVPRYVSELPHVTDERGQVANLLDVHEYIPDSLDSVAEFDAPPSPEHSYNMEFPTDEELTKQDPPALPPQLLMTALGGTDHSDELAPKAKPQHVVLNHLFIEKGWGAQSLLALGLTHRFQSKYVNFVLYKPLVRR

SEQ ID NO: 27383 - protein, 486 aa, Bacillus subtilis
AEIRKLKNYINGEWVESKTDQYEDVVNPATKEVLCQVPISTKEDIDYAAQTAAEAFKTWSKVAVPRRARILFNFQQLLSQHKEELAHLITIENGKNTKEALGEVGRGIENVEFAAGAPSLMMGDSLASIATDVEAANYRYPIGVVGGIAPFNFPMMVPCWMFPMAIALGNTFILKPSERTPLLTEKLVELFEKAGLPKGVFNVVYGAHDVVNGILEHPEIKAISFVGSKPVGEYVYKKGSENLKRVQSLTGAKNHTIVLNDANLEDTVTNIVGAAFGSAGERCMACAVVTVEEGIADEFMAKLQEKVADIKIGNGLDDGVFLGPVIREDNKKRTLSYIEKGLEEGARLVCDGRENVSDDGYFVGPTIFDNVTTEMTIWKDEIFAPVLSVIRVKNLKEAIEIANKSEFANGACLFTSNSNAIRYFRENIDAGMLGINLGVPAPMAFFPFSGWKSSFFGTLHANGKDSVDFYTRKKVVTARYPAPDFN

SEQ ID NO: 27384 - protein, 601 aa, Mycoplasma genitalium G37
MAEQKRDYYEVLGITPDADQSEIKKAFRKLAKKYHPDRNNAPDAAKIFAEINEANDVLSNPKKRANYDKYGFDGVDGEPAFNFQADVFQSFFEEIAKSGVFNNQTNPEQKEKKKRYHWFSKKPKQEQPEINLDHVVEQTIKKVQQNQNQNKDPDELRSKVPGEVTASDWEALVGDTRYGYFDETGDWSWKGYFDEQGKWVWNEPVDSETSEVSVEPEPTPVAPEASFEEAQPEINAEPEASFESTPTPEPVAPEASFEEAQPEPTPIPEPIPTPVQVQPLLLDLNLFTIPTKATKDDLLFDNINLTTYEQVVDYLNSQATPNLAKTDGELQTIDGTNPLLLEQCKKIKKQAEQLFKKLFLKKQLPFITQPEVVEESKTSFDENNVNLVYFEKVPEILFINQQPKEVKYTRQVFDGLTNKTTSETITLEIQLLQTPKETVSAIFKGFGNDHGKGCGDLKIVFEKIKSPFFQVNEDGLHSACIIDPLVAYNGGIIDVFGPYTNFQVKVDGEIDINAIMKFEKLGIAKTKRKGDLFVHLYYSSVPKKKLTTNPQVQQFLELLQAEYELLQDNIKSLKYFKNNLVIPKKPLDQQSYQYLSQEPIS

SEQ ID NO: 27385 - protein, 475 aa, Medicago truncatula
MGSSPNSKPKIVRGSAGYILEDVPHLTDYIPELPTYSNPLQDNPAYSVVKQYFVHIDDSVPQKIIANKDSPRGIHFRRAGPRQKVYFKSDEVQAAIVTCGGLCPGLNTVIRELVCGLYHMYGVKKVLGISGGYKGFYAHNTISLTPKTVNDIHKRGGTILGSSRGGHDTTKIVDSIQDRGINQVYIIGGDGTQRGAYRIFEEIRNRGLKVAVVGIPKTIDNDIPVIDKSFGFDTAVEEAQRAINAAHVEAESVENGIGVVKLMGRYSGFIAMYATLANRDVDCCLIPETPFFLEGPGGLFEYTERRLKENGHMVIVIAEGAGQELVTESIQSMHKQQDASGNKLLQDVGLWISHKLKDYFAKQKTMGITLKYIDPTYMIRAVPSNASDNVYCTLLAQSAVHGAMAGYTGFTSGLVHGRQAYIPFNRINEGQNTVVITDRMWARLLSSTNQPSFLIAKTAVEEKKKEEEEEDSFNL

SEQ ID NO: 27386 - protein, 229 aa, Mycobacterium tuberculosis CDC1551
MAGSTGGPLIAPSILAADFARLADEAAAVNGADWLHVDVMDGHFVPNLTIGLPVVESLLAVTDIPMDCHLMIDNPDRWAPPYAEAGAYNVTFHAEATDNPVGVARDIRAAGAKAGISVKPGTPLEPYLDILPHFDTLLVMSVEPGFGGQRFIPEVLSKVRAVRKMVDAGELTILVEIDGGINDDTIEQAAEAGVDCFVAGSAVYGADDPAAAVAALRRQAGAASLHLSL

SEQ ID NO: 27387 - protein, 431 aa, Cupriavidus oxalaticus
MRPGNLLLNWAAPFSNDLSSHCTMPQEAMKAPVVVLGAGLAAVSFASELRQAGYQGPLTVVGDEAEPPYDRPPLSKDFMGHGDAEKIRLDCKRAPEVEWLLGVAAQSFDPQAHTVTLSDGRTLPYGTLVLATGATPRTLPALQSAPMPVHTLRTLEDARRIQVGLRPQARLLIVGGGVIGLELAATARAAGVHVTLVETQPRLMGRAASSTLSDFVARYHAAQGVDLRFGRSVTGFTEGTVLLDDGARIAADMVVVGIGVVTNDALARAARLACDDGIFVDAFGRTTCPDVYAIGDVTRQRNPLSGRFERIETWSNAQNQGIAVARHLVDPAAPGYAELPWYWSDQGALRIQVAGLASGDEEIVRGEFSIESPKFTLIELQKGCIVGATCVNNARDFAPLRRLLAAGAQPDRAALANPATDLRKLAAAVGT

SEQ ID NO: 27388 - protein, 471 aa, Legionella pneumophila str. Lens
MNKGMNAFVFLIAVIAGFGGFLFGFDSSVIADVKDQVISQLALTDWQWAQVVSSSLLGCILGIPISGLVADKLSRRSLLKVVALGFMLGSSLCALAPGLVSILLGRFIIGICIGIASYIAPLFIAEIAPPHQRGTLVLINGLTITFGQAVAYLIGYFLHDYSLMSWRYLFWIGSLPALVLFSGMYFVPHSPRWIMMKYGADATLKTLKQIRPVGYNIQQELTEISNNLVNPAPAYIQMFKKPIVFVLLLGIGLGLFQQFSGINALMYYGPVVFESFGFSPVKNAILATFFLGLVNFIFTVVTLFYVDKLGRRFLLISGTLIASISLYFVSVLSCNSLFVNKFWILGGLSFYVMGYCISLGSLFWVLISEIYPLSVRGLAMSIATVFQWGANFVVSLLFLPIYQFSGQTVTFAMFATFCLLACWFIYYFVPETTSVSLEKLEENLSSGKKVRDIGQPVSKNIKIAKFNLIMD

SEQ ID NO: 27389 - protein, 182 aa, Triticum aestivum
MAARARAVAAMSSSSSVLLAAAVALALLVASASAQSGCTSVLIGLYPCMNYISGSGTAPTKSCCSQLASVVQSQPQCLCSALGGDSPSLGGVTINKTRALELPNACNVQTPPASKCNGAGGGSAPGASANTPTTPAVQTPAGLGSKTTPSAYLQGSGGSSLHGPAGLVFALAVAAVYAVSAV

SEQ ID NO: 27390 - protein, 298 aa, Xanthomonas oryzae pv. oryzae KACC10331
MPFPVTMSEDDSSQSLEAPEKRRSWLERLSAAFSGEPHTRDELVALLRTAEQDGLIAADTLRMMEGAISVSELTVGDVMISRSQMVSLPVEARFIDLMKQVVESGHSRFPVHGENKDEVLGILLAKDLLRGVVADNGPGNVRELLRPAVLIPESKKLNVLLKEFRLSRNHMAIVVDEYGGVAGLVTIEDVLEQIVGEIDDEHDDAEDENSLIAIQADGRYVVDALTPIEDFNERFGAEFPDDEYDTVGGLVTDAIGHLPETGEELTLGRFAFRVAKADARRVHAFHVTILPPDPQDDA

SEQ ID NO: 27391 - protein, 435 aa, Raphanus sativus
MKGVRKTYNNSYTLSFLLVFFMLILFRPAFSINTLSATESLTISNNRTLVSPGNVFELGFFRTTSNSRWYLGIWYKKLSERTYVWVANRDNPLSNSIGTLKISGNNLVLQGHSNISVWSTNRTRGNERSPVVAELLANGNFAMRDSNNNDANQFLWQSFDYPTDTLLPGMKLGYDLKTGLNRFLTSWRSSDDPSSGDYSYKLENRRLPEFYLWSEEFRVHRSGPWNGIRFSGIPEDQKLSYMVYNFTENSEEVAYTFLMTNNSFYSRLTLNSEGYLERLTWAPSSVVWNVFWSSPNHQCDMYRVCGPYSYCDVNTSPVCNCIQGFRPKNRLQWDLRIPLSGCIRRTRLSCSGDGFTRIKNMKLPETTMAIVDRSIGVKECEKRCVSECNCTAFANADIPNGGTGCVIWTGRLDDMRNYDADGQDLYVRLAAADLV

SEQ ID NO: 27392 - protein, 263 aa, Bartonella tribocorum
NAVNNMINAGLQGVDFVVANTDAQALAMSKAERVIQLGAAVTEGLGAGALPEVGQAAAEECIDEIIDHLADSHMVFITAGMGGGTGTGAAPVVARAAREKGILTVGVVTKPFQFEGARRMKTAEAGIEELQKSVDTLIVIPNQNLFRIANDKTTFADAFAMADQVLYSGVASITDLMIKEGLINLDFADVRSVMHEMGRAMMGTGEASGEGRALAAAEAAIANPLLDDTSMRGARGFLISITGGRDMTLFEVDEAANRIREEV

SEQ ID NO: 27393 - protein, 896 aa, Desulfitobacterium hafniense DCB-2
MDSRLHLVDNLPALLWSSDRAGNYDYVNQAWLEFTGLTFVEVRGEGWLSCVHPEDSPGVMNVLEHSRRHKAPFEAEYRLRRYDGEYRHCLSRGQPYDDPKGELAGYTGVIIDITERKAAEIMTRENAEKFREIFNRITDCVFIHEVKDDGQIGKIQEVNDMACELIGLTRAEIIDLSREVIKVKSPLTLANEFTQKLLSKNYLVFEGMLLTHQGKEIPVEVKAHYHVLNGRRMLLSIARDISNQKRIHKILLASHNKYRQLFDNITDAVFVYELQKDGYPGLLIEINEKARRLMGYHEETFMFSAGPCIRPSSPQLTLDDVWQSLERTHSASFEGICTNLEGEDIPVEVNCHTFPLNGSKVMLTLLRDITERKQIEQERKRTEAEFQQAKEKAEAANRAKSEFLANMSHEIRTPINGIIGMIDLTLLTSLEKTQRENLKIAKNCAYSLFKIINDILDFSKIEAGKLTVEEIEFNLKEVIEQIIKTHSPEAERKGLDLAYTLSANLPDYYKGDPERIKQVLNNLLSNALKFTERGEVSLAVKRLQGDEDVSDLKFTVMDTGIGIAEEDQLHLFEEFNQVDGSITRKYGGTGLGLAISRKLVEMMGGRIWVESEKGKGSSFGVVLRLKHGDKDTLRFKSTQNNDQSREGSTARSYRILLAEDHIVNSIVITEMLKIQGHRVDIAMDGEEALALYHQNPYDVILMDIQLPRLDGIEVTKRIRASEGAQSRTPIIALTAYALQGDREGFLQAGMDEYIPKPVMMEELIMVLDRVVTKFASGEGQAQQEEVVITDEGVYLKDISSFPESVNKDLELSEMAYDFKKLRIALNNGDSVALEHIAHRIKERCSVIGAHKLKALAFKIELAARRGNPGEAKDYLHDLDSEYNQLSGGMLNENTRS

SEQ ID NO: 27394 - protein, 466 aa, Novosphingobium aromaticivorans DSM 12444
MQFERINPMTGAVASQAEAMKASDIPSIAARAGQAFPAWAAMGPNARRGVLMKAAAALEARADAFVEAMMGEIGATRGWALFNLGLAASMVREAAALTTQISGEVIPSDKPGCISMALREPVGVILGIAPWNAPIILGVRAIAVPLACGNAVILKASETCPRTHALIIEAFAEAGFPEGVVNVVTNAPADAAEVVGALIDAPEVRRINFTGSTNVGRIIAKRAAEHLKPCLLELGGKAPLIVLDDADLDEAVKAAAFGAFMNQGQICMSTERIIVVDAVADAFADKFKAKVASMAVGDPREGTTPLGAVVDAKTVAHCRSLIDDALAKGARLLTGGETTHNVLMPAHVVDGVTQDMKLFRDESFGPVVGVIRARDEAHAIELANDSEYGLSAAVFTRDTARGLRVARQIRSGICHVNGPTVHDEAQMPFGGVGASGYGRFGGKAGIDSFTELRWITMETQPGHYPI

SEQ ID NO: 27395 - protein, 263 aa, Bartonella elizabethae
NAVNNMINAGLQGVDFVVANTDAQALAMSKAERVIQLGAAVTEGLGAGALPEVGQAAAEECIDEIIDHLADSHMVFITAGMGGGTGTGAAPVVARAAREKGILTVGVVTKPFQFEGARRMKTAEAGIEELQKSVDTLIVIPNQNLFRIANDKTTFADAFAMADQVLYSGVASITDLMIKEGLINLDFADVRSVMHEMGRAMMGTGEASGEGRALAAAEAAIANPLLDDTSMRGARGLLISITGGRDMTLFEVDEAANRIREEV

SEQ ID NO: 27396 - protein, 327 aa, Pneumocystis jirovecii
MHSKVIIIGSGPAGHTAAIYLARAELKPVLYEGMLANGIAAGGQLTTTTDVENYPGFPDGIMGPLLMEKFREQSVKYGTCIITETVSKLDLSKRPFKYWCESDENTCHTADVVVMATGAYARRLHIPGEETYWQRGISACAVCDGAAPIFRGKCLSVVGGGDSAAEESLFLTRYATKVYLLVRRDKLRASAVMAKRLLNHPKIEVIWNTVVLRSLGDGHLLNRLEIKNVKTQVVSELHVSGLFYAIGHEPATALVRGQVECDDNGYIITKNGGPETNIKGFFAAGDVQDKKWRQAVTSAGSGCMAGLAAERLLAEEEEMKNIEKNKK

SEQ ID NO: 27397 - protein, 579 aa, Staphylococcus aureus subsp. aureus Mu50
MAKIKANEALVKALQAWDIDHLYGIPGDSIDAVVDSLRTVRDQFKFYHVRHEEVASLAAAGYTKLTGKIGVALSIGGPGLIHLLNGMYDAKMDNVPQLILSGQTNSTALGTKAFQETNLQKLCEDVAVYNHQIEKGDNVFEIVNEAIRTAYEQKGVAVVICPNDLLTEKIKDTTNKPVDTSRPTVVSPKYKDIKKAVKLINKSKKPVMLIGVGAKHAKDELREFIEMAKIPVIHSLPAKTILPDDHPYSIGNLGKIGTKTSYQTMQEADLLIMVGTNYPYVDYLPKKNIKAIQIDTNPKNIGHRFNINVGIVGDSKIALHQLTENIKHVAERPFLNKTLERKAVWDKWMEQDKNNNSKPLRPERLMASINKFIKDDAVISADVGTATVWSTRYLNLGVNNKFIISSWLGTMGCGLPGAMASKIAYPNRQAIAIAGDGAFQMVMQDFATAVQYDLPLTVFVLNNKQLAFIKYEQQAAGELEYAVDFSDMDHAKFAEAAGGKGYTIKSASEVDAIVEEALAQDVPTIVDVYVDPNAAPLPGKIVNEEALGYGKWAFRSITEDKYLDLDQIPPISVAAKRFL

SEQ ID NO: 27398 - protein, 263 aa, Bartonella weissi
NAVNNMINAGLQGVDFVVANTDAQALAMSKAERVIQLGAEVTEGLGAGALPKVGHAAANECIDEIMDHLANSHMVFITAGMGGGTGTGAAPVVARAARDKGILTVGVVTKPFHFEGARRMKTAEAGIEELQKCVDTLIVIPNQNLFRIADEKTTFADAFAMADQVLYSGVASITDLMIKEGLINLDFADVRSVMHEMGRAMMGTGEASGEGRALKAAEAAIANPLLDETSMCGARGLLISITGGRDMTLFEVDEAANRIREEV

SEQ ID NO: 27399 - protein, 336 aa, Mycobacterium avium subsp. paratuberculosis
MKLAVIGGDGIGPEVTAEALKVLDAVLPGVDKTEYDLGARRYHATGELLPDSVIDELRAHDAILLGAIGDPSVPSGVLERGLLLRLRFELDHHINLRPGRLYPGVSSPLAGNPDIDFVVVREGTEGPYTGTGGAIRVGTPNEVATEVSQNTAFGVRRVVVDAFERARRRRKHLTLVHKTNVLTFAGKLWSRIVAEVGRDYPDVEVAYQHIDAATIFMVTDPGRFDVIVTDNLFGDIITDLSAAVCGGIGLAASGNIDGTRTNPSMFEPVHGSAPDIAGQGIADPTAAIMSVALLLAHLGEDAAATRVDRAVERYLATRGNERPATTEVGERIAAAL

SEQ ID NO: 27400 - protein, 546 aa, Salmonella enterica subsp. enterica serovar Typhi Ty2
MAIHNRAGQPAQQSDLINVAQLTAQYYVLKPEAGNAEHAVKFGTSGHRGSAGRHSFNEPHILAIAQAIAEERAKNGITGPCYVGKDTHALSEPAFISVLEVLAANGVDVIVQENNGFTPTPAVSNAILVHNKKGGPLADGIVITPSHNPPEDGGIKYNPPNGGPADTNVTKVVEDRANALLADGLQGVKRISLDAAMASGHVKAVDLVQPFVEGLADIVDMAAIQKAGLTLGVDPLGGSGIEYWKRIAEHYKLNLTLVNDQVDQTFRFMHLDKDGAIRMDCSSECAMAGLLALRDKFDLAFANDPDYDRHGIVTPAGLMNPNHYLAVAINYLFQHRPLWGKDVAVGKTLVSSAMIDRVVNDLGRKLVEVPVGFKWFVDGLFDGSFGFGGEESAGASFLRFDGTPWSTDKDGIIMCLLAAEITAVTGKNPQEHYNELAARFGAPSYNRLQAAATSAQKAALSKLSPEMVSASTLAGDPITARLTAAPGNGASIGGLKVMTDNGWFAARPSGTEDAYKIYCESFLGEEHRKQIEKEAVEIVSEVLKNA

SEQ ID NO: 27401 - protein, 525 aa, Solibacter usitatus Ellin6076
MPPKTVSEKVAVFDTTLRDGEQAAGTRLGSREKLIIARQLALLNVDVIEAGYPNSSPEDFDAVQRIAAEIQGPAICALSRAVAADIEACGKALAGCPRPRIHTGIGASDIHIAGKFQDDRYGKSLAEKKRKILQMAIDAVTLARHYVAEVEFYAEDAGRADPVYLYEMIAAVIDAGASVVNIPDTTGYTVPEQYGALIAGIRTHVPGIDRAVISVHCHDDLGMAVANTLHGVLNGARQVEGTINGLGERAGNAALEEIVMALATRADYFGVHTGVNTRELHRTSRLVADLLGVQVPPNKAVIGANAFSHSSGIHVDGVLKKRETYEIMRPEDVGMTESRVVLTARTGRHGLLDRLRKLGYELSDLELDQAYRRFLSVADKKQEVFDEDLIAILRDEIHPLPAVYELQYLHIYSGTSAIPTATVRLLVSGDTREGAAIGDGPVDAVCRAISQVTATAAKLQRYEIRGVTSGTEAMGEVTIQLEEAGRKVIGRGASTDIIEASAKAYLDGLNKLANIAAASHRSAGA

SEQ ID NO: 27402 - protein, 325 aa, Pneumocystis carinii
MHSKVVIIGSGPSGHTAAIYLGRAELKPILYEGMLANGIAPGGQLTTTTDVENYPGFPDGILGPSLMEAFRKQSEKYGAQIITDTVSKLDLSKRPFKYCCESNEEVFHTADVVILATGAYARRLNIPGEEIYWQRGISACAVCDGAAPIFRGKPLAVVGGGDSAAEESLFLTRYATKVYLLVRRDKLRASPIMAKRLLHHPKIEILWNTVALESLGDNNLMNCVKIKNVKTQEVSELQVNGLFYAIGHEPATTLVRGQVECDKDGYIITKNGGPETNIKGFFAAGDVQDKKWRQAVTSAGSGCMAGLAAERLLAEEEEMKNIEDS

SEQ ID NO: 27403 - protein, 138 aa, Shorea bullata
EKNIPVLLGLLSIWNVSFLGYPARAILPYSQALEKFAPHIQQVSMESNGKGVSIDGVPLPYKAGEIDFGEPGTNGQHSFYQLIHQGRVIPCDFIGSAKSQQPIHLKGEVVSNHDELMSNFFAQPDALAFGKTPEELHK

SEQ ID NO: 27404 - protein, 188 aa, Zea mays
MVLVLALGDLHIPHRVPDLPAKFKSMLVPGKIQHIICAGNLCIKEVHDYLKSLCPDLHITGGEYDEYARYPETKTLTIGQFKLGLCHGHQVVPWGDLDSLAMLQRQLDVDILVTGHSHQFKAYKHEGGVVINPGSATGAYSSITYDVNPSFVLMDIEGLRVVVYVYELIDGEVKVDKIDFKKAATMQA

SEQ ID NO: 27405 - protein, 367 aa, Zea mays
MDSDYGVPRELSEVQQNRTLYQPELPPCLQGTTVRVEYGDVAIAADPAGAHVISHAYPHTYGQPLAHFLRKAANVPDAKVISEHPAVRVGIVFCGRQSPGGHNVIWGLHEAIKAHNVNSKLIGFLGGTDGLLAQKTLEITNEVLSSNKNQGGYDMLGRTKDQIRTTEQVNGAMATCQALKLDALVIIGGVTSNTDAAQLAETFAEAKCATKVVGVPVTLNGDLKNQFVETTVGFDTICKVNSQLISNMCTDALSAEKYYYFIRMMGRKASHVALECALQSHPNMVILGEEVAASKLTIFDITKQICDAVQARAEKDKNHGVILIPEGLVESIPELYALLQEINGLHGKGVSVENISSQLSPWASALF

SEQ ID NO: 27406 - protein, 482 aa, Saccharomyces cerevisiae
MLRNGVQRLYSNIARTDNFKLSSLANGLKVATSNTPGHFSALGLYIDAGSRFEGRNLKGCTHILDRLAFKSTEHVEGRAMAETLELLGGNYQCTSSRENLMYQASVFNQDVGKMLQLMSETVRFPKITEQELQEQKLSAEYEIDEVWMKPELVLPELLHTAAYSGETLGSPLICPRELIPSISKYYLLDYRNKFYTPENTVAAFVGVPHEKALELTEKYLGDWQSTHPPITKKVAQYTGGESCIPPAPVFGNLPELFHIQIGFEGLPIDHPDIYALATLQTLLGGGGSFSAGGPGKGMYSRLYTHVLNQYYFVENCVAFNHSYSDSGIFGISLSCIPQAAPQAVEVIAQQMYNTFANKDLRLTEDEVSRAKNQLKSSLLMNLESKLVELEDMGRQVLMHGRKIPVNEMISKIEDLKPDDISRVAEMIFTGNVNNAGNGKGRATVVMQGDRGSFGDVENVLKAYGLGNSSSSKNDSPKKKGWF

SEQ ID NO: 27407 - protein, 447 aa, Parvularcula bermudensis HTCC2503
MSEDDYKQGSLTLAGTVAMGTGVMIGAGIFALTGQVAEFAGDLFPLAFLTAAIISGFSAYSYIKVSNKYPSAGGIAMILQRAYGPSTVTGSAALLMAFSMIINESLVARTFGTYTLQLFGVEGGIFVPLLAIGLIILAFVINIAGNQVIGGVSKVTAILKIGGILIFALIAIWAAGFSFQPAADGFADSASAGGFLAGVALAILAYKGFTTITNSGDEVKQPTRNVGRAIMISLAICTFIYLLVCFAVGSTLTVSEIVAAKDYALAEAARPALGNYGLWFTVTIAIIATASGLLASLFAVSRMLAMLTDMNLIPHRHFGMPGTVQRHTLVYTVVAAGLLAAFFDLSRIASLGAIFYLVMDIIIHWGVFRHLRKDVGAAPAILICAIALDAVVLIAFLLLKWQADPVIILIAAFGMVVVFSFEHFFLKRLRDNPPGEESGNDQHKAHS

SEQ ID NO: 27408 - protein, 306 aa, Ceratodon purpureus
MMAMAVGELGLGLKGSAAPVVGAGREKSVIQNGPSRAPTSAHFWSRISQKVDLRSSNVFGRILGFGVEAPSTSTSSFSVRASSVAPEKSKSRPGEKKGFVEEMRFVAMKLHTRDQSKEGEKEADVQPVGQWKPSIPGYIKFLVDSKKVYDTMETIVEKASHPSSDEYFRNTGLERSARLAKDLEWFASQGHEIPEAGPDGITYANLLTELSESDVPAFICHFYNVYFAHSAGGRFIGKQVAQQILDGRELEFYKWDGELSELLGAVKVNLNKVAEEWTREQKDHCLKETENSFKYSGKILRLIVSA

SEQ ID NO: 27409 - protein, 102 aa, Pseudomonas syringae pv. syringae B728a
MQVNISGHQLEVTKPLREYVELKLKKLEGHFDKITNVQVTMTVEKLKQKIEATLHIHGGEVVANAEHDDMYAAIDLLTDKLDRQLLKHKEKQQSILKGAAAR

SEQ ID NO: 27410 - protein, 484 aa, Saccharomyces cerevisiae
MADKIERHTFKVFNQDFSVDKRFQLIKEIGHGAYGIVCSARFAEAAEDTTVAIKKVTNVFSKTLLCKRSLRELKLLRHFRGHKNITCLYDMDIVFYPDGSINGLYLYEELMECDMHQIIKSGQPLTDAHYQSFTYQILCGLKYIHSADVLHRDLKPGNLLVNADCQLKICDFGLARGYSENPVENSQFLTEYVATRWYRAPEIMLSYQGYTKAIDVWSAGCILAEFLGGKPIFKGKDYVNQLNQILQVLGTPPDETLRRIGSKNVQDYIHQLGFIPKVPFVNLYPNANSQALDLLEQMLAFDPQKRITVDEALEHPYLSIWHDPADEPVCSEKFEFSFESVNDMEDLKQMVIQEVQDFRLFVRQPLLEEQRQLQLQQQQQQQQQQQQQQQQPSDVDNGNAAASEENYPKQMATSNSVAPQQESFGIHSQNLPRHDADFPPRPQESMMEMRPATGNTADIPPQNDNGTLLDLEKELEFGLDRKYF

SEQ ID NO: 27411 - protein, 370 aa, Legionella pneumophila subsp. pneumophila str. Philadelphia 1
MNIFNLPDLGEGLPDAEIHEWFVKEGDTVKADQPLVSMETAKAVVDVPCPQSGTIAKLYGKPGDVIKTGEPLVAFVSTTEKPADKGTVVGNLEESTDVSEDNFIIGSQRSSHRVKTTPAVRLLAKKLGVDLSSLKGSGDNGVITREDVQNQANINSQPPAGFEHLRGVRRAMLNSMVQSHAEIVPVSIFDEADIHIWKPNTDITVRLIRAIIHASKKEPALNAWFDTKHAARRCFKEVHLGIAMDNEEGLFVPVIHDAEKYSDSELRKIIDEFKESVRNRAVSADKLKGATITLSNFGKFSGRFASPIIVPPMVAILAVGRLYKAAVINDEDKIEAHKMLPLSLSFDHRAITGGEATRFLGAVIESLQQA

SEQ ID NO: 27412 - protein, 120 aa, Oryza sativa
  misc_feature (9)..(9): Xaa can be any naturally occurring amino acid
  misc_feature (38)..(38): Xaa can be any naturally occurring amino acid
MDDAKSRCXPEVLEAFEKAVVSHVNAQGPHDFQKENAXVLKGQMESLTRENTILKRAFAIQHERQDYDAKNQELQDEKQRIAEFQEQVRNLELNNYRLSMLLRQAQQGSSIPGRFNPDVF

SEQ ID NO: 27413 - protein, 335 aa, Magnetococcus sp. MC-1
MAQAETAILLVQLGTPDQPTEEAVRRYLRQFLSDRRVVDMNRLLWWPLLHGIILRSRPSKSAKLYKKIWRDDKTSPLLHYTRALQQEMARRFQGRHSSGVRVDFAMRYGNPGLRCKVGSLVREGVRRLLIVPLFPQYAGATVASVMDEVMRPMHIHRLMPTLRVMTPYYAQDAYIDALVASLEGVDLSEPDHRLLLSYHGLPKRHVDEGDPYENHCQTTTLLLTEELDLRHDQWMMSYQSRFGSEPWLEPNTDMLFKTLPSQGIKKLTVMCPGFAADCLETLEEISETGRQTFLKAGGSHFNYIPCLNDEPYWVDALEKMIEDEMHGWLHGPMSA

SEQ ID NO: 27414 - protein, 335 aa, Arabidopsis thaliana
MSNLPRDLSDLPRNMAEEVLSRVPMTSLRRLRFTCKKWNTLSRCRSFAKKHLVCQAKVAAKKREYKVVMMMDFRVYLMRINLQNNVELCIKRERELLFPDASDQIYVRHVFHCDGLLLCIMKDNPRLVVCNPYSGQTRWIETTNNPQRLDAYSYALGYNSSTKSHKILSFGMMFDYVSSTSAEFKIYDFNSDSWRGDIWAAVCLRRPLSGIFKSSLLLSNVRDEQLAVLFQRMDTLQMEIWVTTKIEPNTVSWSSKFFLSVDMRELTGRYSMFSFSDASFFIDEEKKVAVVFDKGKKNLHRWRGWILEEVDLGESPNQNLRPLVCSYVPSSLQLD

SEQ ID NO: 27415 - protein, 247 aa, Legionella pneumophila subsp. pneumophila str. Philadelphia 1
MEKGSAMENLEHGHSQKEIRDRLAQVPSQNYLRDWIYGGIDGVVTTFAIVSGVVGGQLSSLVILILGFANLLADGFSMAASNYLGTKSEVDQFQRYKTIEEKHIDFIPEGEKNEIKQIFQNKGLHGQTLDQVVEEITANRALWIKTMLQEEYGLPATLRFPLKSALYTFSAFLLFGIIPLIPYVLVMNNSFIWSCFFTAITFFVIGSIKSHWSTKSWLYSGFETLIIGTVTASLSYGIGLFLHHYLT

SEQ ID NO: 27416 - protein, 435 aa, Raphanus sativus
MKGVRKTYDNSYTLSFLFVFYVLILLRPAFSINTLSSTESLTISSNRTLVSPGNVFELGFFRTTSSSRWYLGIWYKKLSERTYVWVANRDNPLSNSIGTLKISGNNLVLLGHSNKSVWSTNLTRGSERSTVVAELLANGNFVMRDSNNNDASEFLWQSFDFPTDTLLPEMKLGYDLKTGLNRFLTSWRSSDDPSSGDYSYKLDTQRGLPEFYLLQGDAREHRSGPWNGIGFNGIPEDQKWSYMYNFTENSEEVAYTFLMTNNSFYSRLTLSPSGYFQRLTLNPSTVDWNVFWSSPNHQCDMYRMCGPYSYCDVNTSPSCNCIQGFNPENVQQWALRISISGCIRRTRLSCSGDGFTRMKNMKLPETAMAVVDRSIGVKECKKRCLSNCNCTAFANADIRNGGTGCVIWTGRLDDMRNYVTDGQDLYVRLAAADLV

SEQ ID NO: 27417 - protein, 425 aa, Mycobacterium tuberculosis CDC1551
MTRLDSVERAVADIAAGKAVIVIDDEDRENEGDLIFAAEKATPEMVAFMVRYTSGYLCVPLDGAICDRLGLLPMYAVNQDKHGTAYTVTVDARNGIGTGISASDRATTMRLLADPTSVADDFTRPGHVVPLRAKDGGVLRRPGHTEAAVDLARMAGLQPAGAICEIVSQKDEGSMAHTDELRVFADEHGLALITIADLIEWRRKHEKHIERVAEARIPTRHGEFRAIGYTSIYEDVEHVALVRGEIAGPNADGDDVLVRVHSECLTGDVFGSRRCDCGPQLDAALAMVAREGRGVVLYMRGHEGRGIGLMHKLQAYQLQDAGADTVDANLKLGLPADARDYGIGAQILVDLGVRSMRLLTNNPAKRVGLDGYGLHIIERVPLPVRANAENIRYLMTKRDKLGHDLAGLDDFHESVHLPGEFGGAL

SEQ ID NO: 27418 - protein, 105 aa, Glycine max
  misc_feature (86)..(86): Xaa can be any naturally occurring amino acid
MAPRTMSSSSSILLAAAVAALLVASASAQSGCTAALVGLYPCLNYISGNDTAPTKSCCSQLSSVVQSQPQCLCSALGGDSSSLGGXTINKTRALELPKACNVQTP

SEQ ID NO: 27419 - protein, 436 aa, Raphanus sativus
MKGVRKTYDNSYTLSFSLVFFVFILFRPAFSINTLSSTESLTISSNRTLVSPGDVFELGFFTPGSSSRWYLGIWYKKLSDRTYVWVANRDNPLPNSIGTLKISNMNFVLLGDSNKSVWSTNLIRGNERSPVVAELLANGNFVMRDTNNNDASGFLWQSFDFPTDTLLPEMKLGYDLKTGLNRFLTSWRSSDDPSSGEFSYKLELLKIPEFYLSSGYFPVHRVGPWNGIRFSGIPEDQKLSYMVYNFTENSEEVAYTFLMTNNSIYSRLTISSSGYFERLTWTPSSGMWNVFWSSPVDLQCDVYKICGPYSYCDVNTSPVCNCIQGFDPWNVQQWDLRAWSGGCIRRTRLSCSRDGFTRIKNMKLPETTMATVNRSIGVKECEKRCLSDCNCTAFANADIRNGGTGCVIWTGRLNDMRNYAADGQDLYVRLAAADLV

SEQ ID NO: 27420 - protein, 125 aa, Glycine max
MAGSGSSMLYSFLLFTVILSLQEMYRGKLASSELYTILGGFVSSILFLVLLTFIGNLQETIGARTGWGAVIVAEAVALIAASTVHRVCITTCFLFSAALLYEVNKISGSALSTSDSRIKKQSGRA

SEQ ID NO: 27421 - protein, 308 aa, Mycoplasma genitalium G37
MKQCFVVTTTKRLDSLLASLLNLSRVKVVKLIMNGQIKVNEKLTFKNSLIVAKDDVIKVEIHDETTSDFITSVEPYNLKLEVLFEDKDLMVINKPSGLLTHPTTFNEKASLLAACIFHNNKNPVYLVHRLDRDTSGAIVVCKNQASLLNLQNQLQNRTLKRYYVALVHFPFNALTGSINAPLARVNNNKVMFKIAQTAKAKQAITKFKVINQNEKAALISLELLTGRTHQIRVHLKFIQHPVYNDPLYGIKSEKKDSYGQFLHANRICFIHPTLNKPMDFHAPLEPKFSTKLKSLNLSLTDPLHVLFK

SEQ ID NO: 27422 - protein, 261 aa, Desulfitobacterium hafniense DCB-2
MSSYNDFTVEKKGAIALVTLNRPHKGNSWTLDTYQEMEKIQEDLHYDDEVRVVIFTGAGDKFFCAGADLSLLAKLTPHFISRDLYRYQGINTRWDRFIKPVIMAINGITVGSGLELALCGDIRIASSSSLFSINEVRIGLNPDMGGTQRLTRTVGPSQAKRLIFTAERIDAQEAARIGLVDILVEPENLLNEALKMAEQIASMPPYAIRFAKKAINLAVDAPLEIGLMYEEAGSTFCMGTEDKKEAVDSILEKRQPKFHGR

SEQ ID NO: 27423 - protein, 441 aa, Raphanus sativus
MKGVRKTYDNSYTLSFLRVFFILILHRPAFSIHTLSSPESLTISSNRTLVSSGNVFELGFFTIGFFTTGSSSRWYLGIWYKKVSGRTYVWVANRDNPLSSSIGTLRFSNMNLVLLDQSNKSVWWANLTRGNERSPVVAELLANGNFVIRDCSNNDASGFLWQSFDYPTDTLLPEMKLGYDLKKGLNRFLTSWRNSDDPSSGNISYKLDTQRGMPEFFLLKDGLRAHRSGPWNGVQFSGIPEDQKLSYMVYNFTENSEEVAYTFRMTNSSIYSRLKISSEGFLERWTTPTSIPWNLFWSAPVDLKCDVYKTCGPYSYCDLNTSPLCNCIQGFMPSNVQQWDLRDPSAGCIRRTRLSCSGDGFTRMKNMKLPETRMAIVDRSIGVKECEKRCLSDCNCTAFANADIRNGGTGCVIWTGELEDIRTYLADGQDLYVRLAAADLV

SEQ ID NO: 27424 - protein, 481 aa, Exiguobacterium sibiricum 255-15
MSKKPFTDFQLSTPILEAIEQLGYHTPTDVQQAVIPVALSEKDIIVKSRTGSGKTASFGIPLCELVEWEENKPQALILTPTRELALQVTEDVMNIGRYKRIKATAVFGKQPFRGQVAELKQKTHIVVGTPGRVLDHLERGTLSLEKVKYLVLDEADEMLNMGFLDQVDTILKQLPKQRTTMLFSATFPQDIHQLSDRYMQSPKQVEITTKATEIAEIEHSYIKVTDKTKFAVLKDVTVVENPDRCMIFCRTKEHVDFVAQGLASMDYPVEKIHGGMEQDERLAVMKAFRAGEFRYLVATDVAARGIDIENITHVIQYDMPVEKESYVHRTGRTGRAGALGKAISLVTESDMRRLREVEQYRGEAIERRQAPTERELIRTADAFEEKITTADVRASKTEQLNADIMKLYFNGGKKKKLRAVDFVGTIAKIEGMTAQDIGIITIQDTVTYVEILNGKGPLVLRAMKTTKVKGKQLKVYEAFKK

SEQ ID NO: 27425 - protein, 263 aa, Bartonella alsatica
  misc_feature (7)..(7): Xaa can be any naturally occurring amino acid
NAVNNMXDAGLQGVDFVVANTDAQALAMSKAERVIQLGAAVTEGLGAGALPEVGQAAAEECIDEIIDHLADSHMVFITAGMGGGTGTGAAPVVARAAREKGILTVGVVTKPFQFEGARRMKTAEAGIEELQKSVDTLIVIPNQNLFRIADEKTTFADAFAMADQVLYSGVASITDLMIKEGLINLDFADVRSVMHEMGRAMMGTGEASGEGRALNAAEAAIANPLLDDTSMRGARGLLISITGGRDMTLFEVDEAANRIREEV

SEQ ID NO: 27426 - protein, 366 aa, Arabidopsis thaliana
MALSAIGFEGYEKRLEVTFFEPSIFQDSKGLGLRALTKSQLDEILTPAACTIVSSLSNDQLDSYVLSESSFFVYPYKVIIKTCGTTKLLLSIPPLLKLAGELSLSVKSVKYTRGSFLCPGGQLFPHRSFSEEVSVLDGHFTQLGLNSVAYLMGNDDETKKWHVYAASAQDSSNCNNNVYTLEMCMTGLDREKAAVFYKDEADKTGSMTDNSGIRKILPKSEICDFEFEPCGYSMNSIEGDAISTIHVTPEDGFSYASFEAVGYDFNTLDLSQLVTRVLSCFEPKQFSVAVHSSVGANSYKPEITVDLEDYGCRERTFESLGEESGTVMYQTFEKLGKYCGSPRSTLKCEWSSNNSCSSEDEKDEGI

SEQ ID NO: 27427 - protein, 335 aa, Frankia sp. CcI3
MAQDYYQLLGVGRGASAEEIQQAYRRLARRYHPDVNRGPEAEERFKEIGEAYRVLSDPKTRARYDRFGADFRRIPEDYDGRVTAGPDFGQAGRGWSRTGRVRAEPSFGGADFADGTDFADFADRGFGRAGPGGAGLGGSIFGDLFGDLFGAHGATGPIPGADQEAELELTVEEAYRGGRRQITLAGPGGSPRSYQVTIPRGVVEGQRVRLAGQGGRGSRHGQPGDLYLHVKIAPHPYYRLSGRDINVPLPVTPWEAALGARVPVTTPGGEIKVRVPAGSSSGRRLRLRGAGLPNPTGPPGDLHAEVRVAVPPALTARERALFEQLAAVSAFDPRT

SEQ ID NO: 27428 - protein, 263 aa, Bartonella vinsonii subsp. berkhoffii
NAVNNMINAGLQGVDFVVANTDAQALAMSKAERVIQLGAAVTEGLGAGALPEVGQAAADECIDEIIDHLADSHMVFITAGMGGGTGTGAAPVVARAAREKGILTVGVVTKPFQFEGARRMKTAEAGIEELQKSVDTLIVIPNQNLFRIADEKTTFADAFAMADQVLYSGVASITDLMIKEGLINLDFADVRSVMHEMGRAMMGTGEASGDGRALAAAEAAIANPLLDDTSMRGARGLLISITGGRDMTLFEVDEAANRIREEV

SEQ ID NO: 27429 - protein, 146 aa, Phaseolus vulgaris
MGAFTEKQEALVNSSWEAFKGNIPQYSVVFYTSILEKAPAAKNLFSFLANGVDPTNPKLTAHAESLFGLVRDSAAQLRANGAVVADAALGSIHSQKGVNDSQFLVVKEALLKTLKEAVGDKWTDELSTALELAYDELAAAIKKAYA

SEQ ID NO: 27430 - protein, 263 aa, Bartonella schoenbuchensis
NAVNNMINAGLQGVDFVVANTDAQALAMSKAERVIQLGAAVTEGLGAGALPEVGQAAANECIDEIMDHLANSHMVFITAGMGGGTGTGAAPVVARAAREKGILTVGVVTKPFQFEGARRMKTAEAGIEELQKSVDTLIVIPNQNLFRIADEKTTFADAFAMADQVLYSGVASITDLMIKEGLINLDFADVRSVMHEMGRAMMGTGEASGEGRALKAAEAAIANPLLDETSMCGARGLLISITGGRDMTLFEVDEAANRIREEV

SEQ ID NO: 27431 - protein, 323 aa, Mycoplasma genitalium G37
MDKIAILTSGGDASGMNATIAYLTKYAIAKQLEVFYVKNGYYGLYHNHFITSKELDLTDFFFMGGTVIGSSRFKQFQDPSLRKQAVLNLKKRGINNLVVIGGDGSYMGAKALSELGLNCFCLPGTIDNDVNSSEFTIGFWTALEAIRVNVEAIYHTTKSHNRLAIIEVMGRDCSDLTIFGGLATNASFVVTSKNSLDLNGFEKAVRKVLQFQNYCVVLVSENIYGKNGLPSLEMVKEHFENNAIKCNLVSLGHTQRGFSPNSIELFQISLMAKHTIDLVVNNANSQVIGMKNNQAVNYDFNTAFNLPKADRTKLLNQVNTAII

SEQ ID NO: 27432 - protein, 363 aa, Neisseria meningitidis MC58
MSHISPIPEILADIKAGKMVIITDAEDRENEGDLLMAAQFVTPEAINFMIKHARGLVCLPMDGEMVEKLGLPMMTQKNGAQYGTNFTVSIEAAHGITTGISAADRALTIQTAVSPTAKPEDIVQPGHIFPLRAQKGGVLVRAGHTEAGVDLAQMNGLIPASVICEIINDDGTMARMPELMKFAEEHKLKIGTIADLIEYRSRTESLLEDMGNAPVQTPWGEFQQHVYVDKLSGETHLALVKGTPAADTETLVRVHEPFSVMDFIQANPRHSWSLPKALEHIQQAESGVVILLHRTEDGASLLDRTLPKGANQAYKWDSKSYGIGAQILAGLNVKKLRVLGQPSSFTGLTGFGLEVVGFEEAEK

SEQ ID NO: 27433 - protein, 321 aa, Synechococcus elongatus PCC 6301
MSETQQPTVIITGASSGVGLYGAKALAARGWHVVMACRNLQKAAEAAKSLGINPENYSLMEIDLGSLASVRRFVDQFRATGRSLDALVCNAAVYLPRLKEPQRSPEGYEISVATNHFGHFLLCNLLLDDLKRSPAPEKRLVILGTVTANSKELGGKIPIPAPADLGNLEGLEAGFKAPIAMIDGKKFKPGKAYKDSKLCNMITTRELHRRFHDSTGIVFGSLYPGCVADTPLFRNTPKLFQKIFPWFQKNITGGYFTQELAGERVAQVVADPEFKTSGVHWSWGNRQQKDRQSFVQELSDKASDDRTAQRLWDLSAKLVGL

SEQ ID NO: 27434 - protein, 925 aa, Pseudoalteromonas tunicata D2
MTKLGLRDWILVLASVPTLLIGLLLGGYFTLNRYLDLNDFLLDQGITIIEPLAIATEQPLAERNKKLLNRLVSQSHNKHAPLIKSIAIFDANKELLITSNYHKDFHLLTPFNVVPNQGLTSKETDNHLVLSLPILDHNNLDNGLLLTAEQTLLGYIVLELNQNQALVGQQKALLVSGFIILLAFFISILMALRFSKLFLTPMSKLLFAIDKLKEGDQDTSINEPMRGEFELLRQGLNSIAHNMMLQKDEMQKHIDQAISDYRETLEQYETQNIQLNIAKKEAQDANRVKSDFLAKMSHELRTPLNGVVGFTRQLYKTPLNKHQKDYLDTIELSANSLLAIINDILDFSKLEAGAMELESIHFQLRDTVNEVLTLLAPSAHDKNLELSINIHDNVPDSLIGDPTRFKQILINLISNAIKFTESGHVLIDVDCRHYANQRTSIFVAINDSGIGISANKQDALFSAFGQADSSITRKFGGTGLGLIITKHLVEAMGGHISLNSAVGKGSCFTFNAFFEQPKRHYSDNLPTTPLEQKRVLYFETHHHTHEATQSLLQSWNMHVTACLSLAELEQALTGEFSFDIAILGHAASLDNMSEIKSLVNRVRPQCDYLYLMVNTVSHNMREAFIGTGADACLSKPLNHRKLCESLAAPYRLDHPSIQTPEQAQRILPIKVLVVDDNDANLKLMCTLLAEQIEFIDTAHNGSQALSLAKTHKYDLIFLDIQMPIMDGVTACKLIIESSINESTPIIAVTAHALAGEKENLLKVGFKNYLTKPLDEEVLRQTIFEYSPDFGKSKTLIAQPIESKPVVAPFDSKRIDWPLALQRAGGKVELAHEMLNMLLLSVPETLAELRDATELEDKQRVLNIVHKFHGACCYTGVPKLKQLAETIETALKQDQSLSQIEPELFELDDELVNLMIDAQAQIATPA

SEQ ID NO: 27435 - protein, 403 aa, Arthrobacter keyseri
MGSSIGGVRTAQSLRLEGYEGRIVLVGEETELPYDKPPLSKTVLAGTATEASICLLDRDQAQELGIELQLGRAATGIDIAGNLLNLQGQEALHFDNLVIATGASARPSPWGQRPGIHVLRTLDDGRSLRADLAKGGHLAVVGAGFIGAEAAATARALGLEVTVIDPLPIPMSRIFNAEVGQWFGDLHSSNGVKTIFGTGVESIDGEQGSFALRLTNGQNLEAATILVGIGAVPNDAWLASSGLLVDNGLVLDEYCRTVDAPHIYGVGDVARWRHQKHGEDIRIEHWTNAVEQAACVAYNITHPETPRAYTPVEYVWSDQHDWKIQVVGRVGGKAEHVVIGHPEVHGRFAALYTVDGTSLSGAAIVNWPKALLACRRGMGTGITVQELREKLEPMLDPQPLAAS

SEQ ID NO: 27436 - protein, 165 aa, Vibrio angustum S14
MKDLLPDLCDHYEQDIHFLPIGCHDYGGRNIFYGQCVTLRCFEDNSLVRDILSQDGAGKVLFIDGHGSCRRALLGDQLALLAIKNNWQGIIVNGAVRDIATLATLNLGVKALGGCPIKTVKRQMGELNVTLNISEKLVYPGDYIYADLNGIILSKQALDLSVLND

SEQ ID NO: 27437 - protein, 491 aa, Malus x domestica
MTSILMGYDIGVMSGASIYIEKDLKVTDTQIEIMIGVIEIYSLIGSAMAGKTSDWVGRRYTIVISGAIFFIGAILMGFSTNYTFLMCGRFVAGIGVGYALTIAPVYSAEVSPTSSRGFLTSFPEVFVNIGILLGYLSNYAFSFCPLDLGWRLMLGVGAIPSVGLAVGVLAMPESPRWLVMQGRLGEAKRVLDRTSDSKEESMLRLADIKEAAGIPEECNDDIVQVSGHSHGEGVWKELLVHPTPTVRHILIAAIGFHFFQQASGIDALVLYSPRVFAKAGITSTNQLLLCTVGVGLSKTVFTLVATFFLDRVGRRPLLLTSMAGMVGALVCLGTSLTMVDQHEGVRMTWAVILCLCCVLAYVGFFSSGIGPIAWVYSSEIFPLRLRAQGCGMGVAVNRLMSGILSMTFISLYKAITMGGTFFLYAAIGTVGWIFFFTMLPETQGRTLEDMEVLFGKFHKWRKANKLLEKKKRVAHGDIGTSDPDNRAHLLA

SEQ ID NO: 27438 - protein, 239 aa, Zea mays
MDSDLWISRLMAAKRQFALQRAQRQHAAPASHHDRFGYDDIEPEDDVRSDFPCPYCYEDHDVTSLCAHLEDEHPFESKIVSCPVCLARISKNLLDHITLQHGYLFKLQRHHRVRRVTGNGNHNLSYAGRDLQLQETYLKVLLGNSSRSSSTNASSTVTDSLLSSLVLNLSSLEVEDTSKSSAPSVVENNWFKRSLPSKTWKLSAVDSSLSHEERERRRRRAVVRSAFVQHLLVTTLFED

SEQ ID NO: 27439 - protein, 138 aa, Shorea fallax
EKNIPVLLGLLSIWNVSFLGYPARAILPYSQALEKFAPHIQQVSMESNGKGVSIDGVLLPYEAGEIDFGEPGTNGQHSFYQLIHQGRVIPCDFIGSAKSQQPIHLKGEVVSNHDELMSNFFAQPDALAFGKTPEELHK

SEQ ID NO: 27440 - protein, 487 aa, Sinorhizobium meliloti
MRAQPKASHFIDGEYVEDAAGTVIESIYPATGEIIARLHAATPGIVEKAIAAAKRAQPEWAAMSPTARGRILKRAAELMRQLNRELSELETLDTGKPIQETIVADPTSGADSFEFFGGVAPAALNGDYIPLGGDFAYTKRVPLGVCVGIGAWNYPQQIACWKGAPALVAGNAMVFKPSENTPLGALKIAEILIEAGLPKGLFNVIQGDRATGPLLVNHPDVAKVSLTGSVPTGKKVAGAAAAELKHVTMELGGKSPLIVFDDADLESAIGGAMLGNFYSTGQVCSNGTRVFVQRKIKEPFLARLKERTEAIVIGDPLDEATQLGPMVSAAQRDKVFSYIGKGKAEGARLVTGGGIPNNVSGEGTYIQPTVFADDTDGMTIAREEIFGPVMCVLDFDDEVEVIARANATEFGLSAGVFTADLTRAHRVADRLEAGTLWINTYNLCPVEIPFGGSKQSGFGRENSVAALNHYTELKTVYVGMGPVEAPY

SEQ ID NO: 27441 - protein, 198 aa, Oryza sativa (japonica cultivar-group)
MASRKLVLGLTAARRLRSRAPVLVSSSPFLEASTSTSDATAATATRGSGLGPWGLFLSSRALSSTRPVSLSAGDAPGSSAADHRSILPEDEYHKLADETIHDLLEKLEEYGDSLQMDGFDIDYGNQVLTLRLGELGTYVVNKQAPNRQIWLSSPVSGPSRFDWDAPTNCWIYRRTGANLVELLEKEIGELCGTPVELS

SEQ ID NO: 27442 - protein, 202 aa, Oryza sativa (japonica cultivar-group)
MEVEASYSYGFLPSGRHQPYAPPPPHPAEEGELWEYFPCPFCYIEVEVPFICNHLQEEHCFDTRNAVCPLCADNIGRDMGAHFRVQHSHLLKRRKPSRPSSSWPTPSNNSDPYFEGPPQYMMNNRTYQDPAPDPLLSQFICSMAQTDTNSDNTNTEIAVSAVSHDQRLSQRVTLTDDASKLELKERLQRIEFVKEIIMSTIL

SEQ ID NO: 27443 - protein, 427 aa, Triticum aestivum
MIEGARFHNMLGGGGAGIGGGRGKLENEGNGFYDMPYYHKVGESSHMSVDSADNMNSMNYVGGSVAMSVDNSSVASNESRTVMLNHPGLRDVPTPNYSVCNSVIYPNKAAASVLKEDALARVLMDPTHPTEILTNYEAWTIDLGKLDMGAPFAQGAFGKLYRGTYNGEDVAIKLLEKPENDLERAQLMEQQFVQEVMMLSTLRHPNIVRFIGACRKSIVWCIITEYAKGGSVRQFLARRQTKSVPLRLAVKQALDVARGMAYVHALGFIHRDLKSDNLLISADKSIKIADFGVARIEVKTEGMTPETGTYRWMAPEMIQHRPYDHKVDVYSFGIVLWELMTGMLPFTNMTAVQAAFAVVNKNARPAIPQDCLPALSHIMTRCWDANPEVRPSFNEVVTMLEAAETDVVSNVRKARFRCCISEPMTTD

SEQ ID NO: 27444 - protein, 427 aa, Methanosarcina acetivorans C2A
MKYDVVVVGAGPVGSTAARYAAMNGAKVLLLEEHSSIGSPVGCTGLLSTRAVEECELRPSDEFVFNSVRGAFVHAPDGQCLPIDGKKTKAYVISRKNFDRTLAVMAVEEGVELSLKTRAVGLEKENFDAETGTKRNGNGKENGNKKNSPVKLKVLRNGKPETISTSVVIGADGVKSRIASHAGLGKPARILPGIQIEAPYTSDDSDFVELFPGSSAPGFFAWTVPLNEKVSRIGLALDSGLAGKSGPGGSSPLFYLEKLLCSNPHIKARYSDGMLDFVVGGIPVGPQGRTFSDGILLAGDAAGQAKPTSAGGVYTGAFAAKIAGKIAAEAALEGDNSARRLSEYDRLWRKGLEKELEIGMKIHDYMGKLEDNQLNELIGSLNTPSILNTITEYGDMDHPSVLVRKLMFSGNSLRLVKAFGTFLKTLF

SEQ ID NO: 27445 - protein, 339 aa, Ipomoea batatas
MASNSLKLLVALALVFATSAYLATSRTLSDSLMVVRHEQWMAQYGRVYKTEAEKTKRFNIFKENVEYIESFNKAGTKPYKLGINAFADLTNQEFKASRNGYKLPHDCSSNTPFRYENVSSVPTTVDWRTKGAVTPVKDQGQCGCCWAFSAVAAMEGITKLSTGNLISLSEQELVDCDVKGTDQGCEGGLMDDAFSFIINNKGLTTESNYPYQGTDGSCKKSKSSNSAAKISGYEDVPANSESALEKAVANQPVSVAIDAGGSDFQFYSSGVFTGECGTELDHGVTAVGYGIAEDGSKYWLVKNSWGTSWGEKGYIRMQKDIEAKEGLCGIAMQSSYPSA

SEQ ID NO: 27446 - protein, 255 aa, Triticum aestivum
  misc_feature (227)..(227): Xaa can be any naturally occurring amino acid
MTAKVAGCRKRGAEAFMEDPFAALPPLNTKRGRCSPSAAADVAELGVSMDFDPVDALQLIFPGADPQLLRGYFEASGNVLDAAIRGFKDYLASGSSPTNADAASSGVASDVAKMNTPTDGTDWAELIVKEMSAASDLIDAKNRAFRILELFDKSAADCNTPDEKQKMCEEHKILKQMLGGLLHQNGVLKRAFLIQHNRLKDYQDMVQERSQFKEIVGKYQQQIKALXDRNYVLSLHLAQSDHRSGISGHRNPDVF

SEQ ID NO: 27447 - protein, 242 aa, Glycine max
MGLHHHHHRKLMPLPEKICGLICHVKKSEPCSSDCKVCLKICLTNPQYPSFYYSPPPPQVPPFQSYDDVVDGADQAYNHKISTYLFLALALLTAAFFVVSCRAIYTRFSSRRRVSSPLTSRRQTQTHHDDDDFVDDEEHHGRMVDHPIWYIRTLGLQQSIINAITVCKYKKGEGLIEGTDCAVCLSEFQEDENLRLLPKCQHAFHLPCIDTWLRSHTNCPMCRAPIVAEIESSSFDSNSLGK

SEQ ID NO: 27448 - protein, 506 aa, Bradyrhizobium sp. BTAi1
MAAVQETIDRVKGIDVDQYRYGFETVIESEKAPKGLSEDTIRFISAKKNEPAWMLEWRLEAYRRWLTMTEPTWARVGYPKIDYQDLYYYAAPKPKKKVASLDEIDPEILKTYEKLGIPLREVELLEGVERPAAAAETDADGEAAAPRSKIAVDAVFDSVSVATTFKEELKKAGVIFMPISEALREHPDLVQKYLGTVVPTTDNYFATLNSAVFSDGSFVYVPSGVRCPMELSTYFRINERNTGQFERTLIIADKGAYVSYLEGCTAPQRDENQLHAAVVELVALDDAEIKYSTVQNWYPGNSEGVGGIYNFVTKRGDCRGANSKISWTQVETGSAITWKYPSCILRGDNSSGEFYSIAISNGFQQVDSGTKMIHLGKNTSSRIISKGIAAGKSQNTYRGLVSAHRKASGARNFTACDSLLIGDKCGAHTVPYIEAKNSSAVFEHEATTSKISEDVLFYCIQRGLSQEEAVGLVVNGFVKDVLQQLPMEFAVEAQKLISISLEGSVG

SEQ ID NO: 27449 - protein, 334 aa, Bacillus clausii KSM-K16
MSTVRNIALITSGGDAPGLNGAIAAIAQTPDVNLYFYHGGFDGIIEQDPIAISPTTAREAVQQGELLCFSGRSTHMLHEAGQKRVLEKLKQDCIDALIVCGGNGSAQGARSLSAGLPVAVVPMTIDNDIGGSEYTIGHDTAVNAIAESLHRLRQTAANLPGRIFMVETFGGRCGQLPLAAAVAASADIVLLPEYELNIDKFITEVNARSARGKSVIIVVSEGIYLNKRFSAGDQGVSFALARALEESTGKRVRLSILGYTQRAGDPTSYDCLMAKQMGQCAVDALLNGEKAMLVALKEGRVKAIPLTAIEQAPTLAKELLQLAFKENQLIQLEG

SEQ ID NO: 27450 - protein, 231 aa, Hevea brasiliensis
MDVFPQYSDSLPFATHSCSLHYPESSTLSDTCSALRANLSDEEVLLASSYPKKRAGRKKFRETRHPIYRGVRRRNSGKWVCEIREPNKKSRIWLGTFPTEEMAARAHDVAALALRGRSACLNFADSSWRLPVPASREAKDIRKAAAEAAMAFQPEGTEGFSGELKQENKWTTESAPEDVFYMDEEAVFAMPGLLASMAEGMLLPPPQCVAGSGGEDGEMDAADVSLWSFSI

SEQ ID NO: 27451 - protein, 651 aa, Pseudomonas fluorescens PfO-1
MSELIRVPDIGSGEGEVIELFVKVGDRIEADQSILTLESDKASMEVPAPKAGVIKSLKVKLGDRLKEGDELLELEVEGAAQAAPAPAAAPAAKAEAAPAAAPAPAAPAAAPAAASVQQVHVPDIGSSGKAQIIEIQVKVGDTVEADQSLITLESDKASMEIPSPAAGVVKAISVKLNDEVGTGDLILDLEVAGAAAPAAAAPAQAAAPAAAPAPAAAPAAPVADSVQDIHVPDIGSAGKAKIIEVLVKAGDSVEADQSLITLESDKASMEIPSPAAGVVESISIKLDDEVGTGDLILKLKVKGAAPAAAPAPAAAAAPSAPAPAAAPAAAAPAAAAPVAAPAKPGAKVHAGPAVRQLAREFGVELSAVGASGPHGRILKEDVQTYVKAMMQKAKEAPAAAAGATGGAGIPPIPVVDFSRFGEIEEVPMTRLMQVGAANLHRSWLNVPHVTQFDSADITELEAFRTAQKSVAEKAGVKLTILPLLLKSCAHLLKELPDFNSSLAPSGKAIIRKKYVNIGFAVDTPDGLLVPVIKNVDQKSLLQLAAEAASLAEKARTKKLSSDEMQGACFTISSLGHIGGTGFTPIVNAPEVAILGVSKATIQPVWDGKAFQPKLMLPLSLSYDHRVINGAAAARFTKRLSDLLADIRTILL

SEQ ID NO: 27452 - protein, 291 aa, Nitrosomonas europaea ATCC 19718
MAILIDRHTRVMTQGITGKTGQFHTRQCREYAYGRDCFVAGVNPKKAGEELESIPVFATVEEAKQKTGATVSVIYVPPAYASAAIDEAVEAGLDLVVCITEGIPVRDMLRTRARMRGKKTLLIGPNCPGIITPGELKIGIMPGAIHQQGRIGVVSRSGTLTYEAVAQLSELGLGQSTCIGIGGDPINGLKHIDVLKLFNEDSETDAVLMVGEIGGTDEEECARWVKEHMKKPVVGFIAGVTAPPGKRMGHAGAIIAGGKGTAQEKIEVMEACGIRVTRNPAEMGKLLKSVI

SEQ ID NO: 27453 - protein, 440 aa, Raphanus sativus
MKGVRKTYDNSYTLSFLFVFFVFILFCPAFSINTLSSTESLTISSNRTLVSPGNVFELGFFRTNSSSRWYLGLWYRKLSERTYVWVANRDSPLSSSIGTLKISGNDLVILGHSNRSVWSTNVTRRNERSPVVAELLANGNFVMRDSNNNNASGFLWQSFDYPTDTLLPEMKLGYDLKKGLNKKGLNRFLTSWRSLDDPSRGDYSYKLEPRRLPEFYLFNDDFRVHRSGPWNGVRFSGIPEDKLSYMIYNFFENSEEAAYTFLMTNNSFYSRLKISSSGYLQRLTWTPSSFVWNLFWSSPVNTQCDLYMACGPYSYCDVNTSPMCNCFQGFMPWDKQQWELRKPSGGCIRRTRLSCSGDSFTRMKNMKLPDTTMATVDRSIDVKECEKRCLSDCNCTAFANADIRDGGTGCVIWTGDLEDIRTYHAEGQDLYVRVAAAGLV

SEQ ID NO: 27454 - protein, 406 aa, Brassica napus
MAAALQTNIRPVKFPATLRALTKQSSPAPFRVRCAAASPGKKRYNITLLPGDGIGPEVISIAKNVLQQAGSLEGLEFSFQEMPVGGAALDLVGVPLPEETVSAAKESDAVLLGAIGGYKWDKNEKHLKPETGLLQLRAGLKVFANLRPATVLPQLVDASTLKREVAEGVDLMVVRELTGGIYFGVPRGIKTNENGEEVGYNTEVYAAHEIDRIARVAFETARKRRGKLCSVDKANVLDASILWRRRVTALAAEYPDVELSHMYVDNAAMQLVRDPKQFDTIVTNNIFGDILSDEASMITGSIGMLPSASLSDSGPGLFEPIHGSAPDIAGQDKANPLATILSAAMLLKYGLGEEKAAKRIEDAVLGALNKGFRTGDIYSAGTKLVGCKEMGEEVLKSVDSHVQASV

SEQ ID NO: 27455 - protein, 314 aa, Caulobacter crescentus CB15
MARDPYQELGVTRTASADEIRKAFRKLAKQYHPDANSGDKKAEERFKQVSAAFDIVGDAEKRKKFDLGQIDADGRETMRGFGGQPGNGPFNAGGFGQGGFHRSNEGPEIDLSDLFGGMFGGGGPGGAGRGPFSGGAGGGFSAKGADVKARLDIDLEDAIKGGKKRVAFSDGRTIDVTIPTGAQEGQTLRLKGQGSPGRGGQGDALIELAIKPHPIYRREGEALVMDLPVSIPDAVLGGKVEAPTPDGNVMLAVPKGSNSGQTLRLKGRGMPDGKGKRGDLLARLVVTLPETVDQDLEKFAEAWRAQKPYTPKRK

SEQ ID NO: 27456 - protein, 349 aa, Magnaporthe grisea 70-15
MAKTEKAFTNAEKILMAKAWIYGIRPFFKHGKNFNPTRDIPPQTGKTMLVTGGASGIGAAFVAEIARHSPAQVWIADLRPEAAEKAISAISAECPDVKIDFLQIDLGDAESVKRAASEFLSRTERLDVLLNNAGILPAKGWTTKDGYESMFGVNFVGHARLTELLLPRLMETAAIPGADVRVVSVASGGHGVHPKPDGVRLSSGGALLKEPTCGGMTAMQRYAQSKLAVILWVRRLAREFPAITIVSAHPGTVATSIANDLSGSTRQPPAFFVKLTGTKTPEMGCYNQLWCATAPRDQLVSGKYYCPVGLPDQEFGIARDRKKADELEERLWVWLQKELKGDSFVKVDA

SEQ ID NO: 27457 - protein, 166 aa, Glycine max
MAEQSSNSIYDFTVKDISGNDVSLNDYSGKVLLIVNVASQCGLTQTNYKELNVLYEKYKNQGFEILAFPCNQFAGQEPGNNEEIQEVVCTRFKAEFPIFDKVEVNGKNAVPLYKFLKEKKGGIFGDGIKWNFTKFLVNKEGKVVDRYAPTTSPLKIEKDIEKLLQS

SEQ ID NO: 27458 - protein, 326 aa, Borrelia garinii PBi
MLEFETINVNLTKKENLSQKEIEFIEDVIILGSGPAGLTAGIYSVMSNYKVTILEGPEPGGQLTTTTEVYNYPGFKNGISGRDLMLNMREQVVNLGAKTFPETVFSIKRENSIFYLYTENYIYKSKAVIIAVGSKPKKLETLKNSDLFWNKGISVCAICDGHLFKGKRVAVIGGGNTALSESIYLSKLVDKVYIIVRKDYLRAIAMLRDSVAKLPNIEIFYNSEAIEVDGESSVSSIKIFNEKDNVVNKLKVNGVFMAVGYKPNTEFLKGFLDLDEEGFIITKDIVKTSVDGVFSCGDVSNKLYAQAITAAAEGFIASVELGNFLK

SEQ ID NO: 27459 - protein, 761 aa, Corynebacterium efficiens YS-314
MSLERNPQKSTIGVRSMSARLARSLTGTRMRTNPVLDPLLSIHRQFHPKADGAVLERAYSTAERLHEGVVRKSGDPYITHPLAVATIAAEIGMDTTTLVAALLHDTVEDTDYSLDDLTRDFGEEVARLVDGVTKLDKVALGAAAEAETIRKMIVAMSQDPRVLVIKVADRLHNMRTMRFLPPEKQAKKARQTLEVIAPLAHRLGMASIKWELEDLSFAILYPKKYEEIVRLVADRSPSRDRYLKEIIDQVTAGLHDNNIPAEVLGRPKHYWSIYQKMIVRGRDFDDIFDLVGIRILVDNVNNCYAAIGVVHSLFNALPGRFKDYISAPRFGVYKSLHTTVMGPGGKPLEVQARTHEMHYNAEFGIAAHWRYKETKGSHTGDREEVDQMAWMRQLLDWQKEAADPNEFLDSLRYDLTSKQIFVFTPKGDVVNLPVDSTPVDFAYAVHTEVGHRCIGAKINGKLVALETKLKSGDRVEVFTSKDPNAGPSRDWQDFVVSPRAKAKIRQWFAKERREEYLEAGRDALAAVIQRGGLPMHRLFTATTMKRVATELHYSDVDALYTAIGSGSVSAQHVVNRLVAIFGDQEDAEDALVDRTPFSELVESRAATGNNESGILVEGSPDVLAKLAKCCMPVPGDEIFGFVTRGGGVSVHRTDCTNAEKLREEPERMVQVAWASEGQGSVFSATLQLEALDRAGLLFELTRVINEQKVSVTAMNSHCSDDRVATVRFTFAVSDTKQLGSLMTQLRNAEGVFDVYRVTSGG

SEQ ID NO: 27460 - protein, 709 aa, Oryza sativa (japonica cultivar-group)
MPAWWPRKSRSKAKGVGKPPGAGAASAASSPRKSLDLVDLSASPSVTPRAREKARSLDSPSAAAPRHGGGRCGGGFGEVGYKLPVPVGDAGPGGQGQGQEPELEPAPVRFEENGDVVGGVAGDASSEELSVCSHDSSDEATDQQVCRSTDPASFVRGRNMPSDSHKILNEDNHFMSYSMPREHRKFFEVPVTNMGELHLHCDDLSTSETSSRGRMLPEDFLAPRTRSLSPGPKGHTFAVNNVNSREFGFSPRSPVKMMDGLKSPPHPLPLPPGPATCSPLPPSPTAYSPHPLGPTTCLQSESQWKKGKLLGSGTFGQVYLGFNSENGQFCAIKEVQVISDDPHSKERLKQLNQEIDMLRQLSHPNIVQYYGSEMTDDALSIYLEFVSGGSIHKLLREYGPFKEPVIRNYTGQILSGLAYLHGRNTVHRDIKGANILVGPNGEVKLADFGMAKHISSFAEIRSFKGSPYWMAPEVIMNGRGYHLPVDIWSLGCTIIEMATAKPPWHKYEGVAAIFKIANSKEIPEIPDSFSEEGKSFLQMCLKRDPASRFTATQLMDHPFVQDHPAVRAAKSGALRNAFAPADGTHTTSNREFSRKSITPLKDIGVSARDFTGFSTAVPSPHTASSPISVVRTNMSLPVSPCSSPLRQFKQSNWSCLPSPPHPTFSNGATSYNLSSYMMNETRRIPTISDTWQDISQLKVQSPYGSPKRF

SEQ ID NO: 27461 - protein, 375 aa, Buchnera aphidicola
GRTSIDNLCRIVESAIKAGATTINIPDTVGYTIPSQFKTIIKNLFNKVPNINNAIISAHCHDDLGLAVGNAIASIEAGVRQIEGTISGIGERAGNTALEEVILTIKLKEELLNVFTNIKHNELYRTSQLISQLCNTPIPANKSIIGSNAFAHSSGIHQDGILKNRANYEIIDPKTIGVKAVQLNLTSRSGRAAVKHHMHEMGYQDDDYDLNQLYVNFLKLADKKGQVFDYDLEALAFISNQEDKDQEHFQLKYFSIHSGSTGVSTASVKLLCGNKILNEIITTRNGPINSIYQALNNIAGLPIVLEKFHLVGKGEGRDALGQVDIVVKYNNRKFHGIGLATDIIESSIKAMLNVLNNIWLSNKIKSKIKNIKNKK

SEQ ID NO: 27462 - protein, 314 aa, Aspergillus nidulans FGSC A4
MFARQSTRFLFPRTTTVITRVRLYSSAAPSYEHILTSTPKPGVGLNTDFTVIVTLNRPKALNALSSPLFKEVNDALSKYDESKDIGAIIITGSEKAFAAGADIKEMAPLTFASAYSNNFIAPWSHLANSIRKPVIAAVSGFALGGGCELALMCDIIYCTASATFGQPEIKLGVIPGAGGSQRLTAAVGKSKAMELILTGKNFSGKEAGEWGVAAKVVDGGKEELLEEAVKTAETIAGYSRVATVAAKEVVNKSQDLGVREGVEYERRLFHGLFGSQDQKIGRFLSLYHYSKNGTDGEKGMTAFAEKKKPQWSHE

SEQ ID NO: 27463 - protein, 369 aa, Mycoplasma genitalium G37
MDENETQFNKLNQVKNKLKIGVFGIGGAGNNIVDASLYHYPNLASENIHFYAINSDLQHLAFKTNVKNKLLIQDHTNKGFGAGGDPAKGASLAISFQEQFNTLTDGYDFCILVAGFGKGTGTGATPVFSKILKTKKILNVAIVTYPSLNEGLTVRNKATKGLEILNKATDSYMLFCNEKCTNGIYQLANTEIVSAIKNLIELITIPLQQNIDFEDVRAFFQTKKTNQDQQLFTVTHPFSFSFDSKDSIEQFAKQFKNFEKVSYFDHSIVGAKKVLLKANINQKIVKLNFKQIQDIIWTKIDNYQLEIRLGVDFVTTIPNIQIFILSEHKNPVSLPIDNKSTENNQNKLKLLDELKELGMKYVKHQNQIY

SEQ ID NO: 27464 - protein, 137 aa, Phaseolus vulgaris
MAQKAQKNDTDFKVPEPITPCATATAAAATSISEPSRFFDAATPATSSRSPKRSLPLEDAANADRTVASEPKRAVNRCSGCRRRVGLTGFRCRCGDLFCAEHRYTDRHDCSYDYKTVGREAIARENPVVKAAKIVKV

SEQ ID NO: 27465 - protein, 318 aa, Mannheimia succiniciproducens MBEL55E
MSDIKHSKLLILGSGPAGYTAAIYAARANLNPVLVTGLEQGGQLTTTTEIENWPGDFAETTGPELMQRMLQHAEKFDTEIVFDHINRVDFSSRPFKLYGDVQTFSCDALIIATGASARYLGLPSETEYKGRGVSACATCDGFFYRNKPVAVIGGGNTAVEEALYLANIASEVHLVHRRDAFRAEKILIDRLYKKVEEGKIILHTNRNLDEVLGDNMGVTGVRLKDTQSENTEEIKIDGLFVAIGHAPNTAIFADQLELNNGYIVVKSGLNGNATATSVEGIFAAGDVMDHNYRQAITSAGTGCMAALDAERYLDALEA

SEQ ID NO: 27466 - protein, 234 aa, Glycine soja
MFTLNHSSDLYHVSPELSSSLDTSSPASEGSRGVAFSDEEVRLAVRHPKKRAGRKKFRETRHPVYRGVRRRNSDKWVCEVREPNKKTRIWLGTFPTPEMAARAHDVAAMALRGRYACLNFADSAWRLPVPATAEAKDIQKAAAEAAQAFRPDQTLKNANTRQECVEAVAVAVADTTTATAQGVFYMEEEEQVLDMPELLRNMVLMSPTHCLGYEYEDADLDAQDAEVSLWNFSI

SEQ ID NO: 27467 - protein, 138 aa, Shorea fallax
EKNIPVLLGLLSIWNVSFLGYPARAILPYSQALEKFAPHIQQVSMESNGKGVSMDGVPLPYEAGEIDFGEPGTNGQHSFYQLIHQGRVIPCDFIGSAKSQQPIHLKGEVVSNHDELMSNFFAQPDALAFGKTPEELHK

SEQ ID NO: 27468 - protein, 581 aa, Ehrlichia ruminantium str. Gardel
MLANRGFDFMENRLSSLISIMREYEIDVLLLYNTDEYQSEYIHESKQRLRWLCGFSGSNATLIISKQEKQHFFTDGRYILQAQQELDLNYYQIHNVADITPWQWCMRNLPAGVIVGYEAQLFTLNHIKKYTNHHIILKPIDDILIDRLWVRDFNVPQNIVDHDLKYSGIAGYEKAGEAIKCLHGKDVALITDTDVISWLLNIRNKDFVFNPSVLSRAILYKDGTIDFFIEDVESVNFEYEYIRIYHIDELFSVLKSIQSIVIDASTVPMNIFKHLSQKDVLVKDFDACLIMKSIKNNTEISGAVNAHVRDGVAVINLLYWLDVQLSNNARITELDVVSQLLMFRQQQDLFCGDSFATISGFAENGAVIHYKVNNETNKLICKNGLYLLDSGGQYLDGTTDVTRTIAIGEPTYEQIVNFTLVLKGHIAIAMAVFPLKTTGGMLDILARQYLWKSGLDYQHGTGHGVGSFLSVHEGPCAISYGNNIILQQNMILSNEPGYYKDGEYGIRIENLMYVEKCCDKFLRFKQLTCVPIDLNLINVDMLSKEEIDYINKYHDFVYTTVAPYLNAKVKDWLWNSCRSIK

SEQ ID NO: 27469 - protein, 295 aa, Bradyrhizobium japonicum USDA 110
MVPYTKMRCAAPQRDPGGGGINVARVLKRLGFEATAVYPAGGATGQTLTALVEREAVRSIVIPISNDTREDITIFDETSKEQFRLVFPGACLNEFEWQQCLDAIARLSPQAAFVIASGSLPPGAPADFYGRVVRASTGAAKVVVDTSGASLKAALEAGVYLIKPNLREFQELAGISGADESSLLEAGRRLIDRYRIEIIALSMGPGGALLLTRDIALRANGLPLEPVSVSGAGDSFLGAMVSRLANGDKLDSALRYGVAGGSAALLSPGTGLCLGADVHRLASNVNVTIIAGYHA

SEQ ID NO: 27470 - protein, 590 aa, Triticum aestivum
MCGILAVLGCADWSQAKRARVLSCSRRLKHRGPDWSGLFQCEGNFLAQQRLSVVSPLSGDQPLYNEDRTVVVVANGEIYNHKKIRKQFAAKHTFTTGSDCEVIIPLYEEYGENFVNMLDGVFSFVLYDTRNKTYMAARDAVGVNPLYFGRGSDGSVWIASEMKALHEDCPKFELFPPGNLYSSAAGGFRRWYNPQWFAEHVPATAYQPLVLREAFEKAVIKRLMTDVPFGVLLSGGLDSSLVASVTKRHLIETEAAKKFGTELHSFVVGLEGSPDLKAAREVADYLGTIHHEFHFTVQDGIDAIEEVIYHNETYDVTTIRASTPMFLMARKIKALGVKMVLSGEGSDELLGGYLYFHFAPNKEEFHKETCRKVKALHQYDCLRANKATSAWGLEVRVPFLDKEFIDVAMSMDPEWKLYDANLGRIEKWVLRKAFDDEKEPYLPRHILYRQKEQFSDGVGYNWIDGLKAFTEQQVTDEMMKNAAEEYPYNTPINKEAYYYRMIFERLYPQDSARETVPWGPSIACSTPAAIEWVAQWKASNDPSGRHIASHNDAAPAHAHANWNGAVANGKANGNGTANGNANANGTLVPC

SEQ ID NO: 27471 - protein, 657 aa, Hordeum vulgare
MPTMDTTDRGSYAQLPDDAEAGSAHRRRTGPLCAAILLTSAALLLAVAALAGVRVAGQLPVAGVIMSGQPTTVDVVPTTSTSSRGPEYGVSEKTSGAGAHGGMLGADAGNAFPWSNAMLQWQRTGFHFQPEKNWMNDPNGPVYYKGWYHLFYQYNPDGAIWGNKIAWGHAASRDLLRWRHLPVAMSPDQWYDINGVWSGSATVLPDGRIVMLYTGSTNASVQVQCLAFPTDPSDPLLINWTKYENNPVMYPPPGVGEKDFRDPTTAWFDGPDDMWRLVIGPKDDRHAGMVMTYKTKDFMDYELVPGLLHRVPGTGMWECIDLYPVGGVRGIDMTDAVTAASNNGGDDVLHVMKESSDDDRHDYYALGRYDATKNTWTPLDVDADLGIGLRYDWGKFYASKTFYDPAKKRRVLWGWVGETDSESADVAKGWASLQSTPRAVVLDTKTGSNLLQWPVEEVETLRTNSTDIGGVTIDRGSVFALNLHRATQLDIEASFRLDQLDIAASNEADVGYNCSTSGGAAGRGKLGPFGLLVLADARRYGGDAERTAVYFYVARGLDGGLHTHFCHDEMRSSHANDIVKRVVGNTVPVLDGEELSVRVLVDHSIVESFAMGGRLTATSRVYPTEAIYANAGVYLFNNATGIQVTTTRLVVHEMDSS

SEQ ID NO: 27472 - protein, 518 aa, Aspergillus oryzae
MIPLLILAALAVVFRLVWSIFTSLRHAQNARKWHCGAIPTYPGDILGINTLKEVLRADKEKLIPVLSAQRVETMTAREGRYVSTFRLRQMGRESIFTSDPKNMQAILATQFKEFELGSLRRNSLHPLLGSGIFSTDGEAWSRSRSLLRPQFTRDQVSDLDLEERHVQKAMAGMLADPATKWTPEIDIQSIFFRLTIDSATEFLFGDSVESQTAALSGSRIIEDKFPSYFDRGQWYAAQRARFEKLYWIVNNKESRETDRFVHAYVDRFIDAALAAVKEGKIDPEKRNSDHYVFLHGLTTATQDPVELRSQLLNILLAGRDTTASLLSWCVLLLARHPDIFQKLRNTILADFGDYRNPRNITFSSLKSCRYLHYFMNEVLRLYPIVPGNRRVALKDTTLPRGGGPDGSEPVYVRKGQPVVYSVFVTHRRKDIWGADAEVFNPDRWEDLKVGWEYLPFNGGPRICIGQQFALTEAGYVLVRLLQRFDQIVDARPEREIRFNATLTSAPWENVIVRLREGA

SEQ ID NO: 27473 - protein, 608 aa, Magnetospirillum magnetotacticum MS-1
MCGICGYVGAERPGLIQAMIAEIRHRGPDGEGCDSALGIHLGHARLAILDPSHGAQPLTGADGRYTVSYNGEIYNYPDLRRELEALGHRFETTCDTELLPLGFAAWGEGLFARLDGMFAFALRDNADGRLWLVRDQLGIKPLYYSLAGGELAFASSARALTRHPQVSRRLRPDAIQEFLQFRWVRSGRHLFSDVEILPPGGVLRWTEGEARLDRFWTPARRGPARNALPRDWAAEVELVLEDSVRRQLRADVALGIFLSGGVDSAMIGHYAARNAANRLTAFTFSTGDRVDETAQAAAMARDFGFDHRVVSLTASDFADFPQAVACLDNPVGDAVVLPTWKLCREAAREVKVVLTGEGADEMFAGYAHLPILRKLDQLGSVAGVLRLLAPLIRLMPVGLLNHLFDYQASLGRLGRDAAAELLAVAGDSGKMLARASAIMGDAEMAQATTLGPPPPRPKADLSLGGLLLDLTRGWLPEEILHKMDQLSMAHGLEARVPYVTTALYDLLLRCPDQMAMGKTLLRHVASQSGLAAARRRKVAFHLPVETLWRPQLEEMCREYLSPAMIRRHAILNEAFVGRSLSLLKAGEFLASKRLVAMVSLHAWLDAHT

SEQ ID NO: 27474 - protein, 212 aa, Cicer arietinum
GDALGEEFKGYVFKITGGCDKQGFPMKQGVLTPGRVRLLLHRGTPCFRGYGRRNGERRRKSVRGCIVSPDLSVLNLVIVKKGENDLPGLTDVEKPRMRGPKRASKIRKLFNLSKEDDVRKYVNTYRRNFTTKAGKKVSKAPKIQRLVTPLTLQRKRARIADKKKRIAKAKSEAAEYQKLLASRLKEQRERRSESLAKKRSRLSSATKPTATA

SEQ ID NO: 27475 - protein, 285 aa, Saccharophagus degradans 2-40
MSEHIVEITLENAQAQLIEESFNRPVLIDFWAEWCEPCKSLMPVLEKLANEYAGQFLLAKVNADELNMIASQFGVRSLPTVMVMKDGQPVDGFNGAQPEQTVRELLNKYLPKPWELALGRAKLLMEEEKYGEAIAELTPAYEESMQAAAVLFALVDCYINIKRFEQAEELLDSVKLVDQQDAEYGNLRSQLDIAKQAGKSPEIETLEAALAADPDNIDTKMQLAAQYTHGEYHKDALELLFPLLRKSLNAKDGEVKKQYVDILAVLGKGDPLAVEYQRKLYTLMY

SEQ ID NO: 27476 - protein, 111 aa, Nitrosomonas europaea ATCC 19718
MNLNLTGNHVEITPAMRDYVLSKIERITRHFDNIIDINVILSVDKLKQKAEATVNLRGKEIFVEADGLDMYASIDNLVDKLDRQILKYKEKNIDRRDNQGGLKDQEFEQSE

SEQ ID NO: 27477 - protein, 162 aa, Trema tomentosa
MSSSEVDKVFTEEQEALVVKSWAVMKKNSAELGLKFFLKIFEIAPSAKNLFSYLKDSPIPLEQNPKLKPHAMTVFVMTCESAVQLRKAGKVTVRESNLKRLGAIHFKNGVVNEHFEVTRFALLETIKEAVPEMWSPEMKNAWGEAYDQLVAAIKSEMKPSST

SEQ ID NO: 27478 - protein, 364 aa, Buchnera aphidicola
MTKKLYKIAVLPGDGIGPEIIQEAYKIIDVLQKKFSFNVKMHEYDIGGISIDKHGTALTQETIEGCENSDAILFGSVGGSKWDHLPEIEKPEKAGLLKLRKHFNLFANIRPCKLSQHLLDISPLKNSIIKKGIDLICIRELTGGIYFGKSNKITNIDDPYAFDTEIYFRSEIKRIAKIAFQIAQSRKKKIVSIDKANVLKSSILWRDTVNKMAYKFPNVKLEHMYIDNATMELIKNPSSFDVILCSNLFGDIISDECAAIIGSIGLLPSASLNKSGFGLYEPAGGSAPNIAGKTIANPIAQILSLSMLLKYSLHLPFLSSCIDEAVHEALVKKYMTMDISKNPQNFLKTNEIGDKISDLLAKKA

SEQ ID NO: 27479 - protein, 437 aa, Xanthomonas oryzae pv. oryzae KACC10331
MIGGGIFVITGQAAADHAGPAIMLSFVLAAVCCAFCAMAYAEFAAMVPVSGSAYTYTYATFGELAAWFIGWMLVLEYGVSASAVAVSWTGYFLSLLDHFGIHLPAAFVSAPLDGKLQPTGAIANLPAAGIVLLLTWLCYVGIRKSSAMNMAMVILKTGLILLVIAVGWKYVDTANWHPFIPANEGPGKYGMEGVLRGAAMVFFAYIGFEAVSVAAQESHRPQRDLPIGMILSLVICTVLYISMAAVMTGLLPYTLLGTDEPVVTAIAAHPQLAWLRVIVEVGALIGLSSVVLVMIIGQPRIFMIIARDGLLPSIFTRIHPKYRTPHINTVITGVGIALLAAVFPLDVLGELTSMGTLIAFAAVCAGVLILRRTHPELPRPFRMPAAWLICTAGMLSCLALLSAMTLHNWMLMGLWTLVGLVIYSGYGYRHSRLRDGR

SEQ ID NO: 27480 - protein, 291 aa, Clostridium acetobutylicum ATCC 824
MEKFRTIAITGATSGLGKLVAIELVKRDAHLILTARNKERAEATKKMLESINPKAKIDFFFGDLSVMRDVKRVGEEIKAVHPRIDVLVNNAGLHAFEQRVTSDGLAEMMAVNYLAPWLLTNTLLQSLIASRNARIVNVASEASRNHGELKLPGDLTDISEFTSRESSAIYGKTKLLNIMFTAELARRLSGTGIIVNALNPGFNVTGLGRELWFATALERILKFFHIGDPRKGADIILRLSIDAQYNSVTGGYFNVITGNPISPIYPGGDKVMQNKLWSDTETLLKQRGFIE

SEQ ID NO: 27481 - protein, 512 aa, Xanthomonas oryzae pv. oryzae KACC10331
MRRTTFVRASARLCFATYGMYRMLKSVLRVKPIEPAGLVDAGEPVEGSPQGEATLQRTLSAKHLIMLGIGAVIGAGIFVMTGQAAANHAGPAVMLSFVFAGIACTFAGLCYAEFAAMMPVSGSAYSYSYATLGEGIAWFIGWCLVLEYLFAGSSVAVAWSAYLISFITGTLGLPFPTELTNAPLAWINGEFVASGSILNLPAVMIVTAVSGLCYVGITQSAFINAIVVAIKIAVICLFVGFGAAYVDPANWHPFIPENTAPGVYGWSGVFRAASIVFFAYIGFDAVSTSAGETKDPQRNMPIGILGSLAVCTIIYIIICAVLTGLMPYTQLGTAKPVATALEAHPQLTWLKTAVEIGAIAGLSSVVLVMLMAQPRIFYTMAKDGLMPKLFGKVHPRFHTPYVGTVIVGVIAASLAGLIPLSVLGELVSMGTLLAFATVCAGVMVLRFTKPALERPFRVPLAMIICPLGTLACLALFFQAFQEHWKVFVGWTVIGLLIYFGYGIHHSYLAKRA

SEQ ID NO: 27482 - protein, 339 aa, Mycobacterium tuberculosis CDC1551
MTVRVGINGFGRIGRNFYRALLAQQEQGTADVEVVAANDITDNSTLAHLLKFDSILGRLPCDVGLEGDDTIVVGRAKIKALAVREGPAALPWGDLGVDVVVESTGLFTNAAKAKGHLDAGAKKVIISAPATDEDITIVLGVNDDKYDGSQNIISNASCTTNCLAPLAKVLDDEFGIVKGLMTTIHAYTQDQNLQDGPHKDLRRARAAALNIVPTSTGAAKAIGLVMPQLKGKLDGYALRVPIPTGSVTDLTVDLSTRASVDEINAAFKAAAEGRLKGILKYYDAPIVSSDIVTDPHSSIFDSGLTKVIDDQAKVVSWYDNEWGYSNRLVDLVTLVGKSL

SEQ ID NO: 27483 - protein, 292 aa, Vibrio fischeri ES114
MNDENSQNTEGPSRKSFLGRLSQLFQGEPKDRQELVDVFRDSEENEVIDHDTRDMLEGVMEIAEMRVRDIMLPRSQMVTVEKTQDLESLIATIIEASHSRYPVISEDKDHVEGILLAKDLLRYLGSDCEAFEIEQVIRPAVVVPESKRVDKLLKEFREERYHMAIVVDEFGGVSGLVTIEDILEEIVGDIEDEFDDEEEKDIRQLSKHTFSVKALTEIEDFNEAFSTNFSDEEIDTVGGLVLTGFGHLPESGETIEISGFTFKVTAADNRRIIQLQVTIPDKESENKDPEEE

SEQ ID NO: 27484 - protein, 112 aa, Zea mays
LCRRVKILLLEGCSLLTTRGLESVITSWGDLQSLEVVTCNKIKDEEITPTLAELFSNLKELKWRPDNKSLLAASLVGTGMGKKGRVFFKRLILPAHQRIKGKVLNNSAGVAA

SEQ ID NO: 27485 - protein, 650 aa, Oryza sativa
  misc_feature (251)..(251): Xaa can be any naturally occurring amino acid
MDFTNLLITVLLLLAPLKYKSDVATASDDEDFFKTCSSHRCSKHGPEIRYPFRLSTQPPSCGAPGMQLSCSGQDTILDHPVLGSCKVTMIYYRHVIMNAIPLVDSSPHCLLHKFISVNQSTAVYRPHTLKAASLVGCSRDSIDTNQYNSIVGPTSCLSLANNASQFWYLAYPYEYMSILPLGCTIVSKDIPMPYSYDKNGPNFDISIFTETAKRVISTGETVFTWYSSNVTSICQQCEHEGRRCGFSSQRXSSILPASYINKVETRTYPSYTTLIRKLCTCIFPAMLCKIIELVTSSVGTFIVLSLIVATALYISLKSRYNEEIHLKVEMFLKTYGTSKPTRYTFSEVKKIARRFKDKLGHGAFGTVYKGELLNGVPVAVKMLENSVGEGQEFINEVATIGRIHHANIVRLLGFCSEGTRQALIYEFMPNESLEKYIFPHGSNISRELLVPDKMLDIALGIARGMEYLHQGCNQRILHFDIKPHNILLDYSFNPKISDFGLAKLCARDQSIVTLTAARGTMGYIAPELYSRNFGAISYKSDVYSFGMLVLEMVSGRRNTEPTVENQNEFYFPEWIYERVMNGQDLVLTMETTQGEKEMVRQLAIVALWCIQWNPKNRPSMTKVVNMLTGRLQNLQVPPKPFTSSQNQLVI

SEQ ID NO: 27486 - protein, 139 aa, Triticum aestivum
MSASVMASLVLKPSPSPLLERAKLRGARPSARPSLLIVASKKAKKVQTAQPYGPGGGVVFKEGVDASGRVAKGKGVYQFADKYGANVDGYSPIYTPEEWSPSGDVYVGGKTGLFLWAVTLAGILLGGALLVYNTSALAS

SEQ ID NO: 27487 - protein, 268 aa, Medicago truncatula
  misc_feature (192)..(192): Xaa can be any naturally occurring amino acid
  misc_feature (199)..(199): Xaa can be any naturally occurring amino acid
MAISHNTLAFTFGMLGNVISFLVFLAPISTFYRIYKKKSTEGFQSLPYLVALFSSMLWLYYALLKKDAFLLITINSFGCVVETIYIILYIIYAPRDARNLTFKLLSAMNVGSFALILIVTNYAVHGPLRVQVLGWVCVSLSVSVFAAPLSIVAQVVRTKSVEFMPFNLSFTLTLSATMWFGYGFFLKDICIXLPNVLGXVLGLLQMLLYAIYRNGGEKAMKKEKKAPIEPPKSIVIETQLEKIEQEKKNKDDDNEEKDKSEEPIGCGV

SEQ ID NO: 27488 - protein, 478 aa, Oceanobacter sp. RED65
MSSFNAVWFRRDLRVHDNPALFHAMKNGQCIAFYCLAQKQWDEHQVSLRQRSLIRQQLEDLTQSLAALGVPLIVIDTADFKSIPKTFVSVLQQYNVEQLFCNAEYEVNEVALTKNVTEALQQQDIKCHEYHDQCLIQPGVIVNKQDQPYKVFTAFKKAYLAQLDIYMRDLYPLPKKQQAPKVKTDISALQSIAQVDIDPWQGSEQVALDALDEFCKDRIKAYKRDRDIPSLDGTSTLSPYLAIGSLSVRQCWQMSQQVSPSGSKPEGIATWQSELIWRDFYRHLIYFFPHVCQYKAFKQETDHLPWKKDQALFQAWCDGRTGYPLVDAAMRQLNQTGWMHNRLRMVAAMFLSKHLFIDWRLGEAYFMQQLIDGDLASNNGGWQWSASTGVDAVPYFRIFNPIRQSERFDSKGTFLRQYVPELASLDDKRIHNPDPITVKKLGYPAPIVDHKQAVVQTKQWFKELDASNKEFYSQESLI

SEQ ID NO: 27489 - protein, 440 aa, Zea mays
MSSSDETTGGSVAIAIVSVITGGIVVIVVSVLIYKCCKLRMIRKYGYGGDDDLPLRPVERWRAESVPVPPTGSSSSSYGTVDVVKDRPVRFSSSQLSEFTANYSERLGAGGFGVVYRGQIQLPAGGQGSSSTSLAVAVKVLGSNMGRRAEEQFMAEIGTIGRTSHVNLVRLYGFCFDADLKALVYEFMPNGSLDHHLFHDHDSDQNQKLGFGKLYDVAVGTAKAVRYLHDECERRIIHYDIKPGNVLLDEAFRPKVADFGLARLCERERTHVTMTGGGRGTPGYAAPELWMAAPATHKCDVYSYGMLLFEILGRRRNYVDDDVDGGARDAAAADSAERWYPRWVWQRLERGETEALAARALASKAGKEGRKKVERLCAVALWCVQYRPDDRPSMSGVVRMLEGDEDVAAPAVNPFAHLDSDLLSSRTSTAYTTTTFGSAA

SEQ ID NO: 27490 - protein, 366 aa, Schizosaccharomyces pombe
MIRLQKFGEIVGTSRSWKLLSSTIAKRYSSSSNGVKEMTVRDALNSAMEEEMKRDDRVFLIGEEVAQYNGAYKISRGLLDKFGPKRVIDTPITEMGFTGLATGAAFAGLRPICEFMTFNFSMQAIDHIVNSAARTLYMSGGIQACPIVFRGPNGPAAAVAAQHSQHFAPWYGSIPGLKVVSPYSAEDARGLLKAAIRDPNPVVVLENEILYGKTFPISKEALSEDFVLPFGLAKVERPGKDITIVGESISVVTALEAADKLKADYGVEAEVINLRSIRPLDINTIAASVKKTNRIVTVDQAYSQHGIGSEIAAQIMESDAFDYLDAPVERVSMADVPMPYSHPVEAASVPNADVVVAAAKKCLYIK

SEQ ID NO: 27491 - protein, 573 aa, Yersinia pseudotuberculosis IP 32953
MKQTVATLIAKTLEQAGVKRIWGVTGDSLNGLSDSLHRMGTIEWLGTRHEEVAAFAAGAEAQLTGQLAVCAGSCGPGNLHLINGLFDCHRNHVPVLAIAAHIPSSEIGSGYFQETHPQELFRECSHYCELVSNPEQLPRVLEIAMRQAILNRGVSVIVLPGDVALQAAPEDAAVIWQTPKLPLVQPPMSELTLLADTLNKAKNITLMCGSGCADAHDEVVKLAERLQAPVVHALRGKEHIEWDNPYSVGMTGLIGFSSGYQAMLNADTLILLGTQFPYRAFYPTHANIIQIDINPGSLGAHCPVNMALVGDIKTTLTALLPQLDAKSDRAFLDKALEHYRTTRQDLDALATANDNQPIHPQYLAQQISHYATEDAIFTCDVGTPTVWAARYLQMNGKRRLLGSFNHGSMANAMPQAIGAQATAPDRQVVALCGDGGFTMLMGDFLSLTQLKLPVKIVVFNNSVLGFVAMEMKAGGYLTDGTDLHNPDFAAIANAAGIKGIRVEKASELNAALESAFAHPGPVLVDVVTAKQELSMPPQIKFEQAKGFSLYMLRAIINGRGDEVIELAKTNWLR

SEQ ID NO: 27492 - protein, 376 aa, Saccharomyces cerevisiae
MAKKSNSKKSTPVSTPSKEKKKVIEKKSSTAIPRERVIKAVNELIKFTSKPQDENNEEGNNGKKNLLEDDEEELKKDLQLIVVNNKSFTGTSKSFKLKLLNVKHSFYKPWKEASATAVKDFKVLLILKDSDIKKVSEDDLFDQLDSEGIKVDEIICGKDLKTVYKAYEARNAFISQFSLILADDSIVTSLPKLMGGKAYNKVETTPISIRTHANKEFSLTTLTNNIKKVYMNQLPVKLPRGTTLNVHLGNLEWLRPEEFVDNVELISEQLIKAYQIRSIFIKTNRSPVLPLYYNQDVLDELEAKKDKIEETHEDDMVTIDGVQVHLSTFNKGLMEIANPSELGSIFSKQINNAKKRSSSELEKESSESEAVKKAKS

SEQ ID NO: 27493 - protein, 276 aa, Oceanobacter sp. RED65
MSIKNSCIYQGEVRHRRFLPKRHELNYSLYMMFIDLDEWSEIFRGKWYASLERFNLLSLRRDDYFQGNQSDLKQSIIDHVEKDFAERGLQYQNITRVMLLTHGRHFNIIFNPVSFYYCYDEFDQLVAIVSQITNTPWGERHSYVLPKGQSDAAMKVELKGDNKHIFHFAKQFHVSPFNPMNMDYRWVFSEPGEKLHVHMDNFMQDADNEKHFDATLTMEKRSWQALPKSLIQTPLITVKVMWGIYWHALRLWMKVPFYDHPKTKTATPQGADNKTR

SEQ ID NO: 27494 - protein, 271 aa, Oryza sativa (japonica cultivar-group)
MAAATSHSAIVHTQSHRWRPNQAAIWFWFCLCIEVFGGGAGESSLILIRHGESLWNEKNLFTGCVDVPLTPKGVEEAIEAGKRICSIPIDVIFTSSLIRAQMTAMLAMMQHRRKKVYSEETRKQSIPVITAWQLNERMYGELQGLNKQETADRFGNEQVHKWRRSYDIPPPNGESLEMCAERAVAYFKEHVVPQLTAGKHVMIAAHGNSLRSIIMQLDKLTSQEVISLELSTGIPMLYIFKEGKFIRRGSPVGPSEASVCAYTRVRVFSNL

SEQ ID NO: 27495 - protein, 530 aa, Microbacterium sp. AL-210
MTESSFSRRTMLKGTSVGALALLIGSSPTLAQSSAGLRAPAAAASGSLRAVYHMTPPSGWLCDPQRPVRTGGAYQLYYLHSGQNNGPGGWDHATTSDGVAFTHHGTVMPLQPDFPVWSGSAVVDTANTAGFGAGAVIALATQPTDGIRKYQEQYLYWSTDGGYTFTALPDPVILNTDGRTATTPAEIENAEWFRDPKIHWDALRGEWVCVIGRARYASFYTSTNLRDWQWTSNFDYPNHALGGIECPDLFEMTAGDGTRHWILAASMDAYGVGLPMTYAYWTGTWNGTHFIAGNLVPQWLDWGWDWYAAVTWPKAEAPETRRLAIAWMNNWKYAARDVPTDASDGYNGQNSITRELRLERQEGGWYSLLSEPVGALGGYVTATTTIPTQVVNGSVVLPWSGRAYEIELDISWTDAANVGLSVGRSADGARHTNIGKYGSDLYVDRGPSDQAGFALSPFTRAAAPIDAGVRSVHLRVFVDTQSVEVFVNAGHTVLSQQVHFLPGDTGISLYSDGGAATFSGIRIREFGTPI

SEQ ID NO: 27496 - protein, 138 aa, Shorea scaberrima
EKNIPVLLGLLSIWNVSFLGYPARAILPYSQALEKFAPHIQQVSMESNGKGVSIDGVRLPYEAGEIDFGEPGTNGQHSFYQLIHQGRVIPCDFIGSAKSQQPIHLKGEVVSNHDELMSNFFAQPDALAFGKTPEELHK

SEQ ID NO: 27497 - protein, 294 aa, Desulfotalea psychrophila LSv54
MSIFVNSKTRLLVQGITGQEGQFHTRQCINYGTQVVAGVTPGKGGQMMDSIPIYNTVREARQISAANASMIMVPPPFAADAILEAADAGIELIICITEGIPIIDMLRVKNYLATTTSRLIGPNCPGIITPGECKIGIMPAKIHTPGGPMGVVSRSGTLTYEVVHQLTGVGLGQTTCVGIGGDPINGTGFIDCLKAFNADAETEAVVMVGEIGGQAEEEAAAWVKAHMKKPVIGFIAGLTAPPGRRMGHAGAIVSGGQGAAATKIMAMRDAGIHISENLGTLGMLARQVLDPDSK

SEQ ID NO: 27498 - protein, 384 aa, Bacillus mycoides
MLEFDTTQDQLANIKVIGVGGGGNNAVNRMIEHGVQGVDFIAVNTDAQALNLSKAETKMQIGGKLTRGLGAGANPEVGKKAAEESKEQIQEALRGADMVFVTAGMGGGTGTGAAPVVAQVAKELGALTVGVVTRPFTFEGRKRATQAASGIAAFKENVDTLIVIPNDRLLEIVDKNTPMLEAFREADNVLRQGVQGISDLIATPGLINLDFADVKTIMSNRGSALMGIGSGNGENRAAEAAKKAISSPLLETSIDGAQGVIMNITGGANLSLYEVQEAADIVASASDPEVNMIFGSVINEGLKDDIVVTVIATGFDDSAATQPPKPIIRPTANHTQQQQQPVAQPTKQREVKREMKREEPVVHDRHTDSDDIDIPAFLRNRRRR

SEQ ID NO: 27499 - protein, 666 aa, Phaseolus vulgaris
MAAISCILSLLLSSLIAQVSAQFNTEYCDNNKGNYTINSTYHNNLNTLLSTLSSHTQINYGFYNFSHGQNNDKVNAIGLCRGDVKPDECRRCLNDSALTITQLCPNQKEALLWLNTSKCLLRYSHRTIFGVMESSPGFYLTNVNNVTEADKFNQALSNLMRNPTVVAASGDSRLKYAADSAIAANFQTVYGLVQCTPDLSETDCNRCLDGAISEIPSCCGNKMGGRVLRPSCNIRFESAIFYDSNAKLDPDVTPPSPPPSSFTNTSPKESNNTITIVIAVVVSIVVVAVVSLLGLCIYLRRKKARKSPTVNQDDDDDDIEISQSLQFDFDTIRVATEDFSNSNKLGQGGFGAVYRGRLPNGQMIAVKRLSSGSSQGDTEFKNEVLLMAKLQHRNLVRLLGFCLEGRERLLIYEFVPNKSLDYFIFDPVKKAQLDWEMRYKIIRGIARGLLYLHEDSLLRIIHRDLKASNILLDEEMNPKIADFGMARLVLLDETHANTNRVVGTYGYMAPEYIMQGQFSVKSDIFSFGVLLLEIVSGQKNSGFRHGENVEDLLSFTWRNWRDGTAVNIVDPSLENNSRNEVMRCIHIGLLCVQENLTDRPTMATIMLMLSSYSLGLPIPSEPAFYANSTARSLPATSSWGHSSRATANQSAQESENENSITEPYPR

SEQ ID NO: 27500 - protein, 423 aa, Oryza sativa
MDKLNGSARLMIVSDLDHTMVDHHDEENLSLLRFGALWESVYCQDSLLVFSTGRSPTLYMELRKEKPMLTPDITIMSVGTEITYGEEMVPDDGWVEYLNNKWDRNIVVEETANVSELKLQVESEQRPHKVSFYVDKKSAQEVIKSLSEKLEKRGLDVKIIYSGGQDLDVLPQGAGKGQALAYLLKKLSSCGKPPNNTLACGDSGNDAELFSIPGVHGVMVSNAQEELLQWYSENAKDNPKIIHATERCAAGIIQAIGHFKLGPNVSPRDVDFPYVKENPVKPTDAVVKFYVLYEKWRRAEVPKSDSVVQYFKNITHANGVIIQPSGLECSLHASIDALRSCYGDKQGKKYRAWVDRLVVSQCGSEGWLVRFNLWELEGDVWSCCLTSLALNAKPETPEGFVVTHIHKTWLKGYSSADEQSSKL

SEQ ID NO: 27501 - protein, 103 aa, Rubrobacter xylanophilus DSM 9941
MAVKDVTDDTFKSEVLDSDKPVIVDFWAPWCAPCRRVAPVLEELSESRDDVKFVKLNVDDNQNTTLNYSVTSIPTIARFENGQVTRRAVGALPKQQLMEQLDL

SEQ ID NO: 27502 - protein, 525 aa, Sandersonia aurantiaca
MCGILAVLGCSDDSQAKRVRVLELSRRLKHRGPDWSGLDHHGDCYLAHQRLAIIDPASGDQPLYNEDKTIIVTVNGEIYNHEELRKGLPGHTFRTGSDCEVIAHLYEEHGESFIHMLDGIFSFVLLDSRNNSFVAARDAIGVTPLYIGWGLDGSVWISSEMKGLNDDCEHFKFFPPGHLYSSKEGSFKRWYNPPWFSEVIPSVPFDPLALRKAFEDAVIKRLMTDVPFGVLLSGGLDSSLVASVTARYLEGTKAAELWGTQLHSFCVGLEGSPDLKAAKEVANFLGTIHHEFHFTVQDGIDAIEDVIYHVETYDVTTIRASTPMFLMSRKIKSLGVKMVISGEGSDEIFGGYLYFHKAPNKEELHLETCHKIKALHQYDCLRANKATSAWGLEARVPFLDKEFVNVAMSIDPEWKMIKPDIGRIEKWILRRAFDDEENPYLPKHILYRQKEQFSDGVGYSWIDGLKAHSALHVTDKMMLNAAHIYPHNTPTTKEAYYYRMIFERFFPQIDSPWRSKCGLQHSKSY

SEQ ID NO: 27503 - protein, 176 aa, Manihot esculenta
MASSMLSTATVASINRVSPAQATMVAPFTGLKSTPVFPTTRKTNSDITSITSNGGKVQCMKVWPTLGMKKFETLSYLPPLTREQLAKPSCIGPCLEFELEHGLVYREHARVPGYYDGRYWTMWKLPMFGCTDAAQVLKELDELIKHHPDGYARIIGFDNVRQVQCISFLAYKPPGA

SEQ ID NO: 27504 - protein, 361 aa, Streptococcus pyogenes MGAS315
MTKLDQIRLYLDQKGAELAIFSDPVTINYLTGFFCDPHERQLFLFVYHDLAPVLFVPALEVARASQAISFPVFGYVDSENPWEKIKAVLPNTAAKTIYAEFDHLNVNKFHGLQTIFSGQFNNLTPYVQGMRLVKSADEINKMMIAGQFADKAVQVGFDNISLDATETDVIAQIEFEMKKQGIHKMSFDTMVLTGNNAANPHGIPGTNNIENNALLLFDLGVETLGYTSDMTRTVAVGQPDQFKIDIYNLCLEAQLAAIDFIKPGVTAAQVDAAARQVIEKAGYGQYFNHRLGHGIGMDVHEFPSIMAGNDLVLEEGMCFSVEPGIYIPGKVGVRIEDCGHVTKNGFEVFTHTPKELLYFEG

SEQ ID NO: 27505 - protein, 182 aa, Manihot esculenta
MASSMLSTATVASINRVSPAQATMVAPFTGLKSTPVFPTTRKTNSDITSITSNGGKVQCMKVWPTLGMKKFETLSYLPPLTREQLASEVEYLLRSGWIPCLEFELEHGLVYREHARVPGYYDGRYWTMWKLPMFGCTDAAQVLKELDELIKHHPDGYARIIGFDNVRQVQCISFLAYKPPGA

SEQ ID NO: 27506 - protein, 174 aa, Triticum aestivum
MAPAVMASSATTVAPFQGLKSTAGLPVSRRSRGSLGSVSNGGRIRCMQVWPIEGIKKFETLSYLPPLSTEALLKQVDYLIRSKWVPCLEFSKVGFVFREHNSSPGYYDGRYWTMWKLPMFGCTDATQVLNEVEEVKKEYPDAYVRVIGFDNLRQVQCVSFIAFRPPGCEESGKA

SEQ ID NO: 27507 - protein, 183 aa, Triticum aestivum
  misc_feature (105)..(105): Xaa can be any naturally occurring amino acid
  misc_feature (141)..(141): Xaa can be any naturally occurring amino acid
MATSSGPKEAPANNPGLQTEVDPATKGYFLQQTMLRVKDPKVSLDFYSRVMGMSLLKRLDFEEMKFSLYFLGYEDVTLAPDDHIKRTEWTFRQKATLELTHNWGXTENDPEFKGYHNGNSDPRGFGHIGVTVDDVHKACEXFERLGLICEEPDDGKSKALHRPDGTDSYLPDIGTSQHMMTGS

SEQ ID NO: 27508 - protein, 582 aa, Oryza sativa
MVLFSVTKKATTPFDGQKPGTSGLRKKVTVFQQPHYLQNFVQSTFNALPADKVKGATIVVSGDGRYFSKDAVQIITKMAAANGVRRVWVGQNSLMSTPAVSAVIRERVGADGSKATGAFILTASHNPGGPTEDFGIKYNMENGGPAPESVTDKIFSNTTTITEYLIAEDLPDVDISVVGVTTFSGPEGPFDVDVFDSTIDYIKLMKTIFDFESIKKLLASPKFTFCYDALHGVAGTYATRIFVEELGAAESSLLNCVPKEDFGGGHPDPNLTYAKELVDRMGLGKSSNAEPPEFGAAADGDADRNMILGKRFFVTPSDSVAIIAANAVQSIPYFSSGLKGVARSMPTSAALDVVAKNLNLKFFEVPTGWKFFGNLMDAGMCSICGEESFGTGSDHIREKDGIWAVLAWLSILAFKNKDNLGGDKLVTVEDIVRQHWGTYGRHYYTRYDYENVDAGAAKELMANLVSMQSSLSDVNKLIKEIRSDVSDVVAADEFEYKDPVDGSVSKHQGVRYLFGDGSRLVFRLSGTGSVGATIRVYIEQYEKDSSKTGRDSQDALAPLVDVALKLSKMQEYTGRSAPTVIT

SEQ ID NO: 27509 - protein, 539 aa, Flavobacteria bacterium BBFL7
MAEIVNMPRLSDTMEEGVVAAWLKNVGDKVEEGDILAEIETDKATMEFESFQEGVLLHIGVQEGETAPVDQLLCIIGEEGEDISSLLNGDNSTSESKEDTSKKEESNDSSENDSSNDELPEGVIIVTMPRLSDTMEEGTVASWLKSEGDTVEEGDILAEIETDKATMEFESFNEGTLLKIGIQEGETAKVDALLAIIGPAGTDVSGINLEASAKAPAPKKEEKKVEAPKAEPKKDKAPVAASSSSNANSSSSSKGGRIFASPLAKKMADDKGIDLSQVSGSGENGRIVKSDIVNFKPSAGGSASASSFVAVGTETFEEVPNSQMRKTIAKRLGESKFTAPHYYLGLDLDMDNAIASRKAINELPDTKISFNDMVIKAAAMALRLHPKVNTQWTDKNTIVAKHIHVGVAVAVDDGLLVPVLPFADQMSMQQIGAKVRELAGKARNKKLQPDEMQGSTFTISNLGMFGITEFTSIINQPNSAIMSVGAIVQKPVVKNGQIVVGNVMKITLACDHRTVDGATGAAFLQTFKSYIENPIVMYV

SEQ ID NO: 27510 - protein, 252 aa, Bordetella bronchiseptica RB50
MNTSPTVRFETREQIAIITLNRPDKRNAINLEMRQALIAAWERFENDAALRVAILTGAGERSFSAGRDLSENTDLSQKTFLPILGDNVQASKPVIAAVNGAALGGGWFFTQMCDLVVAADHAVFGMPESKVGRAPAWAVWLQGVIPQKLVLELLLTGNPIGAQRAAEIGFVNHVVPAAQLMDKAMELARAIVATAPLSAAACKEMVYAAAEMGRGAALRTAFHILEPLYRSEDAREGALAFREKRAPRWSGR

SEQ ID NO: 27511 - protein, 138 aa, Shorea scaberrima
EKNIPVLLGLLSIWNVSFLGYPARAILPYSQALEKFAPHIQQVSMESNGKGVSIDGVPLPYEAGEIDFGEPGTNGQHSFYQLIHQGRVIPCDFIGSAKSQQPIHLKGEVVSNHDELMSNFFAQPDALAFGKTPEELQK

SEQ ID NO: 27512 - protein, 458 aa, Candidatus Kuenenia stuttgartiensis
MLRLNKQRNTLEPEEHHFELKDSEEPNLFRDIFPYDKVPKIPFNYRLNPMNMPEEIWITDTTFRDGQQSMPPYTVKQIVDLFDMIHKLGGKRGLIRQCEFFLYNEKDKEAVRKCMERGYKYPEITGWIRAVKSDFKLAKEMGLKETGILCSSSDYHIYLKLKKTRKQALEMYLDIVRAALEEGMIPRCHFEDITRADLYGFVIPFAKELMKLSRESGIPIKIRACDTMGVGVSYPGAAPPRSVPGIIYGLTHFADVPSECLEWHGHNDLYLAMSNATASWLYGCSAINGALLGLGERTGNTPLEALVIEYLALRGNDDEIDTTVITDIADYYRNEIGYQIPPNQPLVGSGFNVTRAGIHSDGLLKNEEIYNIFDTTKLLKRPVGVSITDKSGVAGIVQWIDIYYKLQGDERISKDHPGVVKIKEWVDEQYAMGRITSVSEKEMVELVNIHLKDVFAGR

SEQ ID NO: 27513 - protein, 376 aa, Candida boidinii
MDGEDVAALVIDNGSGMCKAGFAGDDAPRAVFPSIVGRPRHQGIMVGMGQKDSYVGDEAQSKRGILTLRYPIEHGIVTNWDDMEKIWHHTFYNELRVAPEEHPVLLTEAPMNPKNNREKMTQILFETFNVPAFYVSIQAVLSLYSSGRTTGIVLDSGDGVTHVVPIYAGFSLPHAILRLDLAGRDLTDYLMKILSERGYTFSTTAEREIVRDIKEKLCYVALDFDQELQTSSQSSSIEKSYELPDGQVITIGNERFRAPEALFHPSVLGLEASGIDQTTFNSIMKCDVDVRKELYGNIVMSGGTTMFPGIAERMQKEITALAPSSMKVKIIAPPERKYSVWIGGSILASLSTFQQMWISKQEYDESGPSIVHLKCF

SEQ ID NO: 27514 - protein, 498 aa, Oceanobacter sp. RED65
MSGGRRIDDGLSGDNMSYLEHSVEKIGGTSMSDYASVRDNIIKQPDNASGDLYQRIFVVSAYGGITDKLLEHKKSGQPGIYALFSDAIEEDSWVEAFENLEKQLLDINHELYGDTDLLEKANAFLYERLKSAKDCLLDLQSLCKHGHFSLDEHLDTVREMLASIGEAHSAYNTATLLKRDGVNARFVDLTAWQSTEHVSLDERIKEAFSDIDLSKELPITTGYAHSEDGLMRTFDRGYSEMTFSRIAVLTNAREAVIHKEFHLSSADPRLVGEENAVPIGRTNYDVADQLANLGMEAIHPKAAKGMRQQAIPLRVKNTFEPDHAGTLIDTDYVSDKPCVEIIAGCKGVYAIELFDQDMAGNLGTYDEKYLAVLKRFKVNIISKDVNANTITHYVSTNLKTVKRICQALAEISTDAEVSQRKVAIVSAIGSDMHVPGILAKTVRALADSNISVLALHQSMRQVDMQFIVSDQDYDQAIKSLHACLVEVHDHGDAICVAS

SEQ ID NO: 27515 - protein, 138 aa, Shorea smithiana
EKNIPVLLGLLSIWNVSFLGYPARAILPYCQALEKFAPHIQQVSMESNGKGVSIDGVPLPYEAGEIDFGEPGTNGQHSFYQLIHQGRVIPCDFIGSAKSQQPIHLKGEVVSNHDELMSNFFAQPDALAFGKTPEELHK

SEQ ID NO: 27516 - protein, 291 aa, Candidatus Kuenenia stuttgartiensis
MLINKETKVVCQGITGQAGSFHAMQMLEYGTKLVAGVTPGKGGTIHNGIPVFGSMLEAVNKTGANASVIYVPASFAADAIMEAVDAEIALVVCITEGIPTLDMLRVVKYLAAGKSRLIGPNCPGIITPDACKIGIMPGYIHKKGSVGVVSRSGTLTYEIVWQLTQQGIGQSTCAGIGGDPIIGTHFVDILKMFQHDEETSAIVLIGEIGGSMEEEAAEYIKKEITKPVIGFIAGRSAPHGKRMGHAGAIIAGDKGKAVTKVAALQDAGAFMVDNPADIGITVSKILKDAGK

SEQ ID NO: 27517 - protein, 319 aa, Rubrobacter xylanophilus DSM 9941
MILTVTLNAAVARTLVVPNLSLGHRHRAQESAVLAGGKGINVARSLRALGVPVIATGFAGGRNGDAIRDGLSAAAIPFDLIEIKGQSRTSIALIDPMGQTQTEINEYGPEVEPGEQAEFRRHFGQLLEYATAVVFAGSLPPNMEEGFLVELVEQARERGLYTVVDSTPTVLRAALKACPSLVSPNQHEAESVVGFDFIEEEDYLRGLARLVEMGARHACITSREGHSYLTTREGVLSARAPMVERVSTIGSGDAYLAGLLAGLLHRHYAPPEAVKLAAGCAAANAETLGAGVFDVRRAEELAGAVKVEAVSYQPGGDRV

SEQ ID NO: 27518 - protein, 253 aa, Oryza sativa
MESAPASRVRREDVARAVAALLRWLQHHPTPAPEPIYLLVTLKRAPARRFEHTLRLPRSPFPSISLVSDRLPADLPDDIDPLPSPALGSLPPAARRGLVLVDRRLRVRPGGKGKAAAKAARVVPVDLADQAWAESAREAARRVELRVEGGTCRAVRVGHAAMAREEAVENVVAAVEAAAACVPRKWRNVRALHVKAPESVALPLYSAVGTGGGDDGGNGEAEDAKRKGVAVKEQGIVKRRKKSSSVSVGGDQL

SEQ ID NO: 27519 - protein, 649 aa, Brassica napus
MSSAPSPGTGSPPSPPSNSTTTTPPPASAPPPTTPSSPPPPSTIPTSPPPSSRSTPSAPPPSPSPPTPSTPGSPPPLPQPSPPAPTTPGSPPAPVTPPTRNPPPSVPGPPSNPSREGGSPRPPSSPSPPSPSSDGLSTGVVVGIAIGGVALLVIVTLICLLCKKKRRRDEEDAYYVPPPPPPGPKAGGPYGGQQQQWRQQNATPPSDHVVTSLPPPPKAPSPPRQPPPPPPPPFMSSSGGSDYSDRPVLPPPSPGLVLGFSKSTFTYEELARATNGFSEANLLGQGGFGYVHKGVLPSGKEVAVKQLKVGSGQGEREFQAEVEIISRVHHRHLVSLVGYCIAGAKRLLVYEFVPNNNLELHLHGEGRPTMEWSTRLKIALGSAKGLSYLHEDCNPKIIHRDIKASNILIDFKFEAKVADFGLAKIASDTNTHVSTRVMGTFGYLAPEYAASGKLTEKSDVFSFGVVLLELITGRRPVDANNVYVDDSLVDWARPLLNRASEQGDFEGLADAKMNNGYDREEMARMVACAAACVRHSARRRPRMSQIVRALEGNVSLSDLNEGMRPGQSNVYSSYGGSTDYDSSQYNEDMKKFRKMALGTQEYNATGEYSNPTSDYGLYPSGSSSEGQTTREMEMGKIKRTGQGYSGPSL

SEQ ID NO: 27520 - protein, 341 aa, Frankia sp. EAN1pec
MSTDTLAARHRYHPLRVLRLVRETSEARSIVFEVPSELTEVFAYEAGQFVTLRVTLDGETHVRSYSMSSSPLLDGELRVTVKRVPGGLISNWLNDTLGEGDVLEVNPPGGSFSLDRGDHDIVAFAAGSGITPVFSIVRTALATSHRRIRVLYANRDRAAAIFGDELDALAAQYPGRLTVEHHEDLVRGFVHRDQVDRAAGDVETAAYYICGPGGFMDVVEAGLRDLGADPSRVHIERFTPAEEPPPAGPADDITVTIKLGGKTVTTAHRRDSTLLQTARYAGLRAPSSCETGSCATCMARVVQGRAEMRINDALTPDEVAEGWVLTCQAMPVTPVIEVVYE

SEQ ID NO: 27521 - protein, 573 aa, Ralstonia eutropha JMP134
MKASQFFISTLKEAPADAEIVSHKLMMRAGMIKKLGAGIYNYMPVGLRVIRKVENIVREEMNRAGAVELSMPVIQPAELWQETGRWDKMGPELLRLKDRHERDFAVQPTSEEVVTDIARSEIRSYKQLPVNFYQIQTKFRDERRPRFGIMRGREFTMKDAYSFDRDAEGLKKSYENMYDAYVRIFQRFGLEFRAVAADNGAIGGSGSHEFHVIADTGEDAIVYCPTSDYAANMEAAEALPLVAERAAPTQALEKTFTPEKVKCEQVAEFLGIPLERNVKSIVLAKDTEAGAEIWLLLIRADHELNEVKASKVPGLADFRFATENEIVDAFGSPPGYLGPIDMKKPVKVVADRTVANMSDFCCGANYRDYHFTGVNWGRDLPEPIVADLRNVVAGDASPDGKGTLEICRGIEVGHVFMLGTRYSESMNATFLDENGKTQPMQMGCYGIGVTRILGAAIEQNFDERGIIWPAAIAPFEVVVCPVGYDRSEAVKAEADRIHAELLAAGVDVIIDDRGERPGVMFADWELIGVPHRVVVGDRGLKEGKVEYQGRRDAQATQVAVADVVGHVRGQIGK

SEQ ID NO: 27522 - protein, 387 aa, Saccharomyces cerevisiae
MSDINEKLPELLQDAVLKASVPIPDDFVKVQGIDYSKPEATNMRATDLIEAMKTMGFQASSVGTACEIIDSMRSWRGKHIDELDDHEKKGCFDEEGYQKTTIFMGYTSNLISSGVRETLRYLVQHKMVDAVVTSAGGVEEDLIKCLAPTYLGEFALKGKSLRDQGMNRIGNLLVPNDNYCKFEEWIVPILDKMLEEQDEYVKKHGADCLEANQDVDSPIWTPSKMIDRFGKEINDESSVLYWAHKNKIPIFCPSLTDGSIGDMLFFHTFKASPKQLRVDIVGDIRKINSMSMAAYRAGMIILGGGLIKHHIANACLMRNGADYAVYINTGQEYDGSDAGARPDEAVSWGKIKAEAKSVKLFADVTTVLPLIVAATFASGKPIKKVKN

SEQ ID NO: 27523 - protein, 282 aa, Burkholderia thailandensis E264
MDTTLATFERDVIEASLAAPVLVDFWAPWCGPCKTLGPLLEKLEQAYEGRWKLVKVNVDENQELAAHFQTRSIPHVIAFAGGQPVDQFVGVLPEGQLRAFLDRLVPTPDEAERQAAQAALAEERIDDALSHLENALALNPGYDEARLDLVELLLALNRIDDARAEAARLSPQTTGGADARYQAIKTRFDALDATADLPPTDALEARIASDPADLDARFDLAQSLIARRAYDGALEQLLEIVRRDRTFGDDVGRKTMISVFELAADQPELVSAWRRKLSAALN

SEQ ID NO: 27524 - protein, 394 aa, Schizosaccharomyces pombe
MLKRPKRDPLKDCEYVFKGDGLRRVPPYYYEYITFAKLRWYGKTLLEVFNTEFRDRESGYYEKAIRNGQVKVNNQIGNVDTLIENGYIVSHHAHRHEPPVSDQPVGIVHEDESYVVIDKPAGVPVHPTGRYNHNTVLHILMKENKCSLLYPCNRLDRLTSGLMFFSKSPKAAEEMRVHMISKSLKKEYVARVIGEFPNSGEVICDAPLLTVAPTLGLNRIHPDGKEASTVFKRIAFDGHTSLVLCKPLTGRTHQLRVHLQYLGYPIANDPIYANKRVWGPSLGKNGEGSNESVIMRLSEIGKTETASPLLQYEWYTNETEAEAKARRDKRLGELLTGKHCSECGTPLYSDPSPEELGIWLHALKYESKDWSYKTQLPKWALDVCCRDPNALPIE

SEQ ID NO: 27525 - protein, 450 aa, Desulfotalea psychrophila LSv54
MRYLPHTEEEIQEMLEVVGKESLDDLFSSVPAECRYQGDIPIPAALTEWQLKDHFAALMSKNRVNQEHKVLIGAGSYDHYVPEILPSLMSRSEFLTAYTPYQPEVAQGTLQGIFEYQTLTARLLGTDAVNASMYDGASALAESALMSFRIARKKKTVALSAAIHPHYREVVATYLQATDFTIIELPVDAEGRTDLSSLAGIEGLASVAIQSPNFFGVVEDLQGCGEKIHDVDALFISCFSEALAYGLLKSPGECGADIICGEGQSFGLGRSYGGPGVGMMGCRDKLVRNMPGRIVGQTLDTKGKRGFVLTLATREQHIRREKATSNICSNQGICAMTAGMYMATLGGTGIRQLARLNYDKAAYLRSELIKLGAKPLFDAPVFNEFALRFPFDFERVREALKEESVVAGLSLEAYYPDLQGAYLFCATETLKKEDIDRIVSSIKKHALQEV

SEQ ID NO: 27526 - protein, 500 aa, Triticum aestivum
MDAAGRDANPLAGYRIGKTLGIGSFGKVKIAEHIITGHKVAIKILNRRKIKSMEMEEKVKREIKILRLFMHPHIIRLYEVIDTPADIYVVMEYVKSGELFDYIVEKGRLQEEEARRFFQQIISGVEYCHRNMVVHRDLKPENLLLDSKCNVKIADFGLSNVMRDGHFLKTSCGSPNYAAPEVISGKLYAGPEVDVWSCGVILYALLCGTLPFDDENIPNLFKKIKGGIYTLPSHLSPLARDLIPRMLVVDPMKRITIREIREHSWFKARLPRYLAVPPPDTAQQVKKLDDETLNDVIKMGFDKNQLTESLQKRLQNEATVAYYLLLDNKLRTTSGYLGAEYQESMDSSFSQVSPETPSSASEARQYGSPGFGLRHHFAAERKWALGLQSRAHPREIITEVLKALQELNVCWKKIGHYNMKCRWSPGFVETMMHNNNGFGVESAIIEADGLSDKSTHIVKFEIQLYKTRDEKYLLDLQRVSGPQLLFLDLCSAFLTQLRVL

SEQ ID NO: 27527 - protein, 501 aa, Xanthomonas oryzae pv. oryzae KACC10331
MAGGALRRRPMAATPWTLLCMFPGEPMSSASIDGAPDAGENTRFIILISCVATIGGFLFGFDSGVINGTVDGLKQTFQSTAAETGFEVASMLLGCAIGAFFAGRLADRSGRRAVLIISAALFLLSAIGAGASHSSGFFIFARVMGGFAVGAASVISPAYIAEVASARYRGRLATMQQIAIISGLFCAFLSNYLLANAAGASTEPLWAGQAAWRWMFWMQAVPSLLFLLLLLVIPESPRYLVVKGRREQALVVLKRLYGNAAAQTKLGEISASMSADRHKPKFSDLINQATGKIRPIVWIGIGLAVFQQLVGINVVFYYGAVLWQAVGFSEQDALLINVLSGGLSIGACLVTVMLVDKIGRKPLLWIGSAGMAVSLALVTYAFATASLDLNGKLAMSDAMGMLALVAANVYVVFFNASWGPVMWVMLGEMFPNQIRGSGLAIAGAAQWTSNFAITVSFPILLGSIGLAGAYGIYTVAAFISVFFVLKCVYETKGKELEQMEG

SEQ ID NO: 27528 - protein, 184 aa, Manihot esculenta
MATSMLSTATVASINRASPAQASMVAPFTGLKSTSAFTATTKTSADITSLASNGGRVQCMQVWPTRGKKKFETLSYLPPLSREQLASEIDYLLRSGWIPCLEFELEHGFVYRAHGSLPGYYDGRYWTMWKLPMFGCTDSSQVLKELDELIKAHPDGFARIIGFDNVRQVQCISFIAYKPPGTDY

SEQ ID NO: 27529 - protein, 184 aa, Manihot esculenta
MATSMLSTATVASINRASPAQASMVAPFTGLKSTSAFPATTKTSADITSLASNGGRVQCMQVWPTRGKKKFETLSYLPPLSREQLASEIDYLLRSGWIPCLEFELEHGFVYRAHGSLPGYYDGRYWTMWKLPMFGCTDSSQVLKELDELIKAHPDGFARIIGFDNVRQVQCISFIAYKPPGTDY

SEQ ID NO: 27530 - protein, 108 aa, Burkholderia sp. 383
MSEQIKHISDASFEQDVVKSDKPVLVDFWAEWCGPCKMIAPILDEVAKDYGDKLQIAKINVDDNQATPAKFGVRGIPTLILFKNGAAAAQKVGALSKSQLTAFLDSHL

SEQ ID NO: 27531 - protein, 775 aa, Legionella pneumophila subsp. pneumophila str. Philadelphia 1
MEFSMKENVSHLPRELSRMVFWSLTCLKKAIAEVYGKETYERIEQIRLSMQDTIGSESFSLGKALHSLQIELSKLEKKQLYQIAHGFSLMMELINTCENAYRIFRINQRKEQVYSDMPQGIHYVLTAHPTEARTNEFLKLFKEIRDYLIEVLKSPYLMNESHLDQMLKISLQINISYHEKPSVEDEAQYIYQYALHPLNIKLYHSFLAKGVPIQLRTWVGGDKDGHSGVNEKIMLKSLELSRSFFIAYIQECLEEVLEIIKLSTALGKNKSLADQINQLVKKAYGLKKIQSKDHEKISAFKNELTATQINALKFLNFEPEQFSIISSIFHLYPALVMPIELREDSAVVKESLTSIKKTTITKMLEQVHSITHGTDPKNYIRGFILSMVESAEDIKNGINLVKKVFKSYALPVVPLFENQLALTNADTILNNSITEDIRQKHLKQWEGNYEVMLGYSDSSKENGVLPSRLMIAKSLKNIQSTLENKNLRPIFFHGSGGSIERGGGDIKEQTASWSKEMMSNYKVTVQGEMVARLFGSSSILKSQIDKFLDIYSQKGKSNNNDYPEELSLFSTRVSQKYKTLIQSDWFWQIVEQASPYHFLKELKIGSRPTKRKSGPDQRKLRAIPWILCWTQTRLLFPTWWGIGSTWSELNGIEKNRLKALYKENALFAAFVKQLGVTLSKVYLPVWEQYLLQLTGSIEYLRPFQSELESTIQFFYQITDEKDFCFHQPWLGESIQLRSTLIHPLNLIQIEAMKRKDLPLLRKTVTGISCGMLTTG

SEQ ID NO: 27532 - protein, 426 aa, Streptomyces sp. JP95
MSRRAVITGIGAVAPGGIGRDAYWDLLAHGRTATRRISRFDASAFRSQVAAECDFDPVAAGLSPQEVRRMDRAAQFAVVAAQEAIEDSGIDVGAGDPGRTAVSIGSAVGCTTGLEDEYAVLSDGGRNWLVDHTYGVPHLYGYMVPSTLAAEVAWRARAEGPVALISTGCTSGLDAIAHGVQLIEEGAADIVLAGATDAPLSPITSACFDAIKATTPNADQDPGSASRPFDGRRDGFVLGEGSAVMVIEEAGAARRRGATVYAEVAGFANRSNAFHMTGLKPDGREMAEAIRVALDRARLDPGAIDHVNAHGSGTKQNDRHETAAFKRSLGQRAHEIPVSSIKSMIGHSLGAIGSLEVAACALALRHQVVPPTANLTVPDPQCDLDYVPVTAREHRMDHVLSVGSGFGGFQSAMILSRPGARKEAVA

SEQ ID NO: 27533 - protein, 474 aa, Blastocladiella emersonii
MSPAAQLAKAAARSTCMTRLPSGIRVATAPSNSHFAAVGVYVDAGPIYETSIDRGVSHFVSSLAFKSTHGATESQVLKTMAGLGGNLFCTATRESILYQGSVLHHDLPRTVQLLADTTLRPALTEEEIAERRATIAFEAEDLHSRPDAFIGEMMHAVAFGGRGLGNSIFCEPQRARNMTSDTIREYFATYLHPSRMVVAGTGVAHAELVDLVSKAFVPSSTRAPSSVTHSDIETAYVGGSHQLVIPKPPPTHPNYEQTLTHVQVAFPVPPFTHPDMFPVSTLQVLMGGGGAFSAGGPGKGMYSRLYTNVLNRYRWMESCAAFQHAYSSTSLFGISASCVPSFNPHLCNVLAGEFVHMARNLSDEEVARAKNQLKSSLLMNLESQVITVEDIGRQVLAQNQRLEPLELVNNISAVTRDDLVRVAEALVAKPPTMVAVGEDLTKLTDIKETLAAFNASGEALQPVGSAGSFGRVTM

SEQ ID NO: 27534 - protein, 387 aa, Glycine max
MVAKDTVAKKGKDASSKKAKKVEEVEEVEETVTPSKNEKKQKKEENGSAKKEKKDKKSKKAESDSEEEKPKEKEKKDKKAKKEEPKEEPKSESESEEEKDDSKRKRDDDADADADMEEEASSPKVAKVDDSELPPVVYVSRLPYEIKEETLRELFTDVGEIKSLEWINDENDTFCGGAVVTFEDLAAAQKAAEKNGQEVDGRQCAVELHKRVPSGCTTLFVGGLSRDRLDEDNFKEFLKTNGVSNFAEVRFPTAEGQYKGIAFISFESDDDCRAAYNAGLQAKGYGGRVIKIDPSESKQGGGGGRGGRGGGGGRGGFGGDRGGRGGRGGFGGGRGGRGGFGDRGGRGGRGGGFGGRGGRGGFGDRGGRGGRGGRGGGAGGKRTTFDE

SEQ ID NO: 27535 - protein, 313 aa, Escherichia coli K12
MLDNVLRIATRQSPLALWQAHYVKDKLMASHPGLVVELVPMVTRGDVILDTPLAKVGGKGLFVKELEVALLENRADIAVHSMKDVPVEFPQGLGLVTICEREDPRDAFVSNNYDSLDALPAGSIVGTSSLRRQCQLAERRPDLIIRSLRGNVGTRLSKLDNGEYDAIILAVAGLKRLGLESRIRAALPPEISLPAVGQGAVGIECRLDDSRTRELLAALNHHETALRVTAERAMNTRLEGGCQVPIGSYAELIDGEIWLRALVGAPDGSQIIRGERRGAPQDAEQMGISLAEELLNNGAREILAEVYNGDAPA

SEQ ID NO: 27536 - protein, 396 aa, Bacillus subtilis
MAVKVVMPKLGMAMKQGEVSIWNKKVGDPVEKGESIASIQSEKIEMEIEAPEKGTLIDIKVKEGEEVPPGTAICYIGDANESVQEEAGAPVAEDNMPQAVQPVKQENKPAASKKDRMKISPVARKIAEKAGLDLKQLKGTGPGGRIVKDDVTKALAEQKKDQAKPVSEQKAQEIPVTGMRKVIAARMQESLANSAQLTITMKADITKLATLQKQLSPTAEERYGTKTDDHSFLSQEPPVLALQAHPVLNSFYQNERIITHPHVHLGMAVALENGLVVPVIRHAEKLSLIELAQSISENAKKAREGRAGSEELQGSTFSITNLGAFGVEHFTPILNPPETGILGIGASYDTPVYQGEEIVRSTILPLSLTFDHRACDGAPAAAFLKAMKTYLEKPQH

SEQ ID NO: 27537 - protein, 344 aa, Candidatus Pelagibacter ubique HTCC1002
MKKAVILFNLGGPDKIENVEPFLFNLFNDPAILNLPTILRYPLAKLISNRRAPVAKKIYKELGGSSPILKLTMEQSKALETKLNQTEIDSEYKCFIVMRCWNPRANDVIKDVQSFNPEEIILMPLYPQYSAATSGSSIKEWRDVCKKNNYHVKTNTICCYPTDQNFINAHTKEIIKKIKDLKNFKLIFSAHGLPEKNIKKGDPYQWQVEQSVKKIVENLNIENLDWILSYQSRVGPLKWIGPSTEDIIIENSKLGKHIVLVPIAFVSEHSETLVELDIEYKEIADANGCKNYTRVPALGTNEDFIKAMSELIIKKNEYKFSENLYPPKIQCPSNFKKCPCLNYE

SEQ ID NO: 27538 - protein, 210 aa, Salmonella enterica subsp. enterica serovar Typhi Ty2
MILHPSLASADPLRYAEALTALHDAPLGSLHLDIEDTSFINNITFGMKTIQAVAQYSRHPLSFHLMVSSPQRWLPWLAAIRPGWIFIHAESVQNPSEILADIRAIGAKAGLALNPATPLLPYRYLALQLDALMIMTSEPDGRGQQFIAAMCEKVSQSREHFPAAECWADGGITLRAARLLAAAGAQHLVIGRALFTTANYDVTLSQFTAL

SEQ ID NO: 27539 - protein, 858 aa, Vibrio fischeri ES114
MSKMKLVIIGNGMVGHRYIEDLVDKTDVQNMDITVFCEEPRIAYDRVHLSSYFSHHTADELSLVKEGFYEKHGINVLLGERAINVNRENRIVYSSTGREIQYDKLILATGSYPFVPPIKGNESKDCFVYRTIEDLKSIEATAKKSKSGVVIGGGLLGLEAAGALKALGVTTHVVEFAPVLMAEQLDQQGGLQLRNKIERMGVQVHTSKNTLEIAPEGTDARNVMRFADGSELETDFIVFSAGIRPQDKLARQMGLGIAPRGGIEINNNCQTTDKNIYAIGECASWNQTFYGLVAPGYKMATVAVDHLVGNESEFEGADMSAKLKLLGVKVGSIGDANGRTPGCKSYVYQNEEEEIYKRIIVSEDGKKLLGAVMVGDTSDYGDLLQLKLNDIDLPEHPDLLILPAHAGAEKPSLGADSLPESAVICSCFDVTKGKIAQAVADGNHTMAEIKAVTGAGTGCGGCIPLVTSVLNAELAKSGIEVKNDICEHFAYSRQELFHLIRIEEIKTFDELLEKYGKGYGCEVCKPAVGSILASCWGEHILKPELVKLHDTNDNFLGNMQKDGTYSVIPRMAGGEVTPQALSVLADVAAEYNLYTKITGAQRIGLFGAQKDDLPAIWKKLIAAGYETGQAYAKALRMAKTCVGSTWCRYGVQDSVGLGVMIENRYKGIRTPHKMKFGVSGCTRECAEAQGKDLGIIATDAGWNMYVCGNGGMKPRHADLLATDLDQETLIKYIDRFMMFYIRTAAPLQRTSVWMENLEGGVDYLREVIVDNKLGINDQLELDVAKLVNEFSCEWTDAINDESQLKRFTHFINSDERDDNVVFVSDGREQHRPATYTEKNPNAKGDILHVALTDATVEK

SEQ ID NO: 27540 - protein, 544 aa, Silicibacter pomeroyi DSS-3
MTRERLYLYDTTLRDGQQTQGVQFSTPEKLRIASALDSLGIDYIEGGWPGANPTDSAFFDAAPATRARLTAFGMTKRSGRSAENDDVLAAVMNAGTGTVCLVGKAHDYHVTQALGIELAENTENIRASMAHIVAQGREALFDAEHFFDGYRDNPAYALEVCRAALEAGARWIVLCDTNGGAMPADVARVVGEVIAAGIPGDRLGIHCHNDTDQAVACSLAAVIAGARQIQGTLNGLGERCGNANLTSLIPTLLLKEPYASRFETGVSAGALADLTRISRMLDDILNRVPVKQAPYVGSSAFAHKAGLHASAILKDPSTYEHIDPSLVGNERIIPMSNQAGQSNLRKRLTDAGLSVPPGDPALGHILERIKAREDEGYSYDTAQASFELLARRELGQMPAFFEVKRYKVTVERRKNKYDRMVSLSEAVVVVKVDGEKLLSVSESLDDTGSDRGPVNALYKALAKDLGRYSAILSDMRLVDFKVRITQGGTEAVTRVIIDSEDGKGRRWSTVGVSANIVDASFEALLDAINWKLLRDCAGQGAAAE

SEQ ID NO: 27541 - protein, 487 aa, Bacillus thuringiensis serovar konkukian str. 97-27
MTVQTAQIVKNYIGGEWVESISTKMEAVYNPATGEVIAQVPLSTKVDVEQAVLAANEAFKSWSKTAVPKRARILFKYQQLLVDNWEELAKLITIENGKSYNEAYGEVLRGIECVEFAAGAPTLMMGKQLPDIATGIESGMYRYPIGVIGGITPFNFPMMVPCWMFPLAIACGNTFVLKPSERTPLLAARLAELAEEAGLPKGVLNIVNGAHDVVNGLLEHKLVKAISFVGSQPVAEYVYKKGTENLKRVQALAGAKNHSIVLNDANLELATKQIISAAFGSAGERCMAASVVTVEEEIADQLVERLVAEANKIVIGNGLDEDVFLGPVIRDNHKERTIGYIDSGVEQGATLVRDGREDTAVKGAGYFVGPTIFDHVTKEMKIWQDEIFAPVLSIVRVKSLDEAIEIANESRFANGACIYTDSGASVRQFRETIESGMLGVNVGVPAPMAFFPFSGWKDSFYGDLHANGTDGVEFYTRKKMLTSRWEK

SEQ ID NO: 27542 - protein, 1123 aa, Arabidopsis thaliana
MSLSQNAPKSKGIKREELKKQYEDVEDEEEIGSDDDLTRGKRRKTEKEKQKLEESELVEMKKLENLIFGSLYSPVTFGKEEEEDGSALFHVDRSAVRQIPDYEDDGDDDEELSDEENGQVVAIRKGEAAWEDEEEKQINVDIASVNRLRKLRKEENEGLISGSEYIARLRAHHAKLNPGTDWARPDSQIVDGESSDDDDTQDGGVDDILRTNEDLVVKSRGNKLCAGRLEYSKLVDANAADPSNGPINSVHFHQNAQLLLTAGLDRRLRFFQIDGKRNTKIQSIFLEDCPIRKAAFLPNGSQVIVSGRRKFFYSFDLEKAKFDKIGPLVGREEKSLEYFEVSQDSNTIAFVGNEGYILLVSTKTKELIGTLKMNGSVRSLAFSEDGKHLLSSGGDGQVYVWDLRTMKCLYKGVDEGSTCGTSLCSSLNGALFASGTDRGIVNIYKKSEFVGGKRKPIKTVDNLTSKIDFMKFNHDAQILAIVSTMNKNSVKLVHVPSLTVFSNWPPPNSTMHYPRCLDFSPGSGFMAMGNAAGKVLLFPHCTAVPFVEITTRKSLRFSKLMASLQLYGVKTPGLALSSKRLEFASKGACFSVTLPSSSAVFRDVEHSCRNIGLRVSCEALRVDLLQRKEPETCDSSGTGKELTCVMKFGGSSVESAERMKEVANLILSFPDERPVIVLSAMGKTTNKLLKAGEKAVTCGVTNVESIEELSFIKELHLSVHSPNLALFSWEIKFSMFRTAHELGVETTVIEKHLEGLHQLLKGISMMKELTLRTRDYLVSFGECMSTRLFSAYLNKIGHKARQYDAFEIGFITTDDFTNADILEATYPAVSKTLVGDWSKENAVPVVTGYLGKGWRSCAITTLGRGGSDLTATTIGKALGLREIQVWKDVDGVLTCDPNIYPGAQSVPYLTFDEAAELAYFGAQVLHPLSMRPARDGDIPVRVKNSYNPTAPGTVITRSRDMSKAVLTSIVLKRNVTMLDIASTRMLGQYGFLAKVFTTFEDLGISVDVVATSEVSISLTLDPAKLWGRELIQRVNELDNLVEELEKIAVVKLLQRRSIISLIGNVQKSSLILEKVFQVFRSNGVNVQMISQGASKVNISLIVNDEEAEQCVRALHSAFFETDP

SEQ ID NO: 27543 - protein, 121 aa, Glycine max
  misc_feature (14)..(14): Xaa can be any naturally occurring amino acid
MASPATGEETVRRXHILIKHEGSRRKASWKDPEGRVISATTRADAAARLGELRAQILAGRASFADLAAQHSDCSSARRGGDLGTFGRRQMQKPFEDATYALKVGEISDIIDTESGVHIILR

SEQ ID NO: 27544 - protein, 359 aa, Saccharomyces cerevisiae
MSEVITITKRNGAFQNSSNLSYNNTGISDDENDEEDIYMHDVNSASKSESDSQIVTPGELVTDDPIWMRGHGTYFLDNMTYSSVAGTVSRVNRLLSVIPLKGRYAPETGDHVVGRIAEVGNKRWKVDIGGKQHAVLMLGSVNLPGGILRRKSESDELQMRSFLKEGDLLNAEVQSLFQDGSASLHTRSLKYGKLRNGMFCQVPSSLIVRAKNHTHNLPGNITVVLGVNGYIWLRKTSQMDLARDTPSANNSSSIKSTGPTGAVSLNPSITRLEEESSWQIYSDENDPSISNNIRQAICRYANVIKALAFCEIGITQQRIVSAYEASMVYSNVGELIEKNVMESIGSDILTAEKMRGNGN

SEQ ID NO: 27545 - protein, 465 aa, Bacillus cereus ATCC 10987
MAKQLPDIGDYKYGFKDKDVSIFRAGRGLTKEIVEEISRMKEEPQWMLDFRLKSLDKFYEMPMPQWGGDLNDLDFDEITYYVKPSEKSEKSWDEVPDEIKATFDKLGIPEAEQKYLAGVSAQYESEVVYHNMKEDLEALGIVFKDTDSALKENEDIFREHFGKVIPPTDNKFAALNSAVWSGGSFIYVPKGVKVDTPLQAYFRINSENMGQFERTLIIVDEGAHVHYVEGCTAPVYTTNSLHSAVVEIIIKKDAYCRYTTIQNWANNVYNLVTKRAVCEENATMEWIDGNIGSKLTMKYPAVILKGEGARGLTLSIAIAGKGQHQDAGAKMIHLAPNTSSTIVSKSIAKHGGKVTYRGIVHFGPKAKNSRSNIECDTLIMDNQSTSDTIPYNEIKNDYVSLEHEAKVSKVSEEQLFYLMSRGISEQEATEMIVMGFIEPFTRELPMEYAVEMNRLIKFEMEGSIG

SEQ ID NO: 27546 - protein, 505 aa, Debaryomyces hansenii CBS767
MNWYIIIFIAYFVRRLIILCKNYWLARQWGCEPMQEFGGRFGIISLINVIKARREGFLVDYQKQTYIETDTDTIKSRLFHKQLIHTKNAENVKAVVATQYDDFSIGKRHKFFKPLLGNGIFASEGERWQHSRTMLRPQFARERVAHVQALEPHLQVFAKHVRKSEGGVFNIQILFHKLTIDAATEFLFGESVDSLRDASIGYESLPTDIDGKAGFDDAFNISQNYMMLRALAQDLYFLFDSKEFREANRKIHKFTGHYVHKALETTQEELDAKSRDGYIFLYELVKQTRDPIILQDELLSIMLAGRNTTASLLSFLFFELARNPEIWSKLKREVYEHFGNGDDVKLEKITFESMKKCTYLKWVINETLRMYPSVPQNFRVAKKDTTLPRGGGKDQQSPIFVPKGQFVLYTTYSMHRLEAYYGKDADVYRPERWENLRNIGWAYMPFSSGPRVCLGQQFALTEASYITIRLAQMFPNLESHDSKYPPPKLTNSTMRHLDGVFISLH

SEQ ID NO: 27547 - protein, 430 aa, Bacillus cereus ATCC 10987
MTIGTLPFDQETIRQRASEVNEAAWLTEFRLQALAQATALPMPTPDKTKIDKWDFIGKGDAAKQEPVSSLTELPEAVKNLIDENNSVLVQRTGTTAFVSLADEAKEKGVIFTDIVTAATEHAELVQKYLMKDGVKVDEHRLTALHAALINGGAFVYVPKNVVLETPLQAVFLVDGEEANVYNHVLFVADANSTATYVENYVANENAKGIANIVAEVIVEQGAQVKFGAVDLLAKDVTTYVNRRGIVGRDGRVDWALGLMNDGNTISENVTNLMGDGSYADTKTVTIGRGNQTQNFTTKVVHFGKHSEGWILKHGVQKDSATSIFNGIGKIEHGASKSNAQQSSRVLMLDEKARGDANPILLIDEDDVMAGHAASVGRVDPTQLYYLMSRGIPKREAERLVIHGFLAPVVNELPIEGVKAQLVEVIERKVR

SEQ ID NO: 27548 - protein, 363 aa, Ralstonia solanacearum
MHNKDKRMTKIAVLPGDGIGTEIVAEAVKVLKTLGETFEMETAPVGGAGYEAKGHPLPEDTLKLAKEADAILFGAVGDWKYDTLPRELRPEQAILGLRKHLQLFANFRPAICYPELAGASSMKPEIVAGLDILIVRELTGDIYFGQPRGVRAAPDGLFAGAREGFDTMRYSEPEIRRIAHVAFQAAAKRGKKLCSVDKANVLETFQFWKDIVTDVHKEYPEVELSHMYVDNAAMQLVKAPKNFDVVVTGNMFGDILSDEAAMLTGSIGMLPSASLDANNKGLYEPSHGSAPDIAGKGIANPLATILSAAMMLRYTLGKAEQADRIENAVKKVLAQGYRTGDILTPGCKQVGTVEMGDAVVAAL

SEQ ID NO: 27549 - protein, 162 aa, Triticum aestivum
  misc_feature (77)..(77): Xaa can be any naturally occurring amino acid
MQFLRGVGGGGAGGAGGAGSMAWEVLRRHFSRKRAVDIRRINPKVPKEEAVAISGRLLQILADHGPLTVGITWNHAXQDAAIDGLNSKTHMKILLKWMWGRRIIKLSCTQAGNTKKFLYSPFTADDAEAAEEPSPAEEQPKKKGWKGKHPKYQTKKQPAAAA

SEQ ID NO: 27550 - protein, 384 aa, Bacillus mycoides
MLEFDTTQDQLANIKVIGVGGGGNNAVNRMIEHGVQGVDFIAVNTDAQALNLSKAETKMQIGGKLTRGLGAGANPEVGKKAAEESKEQIQEALRGADMVFVTAGMGGGTGTGAAPVVAQVAKELGALTVGVVTRPFTFEGRKRATQAASGIASFKENVDTLIVIPNDRLLEIVDKNTPMLEAFREADNVLRQGVQGISDLIATPGLINLDFADVKTIMSNRGSALMGIGSGNGENRAAEAAKKAISSPLLETSIDGAQGVIMNITGGANLSLYEVQEAADIVASASDPEVNMIFGSVINEGLKDDIVVTVIATGFDDSASTQPPKPIIRPTANHTQQQQQPVAQPSKQREVKREMKREEPVVHDRHTDSDDIDIPAFLRNRRRR

SEQ ID NO: 27551 - protein, 131 aa, Candida glabrata CBS 138
MAASLPHPKIVKKHTKKFKRHHSDRYHRVSENWRKQKGIDSVVRRRFRGNISEPTIGYGSNKKTKFMSPSGHKVVLVSNLKDLETLTMHTKSYAAEIAHNVSSKNRVTLLARAKALGVKVTNAKGRLALEA

SEQ ID NO: 27552 - protein, 118 aa, Shewanella sp. ANA-3
MLKITSKQLEVTAPIRERIESRFDKLSRHDVQLINPHVIITEEKPGFKIEASVGIPNGELFAQAKHDNLYAAITAMGQKLEKQLNRLTHKPEAQRFASITHPEDAVNVEDDYEEEDAA

SEQ ID NO: 27553 - protein, 369 aa, Candida albicans SC5314
MFRQVTKSAPVIRTTQRLFARSYIAGQFTGSKGSDGKYTVTLIEGDGIGPEISQAVKDIYAAADVPIHWEPVDVTPLLIDGKTTLPQPAVDSVNKNLVALKGPLATPVGKGHTSMNLTLRRTFNLFANVRPCKSIVGYETPYENVDTVLIRENTEGEYSGIEHTIVPGVVQSIKLITKPASEKVIRYAFEYAKSINKPHVLVVHKASIMKLSDGLFVNTAKEVAQEYPDVSLDFELLDNTSLRLTADPSQYKNVVMVMPNLYGDIMSDLSSGLIGGLGLTPSGNMGNKVSIFEAVHGSAPDIAGKGLANPTALLLSSCMMLRHMSLNSDADRIENAVLKTIASGPDNRTGDLKGTATTTRFTEEVIKNL

SEQ ID NO: 27554 - protein, 95 aa, Klebsiella pneumoniae
MQLNITGHNVEITPAMRDFVTAKFSKLEQFFDRINQVYIVLKVEKVTQIADANLHVNGGEIHASAEGQDMYAAIDGLIDKLARQLTKHKDKLKQH

SEQ ID NO: 27555 - protein, 160 aa, uncultured archaeon GZfos19C8
MYRYREGGMMMEEKRDLSGFVNAEEAEIEQIKERKMREMEEKIKAKGEEQKEGIIDYPIVLTDETFTDAVRKSSLIVVDCWAPWCGPCKTIAPVIEELAKQYAGKVVFGKLNVDENPKVATDFAIMAIPTMFIFKNGEPVDVIQGALPKPYLEAKLKEWL

SEQ ID NO: 27556 - protein, 469 aa, Burkholderia pseudomallei K96243
MQTESNGRPGAGGGAARPALQQTLGTWQLWGIAVGLVISGEYFGWSYGWASAGTLGFVVTALFVAAMYTTFIFSFTELTTSIPHAGGPFAYARRAFGPAGGYLAGVATLVEFVFAPPAIALAIGAYLHVQFPGLEPKHAAMGAYLVFMALNIVGVQIAATFELVVTLLAIFELLVFMGVVSPGFAWSNFVKGGWAGADHFSAGAFHGMFAAIPFAIWFFLAIEGVAMAAEEAKHPKRSIPIAYVAGILTLVALAIGVMVFAGGAGDWTKLANINDPLPQAMKYIVGANSGWMHMLVWLGLFGLVASFHGIILGYSRQIFALAREGYLPEWLAKVHPRFKTPYRAILAGGVVGIAAIYSDELIQFGGQTLTANIVTMSVFGAIVMYIVSMAALFKLRRMQPRMERPFRAPLYPFFPAFALVAALVCLGTMVYFNALVASIFVAFVALGYGYFLATRAQREAAPADALLEE

SEQ ID NO: 27557 - protein, 465 aa, Triticum aestivum
MNQSAVGSLVPRQAPGSYGLPFVSAIRDRLDFYYFQGEAKYFESRVEKHGSTVLRINVPPGPFMARDPRVVAVLDAKSFPVLFDVDKVEKKNLFTGTYMPSTSLTGGFRVCSYLDPSEPTHTKVKQLLFSLLASRKDAVIPAFRSHFSSLLATVESQLVLAGKSNFNTLNDFTSFEFIADAYFGVLPSASDLGTTGPTKAAKWLIFQLHPLVTFGLPLILEEPLLHTVLLPPIFVSGDYKALYKYLYAAATKALDMAESLGLNRDEACHNLLFATVFNSYGGLKVMLPGILGRIAEAGEKFHQRLAAEVRTAVADAGGKVTIEALEKMELTKSAVWEALRLEPPVKFQYGRAKADMNIESHDAVFAVNKGEMLFGYQPCATKDPRVFGSTAREFVGDRFVGERSKLLQYAYWSNGRETESPSVDNKQCPGKNLVVLVGRLLVVELFLPVRHLHRRRRGRPAGHQG

SEQ ID NO: 27558 - protein, 285 aa, Buchnera aphidicola str. APS (Acyrthosiphon pisum)
MPAIIIDGNKIAKKIELKILKKVKQRKKNGERIPGLAMILVGNHIPSQIYVNKKKISCKNVGFFSECWNLPSNINEKEILNIISKLNENKNIDGILIQLPLPPQINHMKILSSIVPDKDVDGFHPYNTGSLCQRTPKLRACTPKGIITMLKYNKIKTHGLHAVMVGASNIVGRPMSLELLLAGCTTTVTHRFTKNLKDHVQNADLLIVAVGKANFLKGSWIKTGSIVIDVGINRLKNGKVVGDVEFKTAYLRASYITPVPGGVGPMTVATLLQNTLEACENHDDI

SEQ ID NO: 27559 - protein, 278 aa, Bacillus clausii KSM-K16
MKEHNKVVLITGANSGIGLELTKNLLLQGWEVAALIRSDFPNEQPIIIDALKKNHLRVYKADLADFSSLRNALDEIKKSETKIDMLFNNAGVSFAEYKHSKQGRELHFEVNTLVPFIITMELKELLLKGQNKTIINTSSNSLLFLKQFDLNTIINPKTPFKKLIGPYANSKLALSLWTNGIAPELSSEGIKIRSVCPGPNKTRLTKGKGMPSYILLIRNLMFTPPSKGASRLYDAAFNNEITGIFINKGKETAIKLSGHEEEVLNRLYDIYKNEFLVL

SEQ ID NO: 27560 - protein, 334 aa, Burkholderia sp. 383
MARKITYSQAINEALAQEMARDESVIVMGEDNAGGAGAPGEDDAWGGVLGVTKGLFHKFPGRVLDTPLSEGGYIGAAVGAAACGMRPVAELMFIDFMGVCFDQIFNQAAKFRYMFGGKAVTPVVIRAMYGAGLRAAAQHSQMLTSLFTHIPGLKVVCPSTPYDAKGLLIQAIRDNDPVIFLEHKLLYTREGDVPEESYAIPFGEANVMRDGDDATIVTYGRMVHLAMDAAAKLAKDGIQVDVIDLRTTSPLDEETILESAERTGRVVVVDEANPRCSIATDIAALVAQRAFHALKAPIELVTAPHTPAPFASVLEDLYIPSADAIAQAVLKTRS

SEQ ID NO: 27561 - protein, 554 aa, Nocardia farcinica IFM 10152
MSAPAAKPAILSVDDDPGVSRAVVRDLRRRYGADYRILRAESGDQALEALREMKLRGQPVAVLIADYRMPGMNGIEFLEHAMDLHPYARRVLLTAYADTDAAIDAINVVDLDHYLLKPWDPPEEKLYPVLDALLEAWRGSEHRPVTETKVVGTRWSPRASQVREFLARNQLPYRWYLADEPEGARLLEAAGAEPERCPVVITSAGQVLLQPTDSVLAEHVGLTVNPAGEFYDLIVVGGGPAGLGAAVYGASEGLRTVLVERTATGGQAGQSSRIENYLGFPDGLSGAQLADRARRQAAKFGAEVVTTREVVGLEVNGSARTVRFADGGRLCGHTVIIATGVDYRRHPAPGVDEFTGRGVYYGSAMTEAAECADREIYIVGGANSAGQAAVFLSRNARTVHLVVRADSLTKSMSHYLIEQIRQIPTIQVHTETEVVGAIGDDHLRQIVLRDNRTGAEEKADTERLFLFIGAAPQTDWLDGVVARDPAGYVLAGPDLLVEGTRPAGWELDRPPHHLETSVPGVFVAGDVHAESAKRVASAVGEGAMAVMFVHRYLA

SEQ ID NO: 27562 - protein, 222 aa, Oryza sativa (japonica cultivar-group)
MAAATMALSSSFAAAAAVGAPWRGVVGAGRAAVGFPPRRRAVTLVVRAQAEPEVEPTKEETITSTPSPVAAAPKAKPAASTGLWDVLAFSGPATERINGRLAMVGFVPVLAVEASRDGELLEEATSRGGLAWFAATAAVRPSRPPRSRFRVPRRRRLCPSPRRGGGCSLWSPPPSLRPVPPPAPASIRPRAEGCRFVVAAAATAASSPAAAAAASPVCADRR

SEQ ID NO: 27563 - protein, 417 aa, Lactococcus lactis subsp. lactis Il1403
MEFSFDTDLTSGAVIKVIGVGGGGGNAINRMIEEGVSGVEFIAANTDVQALRSSKADTVIQLGPKLTRGLGAGAQPEVGKRAAEESAETVSQALEGSDMIFITAGMGGGTGTGAAPVIAQIAKELGALTVGVVTRPFGFEGSKRSYFATEGIEALRANVDTLLIISNNNLLEIVDKKTPLTEALREADNVLRQGVQGVTDLITNPGMINLDFADVKTVMENKGDALMGIGVATGEERVIEATRKAIYSPLLETTIEGAENVLLNVTGGMDMSLIEAQDASEIVIQAAGNDVNIMLGTAIDPNLKDEIRVTVVATGVAKEDADEALGLQPEPRRQPNLTHNSNMQHAQTSRPMQSQQQTQAAPQGQNQSSAFGDWDIRRETSTRQNVSNTRDTSSVTSFGGVPTTDEDLDTPPFFRKN

SEQ ID NO: 27564 - protein, 413 aa, Solibacter usitatus Ellin6076
MSRRVVVTGVGLLTPLGIGTQTTWDALLASKSGIAGITQFDATAFSCRIAGEVKGFDPSNYIEKKEIKKMGRFIQFAIAAADFALKDSGLVVTPEIAEEVGVYIGSGIGGFEVIEREHQTLLEHGPRRISPFFIPATIINLASGYVSIKSGAKGPNSATATACTTSAHSIGDSFRMIQRGDAVAMICGGTEAAVTPMGIGGFAAMRALSTRNDDPERASRPWDKDRDGFVVGEGAGIIVLEALEHATARGAKILAEIVGYGMSADAFHVTAPPDDGDGAFRVMRNAIKDAGLSPEQIDYINAHGTSTDVGDKAETMAIKRAFGEHAYKVAVSSTKSMTGHLLGGAGGLEAGITVMAIHDQVAPPTINHECPDPACDLDYVPNHARKMPIEYALSNSFGFGGTNGCLIFKRYSE

SEQ ID NO: 27565 - protein, 170 aa, Kineococcus radiotolerans SRS30216
MTSPTPASTPTPAPAPFTTADLYDEHGKRLGSCDTPLRQFGAHRAFSGAIRTVRCFEDNALLKSVLSEAGHGQVLVVDGAGSLHTALMGDMIADIATRNGWAGVVIHGAVRDVAVLAGIELGIKALGSNPRKSAKTGAGEKDVPVEFGGCTFTPGHHLWSDDDGVVVLPA

SEQ ID NO: 27566 - protein, 600 aa, Roseovarius nubinhibens ISM
MYQSFTETARPEQGPPRLAALRHALQEARLSGFLVPRADAHQGEYVAPGDERLAWLTGFTGSAGFCIALRDRAGVFIDGRYRVQVKAQVALDHFTPVHWPETKPATWLREALPEGGRIGFDPWLYTPDQIDEITKGLTGSGIDLVPHDNLIDQIWEDRPAPPLGAIRAYPDALAGLTHGQKRATLGAELSSAGQEAAVITLPDSIAWLLNIRGSDIPRNPIPHGFAILHATGHVTFFVEAAKLDDTLRAHLGDEVVIRPPSAFGPALRSLTGTVRVDAKSAPLQVLRELEQAGVPVQMGDDPCILPKACKTPAEIDATREAHLRDGAALCEFLTWFEAQAPGTITEIDVVRELENRRRATGALLDISFETIAGSGPHGALAHYRVSESSNRTLVAGDLLVLDGGGQYLDGTTDITRTLPVGEVGEDERAAFTRVLQGMIAMSRVRWPAGLAGRDLDVLARYPLWLADQDYAHGTGHGVGVHLCVHEGPQRLSRVSEVPLRPGMILSNEPGYYREGAFGIRIENLLVVHEATPLPGGDQTGKLAFETLNFVPIDTRLIETGMLSEPERDWLNDYHAACRDKISPRLGEAARLWLAQRTQPV

SEQ ID NO: 27567 - protein, 407 aa, Bradyrhizobium sp. BTAi1
MPDVFGPRGPRNAQDARSPEGSTVSRSPMPRVILNDTTLRDGEQAPGVAFALAEKVAIARALARAGVPEIEAGTPAMGADEIAAIRAIVDARLPATIIGWCRMREADVDAAIAAGVSMVNVSIPTSDVQIAAKLGGDRSAALELLKRVVTYARQRGLDVAVGGEDSSRADVGFLAEVIATAKALGARRFRVADTLSVLDPDATFALVNALRATTDLEIEFHGHDDLGLATANTLAAVKAGATHASVTVIGLGERAGNAPLEEVAVALRQLYRRETGIVLAELDRVANVVAAAAARAIPLNKAIVGEHVFTHESGIHVDGLLKDQRTYQALDPMLFGRSNRIVIGKHSGLSAITSLLSDLRLPVSADQAQRILARVRKHAVVHKGPVPKEAVAAIWREVCDHPLASFA

SEQ ID NO: 27568 - protein, 465 aa, Salinibacter ruber DSM 13855
MAIPIEMPKLSDTMEEGVLSAWLVDEGEEVSAGDVLAQVETDKATMDLEAFDEGVLLKQVIGEGDAVPIGELIAVIGEAGEDISDLVDDAGGDGAAEPEADPDAEVDSDADAEDASAEPEVEPEPAPEPSGDGQLSERMPEPVPAGTDAEGRRIKASPLARRIAQEHDVELAQVDGSGPEGRIVRRDVETHVEKQEAAPESTPEPEPTTEPEPAPQPEPSVPEAPSYAMPDEEAAYESEGITQMRETIARRLAESKYSAPHYYLTVDIDVERAIEVREDLNDLAEEQGRAKISFNDFITKACALSLHDHPYVNAAYRPDEGEIHKHNRVHIGIAVAIDEGLITPVIRDADRKGLSELARETRALAERARDRDLEPEEFEGATFTTSNLGMFGIEEFTAIINPPNSAILAIGEIRDTPVVEDGEVVPGKRMKVTLSCDHRVVDGAKGAHFLDTVKSYLEEPMNLLL

SEQ ID NO: 27569 - protein, 430 aa, Bordetella bronchiseptica RB50
MRACQPEYEMSLIVQKYGGTSMGSVERIKNVARRVAKWHAAGHKVVVVPSAMAGETNRLLSLAREISPQPDGRELDMIAATGEQASSGMLAIALQAEGVPARSYAGWQVPVRTDSSYTKARIKSIDDKRVLADLDAGRVVIVTGFQGVDDDGHITTLGRGGSDTSAVAVAAAIKADECLIFTDVDGVYTTDPRVVPEARRMAVVSFEEMLEMASLGSKVLQIRSVEFAGKYHVPTRVLSSLTDPLIPLEEEMRSGTLITFEEDEKMEAAVVSGIAFSRDEAKITLLAVPDKPGIAYSILGPVAAANIDVDMIVQNQSVAGTTDFSFTVNRNEYQRTLDLLKREVIPAVSARELVTDEKVAKVSIVGIGMRSHVGVASLMFQTLSQEGINIQMISTSEIKTSVIIDDKYMELAVRSLHKAFGLDQVPGDQV

SEQ ID NO: 27570 - protein, 430 aa, Robiginitalea biformata HTCC2501
MILEMKVPSPGESITEVEIAQWLVSDGDYVEKDQAIAEVDSDKATLELPAEESGVITLKAEEGDAVAVGEVVCLIDTDAEKPDASGGKDQEGSAGTDSVGKGDEGSGGNAEKELDKQKEQAGQAGGSKAPQPRQAKETYASGVASPAAKKILDEKGIDPASVKGSGKDGRITKDDAVKAVPSMGSPGGGSRGESRSKLSMLRRKVAERLVSAKNETAMLTTFNEVDMSAVFDIRAEHKEAFKEKHGVGLGFMSFFTKAVIRALQQFPAVNSMIDGKEMITYDYCDISIAVSGPKGLMVPVIRNAENLSFRGIEEEVKRLALRARDGQITVDEMTGGTFTISNGGVFGSMLSTPIINPPQSGILGMHNIVERAIVRDGAIAIAPVMYVALSYDHRIIDGKESVGFLVAIKEAIENPVEHLMDGDLKKALEL

SEQ ID NO: 27571 - protein, 377 aa, Kineococcus radiotolerans SRS30216
MSTASTATTTATTPAAPAVGSKQYSLAVLHGDGIGPEIVPASVKILDAAVAAAGATPIAWTELPLGRSAIDEYGEHTPTKTLDALDEVDGWLLGPHDSAAYPEPYRSQLNPSGTIRKHFGLFANIRPAKAFRGGNAIVEGTDLVIVRENTEGFYADRNTFAGTGEMMPTPDVAIMHGIITRAATERIAHEAFQLARTRDKRVTIVHKANVLKMTTGLFRDVCREVGKQYPDVAINDFHIDAATVHLVRRADKFDVIVTENMFGDILSDLAGEVAGSLGIAPSINSSATHAMAQASHGSAPDIAGRDIANPIAMILSSAMLLRWLAAKFDDEKIARAADIVEAAVDLTVAEGATTPDMGGTSSCSGFADAVVAATARV

SEQ ID NO: 27572 - protein, 964 aa, Zea mays
MTTMSDDGDRTCPLCAEEMDITDQQLKPCKCGYDICVWCWHHIIDMAEKEETVGRCPACRTCYDKDRIVKMAATCDRTVAEKNAEKKHRTQKVKPKAAPSAAATSTVESKKHLASVRVIQRNLVYIIGLPAHLCNESVLECREYFGQYGKILKVSVSRPTGPPSQQASANSNISVYITYAKEEEAIRCIQAVHNFVLEGKVLRACFGTTKYCHAWLRNMTCGNPDCLYLHDVGSQEDSFTKDEIISAYTRTRVPQMASGVSQRRTGTVLPPPGDDFSYSAVVSAKHTFKNGTLNTTSQPRLSPPNSSSGRSTLPSAASWGQRDLNARTTATGATSSQSHTKPKSESQSNPFSSSSVFSCTKTPSSWNDDTSTAAKISEGQQLSEKESRTLQPYKPGISKETQALSSLESSLDIDFSTIPSAWNDDDIVVPDVMPKGSDENQVANKNECQSSHTAVEKMLEDIGSKDTDMEKLSAQISSVTLGGNDEIQSMAGNQQPDVMPCTSVDVLMDQNFGRDLAHPNPDELLLPSENKDSIVSCQYSSDKRLDWSLEMQNCSVTPLNDRMDSALLTDKIHSRQLDGSEQSSYSSFVEFPSTVDTSFHHHRAMGSLRNNSIGSFDKTISVNKYERRIISDTLSEFNPWDDSYSTANNFARMLRESKNNDVHCIAPSWKSGTGIKESRFSFARQDNQGNLFDSSLRNCGTGTEQNFSLLPQNSRGNIYQNGLAFQSLENEFSNNNSPGVLDMATTGTSMSKISAPPGFSAPTRVPPPGFSTAFPSQDSLNPTPVFPSGILCHGGSIPPPRFSSFSSGISTQEFDDPAILAMGKGLMPGIGDSGLEMKNTPAFQAQLQPASSDPRFQLHVQPNVQSRQNMRFTDPMQDGLNHMNDNYLASRFLAQNQGPLSPYVQIPQQPRNSQVINGHWDGWSDLRQGNNAPMSDMSRILYPSEVNKLHMLGSNDVHNRAFGM

SEQ ID NO: 27573 - protein, 437 aa, Robiginitalea biformata HTCC2501
MDSKIFKISLIAALAGFLFGFDTVVISGAEKKLQLLWETSDAYHGTVVIGMALFGTVIGAIFGGFPTNRFGRKRTLIWIGVLYSVSAIGSALSNDPVTFGIFRFLGGIGIGASTVAAPTYISEIAPADQRGRLVGMYQFNIVFGILVAYFSNYLLNGIGDNDWRWMVGVEAFPALIYTAFAFGIPKSPRWLVTQHREEEAAGILEKLGLKLSVGDIVRDLEANVQAGAETIFMKKYRFPLLLAFLIAFFNQFSGINAFLYYAPRIFELAGLEESTALLSSIGIGVTNLVFTLLGIYLIDRLGRRTLMYYGSFGYIVSLALVAAAFFFNWTGMAVPIFLFVFIASHAIGQGAVIWVFISEVFPNHLRGSGQSFGCSVHWVLAWLIPSSVPFLMSWIGPAPVFGFFAFMMVLQLLFVHFMMPETKGISLEELSKRLLRK

SEQ ID NO: 27574 - protein, 485 aa, Oceanobacter sp. RED65
MNVVWFKRDLRLHDHDALFKAISLGKPCLLLYILEPSLIEDTHYDDRHWRFVYESLQDLNKQLSPYGHRLTVIKGEALDVLQAIHQRHEIHTIFSHQEIGIARTFSRDRKIEYWCKNNSIVWQQSPHGAVVRGLQHRLYWQDHWYNYMARSIPPIELNKLKSEQSCLHDVDAFDDIYKQTNPHFQYGGESSAMVTLEDFLTDRHLHYRGSISSPSRSRHYCSRLSPYLAWGNLSLRYCYQQTQLAFAQSKGKQHLNAFSSRLHWHCHFIQKFESESRMEFEAVNRGYLDFPYDIGDSAHEKLAIWQQGKTGYPLVDACIRCLQTTGYLNFRMRAMLVSFACHYLNLHWKSVAEYLAKLFLDFDPGIHYSQIQMQAGITGTNTIRIYNPVKQSQEQDPEGEFIRLWCPELSSLSNDVIHSPWLLGPLEKQMFALDYPEPMVNADCIQINRERLWSWRSRDKVKLEAKRILNTHVTPNSETRQQAKR

SEQ ID NO: 27575 - protein, 395 aa, Flavobacteria bacterium BBFL7
MAKETYDRSKPHLNVGTIGHVDHGKTTLTAAITKVLADAGFSNATSFDQIDNAPEEKERGITINSSHVEYQTQNRHYAHVDCPGHADYVKNMVTGAAQMDGAILVVAATDGPMPQTREHILLGRQVGIPRIVVFLNKVDMVDDEELLELVDMEVRDLLSFYEYDGDNGPVVSGSALGALNGEQKWVDTVLELMEAVDAWIEEPVRDMDKPFLMPIEDVFSITGRGTVATGRIETGVANTGDPVEIIGMGAEKLTSTITGIEMFRQILDRGEAGDNAGILLRGIEKTQISRGMVIVKPGSVTPHAKFKAEVYILKKEEGGRHTPFHNNYRPQFYVRTTDVTGNIALPSGVEMVMPGDNLTITVDLIQPIALNLGLRFAIREGGRTVGAGQVTEILD

SEQ ID NO: 27576 - protein, 196 aa, Pisum sativum
MAVSSCQSIMSNSMTNISSRSRVNQFTNIPSVYIPTLRRNVSLKVRSMAEGEPKEQSKVAVDPTTPTASTPTPQPAYTRPPKMSTKFSDLMAFSGPAPERINGRLAMIGFVAAMGVEIAKGQGLSEQLSGGGVAGFLGTSVLLSLASLIPFFQGVSVESKSKSIMSSDAEFWNGRIAMLGLVALAFTEFVKGTSLV

SEQ ID NO: 27577 - protein, 189 aa, Oceanobacter sp. RED65
MLRSTITLAFMIGVTLIVSYQAKAGEDNTKDCPQWLDMTLHKLHSKETVDLCSVVTGHPLLIVNTASHCGYTKQFSGLEALHQDFQDMGLVIIGFPSNSFNQEASSEAKTASVCFKNFGVTFLMSKPVNVRGEDAHPVFKHLNQQRGEPSWNFNKYLVSPNGEVLKRYESSVTPSSQRLRNDIRTQFSL

SEQ ID NO: 27578 - protein, 708 aa, Anabaena variabilis ATCC 29413
MSALWTYFFNSAPFIPHGHCYLWQTDLVWLHIISDGLIAVAYYSIPATLFYFVRKRQDLPFYWMFLLFSGFIVACGTTHIMEVWTLWYPTYWVSGFLKAITAIISVFTALALIPLVPKALILPSPAQLERANKDLQNEIGERLKVEAELRKYQNHLEELVNIRTNEITNANEKLQQEIHERQRIVEILRESEERYRYLAEAIPQLVWTADANGECDYFNQNWCDYTGLTLEESLGSGWLAALHLEDLERSYETWSKAVETGTLYENEYRFKRAADGSYRWLLGRGLPLKDHQGRVVKWFGTCTDIHEQKQILEERARLLELEQTARAEAETANRIKDEFLAVLSHELRTPLNAILGWSKLLQERKLEPARTFQALATIERNATLQVQLIEDLLDISRILQGKLVINITKVNLVIVILTALETMRLAAESKLIQVSTNFPSKMGQVMGDSARLQQVVWNLLSNAVKFTPKGGKIEVSLEKVDGYAQIVVSDTGKGIKPEFLPYVFDYFRQADSSSTRRFGGLGLGLAIVRKIVEIHGGTVTAQSLGEEQGASFTVRLPILPEEDGNVTYEQHRSTSSITSSLPLEGIKVLVVDDDADSRDFLTFILEQEGAEVTLAASALEVLQLLPEIKPDVLVSDISMPDMDGYTLIRQVRTWTAEQGGAIPAIALTAFARQYDREQAFQAGFQLHLPKPLNAEEFFAAVVELVNGQ

SEQ ID NO: 27579 - protein, 253 aa, Brucella suis 1330
MSVERHADGVATVRINRPEARNALNLTTRQQLAEHFRALSGDESVRAIVLTGGETCFVAGADVREFASAGPIEMYLRHTEYLWDAIASCAKPVIAAVNGYALGGGCELAMHCDIIVAGEGAVFGQPEVKLGLMPGAGGTQRLIRAVGKFQAMRIALTGCMVPAAEALSIGMISEMTANERTLPRAHELAVEIARLPALAVAQIKEVMLVGADLPLDGALALERKAFQLLFDSKDQKEGAAAFLEKRKPAYNGR

SEQ ID NO: 27580 - protein, 322 aa, Bacillus methanolicus
MNKIAVLTSGGDAPGMNAAIRAVVRRGIFKGLDVYGVKNGYKGLMNGNFVSMNLGSVGDIIHRGGTILQTTRCKEFKTAEGQQQALAQLKKEGIDGLIVIGGDGTFEGARKLTAQEFPTIGIPATIDNDIAGTEYTIGFDTAVNTAVEAIDKIRDTAASHDRIYVVEVMGRNAGDIALWAGMCAGAESIIIPEADHDVEDVIDRIKQGYQRGKTHSIIVVAEGAFNGVGAIEIGRAIKEKTGFDTKVTILGHIQRGGSPSAYDRMMSSQMGAKAVDLLVEGKKGLMVGLKNGQLIHTPFEEAAKDKHTVDLSIYHLARSLSL

SEQ ID NO: 27581 - protein, 737 aa, Oceanobacter sp. RED65
MDSNLLHALTALYALESRQQLRLQGIKILLETQAFSEVSINPKPCIEHNKQCLDLGAGYFFNYLPSADKQQIAEALTKAFRSQYLACHATTQTHALEQIERLSHVGYWRWHVSENRVFYSPQWKAMLGYEDNEIKSDFSAWENLLHPDDRAEAERQVAYFFSHPHATNIVEFRLQCKNGQYRTIISKGRVESLQADNQTPDIIFGIHFPADELKGSQEDHQRLTTQLNRERTLRARAGEIADIGFWEVNLDTGYIYWNKKTRLIHGVDENYKPDLETAIEFYKAGYSRDTITQAVQTCLEHGTPYDVELEIVDIHGNEKWVRAIGIKDDSSDELRMFGLFQDVDQRKRAISELEQARHAAEEANRAKSVFLASMSHELRTPMNGVLGMLQLMEGSVKQEVNKRRLQIASNSAKNLLTILDDILDFSRIEAGKLVLDSTEFSMSELLSSLQELFNIEVEKKRSTIHIENLLQHDMYWGDEGRIRQMLINLIGNANKFTQNGQIIVRAQSGENRDLKLSVQDTGIGIPSDRLGQIFESFTQADSSTTRQYGGSGLGLTICKRLSELMNGTISVISEQGKGSEFTLHLPLREAECRQRTDQNVTFLPPVLSLDKSNILLVEDNEINQIVVSDMLKDLDAQIEICNNGKEAIDFLQSTETQFDCVLMDCQMPVMDGYEATCAIRRGVAGEAWTNVPIIALTANAMHGDKEKCLDAGMSDYLSKPVDMSDLQKAISPFLKIK

SEQ ID NO: 27582 - protein, 384 aa, Methanococcus maripaludis S2
MDEQDILNELREYRNQDLKYEEGYILGSMCTKPHPMARKISEMFFETNLGDPGLFKGTSKLEKEVVSMIGGILHNKNAFGYLISGGTEANLTAMRAFKNISKSKGKPQNIIIPETAHFSFDKAKDMMDLNVVRPPLTKYFTMDVKFIKDYIEDSKNEVSGIVGIAGCTELGSIDNICELSKIAVENDILLHVDAAFGGFVIPFLDDKYKLDGYNYDFDFSLNGVSSITIDPHKMGLAPISAGGILFRDNMFKKYLDVDAPYLTEKQQATIIGTRSGVGVASTWGIMKLLGIDGYETLVNESMEKTMYLVKKAREYGFETAIDPVMNIVALNDENKHDTCMKLRDENWYVSVCRCVDALRIVVMPHLEIEHIDGFLESLSNTKKY

SEQ ID NO: 27583 - protein, 614 aa, Ralstonia metallidurans CH34
MAGVLVFPDRKGSFRRVRPNGCRIAARSGCLMAPGLTRKQRMKASQFFISTLKEAPADAEIVSHKLMMRAGMIKKLGAGIYNYMPVGLRVIRKVENIVREEMNRAGAVELSMPVIQPAELWQETGRWDKMGPELLRLKDRHERDFAVQPTSEEVVTDIARTEIRSYKQLPVNFYQIQTKFRDERRPRFGIMRGREFTMKDAYSFDRDIDGLKASYQNMYDAYVRIFQRFGLEFRAVAADNGAIGGSGSHEFHVIADTGEDAIVYCPTSDYAANMEAAEALPLLATRAAPAEELKKTSTPEKAKCEHVAEFLGIPLERTVKSIVLATDSDAGAQIWLLLIRGDHELNEVKASKVPGLADFRFATETEIVDTFGSPPGYLGPIGPKKPVKVVADRTVANMSDFCCGANDRDYHYTGVNWGRDLPEPAVADLRNVVAGDASPDGKGTLDICRGIEVGHVFMLGTRYSESMNATFLDENGKTQPMQMGCYGIGVTRILGAAIEQNYDERGIIWPAAIAPFAVVVCPVGYDRNEAVKAEADRIHAELLAAGVDVILDDRGERPGVMFADWELIGVPHRVVVGDRGLKEGKVEYQGRRDAQATPVAVADVVAHVRGQLAA

SEQ ID NO: 27584 - protein, 413 aa, uncultured archaeon GZfos28B8
MNERKKIGIITSGGDCGGLNAVIKGVSSMANYYGLENVVIPNGYAGLYNLIDFETDDLISLDYIRMGLFHSNIAGSEAGHSRVKISKLDDETKYDRIKQGLDKHSIDALVVSGGDDTGSVALDLLNNGIAINHVPKTMDFDLQSYSVGGDSAINAISKMAANLRTTARSHNRIMILEVFGRYAGHAAFRGGIAADADCIIIPEVAPDFDVIYEDMFAKYTERIKKSDVKAGSYLIVVSEALKGNKPEDDVDERGFLIDKTRGSDAFGHYPLAGSGKTIEAELKKRMKNDVKMKQFMEQVHMYVQGQYEIPEIRVIRPTHLVRCGDSSAYDANFGKECGAGAVILLMQNITGATVTGVRNGVVEYMDISEAIKQNTVNLDQVALHEALGICFGRKTQKTGFEKKMKLDTVNRYL

SEQ ID NO: 27585 - protein, 390 aa, Prosthecochloris aestuarii DSM 271
MIHKREKADIAKRPVWIIDTTLRDGEQAPGVAFTPEEKKTIAGKLAECGVNELEIGYPAISSEEQAVITEIARMQLPLRLTSWARAKWEDIDAAIRCKTQGVHISFPLSELYLQLMDKPYEWVEEQLHLLVPKAKKYFDFVSVGGQDATRTGPDILERFIREAVECGADRIRIADTVGIATPLHLMQLISRIKKAVPATLEFHAHNDLGMATANAFSAMEAGCDAVSVSVTGLGERAGNAALEELAIALKLSGRYHSSIKTERLQELCGIVAKASNRNIEDQKPVIGASVFRHESGIHCNALLKNPLSYQPFLPGEIGRDNYELVIGKHSGSAAIQHVLAGNGIAIDRKEASRLLAPVRMTADRNKRGISADELTRIYQQYIVNPQDICR

SEQ ID NO: 27586 - protein, 505 aa, Brassica oleracea
MASSLLTSSGIIPTTSSNMVVRSFLPFGSVRLTRPYNKSSLLISCCSSVSKKAETSGTDLKTVVERWPEYIPNKLPDKNYVRVFDTTLRDGEQSPGAALTPPQKIEIARQLAKLRVDIMEVGFPVSSEEEFETIKTIAKTVGNEVDEETGYIPVICVIARSKERDIKAAWESVKYAKRPRIVIFTSTSDIHLKYKLKMTREEVVEMVASSIRFAKSLGFEDIEFGCEDGGRSDKDYICKVFEEAIKAGATTLACPDTVGINMPHEYGKLVRYIKANTPGIDDVIFSAHCHNDLGVATANTIAGICAGARQVEVTINGIGERSGNAPLEEVVMALKCRGAFVMGGVYTRIDTRQIMATSKMVQEYTGLYVQPHKPIVGANCFVHESGIHQDGILKNRSTYEILSPEDVGVVKSQNSGIVLGKLSGRHAVKGRLKELGYEISDEKLNEVFSRFRDLTKQKKRVTDDDLRALVTCGDEIFSSEKLNGTNDNEINRNGYVPSPQISSVV

SEQ ID NO: 27587 - protein, 423 aa, Brassica oleracea
MASSLLTSSGMIPTTGSNMVFRSFLPFGSVRLTHPYNNSSLLISCCSSVSKNAETSGTDLKTIVVDEETGYIPVICVIARSKERDIKAAWESVKYAKRPRILVFTSTSDIHMKYKLKMTREEVVEITKSSIRFAKSLGFKDIEFGCEDSGRSDKDYICKVFEEAIKAGATTVAFADTVGINMPQEYGELVRYVKANTPGIDDAIFSVHCHNDLGVATANTIAGVCAGTRQVEVTINGIGERSGNAPLEEVVMALKCRGAYLMGDVYTRIDRRQIMATSKMVQEYTGLYVQPHKPIVGANCFFHESGIHQDWILKNRSTYEILSPEDVAVVKSQNSGIVLGKLSGSHVVKGRLKELGYEIDDEKLNEVFSRFRDLTKQEKRITDDDLKALVTLCGDEIFSSEKLNGKEINSKGYAPDPQISSAV

SEQ ID NO: 27588 - protein, 113 aa, Prosthecochloris aestuarii DSM 271
MKYIVAMIQPHKLPDVKAALAEAGIFKMTVTNVLGCGAQGGYTEIYRGVPNEINLLKKLKIEIGVNDDFEKKTVDAIIKGAKTGEIGDGKIFVFDMPKCIRIRTEETGNDAIG

SEQ ID NO: 27589 - protein, 260 aa, Brassica oleracea
QLMTWKTAVANIPYGGAKGGIGCDPSKLSISELERLTRVFTQKIHDLIGIHTDVPAPDMGTGPQTMAWILDEYSKFHGYSPAVVTGKPIDLGGSLGRDAATGRGVMFATEALLNEHGKSISGQRFVIQGFGNVGSWAAKLISEQGGKIVAVSDITGAIKNKDGIDIESLLNYTKEHRGVKGFDGAHPIDANSILVEDCDILIPAALGGVINRENANEIKAKFIIEAANHPTDPDADEILSKKGVVILPDIYANSGGVTVS

SEQ ID NO: 27590 - protein, 442 aa, Prosthecochloris aestuarii DSM 271
MKRHVKAPILLTLGLLLAGVISGPPLFAAEATDAASVNAYAIDNMFLFLCAVLVLFMQAGFALVESGLNSAKNTVNILFKNMMDLGLGVILFYIIGYGLMYPGDAFSGGWFGFSGFGIGVESPEAVGGNLHPAVDFLFQVAFAATAATIVSGAVAGRMKFEAYLIYSAVITAFVYPISGFWKWGGGWLNELGFYDFAGSLVVHALGGFAALAAAIVLGPRIGRFNADGSPNAMPGHNLALSTLGVFILLIGWFGFNPGSQLAIAGAANTDIVMIIATNTLLAAAAGSVLAMIFAWILFKKPDLTMAMNGLLGGLVGITANCDSVTYNEALIIGAVAGILVVLGVKLLDMLKIDDPVGAWPVHGLNGVWGGLATGIFGGHPMVAQIIGSIAIPVWGFVTMLVLFLILKMMGILRVSREDEMKGLDISEHEEEAYHGFQIFSTQ

SEQ ID NO: 27591 - protein, 568 aa, Glycine max
MASSALISDTQPWKDLKAHVDDVKKAHLRDLLSDDKRCQSMLVEFDDILLDYARQQATPETIQKLFELAEAASLKEKINRMYSGEHINSTENRSVLHVALRASRDAVIESDGKNVVPEVWKVLDKIQDFSERVRNGSWVGATGKALKDAVAVGIGGSFLGPLFVHTALQTDPEAVESARGRQLRFLANVDPIDVARNITGLNPETTLVVVVSKTFTTAETMLNARTLREWISSALGPSAVAKHMVAVSTNLTLVEKFGIDPKNAFAFWDWVGGRYSVCSAVGILPLSLQYGFSVIEKFLRGASSIDQHFYSQPFESNIPVLLGLLSIWNVTFLGYPARAILPYSQALEKFAPHIQQVSMESNGKGVSIDGVPLPFEAGEIDFGEPGTNGQHSFYQLIHQGRVIPCDFIGVVKSQQPVFLKGEVVSNHDELMSNYFAQSDALAYGKTAEQLQKENVSPHLIPHKTFSGNRPSLSLLLPSLNAYNIGQLLAIYEHRIAVEGFIWGINSFDQWGVELGKSLATQVRKQLNASRTKGEPVQGFNFSTTTMLTRYLQASSDVPADLPTVLPKI

SEQ ID NO: 27592 - protein, 385 aa, uncultured archaeon GZfos35A2
MQQYDVIVIGAGPSGAIASKTCAGNGLKTLLFEKEGIPRLKLCGGAVSTSALSDLDFGIEKDLIERECYGARVHFKTHQIEVKRKSRLAILVSRDKFDAYLVSKAVDAGVALHEAEKATSIKPEQSRIVVETNKEKYNAKVVIGADGVNSIVSKYVRDSYKPDELGFCIAAEIPASNEEVNEYIENAIDIHYGITNFGYGWVFPKEKHFSVGLCGILPSMKNSRDIFIAFIKKLGFSTDVNSHAHLIPAGGYEREVCSDRIMLVGDAAGFVDPYQGEGIKYAFISAKLAAERVVESYENDEFSKSALDTYKRTCYSLFGENLKYSLRLTRLMYKYPNIFFRLLSSNKIVLGKWLEIPAGEMEYKEYIRWLIPRVPYYMLKTLLVF

SEQ ID NO: 27593 - protein, 450 aa, Hordeum vulgare subsp. vulgare
MAMPPAEKVIVVDANPSKNGHGDEIDDLPVADATSHQIGVDPWYQVAFVLTTGVNSAYVLGYSGSLMVPLGWVGGTVGLLLAAAVSMYANALLGRLHLLGGKRHIRYRDLAGHIYGPKMYRLTWAMQYVNLFMINTGFIIIAGQALKALYLLISNDGAMKLPYCIAVSGFVCALFAFGIPYLSALRIWLGFSTVFSLTYIVAACTLSLKDGMRSPPRDYSIQGDPSSRVFTTIGAAASLVFAYNTGMLPEIQATVRAPVVKNMEKALWFQFTAGCVPLYAIIVIGYWAYGNQTTTYLLNNVHGPVWIKAVANLSAFLQTVIALHIFASPMYEYLDTRFGSKVGGPFAMHNVIFRVGVRGGYLAVNTLMAAMLPFLGDFMSLTGALSTFPLTFVLANHMYLVSNRQRLSSLQKSWHWLNIVFFTILSITAAIAALRLIARDSKEYHIFADV

SEQ ID NO: 27594 - protein, 495 aa, Bacillus subtilis subsp. subtilis str. 168
MSSLTMQVTKRLETFLQGTKKLYIDGKFVPSASGATFDTPNPATGETLMTLYEAQAADVDKAVKAARKAFDQGEWRTMSPASRSRLMYKLADLMEEHKTELAQLETLDNGKPINETTNGDIPLAIEHMRYYAGWCTKITGQTIPVSGAYFNYTRHEPVGVVGQIIPWNFPLLMAMWKMGAALATGCTIVLKPAEQTPLSALYLAELIDQAGFPAGVINIIPGFGEDAGEALTNHEAVDKIAFTGSTEIGKKIMSTAAKSIKRVTLELGGKSPNILLPDANLKKAIPGALNGVMFNQGQVCCAGSRVFIHKDQYDEVVDEMASYAESLRQGAGLHKDTQIGPLVSKEQHERVLSYIQKGKDEGAKAVTGGSCPFEAGYFVAPTVFANVEDEMTIAKEEIFGPVLTAIPYETVDEVIERANHSEYGLAAGLWTENVKQAHYIADRLQAGTVWVNCYNVFDAASPFGGYKQSGLGREMGSYALDNYTEVKSVWVNLED

SEQ ID NO: 27595 - protein, 166 aa, Sinorhizobium meliloti
MTGELTRREMLKAHAAGIAAATAGIALPAAAQPVPGGVEALQITWSKAPCRFCGTGCGVMVGVKEGQVVATHGDMQAEVNRGLNCIKGYFLSKIMYGTDRLKTPLLRKRNGAFAKDGEFEPVSWDEAFDVMAEQAKKVLKDKGPTAVGMFGSGQWTIFEGYAATKL

SEQ ID NO: 27596 - protein, 497 aa, Solibacter usitatus Ellin6076
MSIFRTKSIDALIAASEDPEKKLRRTLGPWSLTAFGIGAVIGSGIFILTGTAAAGETLNYKSILHAPVLDLIMHGTQALSMTGRQGAGPAITLSFLLTAIACSFAALCYAELASMIPIAGSAYTYAYATLGEIIAWIIGWDLILEYAVSNMAVAVGFSAYLNDVLDNVFGWHIPAKFANPPIAEGQLTGAWFNISALLVLMILTWILVKGVKESASTNNAMVAIKIAAILIFVIGAAKAVDTSNWKPFAPHGFPGVLTGAAIVFFTYIGFDSVSTAAEECKRPQRDLPLGIILTLIICAILYILVALVLTGIARYDTLNNAAPVANALKVLGYNGIRQWVSLGALVGMLSSLLVFQYGQARIWFAMSRDGLLPKMFSKVHPVYKTPHISTWIAGLVVGIPAGIWDIGTFADLANIGTLFAFIIVSVGVIVLRRTQPDRPRGFRVPGGGFLPVISIVFCLILMMALPLETWVRFFVWLLIGFAIYFPFGRKNSALARR

SEQ ID NO: 27597 - protein, 531 aa, Xylella fastidiosa Ann-1
MFDESLKAQLKAYLDRVIRSIHIHASVDESHKSREMLDLLENIVLLSGKKVVLEVHRDDDQRKPSFGLSTPGESISIRFAGLPMGHEFASLVLGLLQVGGHPPKVADDLIERVRNLDGHYRFETYFSVSCQSCPDVVQALNMAAVLNPQIEHVAIDGALFQDEVEARQIMSVPTVYLNGELFGQGRMTLEQIVAKLDSGAAKRTAESIQDKAAFDVLVVGAGPAGAAAAVYAARKGVRTGLVAERFGGQVLDTMTIENFISVPETDGPRMAAALEQHVRQYEVDIMNLQRVETLVPAGENGFIEVRLASGASLSSRTVILSTGARWRQMNVPGEDEYRNKGIAYCPHCDGPLFKGKRVAVIGGGNSGVEAAIDLAGIASYVTLLEFDTKLRADEVLQRKLRSMSNVEVIMGAQTTEVRGDGKKVTGLVYVDRSTGGSFILALEGVFVQIGLLPNTEWLKGRVELSPRGEIVVDERGHTSLPGVFAAGDATTVPYKQIVIAMGEGSKAALSAFDYLIRNVVEITGIAQAQAA

SEQ ID NO: 27598 - protein, 417 aa, Bacillus subtilis subsp. subtilis str. 168
MAEIKVPELAESISEGTIAQWLKQPGDYVEQGEYLLELETDKVNVELTAEESGVLQEVLKDSGDTVQVGEIIGTISEGAGESSAPAPTEKTESKESVKEEKQAEPAAQEVSEEAQSEAKSRTIASPSARKLAREKGIDLSQVPTGDPLGRVRKQDVEAYEKPASKPAPQQKQQPQAQKAQQSFDKPVEVQKMSRRRQTIAKRLVEVQQTSAMLTTFNEVDMTAVMNLRKRRKDQFFEQNEVKLGFMSFFTKAVVAALKKYPLLNAEIQGDELIVKKFYDIGIAVAAVEGLVVPVVRDADRLTFAGIEKEIGELAKKARNNKLTLSELEGGSFTITNGGTFGSLMSTPILNSPQVGILGMHKIQLRPVAIDEERFENRPMMYIALSYDHRIVDGKEAVGFLVTIKNLLEDPEQLLLEG

SEQ ID NO: 27599 - protein, 120 aa, Brassica napus
  misc_feature (41)..(41): Xaa can be any naturally occurring amino acid
  misc_feature (99)..(99): Xaa can be any naturally occurring amino acid
MGVDYYKVLQVDRSAKDDDLKKAYRKLAMKWHPDKNPNNKXEAEAKFKQISEAYDVLSDPQKRAIYDQYGEEGLNRQAPPPGPGEFPGGSDRGASFRFXGRSADDIFSEFFGFSRPPGDG

SEQ ID NO: 27600 - protein, 358 aa, Rhodobacter sphaeroides 2.4.1
MSRQQPRASFLPESPLAPVALCDTTLRDGEQTAGVAFTRAEKRAIAEALQAAGVAEVEVGVPAMGEEERADIRAVAAVLKTAAPVVWCRLRAEDLAAAQRTGVVRLHIGVPVSERQISAKLGKDAAWVRDKVEKLVRAASWAGHKVSVGAEDASRADPFFLAEIAHVAAEAGAIRFRISDTLGVLDPFAAHELVGRVVTRCPLPVEFHGHNDLGMATANSLAAARAGASHLSVTVNGLGERAGNAALEEVAAALEAAGRATGVALGQLCALSELVARASGRPLSPQKPIVGEGVFTHECGIHVDGLMKDRATYESADLRPERFAAATASPSASIPRPPGSPGRWPRRGFPPTRRRSRP

SEQ ID NO: 27601 - protein, 358 aa, Bordetella bronchiseptica RB50
MTHQIAVLPGDGIGPEIVEQAERVLKALDLPLELRQAPVGGAAFDQFEHPLPPATLELAQGSHAVLFGAVGDWKYDTLPREFRPEQAILGLRKALGLFANLRPAILYPELASASSLKPEIVSGLDILIIRELTGDIYFGTPRGVRTAADGAFAGEREGYDTMRYAESEVRRIARIGFESARKRNKKLCSVDKANVLETSQFWRDLVIEVSRDYPDVELSHMYVDNAAMQLVRNPRQFDVIVTGNLFGDILSDEAAMLTGSIGMLPSASLNAAGQGLYEPSHGSAPDIAGQGIANPLATILSAAMLLRYSLNLAPQADRVEAAVRKVLADGLRTADIHEAGTTKVSTSQMGDAVLKALG

SEQ ID NO: 27602 - protein, 162 aa, Parasponia rigida
MSSSEVNKVFTEEQEALVVKAWAVMKKNSAELGLQFFLKIFEIAPSAKNLFSYLKDSPVPLEQNPKLKPHATTVFVMTCESAVQLRKAGKATVKESDLKRIGAIHFKTGVVNEHFEVTRFALLETIKEAVPEMWSPEMKNAWGVAYDQLVAAIKFEMKPSST

SEQ ID NO: 27603 - protein, 125 aa, Brassica napus
HASADAWEKEASWGWVLSKENRMKFAGWSIMFICIGNFLMSYAASSLLFPGLLRYSLCGVGGFLLLFGLIVLSCIDQDDARHSFGHSGGFICPLVPLLPILCILINMYLLVNLGAGTWARVPVWL

SEQ ID NO: 27604 - protein, 515 aa, Shewanella sp. MR-4
MTTPADAPKWPRQIPYIIASEACERFSFYGMRNILTPFLMTALLLSIPEDLRGAVAKDVFHSFVIGVYFFPLLGGWIADRFFGKYNTILWLSLLYCVGHAFLAIFEHSVQGFYTGLFLIALGSGGIKPLVSSFMGDQFDQSNKSLAQKAFDMFYFTINFGSFFASLSMPLLLKNFGAAVAFGIPGVLMFIATVFFWLGRKRYVHMPPEPKDPHGFLPVIRSALLTKIEGKANIGLVLALIGGVSAAYALVNIPTLGIVAGLCSAMVLLMGFVGLGASLQLERARGIHPDAAVDGVRSVLRILVLFALVTPFWSLFDQKASTWILQANDMVKPSWFEPAMMQALNPLLVMLLIPFNNFVLYPAIERMGVKLTALRKMGAGIAITGLSWIVVGTIQLMMDGGSSLSIFWQILPYALLTFGEVLVSATGLEFAYSQAPKAMKGTIMSFWTLSVTVGNLWVLLANVSVKSPAVTEQIVQTGMSVTAFQMFFFAGFAILAAVIFALYARSYQMQDHYRQV

SEQ ID NO: 27605 - protein, 473 aa, Oryza sativa
MSALFAASRCASLRVMRPQCSHIAAASLLLSRWYSSKFPPHTVINMPALSPTMTQGNIASWSKKEGDQLAPGEAIAEIETDKATMDFEFQEDGYLAKILMGDGSHDIPVGKPIAVYVEESNDVAAFENFTAEDAGEGEAKPAESKEEPKQESKEESKDTSKESKAAPAKSESKSSSTPKPSGRIIASPLAKTIALEKGISLKNVKGSGPNGRIVAKDLENIKESAAAAPAAAAAAAPVGASYTDTPLTNMRKTIASRLLQSTQQSPSYIVSSEMSVSKLLKLRQSLNASAEDRYRLSVNDLLIKAIAKASLRVPEVNSAWLGEQGVIRTYNYVDVSVAVATPTGLITPIVKNADTKGLATISAEIKDLGKRAKANKLAPEEFQGGTVTLSNLGMNHAVTSFTSIINPPSCAIFAVGTVTKKAVPSDVNEQGFIFDDVMNITGTFDHRLVDGALGGEFMKALKKIVENPLEMLV

SEQ ID NO: 27606 - protein, 115 aa, Triticum aestivum
MARGAATQLVLVSMVAAMLLVACDAAISCGQVTSALSPCISYARGNGANPPAACCSGVRSLAGAARSTADKQAVCKCIKSAAGGLNAGKAAGIPLKCGVSVPYAISSSVDCSKIR

SEQ ID NO: 27607 - protein, 496 aa, Staphylococcus aureus subsp. aureus Mu50
MELLKHLSQRQYIDGEWVESTNKNTRDIINPYNQEVIFTVSEGTKEDAERAILAARRAFESGEWSQETAEKRGKKVRAIADKIKEHREALARLETLDTGKTLEESYADMDDIHNVFMYFAGLADKDGGEMIDSPIPDTESKIVKEPVGVVTQITPWNYPLLQASWKIAPALATGCSLVMKPSEITPLTTIRVFELMEEVGFPKGTINLILGAGSEVGDVMSGHKEVDLVSFTGGIETGKHIMKNAANNVTNIALELGGKNPNIIFDDADFELAVDQALNGGYFHAGQVCSAGSRILVQNSIKDKFEQALIDRVKKIKLGNGFDADTEMGPVISTEHRNKIESYMDVAKAEGATIAVGGKRPDRDDLKDGLFFEPTVITNCDTSMRIVQEEVFGPVVTVEGFETEQEAIQLANDSIYGLAGAVFSKDIGKAQRVANKLKLGTVWINDFHPYFAQAPWGGYKQSGIGRELGKEGLEEYLVSKHILTNTNPQLVNWFSK

SEQ ID NO: 27608 - protein, 338 aa, Methanococcus maripaludis S2
MIFMSDPKNVVFKESEELNGVFIEGPDFDETIDLKDVLTDYYEKIGFQATHLGKAVKIWKQIEEVRKNEEVVVFMGYTSNMVSSGLREIISYLVKHKKVDVLVTTAGGIEEDFIKCIKPFVLGEWDMAGSDLREKGINRIGNVYVPNDRYIEFETYMTKFFETLLKKQQDENKIISASEFCFELGRFMDENLGQEKEKSIIYWAYVNKIPIFCPAITDGSIGDMLYFFKKNEKGTDLKIDVASDIVRLNDMAIDANKTACIVLGGSLPKHSIINANLFREGTDYAIYITTAVPWDGSLSGAPPEEGVSWGKIQEKADFVEIWADATIVFPMLVYGVFK

SEQ ID NO: 27609 - protein, 398 aa, Ralstonia eutropha JMP134
MDFDMIETEVMDGTIIKVVGVGGAGGNAVQHMISRGVQGVEFICMNTDAQALKRSTASRVLQLGNSGLGAGAKPEVGRNCAEQAREQIADALRGAHMVFITAGMGGGTGTGAAPIVAQVAKEMGILTVGVVSKPFDFEGARRAKVAEHGSSELESSVDSLIVVLNEKLFEVMGDDAEMDKCFQCADDVLHNAVAGIAEIINVDGLVNVDFEDVKTVMGEQGKAMMGTATVSGVDRARLAAEQAVASPLLEGVDLSGARGVLVNITASRSLKLSETKEVMNTIRSYAAEDATVIFGTVYDDAMGDALRVTVVATGLGRSAKKQQPMTLLKTGTDNMPVQMMAGMAAAATTHHSSPDYSGLDTPAVWRSSRESASAHVAALQEKGVDTYDIPAFLRKQAD

SEQ ID NO: 27610 - protein, 410 aa, Pseudomonas syringae pv. syringae B728a
MALIVQKFGGTSVGSVERIEQVADKVKKFREAGDDLVVVLSAMSGETNRLIELARQISDQPVPRELDVIVSTGEQVTIALLAMALMKRGVPAVSYTGNQVRILTDSAHNKARILQIDDQKIRSDLKAGRVVVVAGFQGVDEHGNITTLGRGGSDTTGVALAAALKADECQIYTDVDGVYTTDPRVVSQAQRLDKITFEEMLEMASLGSKVLQIRAVEFAGKYNVPLRVLHSFKEGPGTLITIDEEESMEQPIISGIAFNRDEAKLTIRGVPDTPGVAFKILGPISAANIEVDMIVQNVSHDNTTDFTFTIHRNDYQAALQVLEATAREISAREVSGDTKIAKVSIVGVGMRSHAGVASRMFEALAKESINIQMISTSEIKVSVVIEEKYLELAVRALHTAFELDAPRQGE

SEQ ID NO: 27611 - protein, 438 aa, Mycobacterium bovis AF2122/97
MPRRSPADPAAALAPRRTTLPGGLRVVTEFLPAVHSASVGVWVGVGSRDEGATVAGAAHFLEHLLFKSTPTRSAVDIAQAMDAVGGELNAFTAKEHTCYYAHVLGSDLPLAVDLVADVVLNGRCAADDVEVERDVVLEEIAMRDDDPEDALADMFLAALFGDHPVGRPVIGSAQSVSVMTRAQLQSFHLRRYTPERMVVAAAGNVDHDGLVALVREHFGSRLVRGRRPVAPRKGTGRVNGSPRLTLVSRDAEQTHVSLGIRTPGRGWEHRWALSVLHTALGGGLSSRLFQEVRETRGLAYSVYSALDLFADSGALSVYAACLPERFADVMRVTADVLESVARDGITEAECGIAKGSLRGGLVLGLEDSSSRMSRLGRSELNYGKHRSIEHTLRQIEQVTVEEVNAVARHLLSRRYGAAVLGPHGSKRSLPQQLRAMVG

SEQ ID NO: 27612 - protein, 181 aa, Glycine max
MAVHGDDDPVVMVVPNLSPPNTYEAVVNGGTFDRLHNGHRLFLTASAELARCRIVIGVCDGPMLAKKQFAELIQPIEERINNVKTFIKSVKPELEVQAVPITDPFGPSITDENLEAVIVSKETLPGGLAINRRRAERGLSQLKIEVVDLVSGESGEIKLSSSMLRKIEAEKAKQQNTISET

SEQ ID NO: 27613 - protein, 315 aa, Zea mays
MAKKRKRTDAPAEAAGAEKPDDSAPARPERTLFGFKDLVPDAEPASAGAEAAVAPFRNREKDVLSLLPHAKKDSKVESKQSKGNALNELLELRSCSSCLFFECRKQKDLYLWMVKSPGGPSVKFLVNAVHTMEELKLTGNHLKGSRPLLTFSTNFDEQPHWKLVKEMITQDFANIQQGQTPLRYFSTGCLNDRWTRTHLSLGHHVITHQMTKWSMQLPLSEFEPGCFTVTENLNLGWALAAGGWWREEGAEERRGGALAVGGWWREDVGGDAGGDGVGVAVLVCFRGSGGDAGGDEGGGQLRIHALERRAAGART

SEQ ID NO: 27614 - protein, 479 aa, Escherichia coli CFT073
MSVPVQHPMYIDGQFVTWRGDAWIDVVNPATEAVISRIPDGQAEDARKAIDAAERAQPEWEALPAIERASWLRKISAGIRERATEISALIVEEGGKIQQLAEVEVAFTADYIDYMAEWARRYEGEIIQSDRPGENILLFKRALGVTTGILPWNFPFFLIARKMAPALLTGNTIVIKPSEFTPNNAIAFAKIVDEIGLPRGVFNLVLGRGETVGQELAGNPKVAMVSMTGSVSAGEKIMATAAKNITKVCLELGGKAPAIVMDDADLELAVKAIVDSRVINSGQVCNCAERVYVQKSIYDQFVNRLGEAMQAVQFGNPAERNDIAMGPLINAAALERVEQKVARAVEEGARVALGGKAVEGKGYYYPPTLLLDVRQEMSIMHEETFGPVLPVVAFDTLEEAISMANDSDYGLTSSIYTQNLNVAMKAIKGLKFGETYINRENFEAMQGFHAGWRKSGIGGADGKHGLHEYLQTQVVYLQS

SEQ ID NO: 27615 - protein, 548 aa, Prosthecochloris aestuarii DSM 271
MSLQQSPAWRALASHKQTLDCVLMRDLFADDPERFSRFSIRSGDLLLDYSKNRVTSETMALLADLAREAGVEACRDEMFAGSKINFTEKRAVLHTALRQPWGFQLLLEGGQEVGKDIAAVLGQMKGFTEQILSGKWKGYSGKAITDVVNIGIGGSDLGPYMVTEALRPFAHGAVKVHFVSNIDGTHISETLKRVDEETTLFIIASKTFTTQETLTNAHTARSWFLERAVDESFIARHFAAVSTNKEAVQAFGIDTGNMFGFWDWVGGRYSLWSSIGLSIALYLGFDRFLELLAGAHSMDEHFRSAPLDANIPVVLALLGIWYNNFFDFPSHAVIPYDQYLHRLPAYLQQLDMESNGKRVDRDGNVVDYATGPVIWGEPGTNSQHAFFQLMHQGTSCVPADFILPLKTQNPAGEHHDILAANCFAQTEALMKGKTAAEARAELGSAGMSEEEIDALVPHKVFPGNRPTNTLIFNEINPFNLGALIAMYEHKVFVQGVIWRINSFDQWGVELGKQLAKAILPELGSADDVATHDASTNALINLYRRSRNG

SEQ ID NO: 27616 - protein, 546 aa, Burkholderia thailandensis E264
MKRNPAEKYRPFEPVRINGRRWPSRTIERAPIWMSTDLRDGNQSLIEPMTIEQKLEFFEMLVAIGFKEIEVGFPSASQTDFDFVRKLIVEKRIPDDVTIEVLVQSREDLIAHTFDALEGAPRAIVHLYNAICPSFRRIVFGMSKDDVKALAVDGTRIIKEHAQARPGTHWTFQYSPETFSMTELPFAREVCDAVAQTWRPTRDHKMIVNLPATVEAATPNVFADQIEWMDRNLGYRDSIVLSVHPHNDRGTAVAAAELALLAGADRIEGCLFGNGERTGNVDLVTLALNLYTQGIDPGLDFSDIDAVRRVVERCNRIPVHPRHPYAGDLVFTAFSGSHQDAIRKGLAQQRPDAIWEVPYLPIDPADLGRSYDAVIRVNSQSGKGGATYLLERGMGFSPPRRVQIEFSHAVQALADASGEEVTADAICALFTREYLQTMGPAARAGASASWHDREVALAHAEDAPSAARQAAAAFAAAAGVAIDVTSCEVERTANGDTVVFVGAKVGDAALRHGAGVHRDPAAAATDAVASAINRSAWSRDKRRAAA

SEQ ID NO: 27617 - protein, 955 aa, Arabidopsis thaliana
MRLRHQGGQYLARGMEPVYWSNKVDSTHDLYDNYTLGSYQNNSYNILAHTGFGYDHEFQIYEINSNSWRIIDATLDFKLGYIGRGVSLKGKTYWIASGEEEKRLGKFLISFDYTTERFERLCLPNKYPCYATLALSVVREEKLSMLSQRGIKSKAEIWVTNKIGETQVVSWSMVLALDLQPKRCIGESGSFLVDEKKRVVVCCDNIRDQGKTTFDSNLPRYHRQKKKGRMIIVFDVESMRLPVTVKATKPSFLVIWIRYSSAASSPTVSLNPSGRLQQTLAGSVEVKGKSLHSGKFSTVKLNPEIAGAGRFFEFRSRFIPASIEFAQESPLCTTLLKDELKIRTVEHLLSALEAKGVDNCRIQIESESSDDREVEVPIFDGSAKEWVDAIQGVGINAAQNHDGESVEKMVAHVNKPVYVCKNDTFVAAFPALETRITCGIDFPQVPAIGCQWFSWRPIHESSFAKDIASSRTFCVYEEVERMREAGLIKGGSLDNAIVCSAEHGWMNPPLRFDDEACRHKILDLIGDLSLVSRGGNGGLPVAHIVAYKNEEEEVRSSTEENENVRSSTEENEYVRSSTEAGRGEDPHEDSDNISESGAIHLQIMERFNQRSGSGKEEEEDTMDLSIKQVDLLNQVEISRVYHCDGLLLCVAKDNSRVVVWNPYLGQTRWIRPRTESNIGDSYALGYDINRNHKILRMVQTRNVSVYRYEIYDLRSNSWRVLEVTPNGEMDPNHPLYGVSVKGNTYFFAHEDSSSGEIDEDGDIIDLEDFLLCFDFTTETFGLRLPLPFHSTIDATVTLSCVRDQQLAVLYHNEGLHSDDRFTTVEFWVTTSIEPNSVSWSKFLTVDMRPLALTGVRFDNDMGATFFIDEDEKVAVVFDLDGYLSTESARYHTAFISGKDGFFKPVTLGVAPNVGEPCPRTGHIPTTYRPPLVCSSTYLPSLVQVNQQRKRKERHV

SEQ ID NO: 27618 - protein, 346 aa, Rickettsia prowazekii
MLGYMNKRIAIVLFNLGGPEDIEYVKPFLFNLFYDKAIINLPNPLRYIIAKIISITREKKSQKIYSLIGSKSYLIQETEKQKLAITEKLKEFIKEDFIIFINMRYSTPFAKEVIGQIKEYNPSEIILLPLYPQFSSTTTGSSVKNFLQNIDIDIPIKTICCYPIEEDFIKAHVSIIKEKLYDKNFRILFSAHGLPKRIIKAGDPYSFQIKETVNKIVKELNIKDLDYKITYQSRVGPIEWLKPNTEDEIELAGKLKKDIIIVPISFVSEHVETLVELDIEYKLIADKYKIQYTRIPTLGTNKIFINSLTNILLRFINNTNTNLVMSSSSKRICPNKFTKCLCNLTN

SEQ ID NO: 27619 - protein, 416 aa, Mycobacterium sp. KMS
MAKLRTGSGFGDVVVTAVASTTAVAPDAEDTWQQLLAGHSGIRALDSWFVDELDSPVRIGGQLRENSDAYLNRVELRRLAYMQKMSTVLGRRLWEAAGTPDIDPRRLMVSIGLALGSTEEIPAQYDDWRQKGLRAVSPLAVQMYMPNAPAAAVGLDRQAKGGIISPVMADASGAAAIAQAWRQIVLGEVEMAICGGVETKIEAVPVGAFTRLGLLSTNNDDPAGACRPFDKDRDGMVLGEGGALLLIETEENAKARGATILGRIMGAAMTSDGYDIVEPDPSGVPAGDAIRHAVDLAGLEPSDVDLVNAHATGTAFGDVAEGCAIRHALGAHRPAVYAPKAALGHSLGAAGAVEAVLTVQALRDGVVPPTLNVQHLDADIDLDVVTGEPRRGDFRYAVSNSFGLGGHNIVLVFGAY

SEQ ID NO: 27620 - protein, 680 aa, Prosthecochloris aestuarii DSM 271
MPENALKPPTIFLSYPSKEESFVARICYYLERQARVKCYFNPEQKIAGDFEQRIQQAAQESDYFVLFLSGNTTSSKWQKTELQHWRKAHPDMLTRIIVVNLHTMMLDDKPNELPPNLERIIISEPEKQGVYCSEQILKLFALPAAPFDGLPVTIQVLYEKEIINAYMRNNGQLPDTLISKGYPPTWPKVRKIQSSTTSNPLNEKKFGTYRAPDSSISVDARHQTGNNAHCTDTCQLDLTFPEAGPRQTIIIPSNPFNVAILVSGGIAPGINSIISAIAERHETYQNEYRNTYHIQHHTVNLNSCMEGFNALFEIGGQIFELDKQLINHEANNGGSVIPTARADDLLPHDPDKRYTKLRRIVHTLEQRDISILYIIGGEGSMRAAHAIWTIFHKRYPNKRLSVIGIPKTMDNDILWVWQSIGFPSAVEKARQIIIQLAIEATSNPRVCIMQLFGSSSGYVVSHAALASNMCDLALIPELEFSMHDVCEYMGAKLQERRNKPNTSPYGLIVMAETAIPSDFMDYIDNKNVGLTEDEITALHHFNVNNRKVIGQTPDHLRNAGLKIVSKILETYINQRLSIEYNDNYWKKYRVFTNAPRHIVRSVEPSTNDVAYGIRLGTMAVDMAMAGYTDCIVSQWLTEYVAVPLELVTLGRKEVPLDGIFWKTVIAKTGQIEFESLSGIK

SEQ ID NO: 27621 - protein, 613 aa, Mycobacterium avium subsp. paratuberculosis K-10
MKPYPFSAIVGHDRLRLALLLCAVRPEIGGALIRGEKGTAKSTAVRGLAALLSAATGSDANLVEMPLGATEDRVIGSLDLQRVLRDGEHAFSPGLLARAHGGVLYVDEVNLLHDHLVDVLLDAAAMGRVHIERDGISHSHDARFVLIGTMNPEEGELRPQLLDRFGLTVDVHASRDVEVRAQVIRQRMAYEADPDGFAERYADADAELARRIAAARALVDDVVLPDTELQRIAALCAAFDVDGMRADLVVARAAVAHAAWRGAPTVEEQDIRVAAELALPHRRRRDPFDDPGIDREQLDEALAQAGSEPDPDPDPPGGGQAGETEQQPPQRDSAQDAKPRPPTTKPSAPPSKTFRTRALRVPGVGEGAPGRRSRARNASGSVIAATDGADTGCGGHGLHLFATLLSAAERAGAGPLRPGPDDVRRAVREGREGNLVIFVVDASGSMAARDRMAAVSGATLSLLRDAYQRRDKVAVITFRQQQARLLLPPTSSAHIAGRRLARFDTGGKTPLAEGLLAARELIVREKARDRARRALVVVLTDGRATAGPDPLGRSRIAAARLVAEGAAAVVVDCETSYVRLGLAEHLARQLGAPAVRLEQLHADSLTRAVRDAA

SEQ ID NO: 27622 - protein, 109 aa, Glycine max
QSEAKIFVKSLRSTFSFLEDVRVPTIAVIEGVALGGGLEMALACDIRICGRENALMGLPETGLAIIPGAGGTQRLPRLVGKAIAKDIIFTGRKIDGKEALSLGMLISHL

SEQ ID NO: 27623 - protein, 124 aa, Arabidopsis thaliana
  misc_feature (21)..(21): Xaa can be any naturally occurring amino acid
  misc_feature (47)..(47): Xaa can be any naturally occurring amino acid
  misc_feature (88)..(88): Xaa can be any naturally occurring amino acid
CVFTCSPPQRTMATTVTLKSXTGPRQSSTDQPYVASHVSSSLSRAQXRNSLSVIAPRATPILFNRKLRVTVICGGPSRGAPADTPAQXGIKTIPIDRQMDTCKPCRSAIPPCMVGEVNLPLESI

SEQ ID NO: 27624 - protein, 218 aa, Desulfovibrio vulgaris subsp. vulgaris str. Hildenborough
MSDEPKGAILQRDKLTYAIVPRTPCGLLTPDVLDAVSRVCRKYEVPIIKITSGQRLALVGMKKEAVEPMWEELRLDVGRAVELCVHYVQACPGTAVCRFGLQDSLGIGVAIEEEYVGHDFPAKVKFGISGCPFCCGESYLRDVGLVGTKKGWTLIVGGNSGGHPRIGDVLAEELSTDEAKGLIRKFMEFYRDNSGKRLRVSKFVEKTGIEAIRQAVLG

SEQ ID NO: 27625 - protein, 332 aa, Ustilago maydis 521
MVEATSTEGPSESARRTSPTALRSLSAEFGILARSDASASFSFGPVNVVASVSGPTEVRIRDELTDRATLDVIYQPQHGVAGIPARAVSDALTTAFSSVLLLHHHPRSLIQLVLQTLSSPSLPQSAGQPLQTDTGDNHRHVPRQPLLLGPDVPPSATEQAALINAASLALLDAGIPARASVAACACAILPATQGLVLRQNSHITEMSQSQLAGLVRQYKQEQDESDDVDRYDEKDSNKRYTAETVVLLDPTPLELDYALSTHVFAFAFSQALDEQDKEATPREISEQIFAESQGAVDLDELQHARRLCLSGCSAIVAFMRTAVQKRVASQVA

SEQ ID NO: 27626 - protein, 371 aa, Phalaenopsis hybrid cultivar
MGSAACETERDVLKSLVFKESAALESLKIGGYDFNNGLDLTGLLNSLVSTGFQATNLGEAMEVVNQMISWRLADEEVAVDGSEETDRAFRESVKCKIFLGFTSNLISSGVRETIRFLVQHRMVDVLVTTAGGIEEDFIKCLAPTFKGDFSLGGTFLRSRGWNRIGNLLVPNDNYCKFGDWIMPILDKMLEEQINEKAHWTPSKVIARLGKEINNESSYLYWASKNGIPVFCPAITDGSIGDMLYLHSLRNPGHIIDLVQDVKAMDEEAVHASPRKTGVLILGGGVPKHHICNANMLRNGADYAVFINTAQEFDGSDSGARPDEAVSWGKIKGTAKTAKVHCDATIAFPLLVAGTFAKKINKAAAQANGIKA

SEQ ID NO: 27627 - protein, 518 aa, Triticum aestivum
  misc_feature (369)..(369): Xaa can be any naturally occurring amino acid
  misc_feature (453)..(453): Xaa can be any naturally occurring amino acid
  misc_feature (464)..(464): Xaa can be any naturally occurring amino acid
  misc_feature (480)..(480): Xaa can be any naturally occurring amino acid
MNGKGGDGGSDHDDMDMRKPLLVNTGSWYKMGSSLTAGSSSMAIICESHVSALLCTLIVALGPIQFGFTGGFSSPTQDAITRDLGLSISEFSVFGSLSNIGAMVGAIASGQMVEHVGHKGALMIAAVPNILGWLAISLAKDTTFLYTGRLLEGFGVGIISYTVPVYIAEISPRNKRGALGCVNPLSVTLGMVLAYVLGMLVPWRMLALIGTLPCTILIPGLLFIPESPRWLAKMNKMDDFEASLQVLRGSETDITSEVNDIKTAVASANKMTAIRFQELNQKKFRMPLILGIGLLVLQQLSGINAILFYAGSIFKAAGLTNTNLAACGLGAIALLATGATTWLLDRAGRRILLIISSAGMTLSLLAIAXYFFLKDNVPQDSDMYYILSMVSLFAIVAYVITFSFGMGPIPWVIMSEILPVSIKSLAGSFATLANWLTSFGIPMTANLLLSWSXGGTFACYNARXALSTLMFIILWVPGSXRGRTLEEIQWSFPVELQSVVFAVYVGNYSFAGHRLLFT

SEQ ID NO: 27628 - protein, 203 aa, Shewanella sp. ANA-3
MISILVSDVIENNEFANLGAPNEKDIMMKLPLVIFASLLSTSAFAATCPSYLDVEVRKLHSDEKINLCELTQGKPVLLVNTASNCGYTPQFKALEALHKEYKDKGLVVIGFPSDDFFQEENDEKDTAKVCYINYGVTFTMLATSPVRGSDANSVFKYLGDKADSPKWNFYKYVVSGDGNTVQQFNSKVKPDSAELKQAIESVL

SEQ ID NO: 27629 - protein, 280 aa, Shewanella sp. ANA-3
MGHAKRGKVGVLLLNLGTPDAPTASAVRRYLAEFLSDPRVVEIPKLLWMLILHGIVLRVRPAKSAALYQKVWTEAGSPLMDISLRQTAKLSDKLTAGGHQVSVHLAMRYGNPSVASTLQTMHQQGIDKLVVLPLYPQYAAPTTGSAFDAIARELTQWRFLPSLHFIHTYHDNPDFITALVNSIRADFEQHGKPQKLVLSYHGMPERNLHLGDPYYCFCMKTTRLVAEQLGLTADEFVMTFQSRFGKAKWLQPYTDATMHALPSEGVRDVAIVCPAFSADC

SEQ ID NO: 27630 - protein, 182 aa, Streptomyces coelicolor A3(2)
MQQERTVKVSKYLSKHLRHQPERIGLTPDEGGWVEIDALVAAAAAHGFPFTRQELDHVVATNDKRRFAVEGTRIRASQGHSIAVDLRLPVATPPPYLYHGTVARHLEAIRAEGLRPMNRHDVHLSPDRETATRVGARRGRPVVLPVDAATMHRDGHVFHVSANGVWLTQHVPSRYLRFPAPH

SEQ ID NO: 27631 - protein, 470 aa, Rubrobacter xylanophilus DSM 9941
MPADKTIQELGLEEYKYGFKDPEEYFFKTPRKGLDEEIVTMISLHKKEPEWMLEFRLNALKAFQEKPVPTWGADLSELDFDDIYYYIKPVENQGRSWDEVPESIKKTFDRLGIPQAEREILAGVGAQYESEVVYHNLKEEWEKQGVVFLDMDGGLREHEDLVREYFGTVIPPDDNKFAALNSAVWSGGSFVYVPPGVHVDIPLQAYFRINAENMGQFERTLIIADEGSYVHYIEGCTAPTYTTNSLHSAVVELIAKPNARIRYSTIQNWSHNTYNLVTKRGVAYENATIEWVDGNLGSKVTMKYPAVYLMGEGARGEILSVAYAGDGQHQDAGGKVVHVAPNTSSLITSKSISKGTGRATYRGLLKVHEGAVNSKSRVECDALLLDEKARTDTYPYIEIEEKKVNTEHEATVSKVGEEQLFYLMSRGLSEEEAMAMVVNGFIEPIAKELPLEYAIELNRLIQLEMEGSVG

SEQ ID NO: 27632 - protein, 296 aa, Medicago truncatula
MAAELYTATTLKPYNLLQPSTSSPSPSPKTLFFTPLRSFPHSKILETQRTRKSTCFTVCVLTEDPKHTSQLKTEEEIVAQKLARKKSQRFTYLVAAVMSSFGVTSMAILAVYYRFSWQMEGSGEVPWSEMFGTFALSVGAAVGMEFWARWAHEILWHASLWHMHQSHHRPREGAFELNDVFAIINAVPAIALLSYGFFNKGLLPGLCFGAGLGITVFGIAYMFVHDGLVHKRFPVGPIANVPYFTRVAAAHQLHHSDKFKGVPYGLFLGPKEVEEVGGIEELEKEISRRTRSYTGS

SEQ ID NO: 27633 - protein, 228 aa, Arabidopsis thaliana
MNALAATNRNFRHASRILGLDSKIERSLMIPFREIKVECTIPKDDGTLVSYIGFRVQHDNARGPMKGGIRYHPEVDPDEVNALAQLMTWKTAVADIPYGGAKGGIGCSPRDLSLSELERLTRVFTQKIHDLIGIHTDVPAPDMGTNAQTMAWILDEYSKFHGHSPAVVTGKPIDLGGSLGREAATGRGVVFATEALLAEYGKSIQGLTFVIQVKPLSANLRSQALLCI

SEQ ID NO: 27634 - protein, 148 aa, Xanthomonas campestris pv. campestris str. ATCC 33913
MTDTPLLVACPSCAAMNRLPPSRLRDAPKCGSCHTALFLGTPVALSSADFDKHAVRSELPLLVDFWAPWCGPCLSMAPQFAAAAASLEPQLRLAKVDTDLHPVLGTRFGIRSIPTLLILRNGKELARQSGAMGSTQIIAWARSVLSSH

SEQ ID NO: 27635 - protein, 453 aa, Rubrobacter xylanophilus DSM 9941
MSTNGVPEVLRRKGIGIEAVKALAAFKDEPGWLREKRLAAWRTFEEIPMPTMRDEAWRYTDVSDVRFEEYVPYAPSPDVEREGDLPDAVQRLIKEGEENSALLVQHNSETTYARTDEALRARGVIFTDLHTALREHGELVRERLFRLVPEGYDKFAALSAAAFSGGSFLYVPRGVEVEVPIQSYRWLDVAGSIMPRTLVIVEEGASVTYIDEYASEDGEEPALSNGAVELFVGQGAHLQYVSLQNWARNVVHFNTIRSQAEKDATINSLVVSFGAQLSRTNVEAGLTAPGSDSEMLGLYFADEDQLIDHHTLQDHIAPQAHSDLLYKGALRDESLTVFSGLIRVEPGAQKTDAYQTNRNLILGTDEAMAVSLPNLEIMADDVKCSHGATTGQVDDLELFYLMSRGIPRIEAEKLVVFGFFGEVTSRIPLRGLKEKLDRAIEEKIGLGFEERVA

SEQ ID NO: 27636 - protein, 547 aa, Oryza sativa
MQGGGGAASAAAAAAAAATQQHRELLERYELVRVRGRGSFAQVWEARHRRTGLSVAVKILNLAGLLASGIPIRKVEREIAVMRLLNHPHIVRFHEAIAGGDGGGHVYIVMELATQGQLYDYVTQLGRLREDDARRIFQQIISGAEYCHHNMVVHRDLKLENILMDSEMNVKIVDFGFSKFFRHNKVLSASCGSREYAAPELLAGRKYVGPPVDVWSCGVILYILFCGRLPFDSADVSELHRIIKRGEFSIPPYVPDDARDLISSMLIVRPDKRLTITEVRTHRWLQHSIPRYLAMPPLNARTQITRIDAETVDKVVGHGFERRYLVESLENRVENEATVAYNLILNKKFDAPTRYVWTIDVYQEAGQSNTTGAAEATGSSAAGEPPVAVAGEDDGRNNGWALGGVEFHECPREAMRAIAAALRETGVVYAHDDDDRGRYGKLLCARFAGAAGVRRIIRSYLAATDDAPSSSSSAGGGSGRGEAGHGGGAPVDDAVLESLSAAVFFEIQLYKSEGEGNYLMDLKRLSGPQLQYLNICSELSSKLRAIN

SEQ ID NO: 27637 - protein, 284 aa, Halimeda discoidea
KNMITGAAQMDGAILVVSGADGPMPQTKEHILLAQQVGVPAIVVFLNKIDQVDDQDLLELVELEIRETLDRYDFPGDEISIISGSALAAVEALTTNPMIQRGENEWVDKIYKLMDIIDDEIPLPPRNTEKDFLMAIENVVSITGRGTVATGRVERGQIKVGQTVEIIGLKETKETTVIGLEMFQKTLEESVAGDNVGVLLRGIQKNEIERGMVLAKPGSIKPHTRFKAQVYILKKDEGGRHTSFVAGYRPQFYVRTTDVTGKIDSFQGDDDSKIRMVMPGDRVK

SEQ ID NO: 27638 - protein, 128 aa, Zea mays
MNKTGARLRLAPNKRSTRRRSRVLRMATDSEASKAAEVVVDWHKQDKKRMLHAVYRVGDLDRTIKYYTECFGMKLLRKRDVPDEKYTNAFLGFGPENTNFAVELTNFAEVSRPTCVAPLPGSVLAVPL

SEQ ID NO: 27639 - protein, 241 aa, Arabidopsis thaliana
MAAKVSVSPTSLLNQIVVPGDVVLDLSNMNNQTIKLGSGLLQDNDAISAMRAGKLSYSKPNKYWLESSHKRYIPRPDDHVLGIVVDSRADNFWVDIKGPQLALLPVLAFEGGTRRNIPKFEVGTLLYLRVVKTNIGMNPELSCTEASGKAALFGPLRDGFMFETSTGLSRMLLNSPTRPVIEALGKKLSFEIAVGLNGRVWVNATAPRIVIIVANAIMNSESLSGTQQRIMVEKLLAIISD

SEQ ID NO: 27640 - protein, 454 aa, Exiguobacterium sibiricum 255-15
MGKRLDSTHAVETFDTTTIIIRLLIIALLIVLTAFFVAAEFSVVKMRMSRIDQLITEGSKTAKTAKKLLDNLDYYLSACQLGITVTALGLGWLGESTVGAILAMVFKEIALPESVSTVVSFTLAFSVVTFLHVVLGELAPKSLAIQKTEAITMLLAPPLYWFGKVMKPVIWLLNGSARVFLRLFGVEPVGHEDAHSEEEIKIIMTQSYKSGEINQTELSYMQNIFSFDERIAKDIMLPRTDLITISNDASMEDIIALVEEYQFTRYPVAEEGDKDKILGFINAKQLFTDHMANKGKALSFYVHNLPIVSEYSPLQDAMLKMQVERTPMALVIDEYGGTAGVITMEDILEEIVGEIRDEFDKDEKADIEQIHERLYRISGRVLIDDLNERFNLGIEEEDIDTIGGWVMAQDTEVSSGQEFRYKNHTVKVMEVDNHQVKSIYLQLPEKEPVTEEIV

SEQ ID NO: 27641 - protein, 284 aa, Halimeda discoidea
KNMITGAAQMDGAILVVSGADGPMPQTKEHILLAQQVGVPAIVVFLNKIDQVDDQDLLELVELEIRETLDRYDFPGDDISIISGSALAAVEALTTNPMIQRGENEWVDKIYKLMDIIDDEIPLPPRNTEKDFLMAIENVVSITGRGTVATGRVERGQIKVGQTVEIIGLKETKETTVIGLEMFQKTLEESVAGDNVGVLLRGIQKNEIERGMVLAKPGSIKPHTRFKAQVYILKKDEGGRHTSFVAGYRPQFYVRTTDVTGKIDSFQGDDDSKIRMVMPGDRVK

SEQ ID NO: 27642 - protein, 735 aa, Oryza sativa (japonica cultivar-group)
MPLGWLRRKWRRRRDKPAGDAAAASTTATSPRDSVDLGGTSAYPSACASPSSTTPTPTRWGAGASAVPPRCPGPQDQHHGLPLPRPVSKSAPMPLASPAAAPPSPSPPACASAAESVSGGSSSDDEADHRNYRYTDPVVHTSGRTVLPDGHNGMVEEKRFVSCGILQEHQKFFEVPIANVNEVHHMQIFEPSTSESSYSRGRMLPEDTFAVRPRSHSPGPRGHAYSACCARDFGFTPRSPVKRMDDPRSPSQPLPLPPVPVASSSIPSSSITSSQFQSQWKRGKLLGSGTFGQVYLGFNSENGQFCAIKEVQVFLDDSHSKERLRQLNQEIDMLKQLSHQNIVQYYGSELADEALSIYLEYVSGGSIHKLLREYGPFKEPVIRNYTRQILSGLAYLHGRNTVHRDIKGANILVGPNGEVKLADFGMAKHVTSFAEIRSFRGSPYWMAPEVVMNNKGYNLAVDIWSLGCTIIEMATAKHPWYPYEDVAAIFKIANSKDIPEIPDCFSKEGKDFLSLCLKRDPVQRPSAASLLGHPFVHDHQAVRAPTCNGTQLRNGISSPAASHRKPNRESSSRRNIAPLHGIAGLSAREFAGFSTAYPSPHNTSRYTILPPAHPLFPSSSCNLLLNMAVHVQQPNCSESKHVFTGVAMLKPAAAVQAIKLELPPFTNASGALPWIISSSLPKQSLAEPVEAKRRSSRSLAGVEPAETSKPIWLSKEILGLLTCRVSCSMAPQKRF

SEQ ID NO: 27643 - protein, 364 aa, Hyphomicrobium chloromethanicum
MSTYSLRVERKQRETDDCASLWLSVPTDLRSAFAHRPGQFIAVSAEINGEEVTRQYSLSSAPDDSRGIRITVKKIPGGRMSSWLVDRVNEGDRIEVAAPRGRFFRPLDRAHRVLLLAAGSGIAPILPIAQKLLADGVGHRITLAYGSRALDDIILRKDVDELPNIFRTCALEHVLSRPGPTWDGPRGRLDSAYLLSRQDLWDGNASHLPLIVYLCGPESFMDAAEAFFLSHGVDASAIRRESFDLVLEDDADEPPLFVAGTEEVGEPSAICEEIVANVGGEETRVVPEPDETILAALIRGEAPVPFSCQEGTCSSCIAKIKKGSASVRSGVLKTLRQDDLDEGLLLACLARPASRHILIDFDDI

SEQ ID NO: 27644 - protein, 663 aa, Oryza sativa (japonica cultivar-group)
MAAAAAAASLSVSDAAAKLPKPGGQVQRRRDRDRPRVDAAACTRDSRRPTRERCSTTVSLAATATATTATPVRAPVRTRAPMGQRKGADIVVEALERCGVRDVFEYPGGASMEIHQALTRSPVIRNHLLRHEQGEAFAASGYARSSGRPGVCVATSGPGATNLVSALADAHLDSVPLVAITGQAPRRMIGTDAFQETPIVEFTRSITKHNYLILDVDDIPRVINEAFFLASTGRPGPVLVDIPKDIQQQMAVPSWDAPMRLPGYISRLPKPPAANLLDEVIRLVGDAERPVLYVGGGCSASGYELRRFVELTGIPVTTTLMGIGNFPSDDPLSLRMLGMHGTVYANYAVDNADLLLALGVRFDDRVTGKVEAFASRAKIVHVDIDPSELGKNKQPHVSICADVKLALQGMNAMLEEQSAAAARKNLDFSAWRSELEKKKVEFPLGYRTFGEEIPPQYAIQVLDEVTNGEAIVATGVGQHQMWATQHYTYRRPRQWLSSAGLGAMGFGLPAAAGAAVANPGATVVDIDGDGSLLMNIQELAMVRVEDLPVKVMVLNNQHLGMVVQWEDRFYDANRAHTYLGNPAANGGGEVYPDFVTIAGGFGIPAARVTRKGEVRAAVEEMMAAPGPYLLDVVVPHQEHVLPMIPSNGAFKDIIVDGDGRSSY

SEQ ID NO: 27645 - protein, 411 aa, Xanthomonas albilineans
MSRRVVVTGMGLVSPLGNDLASSWDGIVNGRSGIGPITLIDASQFATRIVGEIKDFDPTKFLSAKDVRKMDSFIHYGVAASFMALDDAGLEITDANAERIGAILGSGIGGVLGIEEQTLKLQEGGPRKVSPFYVPSTIINMLPGQVSIMKGLKGPTFSAVSACATSNHSIGTAMRMIQYGDADVMLAGGAERGSSPTAIAGFSSMRAMSTRNDDPAAASRPWDKDRDGFVMGDGAGVLVLEEYEHAKARGARIYAELAGFGASSDAFHMTSPSEDGEGAARSMRAAMRDAGLNPDQIDYLNAHGTSTPAGDLAETIAMKRALGDHAYKLMISSTKSMIGHLLGAAGGAEAIFSVMALHTGIIPPTINLDEPGEGCDLDYVPNVAREKKIDVAMSNGFGFGGTNGTLVFKRI

SEQ ID NO: 27646 - protein, 106 aa, Mannheimia succiniciproducens MBEL55E
MTLNITSKQMDITPAIRTHVEERLAKLEKWHTQLINPHFILSKIPNGFQVDASIGTPIGNLQATAQSDDMYKAINEVEEKLEKQLNKLQHKDESRRASERLKDSFE

SEQ ID NO: 27647 - protein, 157 aa, Zea mays
MESSAAATKPARGGRRGGDRKKSVSKSVKAGLQFPVGRIARYLKKGRYAVRYGSGAPVYLAAVLEYLAAEVLELAGNAARDNKKNRINPRHLCLAIRNDEELGKLLHGVTIASGGVLPNINPVLLPKRTAGSSQGEKVKAEKVKASSPAKKLSPKKG

SEQ ID NO: 27648 - protein, 307 aa, Candidatus Pelagibacter ubique HTCC1002
MKNRKIIIGSRGSKLALIYAEKAREKILKHSKDFGIEEVIIKEIVTKGDQVQDKRLSEVGGKGLFSKTIEVELLEKKIDIAVHALKDMPSEETRGLLTDCFLERNDPREILISKDNKHLKDLASNSIIGTSSYRREFQIKKIRDDLNCKLIRGNVDTRIRKLKENLYDAIILSYAGIDSLGLNQNISQTFSTSEIIPCAGQGVIALQCRDNDESLIELLKQVDHQSTHSSIKAERNVLKVLEGDCETAVGAFANIEGNKINLEVELFSLDGSKRFYLKSSESVDKAEELGIEMGKTLKKMSNNSYKK

SEQ ID NO: 27649 - protein, 317 aa, Bordetella parapertussis
MNPPKHAKVLILGSGPAGYTAAIYAARANLAPLVVTGLAQGGQLMTTTDVDNWPADPDGVQGPDLMQRFLRHAQRFDAGVVSDAIHTVRLDRRPFALTGDQGAYTCDALVIATGASAKYLGLSSERAFMGKGVSGCATCDGFFYRNRDVLVVGGGNTAVEEALYLSNICRTVTVVHRRDRFRAEPILVDRLQARAALGKVKFEYFHELDEVLGDASGVTGARLRDNRDGTARDVAAKGVFIAIGHAPDTGLFEGQLALRNGYIVTRGGLSGLATMTSIPGVFAAGDVQDQIYRQAVTSAGTGCMAALDAQRWLEGAA

SEQ ID NO: 27650 - protein, 370 aa, Arabidopsis thaliana
MMMSDLPHDLVEEILSRLPLISLKAMRSTCKTWNVLSKHRSFANKHIGNVTASGKRDLIMIKDCKVYSIGVNLHGIQNNNNIIDLSIKNKGILHLENLDLIFKEIFNVFHCNGLLLLYGSITDDSIRLVVCNPYWGKREWVKRINNFASFDKLAFGYDKSCGCHKILRVFDSYPNRLEIYNLRSNSRMVSSFPLKWDIAFMQDGVSLKGNTYWYAKDRRSEDCYLICFDFTRERFGPRLPLPQPFIDEFLGSLYVVREEKLAVLVKRWRGGKSEIDIWVTNKIEPDEVSWSKFLKVDNTPRFFLTEGYLIYDEEKVVVFFNKEETEGLKSTVHIAYIVGENGYFRRADLREPLYQPLCRLVCSYVPSSVK

SEQ ID NO: 27651 - protein, 1149 aa, Cryptococcus neoformans var. neoformans JEC21
MSTKAIREYDAKQLVSYWLNRSPTPIPCKTDTSFTAVQVAQVQWDPATKQLSPPIKPGQGLPDWVFSSKLVGKPDQLIKRRGKAGLLCLNKGWEETGAWIEEKAGKPVTVEKTTGTLNTFIIEPFCPHPAETEYYVCINSAREGDWILFTHEGGVDVGDVDAKALKLLIAVGEEFPTRETIISTLLANVAPAKQDVLCDFLIRLYGVYVDLHFAYLEINPLVCLDAVDGKPAEIQYLDMAAKLDQTADFLCGPMWAVARDVSSTTTGATGIKADRGPAMVWPAPFGRDLTKEEAYIQKLDASTGASLKLTVLNSEGRVWTMVAGGGASVVYSDAIAAAGFAHELANYGEYSGAPTEGQTYEYAKTIVDLMTRGTPHPEGKVLIIGGGAANFSDVAATFKGIIRALKEYKEGLVRHSVKIWVRRAGPNYQEGLKAMRLCGESLGVFMKVYGPESPITAIVPMALGIERPPTAITRDVTPIPSAPVTPPNGAASGIANMANNVGAVKADGSREQPNDQIVRFDTEPISGTRPWFRPFDEHTRSFVFGLQPRAIQGMLDFDFSCGRKVPSVAAMIYPFGGHHIQKFYWGTKETLLPVYTSVGEAIKKHPDVDVVVNFASSRSVYASTLEILSFPQIKAIGIIAEGVPERHARELLHLALKKQVIIIGPATVGGIKPGCFRIGNTGGMMDNLIACKLYRPGSVGYVSKSGGMSNELNNILSYTTNGVYEGVAIGGDRYPGTSFIDHLLRYEADPECKMLLLLGEVGGTEEYRVIEAVKKGIIKKPIIAWAIGTCAKMFTSEVQFGHAGSMANSDMETADAKNRAMRAAGFIVPDTFEDLPDTLKAVYNQLVTKGAIVPKAEIEPPQIPMDYQWASKLGLIRKPAAFISTISDERGQELMYAGMRISDVFKEEIGIGGVISLLWFKRRLPAYACKFIEMVLQLTADHGPAVSGAMNTIITARAGKDLISSLVAGLLTIGDRFGGALDGAAAEFSNGLTSGQTPREFVDSMRKANKLIPGIGHKIKSKTNPDLRVVLVVDFVRKHFPNHKTLDFALAVEDVTTQKSGSLILNVDGAIAASFCDLVSGCGAFTEEEAQEYLKNGTLNGLFVLGRSIGFIGHYLDQRLLKQPLYRHPHDDIFYPSVERVVVQPGKKA

SEQ ID NO: 27652 - protein, 326 aa, Arabidopsis thaliana
MRSTCKKWYVLTKDQRFAKKRGKEFLMIMNRRVYLIGVNLHNNIDLSIKCRGRLISRDETAQGFYVSQVFHCNGLLLSVSGKTIDDTRLVVCNPYGVKPKWINPKDNYGRLDIFSLGFDKLCGSYKILRIYDFDNKLQIYDLSSNSWMIPRDTLGRDIEYMQNGVSSKENTYWCARDKQSQYCFLFCFDFTRERFGPRLPLPFNGAYVSLSAVKEEQLAVLFQPSDKSEIEIWVTNKIEPEEVSWSVFLKVEMKLRVLSWNFLIDKEKKFAVVFDKDKAKGFKTNYDIAYVIGENGYYRRVDLRESPNKPLCRIVSCYVPSCVQIE

SEQ ID NO: 27653 - protein, 125 aa, Triticum aestivum
MSNASAMDDARARASRVLEPLRKSILEGPGVKPAQTFLQETIILKDQMPPFLSQNGVLKRAGGIHPERQKDFAEGTPGVQGLKQFFLQSQEQLGPLEINNSALQMLLNQAQQSSSMPGGYNPEVF

SEQ ID NO: 27654 - protein, 369 aa, Synechococcus sp. CC9605
MEMVSGSGSYTAAGIQPSQSARIEVIGVGGGGSNAVNRMILSDLEGVGYRVLNTDAQALIQSQAQQRLQLGQTLTRGLGAGGNPTIGQKAAEESRTDLHDALQGSDLVFIAAGMGGGTGTGAAPVVAEVAREVGALTVGIVTKPFSFEGRRRMRQADEGIARLAEHVDTLIVIPNDRLRDAIGGAPLQEAFRSADDVLRMGVKGISDIITCPGLVNVDFADVRSVMTEAGTALLGIGIGSGRSRAVEAAQAAIASPLLETERIDGAKGCVINISGGKDMTLEDMTTASEVIYDVVDPEANIIVGAVVDEALEGEIHVTVIATGFENKQPYRSERSRSMPSMANHAEPEENGARIPEFLRRRQQQDNGTV

SEQ ID NO: 27655 - protein, 259 aa, Ralstonia solanacearum
MTAQLLSRRTGSTLVLTLSNPDARNALDPVMYTASMEALNLAAKDKEIRSVIFTGADGAFCAGGNLNRLLENRSKPKHVQEEGIDALNHWIETIRTFPKPVIAAVEGPAAGAGFSLVLACDFVVAAADAKFVMAYVNVALTPDGGGSWHIARFLPRPLASEIIMLGKPVSAERLAHFGLVNEVVRPGAALDRALLLAEQLAAQSPHAVGRIKGLIAHAEEASLHAHLQAEQHSFVEALHHADGNEGISAFLHKRQPQYR

SEQ ID NO: 27656 - protein, 112 aa, Frankia sp. EAN1pec
MKLVTAVIKPFKVDDVKTALEGIGVHGLTISEVQGYGRQKGHTEVYRGAEYKVDFVPKIKIEVVVDDEAVDELVTAITTSAQTGKIGDGKVWVVPVDAVVRVRTGERGSDAL

SEQ ID NO: 27657 - protein, 617 aa, Candida albicans SC5314
MSEQAQTQVSADQQQHQHNHHHHHHHHHNENQSQQQVPIDPAANPANRIGRYQILKTLGEGSFGKVKLAQHLGTGQKVALKIINRKTLAKSDMQGRVEREISYLRLLRHPHIIKLYDVIKSKDEIIMVIEFAGKELFDYIVQRGKMPEDEARRFFQQIIAAVEYCHRHKIVHRDLKPENLLLDDQLNVKIADFGLSNIMTDGNFLKTSCGSPNYAAPEVISGKLYAGPEVDVWSAGVILYVMLCGRLPFDDEFIPALFKKISNGVYTLPNYLSAGAKHLLTRMLVVNPLNRITIHEIMEDEWFKQDMPDYLLPPDLSKNKNSKIDVDEDVIRALSVTMGYDRDEIVNVIEKANKQVAAGNSSSQQSKSSNEILDAYLLMKENHALVKDLKKSKSENIESFLSQSPPPSPFPNAGSTSSAPGVQQSLTYQTLATVPDLSTLPNSTIAILPTSLPSIHRAYMAETKQNGDPSQQHAPPPTKKSKTRWHFGIRSRSYPLDVMGEIYRALKNLGAEWAKPTEEELWTIRVRWKYDTSAQFECGSAPNLMKMQIQLFQLEPNNYLVDFKFDGWESAHGNAGTDSPQSHRQQDLDEVGSFSAYPFLHLATRLIMELAVNSQSG

SEQ ID NO: 27658 - protein, 676 aa, Prosthecochloris aestuarii DSM 271
MDPSQREENSLPLLRYDMLEFRPEWQFDDPDSGAYYHSGVVVNKLFFTSLGGDIQYEVAEKALAFVRKLFSDGVLRDCEYIRIADYSGVSKATINSRILYANTLNKLTEEYNCRPSVTYICGASVLLKTMLRIFSHIVSQRFFFVDSVDEAFRRINAHEMSGCVVSSESLVVTRKEIDEFAALCGHLLFEDTNVKSFSRDYISEDHPLNELYKIIGVLHNDLGELKQKEKDQKKRLEEALFEARSLNQKLIDEKRNVEENERVQQELIDTLKKARVEAESANKAKSEFLANISHEIRTPLHAVIGMTELLLESSLAKDQQYYADTISSSAHLLLLLINDLLDFSRIEAGYIDQEKEDFDMRRLIGDIMSLMKDSASRKRLLLDSRVDERLSFCLTGYPGYLRQVLMNLIQNAVKFTYKGMVSLHVTLLSETPEHVSLEFSVKDTGVGIAEEQLKVIFHRFTQIDASSTRKEGGTGLGLAIVKQLVTFMGGEVSVDSRQGEGSDFRFSLTFDKAGEAKADQSSADLSCRQKDGFRSSRSVDDIIRPHRILLVEDNVINQKVAQAMIEKIGYEIDIAVNGEEAVEALQQKQYGLVLMDLQMPVMDGFEATRRIRKFGGLASNARVPVVAMTANATREDRELCLRAGMDDYLSKPVERQVLLDMLQRWLPFKDEPGVET

SEQ ID NO: 27659 - protein, 318 aa, Aspergillus oryzae
MATDTSTYKLNHTMIRVKDPKKSLEFYKFLGLTQIQQLDFPENKFSLYFLAYNGPKSLQGDRHWTDRNAVLELTHNYGTENDPNYSVANGNTEPHRGFGHIAISVDNIESACKRIEDAGYPFQKKLTDGRMKHIAFAKDPDGYWVELIRRHNEDVGTTTDTANYRLNHSMLRVKCAETSLKFYQEVMGMTLLRTAENKDAGFNLYFLGYPAGNPKVQEDAKNPVAEWEGLLELTWNYGTEKQEGPVYHNGNAEPQGFGHICVAVDDLNAACERFESLNVNWKKRLTDGRMKDVAFVLDPDGYWIEVIQNQALKRTSNW

SEQ ID NO: 27660 - protein, 375 aa, Spirochaeta aurantia
VAKQNFVRSKPHINVGAIGHVDHGKTTLTAALTMYGAKKHGGKVMNYDDIDNAPEEKERGITINTRHVEYESAARHYAHVDCPGHADYVKNMITGAAQMDGAILLVAADSGPEPQTREHILLAKQVGVANLVIFLNKMDLADPELVELVEMEVRDLLNLYGFDGEKTPFIRGSAFAAMSKPDDPAATKCLDELLDTMDKYFVIPERALDKPFLMPIEDVFSISGRGTVVTGAIAQGKVKVGDTVEIVGIKPTQTTVVTGVEMFNKLLDAGQAGDNIGALLRGIEKNQVERGQVLAAPKSITPHTNFKATIYCLSKEEGGRHNPFFSGYRPQFYFRTTDVTGTVTLPEGKQMVMPGDNTELVVELITPMDKGSRFA

SEQ ID NO: 27661 - protein, 386 aa, Methanococcus maripaludis S2
MDWKAVSPYNPKLDLKDCYLYDTTLRDGEQTPGVCFAGDQKLEIAKKLDELKIKQIEAGFPIVSENERKAIKSITGEGLNAQILALSRVLKEDIDKAIECDVDGIITFIATSPMHLKYKLHKNLDEVEEMGMKAVEYAKDHGLFVAFSAEDATRTPLEDIIRIHKNAEEHGADRVHIADTLGCATPQAMYHICSELSKHLKKAHIGVHCHNDFGFAVINSIYGLIGGAKAVSTTVNGIGERAGNAAIEEIAMALKVLYDHDMGLNTEILTEISKLVENYSKIKIPENKPLVGEMVFYHESGIHVDAVLENPLTYEPFLPEKIGQKRKIILGKHSGCRAVAHRLQELGLEASRDELWEIVKKTKETREDGTEISDEVFKNIAEKIIK

SEQ ID NO: 27662 - protein, 342 aa, Saccharomyces cerevisiae
MIKHIVSPFRTNFVGISKSVLSRMIHHKVTIIGSGPAAHTAAIYLARAEMKPTLYEGMMANGIAAGGQLTTTTDIENFPGFPESLSGSELMERMRKQSAKFGTNIITETVSKVDLSSKPFRLWTEFNEDAEPVTTDAIILATGASAKRMHLPGEETYWQQGISACAVCDGAVPIFRNKPLAVIGGGDSACEEAEFLTKYASKVYILVRKDHFRASVIMQRRIEKNPNIIVLFNTVALEAKGDGKLLNMLRIKNTKSNVENDLEVNGLFYAIGHSPATDIVKGQVDEEETGYIKTVPGSSLTSVPGFFAAGDVQDSRYRQAVTSAGSGCIAALDAERYLSAQE

SEQ ID NO: 27663 - protein, 237 aa, Caulobacter crescentus CB15
MPTLVLLRHGQSQWNLENRFTGWVDVDLTAEGEAQARKGGELIAAAGIEIDRLFTSVQTRAIRTGNLALDAAKQSFVPVTKDWRLNERHYGGLTGLNKAETAEKHGVEQVTIWRRSYDIPPPELAPGGEYDFSKDRRYKGASLPSTESLATTLVRVLPYWESDIAPHLKAGETVLIAAHGNSLRAIVKHLFNVPDDQIVGVEIPTGNPLVIDLDAALKPTGARYLDDSRAEALPKVG

SEQ ID NO: 27664 - protein, 396 aa, Ralstonia metallidurans CH34
MDFDMIETEIQDGTIIKVVGVGGAGGNAVQHMISRGVQGVEFICMNTDAQALKRSTASRVLQLGNTGLGAGAKPEVGRNCAEQARDQIADALRGAHMVFITAGMGGGTGTGAAPIVAQVAKEMGILTVGVVSKPFDFEGARRAKVAEHGSGELESSVDSLIVVLNEKLFEVMGDDAEMDKCFQCADDVLHNAVAGIAEIINVDGLVNVDFEDVKTVMGEQGKAMMGTATVSGVDRARLAAEQAVASPLLEGVDLSGARGVLVNITASRSLKLSETKEVMNTIRSYAAEDATVIFGTVYDDSMSDALRVTVVATGLGRSAKKQQPMTLLKTGTDNIPVQMMAGLTAAPAHASPDYSGLDTPAVWRSSRESASAHVAALQEKGVDTYDIPAFLRKQAD

SEQ ID NO: 27665 - protein, 285 aa, Triticum aestivum
  misc_feature (225)..(225): Xaa can be any naturally occurring amino acid
  misc_feature (227)..(227): Xaa can be any naturally occurring amino acid
  misc_feature (236)..(236): Xaa can be any naturally occurring amino acid
  misc_feature (241)..(242): Xaa can be any naturally occurring amino acid
  misc_feature (252)..(252): Xaa can be any naturally occurring amino acid
  misc_feature (262)..(262): Xaa can be any naturally occurring amino acid
  misc_feature (265)..(265): Xaa can be any naturally occurring amino acid
  misc_feature (276)..(276): Xaa can be any naturally occurring amino acid
  misc_feature (279)..(279): Xaa can be any naturally occurring amino acid
MSAVVCGKRSSSIFADDLLLQQASSSPPSSHHSSPAAKRSRYAHHHHRRDGRDALLNHLRAAFPAMDPQLLERALEASGDDLDDAIKSLKELHLMESNQANLSATGSAFENGPTAVQPSVEGIVTSGGVDTATEHQPPADGQQPGNSGPEWVDLFVREMSNASDMDDPRARASRALDALTKSILEGAGAEAAQSLHQENMMLKEQMTAVLSQNAVLKRAVAIQHXRXKEFDERSNXVQGLXXLVLQYKEHLXTSEINNYACXHLXQAQQINSIPGXYNXDSFGWR

SEQ ID NO: 27666 - protein, 364 aa, Rubrivivax gelatinosus PM1
MALSPVPELIAELAAGRMVILVDEEDRENEGDLVMAAEHVTPEAINFMARYGRGLICLTLTRERCERLQLPPMAARNGTQHGTAFTVSIEAASGVTTGISAADRARTVQAAVARDAKASDLVQPGHIFPLQAQDGGVLMRAGHTEAGCDLTLMAGLTPASVICEIMKDDGTMARLPDLVLFAREHGLKIGSIADLIEYRSRNESLITRVAQRVLVTPQGPFDCQAFRDRSGAVHLALSVGQWGADDEVLVRVHEPLSVLDLLDAGRCGHSWPLPRALAALRAAERGVAVLLNCGEAGNGLLQQLTVGPDAPPTPRGQMDLRTYGVGAQILRELGIVRMKLLGSPRRMPSMVGYGLEVTGFVAAE

SEQ ID NO: 27667 - protein, 259 aa, Bradyrhizobium sp. BTAi1
MSVYEHIIVEGKGAVGVITLNRPKMLNALSFGVFREIAAAVDDLEADDAIGCIVITGSEKAFAAGADIKEMQPKSFIDMFSSDFTAIGGDRVARCRKPTIAAVAGYALGGGCELAMMCDFIIAADTAKFGQPEITLGTIPGIGGTQRLTRAIGKAKAMDLCLTGRMMDAAEAERSGLVSRVVAADRLMEETMAAAEKIASMSRPAAAMAKEAVNRAFETPLSEGMNVERNLFHATFALEDRAEGMAAFIEKRKPVNKNR

SEQ ID NO: 27668 - protein, 222 aa, Glycine max
MKVVYFFVVLLALASSIAFAYDPSPLQDFCVAINDTKTGVFVNGKFCKDPKLAKAEDFFFPGLGPGNTSNPLGSKVTAVTVNEILGLNTLGISLARIDFAPKGLNPPHTHPRGTEILVVLEGTLYVGFVASNQNDNRLFTKVLNKGDVFVFPIGLIHFQQNIGYGNALAIAGLSSQNPGVITIANAVFGSKPPISDEVLAKAFQVGKNVIDYLQKQFWYNNS

SEQ ID NO: 27669 - protein, 461 aa, Zea mays
MIPAVADPATTLDGGARTPLLPETDPRGRAAPAGAGQNRPAAAATTTVLTAAVSAVLLLVLVAVTVLASQERVDGQGGGGVVAVEVAASRGVAEGVSEKSTAPLLGAGAGAALRDFSWTNSMLAWQRTAFHFQPPKNWMNDPNGPLYHKGWYHLFYQWNPDSAVWGNITWGHAVSRDLLHWLHLPLAMVPDHAYDSNGVWSGSATRLPDGRIVMLYTGSTAESAQVQNLAEPADPSDPLLLEWVKSDANPVLVPPPGIGLTDFRDPTTAWRAAPKPNDGATASWRVAIGSKDRDHAGLALVYRTEDFVRYDPAPALMHAVPGTGMWECVDFYPVAVAAAGGADGLETSAAPGPGVKHVVKASLDDDKHDYYAIGTYDPATDAWTPDDAEKDVGVGLRYDYGKFYASKTFYDPVLRRRVLWGWVGETDSERADILKGWASVQVRIRSRSRLGIESLMIMIIA

SEQ ID NO: 27670 - protein, 414 aa, Mycobacterium leprae
MPSTANGGFPSVVVTAVTATTSISPDIESTWKGLLAGESGIHVLEDEYITKWDLPVKIGGHLKEPVDSHMSRLDLRRMSYVQRMSKLLSGRLWESTGSPEVDPDRFTVVVGTGLGGAERIVESYDLMNAGGPRKVSPLAVQMIMPNGAAATVGLQLGACAGVMTPVSACSSGSEAIAHAWRQIIMGDADVAVCGGVEGPIEALPIAAFSMMRAMSTRNDDPEGASRPFDKNRDGFVFGEAGALMLIETEEHAKARGAKPLARLLGAGITSDAFHMVAPAADGVRAGRAMTRSLELAGLSAKDVDHVNAHGTATPIGDSAEANAIRVAGCEQAAVYAPKSALGHSIGAVGALESVLTVLALRDGVIPPTLNYQTPDPEIDLDIVAGEPRYGDYRYAINNSFGFGGHNVALAFGRY

SEQ ID NO: 27671 - protein, 612 aa, Rickettsia conorii str. Malish 7
MTAQPAGKDIRDINMTKIRINLLRNLFTEYDIDGYIIPSNDKYMSEYVPSYAKRLEYITGFTGSNGIAIIYKDTALFFTDGRYLEQANKELDLELFKLFDLKDISKFGKDAKIGYDSELFTYPTISNLKFNFQKINGNLVDKIWPNQPLEPNSKVYLHDIKLAGVSHTDKISKCREIFLDSRFCRNDIEESGNETEQSALVILDSSSICWLLNLRASDVAYTPLMFAKVILTSTQLYLFINPTRIDAEIINARPEITILPEEEFENILRDSENTHLSKPAYRIFIDDTIASVHIMDLVADKKVQKITDPCLMLKACKNDVEIKHAIDLHIKDAVALCEFFADFSQCHPRENGDPEKHNNELTEYSLGLKLTEQRAKQEGYVSDSFPAICGFQENSAIIHYRADPKTAKKIEGQGILLIDSGGQYQGATTDITRTIVIGTPTDEQKKRYTQVLKGHIALAKAKFPKNIIAGANLDILARQYLWQEMLDYPHGTGHGVGSFLSVHEGPQSINLRNKTILKAGMILSNEPGFYVPGKYGIRIENLMYVKENNGWLEFETLSLVPYASKLTDMTLLNIDEINYIKEYYNKIRAKIYDLLSTQARNWLNNEINLYCN

SEQ ID NO: 27672 - protein, 286 aa, Halimeda tuna
KNMITGAAQMDGAILVVSGADGPMPQTKEHILLAQQVGVPAIVVFLNKVDQVDDQELLELVELEIRETLDRYDFPGDDISIISGSALAAVEALTLNPMTQRGENEWVDKIYKLMDVIDDEIPLPPRNTEKDFLMAIENVVSITGRGTVATGRVERGQIKVGQTVEIVGLKETKETTVIGLEMFQKTLEESVAGDNVGVLLRGVQKNEIERGMVLAKPGSIKPHTRFKAQVYILKKDEGGRHTSFVAGYRPQFYVRTTDVTGKIDSFQGDDDSKIRMVMPGDRVKII

SEQ ID NO: 27673 - protein, 412 aa, Bacillus thuringiensis serovar konkukian str. 97-27
MEKKRVVITGLGAVTPVGTDVETAWENIKKGVSGIGRLTRIDPELFPAKVAAEINDFEVEKYIDKKEARRMDRFTQYAVAAAKMAVADAKLEITEENGPRIGVWIGSGIGGMETYEEQFKIFTEKGPRRVSPFFVPMMIPDMAAGQVSIATGAKGINTCSVTACASGANSIGDAFKAIQRGDADAMITGGAEAPLTSMAFAGFSSAKALTFNEDPATACRPFDKNRSGFVMGEGSGILILEELEHALARGAHIYAEIAGYGATGDAFHITMPAPGGEGGVRAMRQALADAGLQPEDIDYINAHGTSTDANEKYETMAIKETFGEHAYKVAISSTKSMTGHLLGAAGAVEAIFSIKSITDGVIPPTINYETPDPECDLDYVPNNARHQEVNAVLSNSLGFGGHNAVLVFKSYK

SEQ ID NO: 27674 - protein, 281 aa, Candidatus Pelagibacter ubique HTCC1002
MILIDGKKIAAELREELRQEVVELKAKHNKIPGLTVILIGEMAPSQIYVRMKEKAANEVGLKSEVIRYPEAVEEKTVLDKIEELNKDESISGILVQLPLPKHIDKQKVIETILPGKDVDGFHPMNVGNLSSGYESSVPCTPLGCYLMIKKIEPNLSGKKAVMIGRSNLNGKPMAQLLLKENCTVTVTHSKTKDLKAECLEADIIVAAVGIPELVKADWVKKDAIVIDVGINKTENGIVGDVAFEEVSKVARALTPVPGGVGPMTIACLLKNTIECFKRSQK

SEQ ID NO: 27675 - protein, 155 aa, Picea glauca
MASADVEFRCFVGGLAWSTDDRSLQEAFSPYGEVVESKIISDRETGRSRGFGFVTFNDEQSMRDAIDAMNGKMLDGRSITVNPAQSRGNGGGGGGGGSRGYRGGGGGGGYGGSRDRGDRGYGGGGGGYGGGGGGYGGGGGSRYGGGGSEGGSWRR

SEQ ID NO: 27676 - protein, 362 aa, Arabidopsis thaliana
MMMSNLPKDLVEEILSRVPFKYLRAIRSTCKNWYDLSKNRSFANKNIDKAAVSGEKEFLMITQFNVFWVGVNLHRSQNNSFDLSIQLKAKIVSRDKKDDLFQKSQVIHCNGVFLCVREKMLVVLNPYWGQTKRIMPRPPFGCFDRYALGYDKSSGSHKILRLFGVNQNNLNIYDLSSSSWMIPDGTLERDMEYMKQGVSLNGDTYWYAKDKESIDWYLLCFDFTRERFGTPLPLPFSNEGYTLHKGYKSLSALKEEKLAVLLWDTMVIWVTNKIEPDAVSWSIFLKLDMEPSIYCRYGNFFIDEEKKVAVVFEKDSSSWSWMYNPNYNKAYIAGENGYFKSVNLLKSPNTLQLGHLVCSYAL

SEQ ID NO: 27677 - protein, 377 aa, Rhodobacter sphaeroides 2.4.1
MSGSGMTPMLQATPEQARTLGAEEPIRPGQDRLAHAPADHPELPQPKIGILLANLGTPDNYDYWSMRRYLNEFLSDKRVIDYPAWKWQPLLQILILSKRPFSSGANYKLIWNHDKGESPLMTITKDQTAAIAAEIRSLYGNRVMVDFCMRYGNPSTESRVRAMVEAGCEKILFFPLYPHYAGATSATANDEFFRAMMKEKRQPAVRTVPEYYDNPLYIDALAQSVERAYAQLDHRPDVLVASYHGMPKRYLMAGDPYHCQCAKTSRLLRERLGWEKGAIDTTFQSVFGPEEWLKPYTVEHVAELARAGKKRIAVIAPAFSADCIETLEEINGEIREAFEEAGGEEFTYIPCLNDDEAHIRALVSVIEDNLAGWLARG

SEQ ID NO: 27678 - protein, 317 aa, Oceanobacter sp. RED65
MSTRHIKLLILGSGPAGYTAAVYAARANLNPVVITGMQMGGQLTTTTDVDNWPGDVDGLQGPELMQRMQAHAERFNTEVLFDHINNVDLSKKPYTLTGDQGTYTCDALIIATGASAQYLGLESEEAFKGKGVSACATCDGFFYKGKEVCVIGGGNTAVEEALYLSNIAAKVHVIHRRDSFRSEKILADKLLEKAKNGNVEIHWFNELDEVLGDEMGVTGVRLKNNQTGEKQEIELAGVFVAIGHIPNTDIFQGQLDMENGYIKVQSGSHGNATLTSKEGVYAAGDVMDHVYRQAITSAGTGCMAALDAERYLDELEK

SEQ ID NO: 27679 - protein, 541 aa, Oryza sativa
  misc_feature (257)..(257): Xaa can be any naturally occurring amino acid
MESRKPPPSALVDNHVVPGDVVLDLTEMTNQTIKLGAGLRQDCDTIQATSAGRLRLSKPNKYWVESSQKRYIPSVEDTVLGVVVDTKPDNFLVDIKGPNLAFLPVLAFEGGTRRNIPKFEIGTLIYARVVKANSIMNPELSCMDATGKAAEFGQLKDGYMFDTSTGLSRIIFEWHRATKYGGKSLGETILMVAVDECTHKQLPSLSDLCVTLGEFSHICLASRRLSPSQSGMTSATGVEKVEVWCQDLAMGGRSAKXRVEINANKCGTHPTPSKPYYVDKIDTNEQKVVHYQVNCRPARDRNTGSYSVKHHYPSPIVSWIEDLSSFGNVSFSQDPEYADEQSRSSVGQSSASVNLHDMQISVRLTDEFIELAKENTGNNVETCGILGASFRDGTYYVTMLIIPKQEATAHSCQAVSEEEIHAILSEQSLYPAGWIHTHPSQTCFLSSIDLHTQYSYQVMLPEAVAIVIAPTDPTRQVFYGRNCGIFRLTDPGGMGVLRECSESGFHAHRETTDGGPIYETCSKVIFNPNLRFEIVDLRSAP

SEQ ID NO: 27680 - protein, 169 aa, Triticum aestivum
MAPTVMASSATAVAPFQGLKSTATLPVARRSTTSFAKVSNGGRIRCMQVWPAYGNKKFETLSYLPPLTEEQLLKQVDYLLRNNWVPCLEFSKEGFVYRENSTSPCYYDGRYWTMWKLPMFGCTDASQVYKELQEAIASYPDAYVRILGFDNIKQTQCVSFIAYKPAGSE

SEQ ID NO: 27681 - protein, 194 aa, Xylella fastidiosa 9a5c
MNMLNVLRFPVLALALALAFVSSGVLADAGSLLDLDYRPLAGKETVNLQRLYGGKVLLVVNTASKCGFTPQYEGLEALHQKLSPLGFAVLGFPSNDFKGQEPGDEQQIQKFCTLTYGVKFPMFQKVHVKGDEVTPLYQRLTQTTGVAPGWNFHKYLIARDGHVVAQFDSRTRPDDPILLEAIKRELAKPVQVAH

SEQ ID NO: 27682 - protein, 244 aa, Anabaena variabilis ATCC 29413
MRLHIILGPTSTGKTDRSVVLAKQTKAPVIVLDRIQIYQELATGSGRPLIDELEGTTRIYLEERQLADGNLNTLESLSLTLQHIDRLSSQHKLLILEGGSISLCTALWKSRILENYQTTIEYVKVENEELYQSRLWRRMQNALISNPRRPSLIEELSRVWQDPHKLAFVQTVVGYDVLIHWCQKYNLSPDQMWKSFQDNSFYINLIQEMFLAYIQYSQNQRKVFDQLVVEYQQKGALFASTVKF

SEQ ID NO: 27683 - protein, 370 aa, Pseudomonas aeruginosa UCBPP-PA14
MKHFKLPDLGEGLQEAEIVEWHVKAGDSVRADQRLVSVETAKALVDIPAPYDGVVGKLFGAEGDILHVGEPLVGFEGEEADAGTVVGRLEGGGSALEDRFFIGAAPSTREHLAPRATPAVRQFARQQGVELAGLSGSGPDGLITRADVEAAAQGARERFGGERLRGVRRSMALNMARSHAEVVPVTIYGDADLHRWKTARDPLIRLAQALAEACRAEPTLNAWFDGASLSLKLHERLDLGIAVDTPDGLFVPVLRDVGARSAEDLRAGMRRLREDVQARSIPPAEMLGATLTLSNFGTLFGRYANPVVVPPQVAILGAGGIRDEVVAWRGEMAIHPILPLSLSFDHRAATGGEAARFLKVLVNALEQPDG

SEQ ID NO: 27684 - protein, 112 aa, Polaromonas sp. JS666
MKLVTAIIKPFKLDEVREALSGIGVQGITVTEVKGFGRQKGHTELYRGAEYVVDFLPKVKIEAAVSDDLVDRVIEAVEGAARTGKIGDGKVFVYNLEQVVRIRTGETGKEAL

SEQ ID NO: 27685 - protein, 314 aa, Bacillus clausii KSM-K16
MIHILCANPALDRTIYVQAFYPNGVTRSSASHEGLGGKGFNVALPFIVTNEQKTIHMHTFFGGPVGEQLAQMMKNAQLAGETTFIEGDNRYCTILVNESKQEAALINEQGPSITEKEQQQFLQSLFCSLKAGDHLVLSGSLPKGTPLTFYRDIIAQAESRGVQTILDSSGDALAYGAEAKPWLIKINGEEFLDLMGVKEEAANRQQQIEESLKNSPYPNCIVTLGGEGTVAKINGDIWRVTLPTINVTNATASGDIFLGTFIREWRKTNDVKAALLAGSALSLANCLHWLPTIDFSQAEQYQQKIHIERIGSAV

SEQ ID NO: 27686 - protein, 371 aa, Idiomarina loihiensis L2TR
MSLHSTEEIIEDIRQGKMVILMDDEDRENEGDIIIAAECVTPETINFMARYGRGLICLTLTEERCEQLNLPLMVDKNNAPYATSFTVSIEAAEGVTTGISAADRAKTVLDAVKKDAKPEDLVMPGHIFPLKAKSGGVLNRAGHTEAGCDLARLAGFEPAAVIVEVLNEDGTMARRADLEAFSEEHGIKVGTIADLIEYRSIQEKTIERVAECNLPTAFGKFRLITYQDTIDEQVHYALVHGDLSQDKVTNVRVHLQDTFHDTFLTERAAKRSWPIQKAMSYIAEHDGVLVIIGRQQTPESIIAQVCEFEAQDKGEQKPTTSASNASRNVGLGSQILADLNIHKMHLMSSPKRYSALSGFGLEVVDFIEDKD

SEQ ID NO: 27687 - protein, 628 aa, Tulipa gesneriana
MGGRDLESSTPLLHHEPYSPRKTITTILSCITAVALLLSLVTLLNTKHEADHRPPDVAFPMSRGVFEGVSEKSTASLIGSAARFPWTDAMLQWQRTGFHFQTEKNWMSDPDGPMFYKGWYHIFYQHNPDSAVWGNITWGHAVSRDLIHWFHLPIAFFPDQWYDARGPLTGSATFLPDGRIAMLYTGITTEFVQVQCQVYPEDVDDPLLLKWFKSDANPILVPPPGIGSKDFRDPTTAWYDVAEASWKLAIGSKDEQHNGISLIYRTYDFVSYELLPILLHAVEGTGMWECVDFYPVLTNSTVGLDTSVPPGPGVRHVLKASLDDDKHDYYAIGTYDVVSGTWTPDDVESDVGIGWRYDYGKFYASKTFFDSAKGRRVLWGFTGETDSEQNNRLKGWASVLPIPRTILFDQKTGSNLLLWPVEEVERLRTSRQDFENIDIGIGAVVPLDIGKAIQLDIVAEFEIDGATLEASVEADLGYNCSTSDGAFGRGVLGPFGFLVLSDEDLSEQTAIYFYVGRKMDGALHTFFCQDELRSSKANDLVKRVFGSIVPVLHGETFTMRILLDHSIVESFAQGGRTCITSRIYPTKAFDGAARVFIFNNATGAKVTAKSIKIWQMNSASIIPYPFKA

SEQ ID NO: 27688 - protein, 355 aa, Ralstonia metallidurans CH34
MKIAVLPGDGIGPEIVAEAVKVLNALDEKFEMETAPVGGAGYEAEGHPLPDNTLKLAKEADAILFGAVGDWKYDSLDRPLRPEQAILGLRKHLQLFANFRPAICYPELTGASSLKPELVAGLDILIVRELNGDIYFGQPRGVREAPDGLFKGAREGFDTMRYSEPEVRRIAHVAFQAAAKRGKKLCSVDKANVLETFQFWKDIVIDVSKEYPDVELSHMYVDNAAMQLVKAPKSFDVIVTGNMFGDILSDEAAMLTGSIGMLPSASLDANNKGLYEPSHGSAPDIAGKGVANPLATILSAAMMLRYSLNRAEQADRIENAVKKVLAQGYRTADIVTPGCKQVGTREMGEAVLAAL

SEQ ID NO: 27689 - protein, 471 aa, Xanthomonas oryzae pv. oryzae KACC10331
MSSWLRRKSIDQVTVHEAGRQLVRSLSWPHLIALGIGAIVGTGIYTLIGVGADKAGPAVLLSFVAAGIVCACAALAYAEMATMMPAAGSAYTYSYTALGESIAWVVGWSLVLEYSLVVSTVAVGWSGYFVGFLQWLGASLPHELIAGPHAGGIANLPAVVITFLVAGMLMAGTKESATLNAVLVVLKIIALGVFVAIALPTFKSANLQPFMPYGISKAMGPDGVERGVMAAAAIIFFAFYGFDAISTAAEETKNPGRDLSIGIVGSMIGCTLIYVLVALAAVGAMRFTVFGKSPEPLALILRELGHGKAALVIGAVAIIALPTVLLAFLYGQSRIFFVMSRDGLLPRGLSKVNARTGTPVAITLLTAVLVAALAGVARLDEIAALANAGTLAAFTAVAACLLVLRVREPGRARAFRTPLAWVVGPVAILGCLYLFWSLPSNTQGWFLLWNALGVVVYLAYGRRNSRLNSAG

SEQ ID NO: 27690 - protein, 471 aa, Legionella pneumophila subsp. pneumophila str. Philadelphia 1
MNKGMNAFVFLIAVIAGFGGFLFGFDSSVIADVKDQVISQLALTDWQWAQVVSSSLLGCILGIPISGLVADKLSRRSLLKVVALGFILGSSLCALAPGFVSILLGRFIIGICIGIASYIAPLFIAEIAPPHQRGTLVLINGLTITFGQAIAYLIGYFLHDYSLMSWRYLFWIGSLPALVLFSGMYFVPHSPRWIMIKYGADATLKTLKQIRPVGYNIQQELTEISNNLVNPAPAYIQMFKKPIVFVLLLGVGLGLFQQFSGINALMYYGPVVFESFGFSPVKNAILATFFLGLVNFIFTVVTLFYVDKLGRRFLLISGTLIASISLYFVSLLSCHSLFVNKFWILGGLSFYVMGYCISLGSLFWVLISEIYPLSVRGLAMSIATMFQWGANFVVSLLFLPIYQFSGQTVTFAMFATFCLLACWFIYYFVPETTSVSLEKLEENLSSGKKVRDIGQPVSKNIKIAKFNLIMD

SEQ ID NO: 27691 - protein, 502 aa, Mycobacterium bovis AF2122/97
MTTLWQPHRNDYSPIPGRGVHARRGARRPRPRGGRAERPGTGQLTRSGRRALLVGLTAASVGVLYGYDLSAIAGALLSLSEEFELTTREQELLTTTAVLGQIAGALGGGILANAIGRKKSVVLIVAGYAVFALLGATSVSVPMLVVARLLLGVTIGLSVVVVPVYVAESAPAAVRGSLVTAYQLATLSGIVVGYLVGYLLAGSHGWRAMFGLAAAPATLLLPLLWRMPDTARWYLLKGRIADARSALRRIQPEADIDAELADMAAAVDERGGGIGEMVRRPYLRATLFVIALGFLVQITGINAIIYYSPRLFAAMGFAGYFAMLALPAMVQVAGLAAVCASLFLVDRLGRRPILLSGIATMITADAVLITVFANDSDGGTGLVLGFAGVLLFIIGFNFGFGSLVWVYAAESFPSRLRSMGSSLMLTSTLTANAIVAAFSLTMLRVLGGAGVFAVFGTFAVVAFVVVYRFAPETKGRKLEEIRHFWENGGRWPAERSPAADEP

SEQ ID NO: 27692 - protein, 625 aa, Tulipa gesneriana
RDLESSTPLLHREPYSPRKTITTILSCITAAAILLSLITLLNTKHEADHHPPDVAFPMSRGVFEGVSEKSTASLIGSAARFPWTDAMLQWQRTGFHFQPEKNWMNDPDGPMFYKGWYHIFYQYNPVSAVWGNITWGHAVSRNLIHWFHLPIAFFPDQWYDARGALTGSATFLPDGSIAMLYTGITTEFVQVQCQVYPEDVDDPLLLKWYKSDANPILVPPPGIGSKDFRDPTTAWYDVAEASWKLAIGSKDEQHNGISLIYRTYDFVSYELLPILLHAVPGTGMWECVDFYPVLTNSTVGLDTSVPPGPGVRHVLKASLDDDKHDYYAIGTYDVVSGTWTPDDVEADVGIGWRYDYGKFYASKTFFDWPKGRRVLFGFTGETDSEQNNRLKGWASVLPIPRTILFDQKTGSNLLLWPVEEVERLRFNRQDFENIDIGIGAVVPLDIGRAIQLDIVAEFEIDGATLEASVEADLGYNCSTSGGTFGRGVLGPFGFLVLSDEDLSEQTAIYFYVGRKVDGALQTFFCQDELRSSKANDLVKRVFGSIVPVLHGEILTMRILLDHSIVESFAQGGRTCITSRIYPTKAFDGAARVFVFNNATGAKVTAKSIKIWQMKSASITPYPFKA

SEQ ID NO: 27693 - protein, 476 aa, Arabidopsis thaliana
MSYNTGKESSPVSPLKKRRASWSELWVNHHHLLSSSPLDLAAKFQSLTPPISKSKTLLPDFTLLLPDLILIRVIQKIPNSQRKNLSLVCKRWFRLHGRLVRSFKVSDWEFLSSGRLISRFPNLETVDLVSGCLISPPNLGILVNHRIVSFTVGVGSYQSWSFFEENLLSVELVERGLKALAGGCSNLRKLVVTNTSELGLLNVAEECSRLQELELHKCSDSVLLGIGAFENLQILRLVGNVDGLYNSLVSDIGLMILAQGCKRLVKLELVGCEGGFDGIKEIGECCQMLEELTVCDNKMESGWLGGLRYCENLKTLKLVSCKKIDNDPDESLSCCCPALERLQLEKCQLRDKNTVKALFKMCEAAREIVFQDCWGLDNDIFSLAMAFGRVKLLYLEGCSLLTTSGLESVILHWHELEHLKVVSCKNIKDSEVSPSLSALFSALVELQWRPDTRSHLSSSLTGTGIGEKGGKFFKKT

SEQ ID NO: 27694 - protein, 885 aa, Medicago truncatula
MPTWWGKSSSKETKKKAGKESIIDTLHRKFKFPSEGKRSTISGGSRRRSNDTISEKGDRSPSESRSPSPSKVARCQSFAERPHAQPLPLPDLHPSSLGRVDSEISISAKSRLEKPSKPSLFLPLPKPSCIRCGPTPADLDGDMVNASVFSDCSADSDEPADSRNRSPLATDSETGTRTAAGSPSSLVLKDQSSAVSQPNLREVKKTANILSNHTPSTSPKRKPLRHHVPNLQVPPHGVFYSGPDSSLSSPSRSPLRAFGTDQVLNSAFWAGKPYPEINFVGSGHCSSPGSGHNSGHNSMGGDMSGPLFWQPSRGSPEYSPIPSPRMTSPGPSSRIQSGAVTPIHPRAGGTPTESQTGRADDGKQQSHRLPLPPLTVTNTSPFSHSNSAATSPSMPRSPARADSPMSSGSRWKKGKLLGRGTFGHVYIGFNSQSGEMCAMKEVTLFSDDAKSLESAKQLMQVDDKLYIYLEYVSGGSIHKLLQEYGQFGELAIRSYTQQILSGLAYLHAKNTLHRDIKGANILVDPNGRVKVADFGMAKHITGQYCPLSFKGSPYWMAPEVLLFLFWVIKNSKECSLGVDIWSLGCTVLEMATTKPPWSQYEGVAAMFKIGNSKELPTIPDHLSNEGKDFVRKCLQRNPRDRPSASELLDHPFVKGAAPLERPIMVPEASDPITGITHGTKALGIGQGRNLSALDSDKLLVHSSRVLKNNPHESEIHIQRNISCPVSPIGSPLLRSRSPQQRSGRLSPSPISSPRTASGASTPLTGGSGAIPFSNHLKQSVYFQECLGSMPKSPNGVYINGSSHHDSNIDIFQRMQAGSHIKSELVSSDNDALGKQFVRSPHAEPYDFQSVLADRVGRQLLGDHVKINPSFDPSPSSSMLNRTNGL

SEQ ID NO: 27695 - protein, 498 aa, Caulobacter crescentus CB15
MRDIAHFVKGQTLVGASGRFGDVFNPNTGEVQARVQFATDAELDAAVQVAAKAQVGWAQTNPQRRARVMFEFKRLIERDMNTLAEILSSEHGKVIADSKGDIQRGLEVIEFACGIPHILKGEYTEGAGPGIDVYSMRQPLGVCAGITPFNFPAMIPMWMFGISIAVGNSFILKPSEKDPTVPVKLAELMMEAGAPAGVLNVVHGDKSAVDAILTHPLIRAVSFVGSSDIAHYVYQTGTAHGKRVQAMGGAKNHGIVLPDADMDQVVKDLSGAAFGSAGERCMALPVVVPVGQKTADELRERMVAEIASLKVGVSTDPDAHYGPVVSAQHRDKIADYIRIGQEEGAELVVDGRDFQLQGFEKGFFIGPSLFDGVKKGMKTYHEEIFGPVLQIVRAETLEEAIALPSEHQYGNGVAIFTRNGRAAREFAANVNVGMVGINVPIPVPVAYHTFGGWKRSAFGDTNQHGVEGVKFYTKVKTVTARWPEGEVADSSFVIPTMK

SEQ ID NO: 27696 - protein, 323 aa, Triticum aestivum
HYRTSLYKKAGWYRSGIPGISCSPLSLRLQTPAAEPYPLRVLSPSAMAATLFSTALSHHFIPLPSAARPAAASASFACGPLRAVSALLAPRRRLLLPVAVAVSSEFGTEDAEEEQSEGEGGGDSEAEYSEDLKVFVGNLPFTVDSAQLAGLFEQAGSVEMVEVVYDRMTGRSRGFGFVTMGSAEEVAAAVEQFNGYTFQGRPLRVNSGPPPPRDEFAPRTPRTMGGGGGGGSFDSANKLYVGNLSWGVDNSTLENLFSEQGKVLDAKVIYDRDSGRSRGFGFVTYGSADEVNNAISNLDGVDLDGRQIRVTVAESKPREQRRF

SEQ ID NO: 27697 - protein, 155 aa, Zea mays
  misc_feature (21)..(21): Xaa can be any naturally occurring amino acid
  misc_feature (56)..(56): Xaa can be any naturally occurring amino acid
MKGHIHYDGMLIYTGMYEIIXSTDDIGVTRALESGVGLGKLSGRDAEISKLVEVGXYDISDEEFENYFMRYKEVGDKRKRVTDEDIKSLLSDGCSRRRLFVSLAGVLVDCGSLGLSTAAAKLIRSDVGGSMPCGLWIGPGGASYAVGALLLQIRT

SEQ ID NO: 27698 - protein, 357 aa, Pseudomonas syringae pv. phaseolicola 1448A
MTERVLVTGGGGFVACHLIQQLLASGNVVNTTVRNLTNRAKVLPLLTLQKQHPGKLYLFEADLLVDGAFDAPMHDCTVVHHVASPFLLPEKIKDGRREMLEPALLGTRNVLSSVDKTPSVLRVVMTSTVGAIFGDYIDVLHMKNKTLTEDYFNTSSTLETNPYHYAKVEAEKEAWRICEKQTRWSLVTINPGMILGPSLTPASDSGSLFLLDEMFRGYFFYGMPDLSLTTVDVRDVAAAHIIAANKVDAQGRYILAEQHMISFVEIAGIVRRLHRRPWLLPRYRIPDAIVRLIGPFFGLTQDYLSKHLGIRFVVDNQRSLNDLGIKYRSITETLTDHYRCWDMQRQLNSQANEKHRS

SEQ ID NO: 27699 - protein, 542 aa, Leuconostoc mesenteroides subsp. mesenteroides ATCC 8293
MGGVAAGMSAATRLRRLSEKDEIIVFEKGPFVSFANCGLPYHISKTIKHRSQLIVQTADDLRSRFNIDVRVNSEVTHIDRDNKMISVNHDDQQEKLYYDKLILSLGSSPVIPKIEGLHTQSNIFQLRNIPDLDNIMSHLDESIKTVAVLGAGFIGIEVTENLIKRGFSVNLIERSNQILPNLDIEMAQSITNELIKNDVRINTGTTINKVSRDILYLDNGMSIQADAVIIAAGIRPNSDIAIAAGLKVGPNKGIVVDHDFKTSDSNIYAIGDVISVIHQITEQETLIPLAGPANRHGRQVADAIHGLSIKNKPEIGTSIVKVFSKSAASTGINEKQAKQLGLNYHVTHTFSYHHASYYPGATQVMMKLIFTNTGDIIGAQAVGNEGVDKRIDLLATAIKFRLKVDDLPELELTYAPPFGAAKDPVHISGYVAENIINSRSHNIQYNELENYRRDGYLLIDVRSSQEIRAMGLINGFINIPLEKIRDRINQIPKDTGIIVSCATGQRSYTAERIFINNGFRNVKNLDGAFSLYQLMYPQNIVK

SEQ ID NO: 27700 - protein, 79 aa, Triticum aestivum
PIDSGNQVLPLRLGVLGPFVVNKQTPNRQIWLFSPVSGPARFAWDPPPPSWFYRRPGVIFIPLLKKEIVELFGTPVPLF

SEQ ID NO: 27701 - protein, 480 aa, Xylella fastidiosa Ann-1
MSFLPSFLKRKSIDLITVHEEGRRLVPTLSWPHLIAFGIGAIVGTGIYTLIGVGAEKAGPAVLLSFVIAGVICACAALAYAEMATLMPVAGSTYTYSYVALGEGIAWIVGWSLILEYSLVVSTVAVGWSGYMTGFLKSVGVDMPLALTAGPYAGGIINLPAVVITCVVAGLLIVGTKESTTLNAVLVVVKIIALSVFVVIALPHFDMAHLKPFMPYGFTKSIDTGGVERGVMAAAAIIFFAFYGFDAISTAAEETKNPSRDLSIGIIGSMIGCTLIYVLVALAAIGAMHYTVFGPSTEPLALILRQLDQGNTARLIGAAAIIALPTVLLAFLYGQSRILFVMSRDGLLPRGLSTVNERTGTPIATTLFTAILVATAAGLVPLGEIAALANAGTLTAFIAVALCLLVMRVREPQRVRAFRTPLAWVVGPIAIAGCLYLFWSLPKMTQSLFLLWNALGLCVYLVYGRHTSLLSKGVSIDTPR

SEQ ID NO: 27702 - protein, 548 aa, Roseovarius nubinhibens ISM
MTLNLTVPGHEDLKPRITVFGVGGAGGNAVNNMIEKQLDGVDFVVANTDAQALSQARAESRIQLGVKVTEGLGAGAKAAIGAAAAEESIEQIVDHLAGAHMCFITAGMGGGTGTGAAPIIAQAARELGVLTVGVVTKPFQFEGAKRMRQAEDGVESLQKVVDTLIIIPNQNLFRLANEKTTFTEAFSLADDVLYQGVKGVTDLMVRPGLINLDFADVRAVMDEMGKAMMGTGEDSGEDRAIQAAEKAIANPLLDEISLKGAKGVLINITGGHDLTLFELDEAANRIREEVDADANIIVGSTLDTSMEGAMRVSVVATGIDARDVQTDIPVPRRKLSEPLATTTSLEAREEPAPVEEAPIAASASHAEAGEERSLFTGFESERAAAEDQMEDIFETEAASDAVPPPAYQPEPEYVEEAEAELEAFVAPKAPAPGTPSPEALARLHAAVGRTPGSEPRQPAPQPQAHQPAQRPAQAAPAAEESHGERPRFGINSLLNRMTGHGAEAEQPARAPRQQPTLQARQAQPAAVEPEPEQDEQIEIPAFLRRQAN

SEQ ID NO: 27703 - protein, 287 aa, Triticum aestivum
  misc_feature (186)..(186): Xaa can be any naturally occurring amino acid
  misc_feature (196)..(196): Xaa can be any naturally occurring amino acid
  misc_feature (250)..(250): Xaa can be any naturally occurring amino acid
TSRSGMAGGDEGSLVPREVPGSYGMPFVSAIRDRLDFYYFQGQDKYFESRVERYGSTVVRINVPPGPFMARDPRVVAVLDAKSFPVLFDVDKVEKKNLFTGTYMPSTSLTGGFRVCSYLDPSEPTHAKVKQLLFSLLASRKDAFIPAFRSHFSSLLATVESQLVLGGKANFNTLNDATSFEFIGDXYFGVLPSRVXDLGTTRALPKAAQGGSIFQPPPPSFTLRPPMILEEPLLHTVHLPPILVSGDYRXLYKYFNAAATKALDTAEGLGAERDEACHNLLFAPGHN

SEQ ID NO: 27704 - protein, 333 aa, Glycine max
MKSLFKPKPRTPSDIVKQTRDLLLRLTSRDDDNMPDLTKNLRDLKSILYGNSESEPVPEACAQLTQEFFADNTLRLLIQYLPKLNLEARKDATQIVANLQRQQVQSKLIASDYLDTNLDLMDVLVSGYENTDMALHYGAMLRECIRHQIVAKYVLDSPHMKKFFDYIQLPNFDIAADAAATFKELMTRHKSTVADFLSNYYEWFFDEYNSKLLESSNYITRRQAVKLLGDMLLDRTNSAVMTRYVSSRDNLRILMNLLRESSKSIQIEAFHVFKLFAANQKKPADIISIFVANRSKLLRLLGDLKTDKEDEQFEADKAQVIKEIAALEPRDLA

SEQ ID NO: 27705 - protein, 548 aa, Pseudomonas syringae pv. tomato str. DC3000
MSELIRVPDIGNGEGEVIELMVKVGDRIEADQSVLTLESDKASMEIPAPKAGVIKAMKVKLGDRLKEGDELFELEVEGEASAAPAPAAEPAAAAAPAAAEKPAEAAPAAAEPAPAAAATVQDIHVPDIGSSGKAKIIELMVKVGDSITADQSLITLESDKASMEIPSPAAGVIESIEVKLDQEVGTGDLILKLKVAGAAPAAAPAPAASAPAAAPAKAEAAAPAAAPAPKAEAAPAPAAPAKDGAKVHAGPAVRQLAREFGVELSAVSATGPHGRVLKEDVQVYVKAMMQKAKEAPAGGASGGSGIPPIPEVDFSRFGEIEEVPMTRLMQLGASGLHRSWLNIPHVTQFDQADITDLEAFRVAQKGAAEKAGVKLTVLPLLLKACAHLLKELPDFNASLAPSGKAVIRKKYVHIGFAVDTPDGLLVPVIRDVDQKSLLQLAAEAAVLAEKARSKKLTANDMQGACFTISSLGHIGGTGFTPIVNAPEVAILGVSKATIQPVWDGKAFQPKLMLPLSLSYDHRVINGAAAARFTKRLSELLTDIRTILL

SEQ ID NO: 27706 - protein, 187 aa, Brassica napus
  misc_feature (8)..(8): Xaa can be any naturally occurring amino acid
  misc_feature (48)..(48): Xaa can be any naturally occurring amino acid
RFPLPVWXGLGSASKRVIQKDAKNLNMLKEMYNQWPFFRVTIDLVEMXFAKGDPGIAALYDRLLVSEELQPFGEQLRVNYQETRRLLLQVAGHKDILEGDPYLRQRLQLRDPYITTLNVCQAYTLKQIRDPSFHVKVRPHLSKDYMESSKPAAELVKLNPKSEYAPGLEDTVILTMKGIAAGMQNTG

SEQ ID NO: 27707 - protein, 248 aa, Zea mays
  misc_feature (27)..(27): Xaa can be any naturally occurring amino acid
LHPLRCSRFHRAVRNLTWPCRRWWSTXVVFPPVARPPGSAGSHFLGGAGVRGLEIGGNFIKFTAIGVYLEDAAVPALAKKWGGKTADELASDAAFFRDVVTGDFEKFTRVTMILPLTGEQYAEKVTENCVAFWKAAGLYTDAEGVAVEKFREVFKPETFAPGASILFTHSPAGVLTVAFSKDSSVPAAGGVAIENKRLCEAVLESIIGERGVSPAAKLSLAARVSELLAKETAAPADAPQAEPVSITA

SEQ ID NO: 27708 - protein, 222 aa, Rhodobacter sphaeroides
MNDYSTTRDRVEHYFDRTATHTWERLTSSAPVSRIRQTVREGRDTMRAKMLWRLPKDLTGLRVLDAGCGAGQMTAELAARGAQVMAVDISPQLVEIARKRLPPEHQDRVTFASGDMLADDLGRFDYVVAMDSLIYYTDADIAAALDRLGARNRHSVVFTVAPRTPFLMAFWTMGKLFPRSDRSPVMIPHPFQPLNEATGGRLVKVGRVSRGFYISECLEFRP

SEQ ID NO: 27709 - protein, 468 aa, Sulfolobus tokodaii str. 7
MSEVIEIKSPSNLKVIGTVKRMSKDEVRGEIEEAYKGFETISRMPLYKRTAILRKVSEILEREQERLARLLAMEAGKPIKDSRVEVMRASRLFRQAAEEAAIVLEGKNYRVDAYEYPPGNENRIVISTREPIGVVTAILPFNFPINSFAHKVAPAIAVGNSVVVKPSISTPLSAIEMKKILVEAGLPDSAVRIVTGYSNEIGDELITHPLVGLITLTGSTQTGLAIASKAVSLGKRIIMELGGSDPIIVLEDANIDRASSIAVRARYEYAGQNCNAGKRIIVREEIYDKFVKAFKEKVKALKVGDPLDESTDIGPVINQESVEKLNKALEDAQSKGGNVEVLNKGPETGYFFPLSLVTNPSLDMLVLKTEIFGPIAPIVSVKSDEEAINIANSTEYGLQSAIFSNDVNRALKIAKELKFGAIIINDSTRLRWDSLPFGGFKKTGIGREGVRDTMLEMTENKLIAITLL

SEQ ID NO: 27710 - protein, 375 aa, Oryza sativa
  misc_feature (205)..(205): Xaa can be any naturally occurring amino acid
  misc_feature (222)..(222): Xaa can be any naturally occurring amino acid
MPASDPAPAAAAAAYDRTAELRALDATLSGVRGLVASGATHLPRIFHNVVHGDQEPPEATAPSSAATTTTTVPVIDISGSRAAVVDAVRRAAAEWGFFQVTGHGVPLAAMDAAAGAARAFHESGGGEGSDKARLYSREPGRAVKYHCNFDLYQSPVANWRDTLYLRMAPDPPPAADLPEICRDALFEYAKHEDLGNTLFELLSEXALWLKPRYLTDIECNQXQIILCHYYPPCPQPELAIGTSRHSDSGFLTILLQDDIGGLQILHEDRWVDVTPTPGAFIVNVADLLQLISNDNYKSVEHRVVAKNTEPRVSIACFFSTHFHPISTRMYGPIKELLSDENPPLYREALVRDYTARYYSVGLDGKFKTTLSEFRL

SEQ ID NO: 27711 - protein, 424 aa, Yersinia pseudotuberculosis IP 32953
MSTRHVVITGMGVVSPLGCGIETVWQRLLAGQSGIRVLSDEIVGDLPAKIGGQVPTLAEDAKAGFDPDKAVTPKDQKKMDRFIEFAMAAADEAISQAGWHADNTEKQERTATIIGAGIGGFPAIAHAVRTSDSRGPKRLSPFTVPSFLVNLAAGHVSIKHHFKGPIGAPVTACAAGVQAIGDAVRMIRNNEADVALCGGAEAVIDTVSLAGFAAARALSTHFNSTPEKASRPFDTARDGFVMGEGAGLLIIEELEHALARGAKPLAEIVGYGTSADAYHMTSGAEDGDGAYRAMKIALRQAGITPEQVQHLNAHATSTPVGDLGEINAIKHLFGESNALAITSTKSATGHLLGAAGGLETIFTVLALRDQIVPATLNLENPDPAAKGLNIIAGNAQPHDMTYALSNGFGFGGVNASILLKRWVD

SEQ ID NO: 27712 - protein, 121 aa, Glycine max
  misc_feature (39)..(39): Xaa can be any naturally occurring amino acid
  misc_feature (91)..(91): Xaa can be any naturally occurring amino acid
ARLRNLTRVLDGLTLAKRQFAALILLDEERSNEVRAFIXCIKPEMEVQAVPITDPVGAHITDEYLESGTVSIESLAGGLAITRRRVARDLXQLKREVVDLVCGESGEIKQSSLRIRKMKCE

SEQ ID NO: 27713 - protein, 682 aa, Magnaporthe grisea
MLRTVGRKALRGSSKGCSRTISTLKPATATIAKPGSRTLSTPATATATAPRTKPSASFNARRDPQPLVNPRSGEADESFIGKTGGEIFHEMMLRQNVKHIFGYPGGAILPVFDAISNSEHIDFVLPKHEPGAGHMAEGYARASGQPGVVLVTSGPGDTNVITPMADALADGTPLVVFSGQVVTSAIGSDAFQEADVIGISRSCTKWNVMVKSVDELPRRINEAFEIATSGRPGPVLVDPAKDVTASVLRRAIPTETSIPSISAAARAVQEAGRKQLEHSIKRVADLVNIAKKPVIYAGQGVILSEGGVELLKALADKASIPVTTTLHGLGAFDELDEKALHMLGMHGSAYANMSMQEADLIIALGGRFDDRVTGSIPKFAPAAKLAAAEGRGGIVHFEIMPKNINKVVQATEAIEGDVASNLKLLLPKIEQRSMTDRKEWFDQIKEWKEKWPLSHYERAERSGLIKPQTLIEELSNLTADRKDMTYITTGVGQHQMWTAQHFRWRHPRSMITSGGLGTMGYGLPAAIGAKVARPDALVIDIDGDASFNMTLTELSTAAQFNIGVKVIVVNNEEQGMVTQWQNLFYEDRYSHTHQRNPDFMKLADAMDVQHRRVSKPDDVGDALTWLINTDGPALLEVMTDKKVPVLPMVPGGNGLHEFITFDASKDKQRRELMHTRSNGLRG

SEQ ID NO: 27714 - protein, 265 aa, Oryza sativa (japonica cultivar-group)
MAATVAAASSRKRGFSVADILDDPFPLPSHHLAKRGRCSSSAASAADLGVSLEFDPIEVLQLIFPHEDPQLLKSFFEASGNVLDAAIRGFKHRLQSHTDTEITEAASGDTGNEVVSPKVESDLSAMNIPSNGSEWAELVVKEMSSALDLVDAKNRAFRLLDLFEKSTAACISPVEMRKMREEHKILKLMLGGLLEQNGVLKRAFLKQHNRLNDYEKKMSQERSQIIDTYEKEIKALQHRNYVLSLHLAQATQHGIISGHCNPDVF

SEQ ID NO: 27715 - protein, 112 aa, Arabidopsis thaliana
KVEKFFLKPLSQGSQNGKKMIPQGALRKTLEKWDKTNLPPPRGLYVLQKVFFRSNPAKKAFLEMCNYKYVQKMPFESHLAKRVAPGSPLEETKLAVNPLGSLVRANALRKEI

SEQ ID NO: 27716 - protein, 95 aa, Brassica napus
  misc_feature (33)..(33): Xaa can be any naturally occurring amino acid
LVEGETPVEMVLVMTVEPGFGGQKFMPNMMDKXLRQKYPTLDIEVDGGLGPSTIEAAAAAGANCIVAGSSVFGAPESGKVISLLRTSVEKAQPTT

SEQ ID NO: 27717 - protein, 673 aa, Triticum aestivum
MEARDGGSAPLPCSYAPLPEDAEAATTVGRARRTAGPLCAALMLVTAAVLLMVAALAGVRLAGQLPADGIVGVSGDQTTVDAAMMSTSSRGPESGVSEKTSGAAAHGGMLGADASGNAFPWSNAMLQWQRTGFHFQPEKNWMNDPNGPVYYKGWYHLFYQYNPDGAIWGNKIAWGHAASRDLLRWRHLPVAMSPDQWYDINGVWSGSATVLPDGRIVMLYTGSTNASVQVQCLAFPTDPSDPLLINWTKYENNPVMYPPPGVGEKDFRDPTTAWFDGSDDTWRLVIGSKDDHHAGMVMTYKTKDFIDYELVPGLLHRVPGTGMWECIDLYPVGGLRGIDMTEAVAAASNNGGGDVLHVMKESSDDDRHDYYALGRYDAAKNTWTPLDSDADVGIGLRYDWGKFYASKTFYDPSKKRRVLWGWVGETDSEHADVAKGWASLQSIPRTVVLDTKTGSNLLQWPVEEVETLRTNSTNLGGVTVEHGSVFPLSLHRATQLDIEASFRLDPLDVAAAKEADVGYNCSTSGGTTGRGTLGPFGLLVLADARHHSGDMERTGVYFYVARGLDGGLRTHFCHDETRSSHANDIVKKVVGNIVPVLDGEEFSVRVLVDHSIVESFAMGGRLTATSRVYPTEAIYANAGVYLFNNATSARVNVTRLVVHEMDSSYNQAYMTSL

SEQ ID NO: 27718 - protein, 914 aa, Cryptococcus neoformans var. neoformans JEC21
MSDSPAATPLPKDPEGITEQIQSVSTPPPPPQAQKPARQKKIAVLTSGGDSAGMNAAVRAIVRQSIARGCQAYIIREGWEGLVRGNTSGPTPAPTAPQSPTLSASSKTVTFSSLPPSQQFDKLTSTLNKESLANEVSFSDPNEVTPLEDTPLSFGYGQLLRDGAGEGDVEELASHGMQGLAIADREDEKGRSLKNKYIVRVGWDDVRGWQGEGGTLIGSSRCPAFRTREGRLQAASNLIHSGIDCLAVCGGDGSLTGADKLRGEWPSLVEELYTENKITDDQREAYHHLNIVGLVGSIDNDMALTDLTIGALTALHRICESIDSISSTASSHSRAFVIEVMGRHCGWLALLAGIATGADFIFIPEDPPKCEDWETEMCDLLQAHRKVGKRKSIVIVAEGALDRNLKPIKPDYVKKILVERLGLDTRVTTLGHTQRGGKPCAFDRILPTLQGVEAVQTLLSATPETPSYMIGIQENKITKIPLLEAVARTQMVAEAIENRDFAKAMSFRDSEFREMLQAFQISSSLDVSQNAPVDKRLRIGIIHVGAPAGGMNAATRQAVRFCHNRGHVPVAIYNGFEGLLDDNVSELSWLRVDSWTTRGGSELGTNRSLPSIDIGSVAAGFQRYSLDALLVIGGFEAFHSVVLLSQNRTNYPAFQIPIVHLPATLSNNVPLTDFSLGSDTSLNALVEACDAIKQSASASRNRVFVVETQGGMSGYIATMGALAVGAVLVYTPENGISLKLLQEDVEFLIKRYKLDEKGKSEGRLVIKAEKSSSVYTTETLTKIFKEEGKDLFDARSASLGHTLQGGVPSPLDRTRAARLSLRCMQFLEEHASPNSQASHHKPKSAAHPHAGAKSIAKDTAAMIAIIGSKVVYATMDDVLKVTDMKLRRGTDEWWSDCKELAETMGGRTGLMAKH

SEQ ID NO: 27719 - protein, 318 aa, Prunus persica
METFPVVDLSQITGEKREAAMEKMNDACENWGFFELVNHGISHELMDTVEKLTKEHYKKCMEQRFKEMVASKGLEAVQSEIHDLDWESTFFLRHLPVSNISQIPDLDEDYRKVMKEFAVELEKLAEQLLDLLCENLGLEKGYLKKAFYGSKGPNFGTKVSNYPPCPKPDLIKGLRAHTDAGGIILLFQDDKVSGLQLLKDGQWIDVPPMHHSIVINLGDQLEVITNGKYKSVMHRVIAQPDGTRMSIASFYNPGDDAFICPAPALLEKETENISAYPKFVFDDYMKLYSGLKFHAKEPRFEAMKAMESTVNLDPVATV

SEQ ID NO: 27720 - protein, 330 aa, Bacillus clausii KSM-K16
MQEQKDMFDLTIIGGGPAGLFAAFYAGMRKMKVKVIESMPQLGGQLSALYPDKYIYDVAGFPKVKAQDLVDQLTAQAQQFQPEIVLEEAVQTLEKQEDETFVLTTDANIHYTKAVLITAGAGAFAPRKLQVEKADFYEDKNIHYFIRDLSAFTGKRVVVIGGGDSAVDWALMLEPIAKEVTLVHRRDAFRAHEHSVDLLKKSSVRILTPYETAELHGDENGVTAVTFSEVKGDQTETIAVDDVIVNFGFVSTLGPIKEWGLEIRKNAIPVNTKMETNIPGVYAAGDVSTYDGKIKLIATGFGEAPTAVNNAKVYIDPTARAFPGHSTSLF

SEQ ID NO: 27721 - protein, 380 aa, Thiobacillus denitrificans ATCC 25259
MFELMDVDTQDAVIKVIGVGGCGGNAVDHMIASGLNGVEFIAINTDAQALKRNQAKLQLQLGNGVTKGLGAGANPDVGREAALEDRERLAELIDGADMLFITAGMGGGTGTGAAPVVAEVAKELGILTVAVVTKPFMFEGKRVRAANAGIEALARHVDSLIIIPNEKLMQVLGDDVSMLDAFKAANNVLHGAVGGIAEVINCPGLVNVDFADVRTVMSEMGMAMMGSAQASGENRARIAAEQAVASPLLEDVNLAGARGVLVNITASSTVKMKEIHEVMNTIKAFTAEEATVIVGQVLDDTMEDSLRVTMVATGLGNPVARQQSKPMQIIRTGTDDAPMTMGNDDVPSVMTSRRSRTIQAMTDSGIDTLDIPAFLRRQAD

SEQ ID NO: 27722 - protein, 543 aa, Idiomarina baltica OS145
MTVHERAGQPATAADSVNIAQLVSAYYVYEPDPRKAHQKVSFGTSGHRGSALARSFNEAHILAIAQAICAYREEQGIEGPILLGKDTHALSESAYISALDVFLGNGLEVHVQTEHGYTPTPALSHAILTYNANQQKQCDGVVITPSHNPPQDGGFKYNPPHGGPADADATRVIEKYANALLSSGLQGVNTCEREDVLSHPKLVFVDWRKQYIDDLPRCIDMQCIKAADLRLAIDAMGGAGADYWHQIAETYGLNIDIFNDHVDPGFQFMTLDKDGKIRMDCSSPYAMAGLLAYKDRYDLAGGNDPDYDRHGIVTPDGLMNPNHYLAVAIDYLCKSREWAADVAIGKTLVSSQMIDRVVEDNQRKVYEVPVGFKWFAQQLRDGDIGFAGEESAGATLLDRQGDVWTTDKDGIVMVLLAAELQAATGESPSAYYKKLCAQHGEAFYQRVDTASSLEQNARFKDIRAYKLKLTTLAESNVVDIFTKAPGNDAQFGGVKVVLEDGWFAARPSGTEPVYKIYAESFKSAAHLEQIIAEARDWVAELIQ

SEQ ID NO: 27723 - protein, 431 aa, uncultured archaeon GZfos1C11
  misc_feature (409)..(409): Xaa can be any naturally occurring amino acid
  misc_feature (428)..(428): Xaa can be any naturally occurring amino acid
MSLLPLRFYAVTDTIYEHANRIAEEGKVEKVKEFVGELRNKHDMAASVAIGDTQVLKKVKGEIKERIAEMEKALIGICLLGELTLRSLDYIGSFGERLAAPILAGAIQSAGIDAVHFTGGDIGIITNAEYGSAQLMGGVEQEVRARIMPLLGDKIPVVCGFTGETKDGKITTLGRGGSDYTATIIGAAIDADEIWLWKDTEGIMSADPKRIKNARKIPYMSYIEAMELSYFGAAVLHPRAIEPAMKKKIPIRVKNLLNPDDEGTLIGEEQEKTKKAAKAITLIENTSIVNIAGTGIGSISDVASRIFSVLAAKNVDIIMISHGSSERTVSLVIDSAQLERAIDAIHSIPAVDTVIRDISYNSNVCTVGVVGVGMAGTVGVAGKVFSALGNEGISVKMISQGSSEFNISXVVQKEEAYKAAQAIHDVFXMGS

SEQ ID NO: 27724 - protein, 144 aa, Triticum aestivum
MARARLPLAACVVAFHLCLLLCPTSSLRRLPEAESVAARHGGSSRTAYHFQPAKPWQNESVAVRHGGSSRTGYHFQPAKNWQNDPNGPMYHNGVYHLFYQYNPLGATWGKGNLSWGHSVSQDLVNWACLDTAIDPTDPFDGQWL

SEQ ID NO: 27725 - protein, 228 aa, Buchnera aphidicola str. APS (Acyrthosiphon pisum)
MNKFFLAPSILSADFARLGEDIKKVIDAGSDLIHFDVMDNHYVPNLSMGPMILESLRNYNITAPIDVHLMVKPVDNLIPQFAKAGATFITFHPEATLHIERTLNLIKENGCKAGLAFNPATPLNFLDYILEKLDLILLMSVNPGFGNQSFLPSTFNKLREVRKIIDANFSDILLEVDGGVKLDNIADIACAGANVFVMGSGLFKYSNYKLVIEKIRKKLEYAHSRSIH

SEQ ID NO: 27726 - protein, 193 aa, Shewanella sp. ANA-3
RGSPDYVDFADVKTVMSEMGYAMMGTGVARGEDLAEEAAEAAVASPLLEDIDLAGARGVLVNITAGMDMSIEEFETVGNHVKAYASDNATVVVGAVIDPEMSDELRVTVVATGIGAEKRPDIQLVSKPAPRPEPVVVEPKVEAYVEEATHVSYAAPKGNVLPATPAPAPAPAPSTKHELDYLDIPAFLRKQAD

SEQ ID NO: 27727 - protein, 164 aa, Arabidopsis thaliana
MEIDSEKIHERKQSDYNSLDERFEIQKEMYRGQQYSQIYFARLHLMRTLLYSLAPTWKSHLPVCKVLGLEKGKECIIVGTLFKHMKLKPCVLDEYSKERSVTPLVKPHNFMHPDDNLILEDESGRVKLAGSALSPAIYVTGVVVALHGKETNCLNTIKLEREGG

SEQ ID NO: 27728 - protein, 420 aa, Rubrivivax gelatinosus PM1
MAKQKRNAFYAQSGGVTAVINASACGVIETARRHKDRIGKVYAGRDGIIGALTEDLIDTGKESATAIAALRSTPSGAFGSCRYKLKSLEANRREYERLIEVFRAHDIGYFFYNGGGDSADTCFKVSQLSEAMGYPVQAIHVPKTIDNDLAFTDCCPGFGSVAKYVAVSTLEASFDVRSMAKTSTKVFVVEVMGRHAGWIAAAAGLVEEQGIPVVILFPEIVFDEPEFLARVDQLVRQHGYCTVVVSEGCHHADGSFLAEQGARDAFGHAQLGGAAPVVANLIKQALGHKFHWAVADYLQRSARHIASKTDVTQAYALGRKAVELALQGHNAVMPTIERLSDAPYKYRIGMAPLAKVANVEKFMPRDFISKDGFGITEKCRRYLRPLIQGEDYPRFTNGLPRYVSLKNVAVPKKLAAFDLK

SEQ ID NO: 27729 - protein, 131 aa, Rubrivivax gelatinosus PM1
MRLLHTMLRVGDLPRSIDFYTQVLGMTLLRTTERPAQKYSLAFLGYGSNPEHAEIELTYNHGVDRYELGTAYGHLAIGVPDVAATCAAVRAKAQALGGAITREPGPVQGGSTVIAFITDPDGYKIELIERA

SEQ ID NO: 27730 - protein, 336 aa, Acinetobacter sp. YAA
MNTLKFRVIDKIAETKESFSFVLKPLDGVLAEHSPGKYLPIKIRTEKGLLFRSYSLSSSASANEDFKITVKRERGGRGSNWLCDNVKVGDFIETLPPAGSFHPQNWDRDFVFFAGGSGITPVISIIKTALNRHKNRIKLFYANSSESSIIFHKELKDLCLQFPDRLDIQFWLDDEKGIPTSIAFEQYIDDALEVEYFLCGPAPFMGGVENFLIESKVPPGLITKESFAGSVSDDNGDTVESSAEKDVTVNFMLNGIKNSVMCSEDDFILNEIIKAGINVPSSCCAGNCGSCMCLLVSGDVILESNTVLDASDEEDGWILACRSKPRSKNIEISFDQ

SEQ ID NO: 27731 - protein, 321 aa, Mannheimia succiniciproducens MBEL55E
MIKKIAVLTSGGDAPGMNAAIRGVVRSALFEGLEVFGVYDGYYGLYHNKIKQLNRYSVSDVITRGGTFLGSARFPEFKNPEVRAKCAEILRSHGIDALVVIGGDGSYTGAKLLTEEHGIQCIGLPGTIDNDAPGTDYTIGYQTALETAVDAIDRLRDTSSSHQRISIVEIMGRHCSDLTINAALAGGCEYIVASEVEFDQEELIQQIERSIANGKRHAIIAITELITDVHELAKRIEERVHHETRATVLGHVQRGGSPCAFDRILASRMGVYAVDLLLQGKGGYCVGIQNEQLVHHDIIDAINNMRRSFKAELLDMNERLF

SEQ ID NO: 27732 - protein, 541 aa, Oenococcus oeni
MTDQVSILNDPFINKGTAFTEAEREELGLNGLLPAKVQALQEQVDQTYAQFQSKVSNLEKRLFLMEIFNTSHVLFYKLFSQHVVEFMPIVYDPTIADTIENYSELFVEPQGAAFLDINHPENIQSTLKNAANGRVIKLLVVSDAEGILGIGDWGVQGVDIAVGKLMVYTVAAGIDPSTVLAVVIDAGTNNEKLLKDPMYLGNKFNRVRGDKYYDFIDKFVNHAESLFPNLYLHWEDFGRSNASNILNSYEDKIATFNDDIQGTGIVVLAGVLGALKISGQKLTDQTYMSFGAGTAGMGIVKQLHEEMVEQGLSDEEAKKHFFLVDKQGLLFDDDPDLTPEQKPFAAKRSDFKNANQLTNLQAAVEAVHPTILVGTSTHPNSFTEEIVKDMSGYTERPIIFPISNPTKLAKAKAEDVLKWSNGKALIGTGVPVDDIEYEGNAYQIGQANNALIYPGLGFGAIAAQSKLLTPEMISAAAHSLGGIVDTTKVGAAVLPPVSKLADFSRTVAVAVAKKAVEQGLNRQPIDDVEKAVDDLKWEPKY

SEQ ID NO: 27733 - protein, 167 aa, Zea mays
MADESPKSIYDFTVKDISGNDVSLSQFKGKTLLIVNVASKCGLTDANYKELNVLYEKYKEQGLEILAFPCNQFLGQEPGNNEEIQQTVCTRFKAEFPIFDKVDVNGKNTAPLYKYLKAEKGGLLIDAIKWNFTKFLVSPDGKVSQRYSPRTSPLQFEKDIQALLGQA

SEQ ID NO: 27734 - protein, 333 aa, Silicibacter pomeroyi DSS-3
MTIKVGINGFGRIGRCTLSHIAASGRDDIEVIKVNATGPLETAAHLIKYDSVHGRFPGEVSLGEGTMNLGRGDMQMFSTYDLNELDWSGCDVVLECTGKFNDGAKAKVHLERGAKKVLLSAPGKNVDKTIVFGVNDDQLTAADTMISNGSCTTNCLAPLAKVLDEAFGIEHGIMTTIHAYTGDQPTLDRRHKDLYRARAAAMSMIPTSTGAAKALGEVLPNLKGRLDGSAIRVPTPNVSAVDLTFRAGRDVTTAEVNAAVEAAAKGPMKGVLGYEPAPLVSTDFNHTPESSIFAPDQTRVVENRMVRVLAWYDNEWGFSVRMADVAVAMGRLG

SEQ ID NO: 27735 - protein, 470 aa, Zea mays
MASTKAPGPGEKHHSIDAQLRQLVPGKVSEDDKLIEYDALLVDRFLNILQDLHGPSLREFVQECYEVSADYEGKGDTTKLGELGAKLTGLAPADAILVASSILHMLNLANLAEEVQIAHRRRNSKLKKGGFADEGSATTESDIEETLKRLVSEVGKSPEEVFEALKNQTVDLVFTAHPTQSARRSLLQKNARIRNCLTQLNAKDITDDDKQELDEALQREIQAAFRTDEIRRAQPTPQDEMRYGMSYIHETVWKGVPKFLRRVDTALKNIGINERLPYNVSLIRFSSWMGGDRDGNPRVTPEVTRDVCLLARMMAANLYIDQIEELMFELSMWRCNDELRVRAEELHSSSGSKVTKYYIEFWKQIPPNEPYRVILGHVRDKLYNTRERARHLLASGVSEISAESSFTSIEEFLEPLELCYKSLCDCGDKAIADGSLLDLLRQVFTFGLSLVKLDIRQQPLLPLVLGPSSR

SEQ ID NO: 27736 - protein, 541 aa, Oenococcus oeni
MTDPVSILNDPFINKGTAFTEGEREELGLNGLLPAKVQALQEQVDQTYAQFQSKVSNLEKRLFLMEIFNTNHVLFYKLFSQHVVEFMPIVYDPTIADTIENYSELFVEPQGAAFLDINHPENIQSTLKNAANGRDIKLLVVSDAEGILGIGDWGVQGVDIAVGKLMVYTVAAGIDPSTVLAVVIDAGTNNEKLLKDPMYLGNKFNRVRGDKYYDFIDKFVNHAESLFPDLYLHWDDFGRSNASNILNSYKDKIATFNDDIQGTGIVVLAGVLGALKISGQKLTDQTYMSFGAGTAGMGIVKQLHEEMVEQGLSDEEAKKHFFLVDKQGLLFDDDPDLTPEQKPFAAKRSDFKNANQLTNLQAAVEAVHPTILVGTSTHPNSFTEEIVKDMSGYTERPIIFPISNPTKLAEAKAEDVLKWSNGKALIGTGVPVDDIEYEGNAYQIGQANNALIYPGLGFGAIAAQSELLTPEMISAAAHSLGGIVDTTKVGAAVLPPVSKLADFSRTVAVAVAKKAVEQGLNRQPIDDVEKAVDDLKWDPKY

SEQ ID NO: 27737 - protein, 315 aa, Phaseolus lunatus
MSNFPVINFERLNGEERKDTMEKIKDACENWGFFELVNHGIPHDLLDTVERLTKEHYQKCMEERFKELMASKGLEAIQTEVKDMDWESTFHLRHLPESNISEVPDLVDEYRKVMKDFALRLEKLAEQLLDLLCENLGLEKGYLKKAFYGSRGPTFGTKVANYPPCPNPELVKGLRPHTDAGGIILLFQDDKVSGLQLLKDDQWVDVPPMRHSIVVNIGDQLEVITNGKYKSVEHRVIAQTDGTRMSIASFYNPGSDAVIYPAPELLEKEAEEKAQLYPKFVFEDYMKLYAKLKFQAKEPRFEAFKASNFDPIATA

SEQ ID NO: 27738 - protein, 175 aa, Chlamydomonas reinhardtii
MQSLASRPCVLRAQRPFTAKRSSVVRVRAEASSSSPVPIPVWPKDTESARDVFAFGGSAPERVNGRVAMMGFVSILGPELSKKQPVLEQVGDAWFGILLFSLTITFASILPKLVSGVSLKELHSVATSENLKGEGLQQALALFDTNVELWAGRLAMLGFAGLIALETIKGGEAFF

SEQ ID NO: 27739 - protein, 477 aa, Bacillus cereus ATCC 10987
MASIYKFYLNGEWRESSSGETIEILSPYLHEVIGQVQAITRGEVDEAIASAKEAQKSWAEASLQDRAKYLYKWADELVNMQDEIADIIMKEVGKGYKDAKKEVVRTADFIRYTIEEALHMHGESMMGDSFPGGTKSKLAIIQRAPLGVVLAIAPFNYPVNLSAAKLAPALIMGNAVIFKPATQGAISGIKMVEALHKAGLPKGLVNVATGRGSVIGDYLVEHEGIDMVSFTGGTNTGKHLAKKAAMITLVLELGGKDPGIVREDADLQDAANHIVSGAFSYSGQRCTAIKRVLVHENVADELVSLLQEQVAKLSVGSPEQDSTIVPLIDDKSADFVQGLVDDAVEKGATIVIGNKRERNLIYPTLIDHVTEDMTVAWEEPFGPILPIIRVSSDEQAIEIANKSEFGLQASVFTKDINKAFAIANKIETGSVQINGRTERGPDHFPFIGVKGSGMGAQGIRKSLESMTREKVTVVNFK

SEQ ID NO: 27740 - protein, 304 aa, Anaplasma phagocytophilum HZ
MGIYENNIIDGKAAAADLLGRLKVVMEGLKEEHGLFPSLVVIIVGDDPASRLYVGNKQRKAEELGINSKTIALPYETTQEELLGIIQELNEDENVHGILVQLPLPKHIDKILIINAIDPEKDVDGFHNANAGKLLTGEMDCMVPCTPQGCIYLIKKVMPVLSSKRAVVIGRSNIVGKPVALLLMYENCTVSILHSATANIEEHCRDAEIIIAAVGKARMVKSEWVSPGAVVIDVGINLITSESKNRFVGDVDFESVRDKVAAITPVPGGVGPMTIAFLLVNTVLGACRQKGIKQYKNIKSSVLQ

SEQ ID NO: 27741 - protein, 541 aa, Oenococcus oeni
MTDPVSILNDPFINKGTAFTEAEREELGLNGLLPAKVQALQEQVDQSYAQFQSKVSNLEKRLFLMEIFNTNHVLFYKLFSQHVVEFMPIVYDPTIADTIENYSELFVEPQGAAFLDINHPENIQSTLKNAANGRDIKLLVVSDGEGILGIGDWGVQGVDIAVGKLMVYTVAAGIDPSTVLAVVIDAGTNNEKLLKDPMYLGNKFNRVRGDKYYDFIDKFVNHAESLFPNLYLHWEDFGRSNASNILNSYKDKIATFNDDIQGTGIVVLAGVLGALKISGQKLTDQTYMSFGAGTAGMGIVKHLHEEMVEQGLSDEEAKKHFFLVDKQGLLFDDDPDLTPEQKPFAAKRSDFNNANQLTNLQAAVEAVHPTILVGTSTHPNSFTEEIVKDMSGYTERPIIFPISNPTKLAEAKAEDVLKWSNGKALIGTGVPVDDIEYEGNAYQIGQANNALIYPGLGFGAIAAQSKLLTPEMISAAAHSLGGIVDTTKVGAAVLPPVSKLADFSRTVAVAVAKKAVEQGLNRQPIDDVEKAVDDLKWEPKY

SEQ ID NO: 27742 - protein, 137 aa, Triticum aestivum
MESHAVPSEQPAYKPLPSTANEDAHEHQGGGVRWRACAAVLAASAVVLVAATTLGRGARVDEDAGGFPWSNEMLQWQRAAFHFQPEKNFMSDPNGLVYYRGWYHLFYQYNPKGIAWAFGILWGHAASRDLVHWRQLP

SEQ ID NO: 27743 - protein, 422 aa, Wolbachia endosymbiont strain TRS of Brugia malayi
MSRRVVVTGIGLITPLAADVENTWLKLINGKSGIKKISRFDASDLSCKVAGQVPLQHDNIEHCFNPLNYISEKDLKRTDRFIHYGIAAAIQAVDDSLILENQSINRERIGVAIGSGIGGLPSIQENVIIMQEKGPRRVSPFFVPASLINLISGHVSIKYEFTGPNDSAVTACATGAHAIINSARAIKLGEADVMIAGGSESALCRVGIAGFASMKALSTKFNDKPKEASRPWNEGRDGFVMGEGAGILVLEEYEHAKKRGAKIYAELTGYGLTGDAYHITAPHLEGRGALKAMQLALKSAQINPNQIGYINAHGTSTPLGDKIEVIAIKQLFDDYAYKIPISSTKSSIGHLLGAAGSVEAIFSILVLNNGIVPPTLNLHKPSEGCDLNFIPLKAQEHEIQYALSNSFGFGGTNASLVFGKCS

SEQ ID NO: 27744 - protein, 334 aa, Rhodobacter sphaeroides
MKKPFPFSAIVGQEQMKQAMVLTAIDPGIGGVLVFGDRGTGKSTAVRALAALLPLIKAVEGCPVNSARPEDCPEWAHVSSTTMIERPTPVVDLPLGVTEDRVVGALDIQRALTRGEKAFEPGLLARANRGYLYIDEVNLLEDHIVDLLLDVAQSGENVVEREGLSIRHPARFVLVGSGNPEEGELRPQLLDRFGLSVEVRSPRDVETRVEVITRRDAYDADHDAFMEKWGAEDMQLRGRILGARAALPQLKTPNTVLHDCAALCIALGSDGLRGELTLLRAARAQAAFEGAEAVGRSHLRSVATMALSHRLRRDPLDEAGSVSRVERCVAEVLP

SEQ ID NO: 27745 - protein, 115 aa, Zea mays
MARAAAIPLVLVALVATMLLVATDAAISCGQVSSALSPCISYARGNGANPTAACCSGVRSLAGAARSTADKQAACKCIKSAAGGLNAGKAAGIPSKCGVSVPYAISANVDCSKIR

SEQ ID NO: 27746 - protein, 354 aa, Phaseolus lunatus
MAVSAIGFEGYEKRLEICFSQPGIFADPEGRGLRVLTKSQLDEILTPAACTIVSSLSNEDVDSYVLSESSLFVYAYKIIIKTCGTTKLLLSIPPILKFADMLSLTVRSVTYTRGSFIFPGAQPHPHCSFTEEVAILNDYFGKLGSGSMAYIMGSPDKKQKWHIYSASADPLISSDTNVCTLEMCMTGLDREKAQIFYKEQSASAAIMTVNSGIRKILPKSDICDFDFEPCGYSMNSVEGDAVSTIHITPEDGFSYASFETVGYDFKVLNLNAMVDRVLSCFLPNEFSVAVRVDGASKPSEHMCFVDVKGYCREEWCHEELGMGGFVVYQKFVKISDCVSPRSTLKCWKDEVEEE

SEQ ID NO: 27747 - protein, 222 aa, Lycopersicon hirsutum
MNIFETYNSDSLISTESSSSSSSSSSSLFSEEEIILASNNPKRPAGRKKFRETRHPIYRGIRKRNSGKWVCEVREPNKKTRIWLGTFPTAEMAARAHDVAALALRGRSACLNFSDSAWRLPIPASSNSKDIQKAAAEAAEIFRPLKESEEVSGESDNSTSPETSENVQESSDFVDEEAIFFMPGLLANMAEGLMLPPPQCAEMGDHYVETDAYMITLWNYSI

SEQ ID NO: 27748 - protein, 512 aa, Nicotiana attenuata
MDGSTVQGGSSVESFLRNYKLGKTLGIGSFGKVKIAEHTLTGHKVAVKILNRRKIKNMDMEEKVRREIKILRLFMHPHIIRLYEVVETPSDIYVVMEYVKSGELFDYIVEKGRLQEDEARKFFQQIISGVEYCHRNMVVHRDLKPENLLLDSKWNVKIADFGLSNIMRDGHFLKTSCGSPNYAAPEVISGKLYAGPEVDVWSCGVILYALLCGTLPFDDENIPNLFKKIKGGMYTLPSHLSAGARDLIPRMLIVDPMKRMTIPEIRMHPWFQAHLPRYLAVPPPDTMQQAKKIDEDILQEVVKRGFDRNSLVASLCNRVQNEGTVAYYLLLDNRFRASSGYMGAEFQETMEYGYHQINSSEAVASPVGQHLPGIMDFQQVGARQFPVERKWALGLQSRAHPREIMTEVLKALQGLNVRWKKIGPYNMKCQWVPGVPGHHEGMSNNSIHNPFFGDDSTIIENGGVTIPNAVKFEVQLYKTREEKYLLDLQRVQGPQFLFLDLCAAFLAQLRVL

SEQ ID NO: 27749 - protein, 297 aa, Actinobacillus actinomycetemcomitans
NRDHYRIFNDDMQGTGAIVMAAVFSGLKVTKQNFAEQRLVVYGAGTAGTGMADQISAAMQRDGLSREEAKKRVWLIDINGLVTDDMPNLPDYQQEYARPAAEAAAWAKTDGKIGLLEVVKQVKPTILIGTSTDHGAFTEDVVKALCAGVERPILLPLSNPTERIEVMPTDAVQWSDGKALISVGIPVPPVPYKGVNYQIGQANNAMLYPGLGLGVIVSGAKQVTDGMLLAAAEAVASQVNPQDEGASLLPPVDNLRASSATVAVAVAKQAVKDGVAANTSDNWVQAVQDAMWQPEYR

SEQ ID NO: 27750 - protein, 330 aa, Rubrivivax gelatinosus PM1
MVSPTDKRVDIPIENGFVGMVDRDAFDEWLRARAAGSGAQRQIGSFERLTRDDDGVSVVHYQARERPGDAASAPRSVRARCVIGADGARSAVARQAIAGAERNPCVFAYHEIVRAPLAKPVGYDGSRCDVYYRGSLSPDFYGWVFPHGDTLSIGTGSADKGFSLRAAVGRLRSDSGLQGAQTLRREGAPIPMKPLRRWDNGRDVLLAGDAAGVVAPASGECIYYAMASGRLAAEAVESALQTGDGRCLRQARRRFMKAHGTVFRVLGVMQWFWYSSDRRRERFVTICEDRDVQQLTFESYMNKELVRKKPMAHVRIFFKDMGHLLGLVRA

SEQ ID NO: 27751 - protein, 962 aa, marine gamma proteobacterium HTCC2207
MENIKMLQKTRSLTDLENAAEFIARHIGPSADDQQKMLSSLGCSSLQELTSQVVPEAIAMTQALDIVDGCSEAQALAELREIAAHNKVFRSFIGQGYYNTITPNVVQRNILENPAWYTAYTPYQPEISQGRLEALINFQTMITDLTGMEMSNASMLDEGTAAAEAMSLCQRMSKSKSLRFFVDSDCLPQTIDVIKTRAEPVGIEVIVGNPDQLPEDLFGALFQYPGASGEVRNFRDVIQQVQQQGALVVMAADILSLVLLESPGSLGADVVIGSTQRFGVPLGFGGPHAAYMSTREAYKRNLPGRLVGLSQDANGEPAYRLALQTREQHIRREKATSNICTAQVLLAVIAGMYAVYHGPEGLQRIARRVNLMTSVLAQGLALHGIKPINNHWFDTLTLDTGARTEEILQVAAAHEVNLRRIDENTLGVSLDETVTRSDINLLWTILIGEHQIDIDDLADQAVDSLPGELMRTESFLTHPTFNRYHSETEMLRYLRKLSDKDIALDRAMIPLGSCTMKLNATAEMLPITWPEFSTMHPFAPTDQTQGYRLMIDQLEDMLCASTGYDAMSLQPNAGSQGEYAGLLAIRGYHESRGDTDRDICLIPSSAHGTNPASAQMCGMKVVVVKCDDQGNVDVDDLIAKAELHSAKLSAIMVTYPSTHGVFEERIGEICEIVHDHGGQVYIDGANLNAMVGVCQPGKFGGDVSHLNLHKTFCIPHGGGGPGVGPIGVGAHLAPFMPRETADGERQGAKVSAAPYGSASILPITWMYIRMMGRSGLKQATEMAILNANYIATRLQDDYEILYTGAQGRIAHECILDVRSIKDDVGISVDDIAKRLIDFGFHAPTMSFPVAGTLMIEPTESESKAEIDRFCDAMIAIKHEINQVAAGQLDLADNPLVHAPHTAEVVGADEWTRSYSRSQAAYPLRSLRENKYWPPVGRLDHVFGDRNLICSCPSISDYETDEV

SEQ ID NO: 27752 - protein, 361 aa, Blastopirellula marina DSM 3645
MNKKLLLLPGDGIGPEIITEVRKLISWINDHTDLTIETEEDYFGGAAIDAYGVPLRDETLAAARKSDAILMGAVGGPKWDNVAYDIRPEAGLLKIRKQLDLFANLRPAIVFDALIDASSLKPEIVKGLDILIVRELTGGVYFGEPRGIEDLGDGERRGVNTQVYTTSEIRRVGKVAFEIARKRQGKVTSCEKANVMESGKLWREEITRLHAESYSDVTLEHMYADNAAMQLCRRPSQFDVIVTDNLFGDILSDEAAMLTGSLGMLPSAALGAPDSPGLYEPVHGSAPDIAGQGIANPLATILSFAMLLKYSFNSVALGEQIEAAVQAVLAQGLRTADIMTEGCQKVTTVEMGDAVIKELAA

SEQ ID NO: 27753 - protein, 545 aa, Shewanella sp. ANA-3
MTILTQSTTWQALAAHSQQIPHMRELFASDPARFSNMSLSTCGLFLDYSKNRATPETLNLLLTLAQEAKLDAKIKAMFAGDIINTTEKRAVLHTALRSTAEQTIIAEGQDIVPEVQQTLNKMQQFVTSVTSGQWKGFTGKTITDIVSIGIGGSFLGPKIVSQALRPYWMTGLNCHFVANVDGTSISEKLKLLDPETTLFIMSSKSFGTQETLTNTLTAKAWFLAKGGSQSDVAKHFVAVTSNVAKATDFGIDADNIFPMWDWVGGRYSLWSAIGLPIALLIGMDNFRSLLKGAHQMDTHFANAPLAENMPVIMGLFSLWYGNFFNAQSHVVLTYDHYLRGLPAYFQQLDMESNGKSVTLNGTHVDYSTGPVIWGGEGTNGQHAYHQLLHQGTALIPADFIMPLQSHNPIGEHHDQLASNCFGQTQALMQGRTLDEALAELSKSNLSDEEKLLIAKHKVMPGNKPSNTLLMDKLTPETLGALIALYEHRTFVQGAIWDINSFDQWGVELGKSLGNDVLARIGAEQDATALDASSNGLINLYRQGKI

SEQ ID NO: 27754 - protein, 305 aa, Xylella fastidiosa 9a5c
MPLLRIATRKSLLAMWQSEYVAARLRMLRPDLDVVLVPMSTRGDEILDRSLAAIGGKGLFLKELELAMLRGDADCAVHSLKDVPMDLEPPFMLAAVLSRDDPADALISNVYLSLESLPIGARVATSSLRRQAQLRFYRPDLRLFDLRGNVNTRLAKLDNGDYDAIVLACAGLRRLGLEQRMTARLAPPEWLPAPGQGAIAVESLTEDARIGTLLAGLDDLPTRQCVVAERTMNRALHGSCHVPVGAYASYEVGGMRLQGLVGCVADGRLVRAELCSAKDEGDMLGRAVAQCLLDAGAAELLAATA

SEQ ID NO: 27755 - protein, 323 aa, Salinibacter ruber DSM 13855
MSISDPLVLGTRGSELALRQANVVRSRLEAAGHRVELETITTRGDEATDTPISEIGDEAVFTKELDRALLQGGVDLAVHSLKDIPSTVPSGLALAAIGEREDPRDAFVAHPSFDGHLHDLPEGATVATASLRRTAQLLTWRSDLEVVPVRGNVDTRLEKLGESDWTGMVLAVAGLVRLGLSLHIRDRIDPSLIVPAVGQGALGIACREDQDALRDLLRETLHHAPSGHAANAERAFLKKVGGGCQVPLGAWAHIDDGTLVLDACIAALDGSEHYRDERRCAPEDGAAVGRKLAADLLAMGGDHILDDVLGESREGTSNSPFRP

SEQ ID NO: 27756 - protein, 176 aa, Pseudomonas aeruginosa PAO1
MSFNTEVQPGICMEPDAITQEYVFNHTMLRVKDPKRSLDFYSRVLGMRLLRRLDFEEGRFSLYFLAMTRGEEVPDAVDERQRYTFGRQSVLELTHNWGSESDDSQYHNGNQDPRGFGHICFSVPDLVAACERFETLGVNFVKPLDRGMKNVAFISDPDGYWVEIVQASLNGEMGRG

SEQ ID NO: 27757 - protein, 181 aa, Arabidopsis thaliana
  misc_feature (39)..(39): Xaa can be any naturally occurring amino acid
MASSMFSSTAVVTSPAQATMVAPFTGLKSSASFPVTRQXNNDITSITSNGGRVSCMKVWPPIGKKKFETLSYLPDLSDVELAKEVDYLLRNKWIPCVEFELEHGFVYREHGNTPGYYDGRYWTMWKLPLFGCTDSAQVLKEVEECKKEYPGAFIRIIGFDNTRQVQCISFIAYKPPSFTEA

SEQ ID NO: 27758 - protein, 281 aa, Mycobacterium bovis AF2122/97
MGAIMLDGKATRDEIFGDLKPRVAALDAAGRTPGLGTILVGDDPGSQAYVRGKHADCAKVGITSIRRDLPADISTATLNETIDELNANPDCTGYIVQLPLPKHLDENAALERVDPAKDADGLHPTNLGRLVLGTPAPLPCTPRGIVHLLRRYDISIAGAHVVVIGRGVTVGRPLGLLLTRRSENATVTLCHTGTRDLPALTRQADIVVAAVGVAHLLTADMVRPGAAVIDVGVSRTDDGLVGDVHPDVWELAGHVSPNPGGVGPLTRAFLLTNVVELAERR

SEQ ID NO: 27759 - protein, 250 aa, Arabidopsis thaliana
MSSEEDKITRISIEPEKQTLLDHHTEKHFTAGEIVRDIIIGVSDGLTVPFALAAGLSGANASSSIVLTAGIAEVAAGAISMGLGGYLAAKSEEDHYAREMKREQEEIVAVPETEAAEVAEILAQYGIEPHEYSPVVNALRKNPQAWLDFMMRFELGLEKPDPKRALQSAFTIAIAYVLGGFIPLLPYMLIPHAMDAVVASVVITLFALFIFGYAKGHFTGSKPLRSAFETAFIGAIASAAAFCLAKVVQH

SEQ ID NO: 27760 - protein, 234 aa, Rubrivivax gelatinosus PM1
MSAIRIAPSLLSADFARLGDEVRSVIEAGADLIHFDVMDNHYVPNLTIGPLVCQAIKPHATVPIDVHLMVKPVDALIPMFAQAGADIISFHPEASEHVDRTIQLIRSHGIKAGLVLNPATPLNVLDHVLDQLDLVLLMSVNPGFGGQSFIEGTLPKIEAVRRLIDRSGRDVWLEVDGGVKVDNAQRVGAAGADTLVAGSAVFNSASYAHAIAGIRDNARLGQRASNRMAGDGAT

SEQ ID NO: 27761 - protein, 512 aa, Bacillus subtilis
MTETTAHLAGGRAEETAPTMRPILHYTAKNTWLNDPNGLVWHQGVYHLFYQNNPFDNVWGNMSWGHATSTDLLHWTEHPVAIACNEEEDVFSGSIVVDHGNTSGFGTAEDPALVAIYTSAFKEGSVHQGTQAQSLAFSTDAGMTWSKYAGNPVLGRGSAHFRDPKVFRYEGPAGSRWIMVAVEAQHQQVVLYRSADLKDWEYLSTFGPANASDGEWECPDLFPLPVDGDPDNVKWVLVVNINPGAVAGGSGGQYFVGDFDGVQFTADPDSLVPTDADGNVDLRHCLWLDWGRDYYAAVSFSNAPENRRIMIGWMNNWDYANSLPTSPWRSSMSLAREIELATVDGFPRLVQRPVLPLDSGEPARTIQNMELHNSLLQLPDATPGSAQLIEAEILPGTARHIAFRLLGAPDGSAATVLSFDALTSRLTLDRRNSGNTAFHDKFSSAESAPVKLDGGALRLKVIIDQCSVEVFAQDGRVVLSDLVFPRSGNLGTDVYVEGGTATVRKLAVTSLS

SEQ ID NO: 27762 - protein, 504 aa, Triticum aestivum
  misc_feature (181)..(181): Xaa can be any naturally occurring amino acid
MSFRDESGGEDGSGGRSSSASDLRKPFLHTGSWYRMSAAGGGAMDRLGSSAYGLRDSSISALLCTLIVALGPIQFGFTCGYSSPTQDAIMADLGLTLSEFSLFGSLSNVGAMVGAIASGQIADYLGRKGSLMIAAIPNIIGWLAISFANDSSFLFMGRLLEGFGVGVISYTVPVYIAARVXEIAPQNMRGALGSVNQLSVTIGILLAYTLGMFVPWRILSVLGILPCSILIPGLFFIPESPRWLAKMGKMEDFESSLQVLRGFETDISAEVNEIKRSVASSRRRTTIRFAEIKHKRYSVPLMIGIGLLILQQLSGVNGIFFYAASIFKAAGLKNSNLATCGLGAVQVVATGITTWLTDKAGRRLLLIISATGMTISLLVVSVSFFVKDNIDEASHLHFVMSMLSLAGLVAFVLAFSLGMGAIPWIIMSEILPVNIKSLAGSTATLANWMTSWLITMTASLMLNWSNGGTFAIYAAVSMGTLLFVCLCVPETKGRTLEEIAFSFR

SEQ ID NO: 27763 - protein, 352 aa, Oryza sativa
MGEAVKGPVVVTGASGFVGSWLVMKLLQAGYTVRATERLTLWKADLGEEGSFDAAIRGCTGVFHVATPMDFESEDPENEVVKPTVEGMLSIMRACRDAGTVKRIVFTSSAGTVNIEERQRPSYDHDDWSDIDFCRRVKMTGWMYFVSKSLAEKAAMEYAREHGLDLISVIPTLVVGPFISNGMPPSHVTALALLTGNEAHYSILKQVQFVHLDDLCDAEIFLFESPEARGRYVCSSHDATIHGLATMLADMFPEYDVPRSFPGIDADHLQPVHFSSWKLLAHGFRFRYTLEDMFEAAVRTCREKGLLPPLPPPPTTAVAGGDGSAGVAGEKEPILGRGTGTAVGAETEALVK

SEQ ID NO: 27764 - protein, 302 aa, Wolbachia pipientis
  misc_feature (261)..(262): Xaa can be any naturally occurring amino acid
CDKKIQLGINLTKGLGAGALPDVGKGAAEESIDEIMEHIKDSHMLFITAGMGGGTGTGAAPVIAKAAREARAAVKDRAPKEKKILTVGVVTKPFGFEGVRRMRIAELGLEELQKYVDTLIVIPNQNLFRIANDKTTFSDAFKLADNVLHIGIRGVTDLMVMPGLINLDFADIETVMSEMGKAMIGTGEATGEDRAISAAEAAISNPLLDNVSMKGAQGILINITGGGHMTLFEVDAAANRVREEVDENANIIFGATFDQAXXGRVRVSVLATGIDSNVNRDDNSSSNQSESSEQEKLKWAYS

SEQ ID NO: 27765 - protein, 138 aa, Brassica napus
MASLLDSVTVTRVFSLPITSSISPASKVPSISARRISPVTEFRGLIAPRKSAVTQSASLGTNLGSRFARGGRIVCEAQDTTAAAVEVPNISDSEWQTQVLESDVPVLVEFWAPWCGPCRMIHPIVDQLAKDFAGKFKF

SEQ ID NO: 27766 - protein, 216 aa, Lactococcus lactis subsp. lactis Il1403
MKNKIAPSILSADFGNFARDVKRLESAGADLVHIDVMDGHFVDNLTFGAGVVSALRVQTHLFFDVHMMVENPEKYVEDFAKAGADSMSIHVEATHHIHGALQKIKNAGMKASVVINPGTPVEAIKTVLPLVDMVLVMTVNPGFGGQKFIPEMMDKVRELAQIRTDKKLDFEIEVDGGIDDQTIKVAKAAGANVFVAGSFIFNGEVEKNIEKLRVNL

SEQ ID NO: 27767 - protein, 847 aa, Brassica oleracea var. acephala
MLCGDMRGVLFSVLLLFPAFSFSANTLSATESLTISSNKTISSPGNIFELGFFKPSSSSRWYLGIWYKAISKRTYVWVANRDHPLSTSTGTLKISDSNLVVVDGSDTAVWSTNLTGGGDVRSPVVAELLDNGNFVLRDSNNNDPDIVLWQSFDFPTDTLLPEMKLGWDLKTGFNWFLRSWKSPDDPSSGDYSFKLKTRGFPEAFLWNKASQVYRSGPWNGIRFSGVPEMQPFDYIEFNFTTSNQEVTYSFHITKDNMYSRLSLSSTGSLQRFTWIEAIQNWNQFWYAPKDQCDDYKECGTYGYCDSNTYPVCNCMRGFEPRNPQAWGLRDGSDGCVRKTALSCNGGDGFVRLKKMKLPDTAATSVDRGIGIKECEEKCKSDCNCTAFANTDIRGGGSGCVVWTGDILDTRNYAKGGQDLYVRLAATDLEDTTNRNAKIIGSCIGVSVLLLLCFIFYRFWKRKQKRSIAIETSFVDQVRSQDLLMNEVVIPPNRRHISRENKTDDLELPLMDFEAVAIATDNFSNANKLGQGGFGIVYKGRLLDGQEIAVKRLSKMSVQGTDEFKNEVKLIARLQHINLVRLLGCCVDEGEKMLIYEYLENLSLDSHLFDKTRSCKLNWQKRFDITNGIARGLLYLHQDSRFRIIHRDLKASNVLLDKDMTPKISDFGMARIFGRDETEANTRKVVGTYGYMSPEYAMDGIFSTKSDVFSFGVLLLEIISGKRNKGFYNSDHDLNLLGCVWRNWKKGKGLDIVDPIILDSSPSTYRPLEILRCIKIGLLCVQERANDRPTMSSVVMMLGSETAAIPQPEQPGYCVGRSPLDTDSSSSNQRHDESWSVNQMTVSVIDPR

SEQ ID NO: 27768 - protein, 332 aa, Arabidopsis thaliana
MATSTTMSHQAIGSVVSQRPFKASQFLKEPLNNVPMKFRQKRFKIEATASQISVVDNTFLSPSPSKNKPHESKKKSNEAALILIRHGESLWNEKNLFTGCVDVPLTQKGVGEAIEAGKKISNIPVDLIFTSSLIRAQMTAMLAMTQHRRKKVPIILHNESVKAKTWSHVFSEETRKQSIPVIAAWQLNERMYGELQGLNKKETAERYGTQQVHEWRRSYEIPPPKGESLEMCAERAVAYFEDNIKPELASGNNVMIAAHGNSLRSIIMYLDDLTSQEVTTLDLSTGVPLLYIFKEGKFMKRGSPVGSTEAGVYAYTKRLAQYREKLDAAATI

SEQ ID NO: 27769 - protein, 150 aa, uncultured archaeon GZfos35D7
MARIKYSCESDPRTSSRAMGYELHISPKHSREICSTIKKMETPKAKQFLESVIALKQAVPFKRYNGNVGHRRGRMAAGRYPVRAATEILKVLANAAQGAEDKGLEPDRMRLTHTATKMGRTIRGTMPRAMGRATAKNTETVSVEIILEEI

SEQ ID NO: 27770 - protein, 267 aa, Bordetella bronchiseptica RB50
MSTDTHPPGRLAIDDADGLLRVRIVNPARYNAMSLSMWEALGQAVRDAQGRDDLRAIVLEGEGERAFVSGADISEFASQRKDPAQIARYDRAVTQAQQALSESAVPTIALVRGICMGGGMGLALACDLRYCNESARFRMPAARLGLGYALDGVKRMCDMLGAARAADLFLTARTFDGAEAGRIGLAHEVFADADFTQAAAERVAAVAGNAPLTLRAARLALRHLLGGAHAPSADSVDQAVRTCFDSEDYQEGQAAFREKRPPVFKGR

SEQ ID NO: 27771 - protein, 117 aa, Prosopis juliflora
MAGLMKVAFMAVLCVALVVAPMAEAVTCGQVSSSLAPCIAYLQKGGTPAPGCCNGVKSLVGAAQTTADKQAVCNCLKGAAGQVPGLNNQYAQSLPSLCGVNIPYKISTSTNCASIKF

SEQ ID NO: 27772 - protein, 377 aa, Mimosa pudica
MADAEDIQPLVCDNGTGMVKAGFAGDDAPRAVFPSIVGRPRHTGVMVGMGQKDAYVGDEAQSKRGILTLKYPIEHGIVSNWDDMEKIWHHTFYNELRVAPEEHPVLLTEAPLNPKANREKMTQIMFETFNVPAMYVAIQAVLSLYASGRTTGIVLDSGDGVSHTVPIYEGYALPHAILRLDLAGRDLTDSLMKILTERGYMFTTSAEREIVRDMKEKLAYVALDYEQELETAKTSSSVEKNYELPDGQVITIGAERFRCPEVLFQPSMIGMEAAGIHETTYNSIMKCDVDIRKDLYGNIVLSGGSTMFPGIADRMSKEITALAPSSMKIKVVAPPERKYSVWIGGSILASLSTFQQMWISKGEYDESGPSIVHRKCF

SEQ ID NO: 27773 - protein, 440 aa, Arabidopsis thaliana
MEIDSEKIHERKQSDYNSLDERFEIQKEMYRGQQYSQIYFARLHLMRTLLYSLAPTWKSHLPVCKVLGLEKGKECIIVGTLFKHMKLKPCVLDEYSKERSVTPLVKPHNFMHPDDNLILEDESGRVKLAGSALSPAIYVTGVVVALHGKETNAGEFFVEDVLEAGLPPQIERPIDLQEDKYVVLLSGLCIGSKSANPLQFQLLVDHITGHLGDEEEQGLAAQIVHVVIAGNSFEFPRKLINGQNLASKDQSTLYEPIKELDIMLSQIAAGVSVDIMPGTNDPANFALPQQPLNRCLFPGSSPYNTFRSCTNPHSFDVDNIRFLGTSGQNIDDLGKYSEAKSKLDFVERTLRWRHLAPTAPNTLGCYPFTDRDPFLIETCPHVYFVGNQDKYDNRLIKGSEGQLVRLICIPKFCETGIAVAVNLRNLECHTLSFSTQINQS

SEQ ID NO: 27774 - protein, 310 aa, Francisella tularensis subsp. holarctica
MNIQNGWIYDANLLETGGMCFSLRADSFKSYHSHDNSDIHKTKRLQYHFTAKKAWMNDPNGLVYFKGKYHMFYQHYPYGKHTAMLHWGHAVSTDLVNWQHLPIAIYPQNDLNDRYIGGAFSGSAMVVDDELFLIYTEHFEDLDNTPNIFIEKQNLIKSKDGIHFSKPKIVINHKPDFCSYDFRDPKVWFDKIFNCYYMVIGTYANNYPSVALYRSDNAESWNYHSILFQEKTISGRTLECPDLFYLDGKYVLVLSIFETKNKKDFNYQSYYYIGNFDGKHFSAETPPTLQKSFMHHRLLKLMVIDALSVG

SEQ ID NO: 27775 - protein, 446 aa, Corynebacterium diphtheriae
MARSVVVWFRDDLRVHDNPALMKAWELVRANPADLHAVYIANEVGVRPLGGAVKWWLHHSLLALSEQLAQRGVRLHVLSGDPLTLLPQLVTSCGATAVTMNRRYDPAARSIDDAFVADASAHDVEVYDFPCHLLAEPGEITTTTGGSYKVFTPFSRNLRDAIGDLPLDTLAAPPKAEQPIDDTETQAAIADLGWDAWWAASISKAWTPGEPAAREALAELDDILPRYLDDRDRPDIDGTSRLSPRLRFGELSVAEVWNHAHTSEGFRRQLMWRDFAWHRLDAHPDMATANIRPEFDHFPWDGGDFEAELNAWRHGRTGIALVDAGMRELWATGTMHNRVRMVAASLLVKNLGIHWRHGEQWFWDTLVDADPASNPFNWQWVAGSGDDAAPYFRIFNPDTQARRFDPDGTYRTRWLPIMSADYPEEAIVDLKESRLRALDAYNACKR

SEQ ID NO: 27776 - protein, 508 aa, Zea mays
MGAMMASITSELLFFLPFILLALLALYTTTVAKCHGTHQWRRQKKKRPNLPPGARGWPLVGETFGYLRAHPATSVGRFMERHVARYGKIYRSSLFGERTVVSADAGLNRYILQNEGRLFECSYPRSIGGILGKWSMLVLVGDAHREMRAISLNFLSSVRLRAVLLPEVERHTLLVLRSWPPSDGTFSAQHEAKKFTFNLMAKNIMSMDPGEEETERLRLEYITFMKGVVSAPLNFPGTAYWKALKSRASILGVIERKMEDRLEKMSREKSSVEEDDLLGWALKQSNLSKEQILDLLLSLLFAGHETSSMALALAIFFLEGCPKAVQELREEHLLIARRQRLRGASKLSWEDYKEMVFTQCVINETLRLGNVVRFLHRKVIRDVHYNGYDIPRGWKILPVLAAVHLDSSLYEDPSRFNPWRWKLQSNNAPSSFMPYGGGPRLCAGSELAKLEMAIFLHHLVLNFRWELAEPDQAFVYPFVDFPKGLPIRVQRVADDQGHRSVLTESTRG

SEQ ID NO: 27777 - protein, 523 aa, Bordetella bronchiseptica RB50
MPENAQPHAVIPAADLQLSAQNPQWRVFAAAAAGASLVARPLRVIEAAGIYVDLSMQRHSSALAQAGLALLQARDVLGARAALFAPGAPDAAHGRYPVLRAGYGAHPEEQCDIEVEIEYARMLEFVRELDRGGACPAVLYLGGGAGQWALRLALQAFGGPAQRRQLRFVSGGDAAALHEALAGLDPRRTLVVAASRGFEPSETLDNARAAIDWLRRAGIDDVSAHLVAVTGNESAARALGVAAARVFRLPSWLQPRHELWSVGALPVALALGVDMLKALRSGAAAMDQHFLQAAPTVNAPMQMALAAVANTSAMHWPTHALAVYSARLAALPACVQQLEMTLAGRAPASLPAYPVVWSPAGAPGPGAFFEWLHRAPAGAPVDFIAGLDEYPASPPAHRALLANCLAQREALLRGLPAGPGQPAAGGGRPSTLVVLRQVDPRAVGALLALYEHKAFVQAALWGAALGGADQAQACQRLAQDIARQLAVPPAAGPVDWGHDSSTAFWIDRYREQGGAGAAAGRTA

SEQ ID NO: 27778 - protein, 291 aa, Zea mays
MATGSDAGKSAEAVLEWPKQDKKRMLHAVYRVGDLDRTIKCYTECFGMKLLRKRDVPEEKYTNAFLGYGPEDTNFALELTYNYGVDKYDIGAGFGHFAIANEDVYKLSETIKSSDCCKITREPGPVKGGSTVIAFAQDPDGYMFELIQRGPTPEPLCQVMLRVGDLDRAIMFYEKALGMKLLRKKDVPQYKYTIAMMGYAEEDKTTVLELTYNYGVTEYNKGNAYAQVAIGTDDVYKSAEAVELVTKELGGKILRQPGPLPGLNTKITSFLDPDGWKVVLVDHADFLKELH

SEQ ID NO: 27779 - protein, 541 aa, Oenococcus oeni
MTDPVSILNDPFINKGTAFTEAEREELGLNGLLPAKVQALQEQVDQTYAQFQSKVSNLEKRLFLMEIFNTNHVLFYKLFSQHVVEFMPIVYDPTIADTIENYSELFVEPQGAAFLDINHPENIQSTLKNAANGRDIKLLVVSDAEGILGIGDWGVQGVDIAVGKLMVYTVAAGIDPSTVLAVVIDAGTNNEKLLKDPMYLGNKFNRVRGDKYYDFIDKFVNHAESLFPNLYLHWEDFGRSNASNILNSYKDKIATFNDDIQGTGIVVLAGVLGALKISGQKLTDQTYMSFGAGTAGMGIVKQLHEEMVEQGLSDEEAKKHFFLVDNQGLLFDDDPDLTPEQKPFAAKRSDFKNANQLTDLQAAVEAVHPTILVGISTHPNSFTEEIVKDMSGYTERPIIFPISNPTKLAEAKAEDVLKWSNGKALIGTGVPVDDIEYEGNAYQIGQANNALIYPGLGFGAIAAQSKLLTPEMISAAAHSLGGIVDTTKVGAAVLPPVSKLADFSRTVAVAVAKKAVEQGLNRQPIDDVEKAVDDLKWEPKY

SEQ ID NO: 27780 - protein, 252 aa, Corynebacterium diphtheriae
MTQKNFPPLPGTLSSTGQAIDPVAVSGLNSKLNWLRAGILGANDGIVSISALLLGVIATNASTSTVLLSGVAATIAGAVSMALGEFVSVSAQRDNEHKVMEQEYNELLHAPGEERAEIAGILENYGMSTATAYRAAIEIGRNDPFRAHLQIEYGIDPHDLTSPLHAAVSSAASFLLGALLPLLTVFLIPDLSRVAGAIAVTAVTLLALAITGYVSAHIGGTSPVKSVLRLTIGGILGLALTFGAGYAFGAVA

SEQ ID NO: 27781 - protein, 234 aa, Glycine max
  misc_feature (225)..(225): Xaa can be any naturally occurring amino acid
  misc_feature (228)..(228): Xaa can be any naturally occurring amino acid
MTVTASLHRLSRLRFIAKPQPFLSPHSTPSHFSLTPKTKKPNRFRFRFRSMAAEPKESPSNNPGLHTTPDEATKGYIMQQTMFRIKDPKVSLDFYSRVLGMSLLKRLDFPEMKFSLYFMGYEDTTEAPSNPIDKVVWTFSQKATIELTHNWGTESDPEFKGYHNGNSEPRGFGHIGITVDDTYKACERFQNLGVEFVKKPDDGKMKGIAFIKDPDGYWIEIFDRXTIXNGTQAP

SEQ ID NO: 27782 - protein, 483 aa, Burkholderia xenovorans LB400
MNAVLRDHPAFRAEALRLKGERVTRPRTLDVFDPYTGTRVGTVPLASVDDVRAAFEYAAAYQAQLTRYERSQILERAASIMRERTEEASDLISLESGLSKQDSRYEIGRVADVLKFASIEALRDDGQSFSCDLTPHGKKRRVFSQREPLAGVIVAITPFNHPMNQVAHKIAPAIATNNRVLLKPSEKVPLSALYLADVLYEAGLPAPMLQVLTGDPREIADELITHPLAELVTFTGGVAIGKYIAARAAYRRVVLELGGNDPLIVLDDADLERAATLAVQGSYKNSGQRCTAVKRMLVQKSVAADFTDLVVEKTRAWTFGDPFDASSQMGTVIDVAAAQLFEARVNEAVASGARLLTGNQRNGALYAPTVLDGVDPSMTLVREETFGPVSPIITFDTLDDAIRISNGTAFGLSSGVCTNRQDAITRFINELRVGTVNVWEVPGYRIELTPFGGIKDSGLGYKEGVQEAMKSFTNLKTFSLPWE

SEQ ID NO: 27783 - protein, 172 aa, Pisum sativum
MALESLFKSIHTKTSLSSSIVFIFKGKACFLTSKSRIQESFAELNSFTSLVLLIENHVLLHAREAVNEVQVVNDSSWDELVIGSETPVLVDFWAPWCGPCRMIAPIIDELAKEYAGKIKCYKLNTDESPNTATKYGIRSIPTVLFFKNGERKDSVIGAVPKATLSEKVEKYI

SEQ ID NO: 27784 - protein, 541 aa, Oenococcus oeni
MTDPVSILNDPFINKGTAFTEAEREELGLNGLLPAKVQALQEQVDQTYAQFQSKVSNLEKRLFLMEIFNTNHVLFYKLFSQHVVEFMPIVYDPTIADTIENYSELFVEPQGAAFLDINHPENIQSTLKNAANGRDIKLLVVSDGEGILGIGDWGVQGVDIAVGKLMVYTVAAGIDPSTVLAVVIDAGTNNEKLLKDPMYLGNKFNRVRGDKYYDFIDKFVNHAESLFPNLYLHWEDFGRSNASNILNSYKDKIATFNDDIQGTGIVVLAGVLGALKISDQKLTDQTYMSFGAGTAGMGIVKQLHEEMVEQGLSDEEAKKHFFLVDKQGLLFDDDPDLTPEQKPFAAKRSDFNNANQLTNLQAAVEAVHPTILVGTSTHPNSFTEEIVKDMSGYTERPIIFPISNPTKLAEAKAEDVLKWSNGKALIGTGVPVDDIEYEGNAYQIGQANNALIYPGLGFGAIAAQSKLLTPEMISAAAHSLGGIVDTTKVGAAVLPPVSKLADFSRTVAVAVAKKAVEQGLNRQPIDDVEKAVDDLKWEPKY

SEQ ID NO: 27785 - protein, 388 aa, Mycobacterium avium subsp. paratuberculosis K-10
MSDERVKPFLVPDLGEGLEEVTVTHWNVAVGDDVELNQVLCTVETAKAEVELPSPYAGRIVEMNGAEGDVLKVGAVLVRLDTAPESGEPPAAETAPTLVGYGADAGIDTSRRTGRPLAAPPVRKLAKELMVDLGSLRPRSGAVITREDVLSAAHGTGNGAEVRPVQGVQARMADKMTLSHKEIPAATVSVQVDCTALVRLSERLGPAEQRITPFVLTLRLLVIALRRNEIMNSTWVDTPQGPQVRIEHRVHLGVAVATERGLLVPVIADAHTKTTRELASRAAELISGARAGSLTPGELRGSTFTVSNFGALGVDDGVPVINHPEAAILGMGAIKPRPVAIGTEVVVRPTMSLSAVFDHRIADGAQAARFVCELRDLIESPETALLDL

SEQ ID NO: 27786 - protein, 351 aa, Mycobacterium avium subsp. paratuberculosis K-10
MTQLADRPTGHGETLTAAVQDVALHAQALTMVQALNRALHDAMAADERVLVFGEDVAVQGGVFRVTEGLAEAFGESRCFDTPLAESAIIGIAVGLALRGFVPVPEIQFDGFSYPAFDQVVSHLAKYRTRTRGAIDMPVTVRVPSFGGIGAAEHHSESTESYWAHTAGLKVVVPSNPADAYWLLRHAIACPDPVMYLEPKRRYQGRGLVDAGRPEPPIGRAMVRRAGTDVTVVTYGSLVGTAVGAAEEAQRQRGWSLEVIDLRSLVPLDFDTIATSIHRTGRCVVMHEGPRTLGYGAELAARIQEELFYELEAPVLRACGFDTPYPPARLEKWWLPGPDRLLDCVERTLELP

SEQ ID NO: 27787 - protein, 578 aa, Oenococcus oeni PSU-1
MTSKKGSDLLVSVLTDWGIKEVYGLPGDSVDTTVDALRRQKDKIKFIQVRHEEVASLAASASAKYTGKIGVCLSIGGPGAIHLLNGLYDAKMDHVPVLALLGQVTSQSLNEGYFQEVNTPKLFDDVAVFNRTISSVDNLAEIVDQAIRSAYENKGVAVLTIPDDIPDQELKTIYHSSAKAFSLAKPSINEEQINKASELIKNSQKPIALIGLGAKESGEEVTSFLEKNNIPFVQTLPAKGTISDDHPNSLGNVGKLGTKPAYEAMKNADLLILLGSNYPYLPYLPNKGQAKCIQVDLKAENLGKRYSVTTAIQADVYDVVHALNKKGVLRDNKSFLQACQKNMDNWNKWMQEKRELDTTPISPESMVAYIDQTAPDDLVYSIDVGTSTSWAARFLHVKRNQKFAISAWLGTMGCGLPGAIAGQIVFPKRRVLSLIGDGAFSMVMQDFVTAVKYKLPIIFVIINNQKLAFIEYEQQSAGQLNYEINLADIDFGKFAQAAGGIGITVKSNDKFKEALDQAYQTKDKPVLINAYVEDNAPLPGKIVLDEAKGFAKFGQEYLENYWKIPELPPFKDILRQFF

SEQ ID NO: 27788 - protein, 504 aa, Solanum tuberosum
MYRATSSRLRALKVRGTNRVLARFLCSTAVATKPSGGLFSWLTGGGSDSLPPLDFPLKDIQLPPPLPDYVEPGKTKITTLTNGLKIASEISASPAASIGLYVDCGSIYEAPASYGATHLLERMAFKSTLNRSHLRIVREVEAIGGNVTAAASREHLIYTYDALKTYVPQMVELLVDSVRNPAFLDWEVSEQLEKVKSEIDEYTKNPQHLLLEAVHSAGYSGPYGNSLAATEATVNRLNSTVLEEFVAENYTAPRIVLAASGVEHEELLKVAEPLLSDLPKVPRAEEPTPVYVGGDYRRQADSGMTHFALAFEVPGGWLKEKDAMTLTVLQMLMGGGGSFSAGGPGKGMYSRLYLRVLNAYPQIHAFSAFSSIYNNTGLFGIQAATTSDFAPRAIEVAVKELTAVANPGEVDMVQLDRAKQSTKSAILMNLESRMVASEDIGRQLLIYGERKPVEHVLKAIDAISANDIASVAQKLISSPLTMASYGDVLSLPTYDVVSSRFHSK

SEQ ID NO: 27789 - protein, 288 aa, Escherichia coli K12
MAAKIIDGKTIAQQVRSEVAQKVQARIAAGLRAPGLAVVLVGSNPASQIYVASKRKACEEVGFVSRSYDLPETTSEAELLELIDTLNADNTIDGILVQLPLPAGIDNVKVLERIHPDKDVDGFHPYNVGRLCQRAPRLRPCTPRGIVTLLERYNIDTFGLNAVVIGASNIVGRPMSMELLLAGCTTTVTHRFTKNLRHHVENADLLIVAVGKPGFIPGDWIKEGAIVIDVGINRLENGKVVGDVVFEDAAKRASYITPVPGGVGPMTVATLIENTLQACVEYHDPQDE

SEQ ID NO: 27790 - protein, 319 aa, Streptomyces coelicolor A3(2)
MTEKALRLGTRRSKLAMAQSGQVADAVSQVTGRPVELVEITTYGDTSREHLAQIGGTGVFVAALRDALLRGEVDFAVHSLKDLPTAQHEGLVVAAIPEREDPRDVVVARDARKLTDLPRGARVGTGAPRRMAQLNAYARTHGMEIETVPIRGNVDTRIGYVRSGELDAVVLAAAGLNRVGRIDEVTDFLSVDTVLPAPGQGALAVECAADNASLIAALAELDDPFTRAAVTAERSLLAALEAGCSAPVGALADLLADGQTVKEMRLRGVVGTTDGSTLVQLSTTGPVPETHEAALALGGELAAEMLAQGAAGLMGERAQ

SEQ ID NO: 27791 - protein, 547 aa, Leptospira interrogans serovar Copenhageni str. Fiocruz L1-130
MGRTDLSRILKIGSRKSALAKLQTYLVLGALKKKFPEIQVELFFREASGDQDLQTPLWKMGTKGVFTQDLTADLVEKKVDIVIHSWKDLDLEGHPDTTIIGVLDRADQRDVLLWKKSSLSKYSPSVLKIHTSSPRREYNLRKFLSFSLPSRYTNSSLVFLPIRGNIQTRIRKWKESDSDGLVLAKAALDRLLSEDFFNSDELEYQEIRKFLKDSMDESVYQIFPLSLNPTAPGQGAIAAEVRTEDNWVLDRIRTLSKSEVVLAVEEERKILKRFGGGCHQKIGVSILQKAYGKILYQRGLSDSGEVLEVEEQFSEIFAPPADSVSKVYPVPGEAVKQKRTPLDSSNGLIFSEDGQNNKTIFPTELILKDWLVTRGNAFPNLSPALEHTGLIWTSGLKTWFQLAQRDIWVHGSLDALGEDELPKHSIFGKPLDFIKCTHVGSTEIASGLGRVLTYQTQAMEDHPDLSEKTHFFWMSASQFDKALSIFPQICNGFHACGPGITYSHIRKVLGESANLSIFIRYESWLASLGLEEFKGKKIGNQTEKNSP

SEQ ID NO: 27792 - protein, 258 aa, Ralstonia metallidurans CH34
MSYENILVETRGRVGLVTLNRPKALNALNDALMDELGAALTAFDQDEAIGCIVITGSERAFAAGADISMMAKYSYMDVYKGDYITRNWETIRRIRKPVIAAVAGYALGGGCELAMMCDIVIAADSAKFGQPEVKLGTMPGAGGTQRLPRAVSKAKAMDLCLTARMMDATEAERAGLVSRIVPADKLVDEAVAAAETIAGYSLPVVMMIKESVNAAYETTLNEGVHFERRLFHSTFATEDQKEGMAAFVEKRAPNFQNR

SEQ ID NO: 27793 - protein, 366 aa, Blastopirellula marina DSM 3645
MAYEVTLITGDGTGPELAEAARKCVDATGVKINWDEQEAGVDIMEKVGTPLPQSVMDSVRRTRCALKAPITTPVGTGFRSINVHLRQELGLFACIRPCKYYPGVRSYFSELNVDIVIVRENTEDLYAGVEFEAGKPETSQLIEYINGLPSDKKIKTGGDETGVSIKPISVSGTQRIVRCAFDYAQKNGRKKVTAVHKANIMKYSDGLYLKTATEVAKEYPDIEFEERIVDNMCMQLVQKPELYDVIVLPNLYGDILSDLGAGIVGGLGVAPGANLGPEGAVFEATHGSAPKYKGQNKVNPVALILSGMLMLRHLGEIDAAERLEKAVADVIAEGKHVTYDLKPNRDDPTAVGTQEMAAAICAKLGG

SEQ ID NO: 27794 - protein, 219 aa, Yarrowia lipolytica CLIB122
MATISSSRTQVRRLESQLAELLSEYSSFATSHAIAASEDEVRIGRDIEQVIEKTADSLESFERLLDSTPNATATQTGQLQRHRETLAEHRSQYKKINAGIKQERDRANLLSSVRSDIEGHRNRSATPQAEEEYMLHERGRVDNSNNMTDTLLAQAYATREELLTQRASLANIQRRLFNTASSIPGINTVISKINTRKKRDSLILAVIITLGILFILFLR

SEQ ID NO: 27795 - protein, 339 aa, Rubrivivax gelatinosus PM1
MTTRIAINGYGRIGRNVLRALFESKRTGAARDIEIVAINDLGNAQTNAHLTRFDTVHGRFGLPVSHEGSDLVVDGHRIHVSSIRSPAELPWKQHGIDIVMECTGLFTSKAKAGAHLAAGARKVLISAPGGADVDATVVYGVNHGVLRAGHTVVSNASCTTNCLAPVAKVLNDGIGIANGLMTTVHSYTNDQVLTDVYHEDLRRARSATQSMIPTKTGAAAAVGLVLPELAGRLDGFAVRVPTINVSLVDLVFTAQRDTSVDEVNALMKTAAATGPLASVLGYTDEPLVSMDFNHDARSSVFDASCTKVSGRLVKVCAWYDNEWGFSNRMLDTALAMARA

SEQ ID NO: 27796 - protein, 242 aa, Glycine max
MPPCPLFPFNPFHLLSNSLSLSKISLKSEKSLSLSKIRNNLKQIEMESNTPVIAKKVLSIIRVAFFMLRKGISKGKLMMHLNNMMLKRPGKAIANLMFHHHHNHGVSGNNLQFSTAREYEFSCSNTPNNFFAAALASNNKRHRHNPFFTCAHAPPTLDDDAVTVNAVKGVLEMLNNEAFEEASPAVATALSGFGRSPMVRKLIRVTDSPFPLGESEDDKDNQVDKAAEEFIKRFYKELRKQT

SEQ ID NO: 27797 - protein, 124 aa, Hordeum vulgare subsp. vulgare
MASRRAHAAATMALLVVALVLSGAPAPAEGAVASCGQVVSYLAPCIGYAMGRERAPGGGCCTGVRSLNAAAATPADRQATCTCLKQQTSGMGGIKPDLVAGIPSKCGVNIPYAISPRTDCSKVR

SEQ ID NO: 27798 - protein, 80 aa, Wolbachia endosymbiont of Drosophila ananassae
MATLSVREALCTAIREEMQNDSDVLIMGEEVAEYDGAYKVTKGLLKEFGENRVVDTPITEHGFAGLAVGAAFAGLKPIVE

SEQ ID NO: 27799 - protein, 331 aa, Musa acuminata
KIKIGINGFGRIGRLVARVALQSDDVELVAVNDPFITTDYMTYMFKYDTVHGSWKHHEIKVKDSKTLLFGEKEVTVFGIRNPEEIPWGESGAEYVVESTGVFTDKDKAAAHLKGGAKKVIISAPSKDAPMFVIGVNENEYTSDINIVSNASCTTNCLAPLAKVIHDRFGIVEGLMTTVHSITATQKTVDGPSSKDWRGGRAASFNIIPSSTGAAKAVGKVLPSLNGKLTGMSFRVPTVDVSVVDLTVRLEKAATYDEIKAAIKEESEGKLKGILGYVEEDLVSTDFVGDSRSSIFDAKAGIALNPNFAKLVSWYDNEWGYSSRVIDLIRHM

SEQ ID NO: 27800 - protein, 602 aa, Zea mays
MAVGGDANGGGGGVRQRQRGCSCTKADFFPEESFSSWSAYGRALRSTGPRLADRLTSRSLESTELHEVRARSGADMKRDLTWWDLVWFGVGAVIGAGIFVLTGQEAREDVGPAVVVSYVVSGVSAMLSVFCYTEFAVEIPVAGGSFAYLRVELGDFMAFVAAGNILLEYCIGGAAVARAWTSYFATLLNHQPSDFRIHASSLSADYSELDPIAVVVIALVCIFAVASTKGTSRFNYVLSIVHIAVIVFIIVAGLTKADAANMRDFMPFGVRGIFSASAVLFFAYIGFDAVSTMAEETKNPARDIPIGLVGAMTLTTALYCVLAVTLCLMQPYASIDKDAPFSVAFSARGMDWAKYIVAFGALKGMTTVLLVSAVGQARYLTHIARTHMMPPWLAQVHPRTGTPVNATVVMLVATAIIAFFTDLGILSNLLSISTLFIFMLVAVALLVRRYYVAGETTVANRNKLAACIIAILATSSATATCWGVNVNGWVPYAVTVPAWFASTVCLWAFVPQARAPKLWGVPLVPWLPSASIAINVFLLGSIDYKSFMRFGFWTAGLLVYYLFVGLHASYDTAKALAADSAMAKVEDGDGKPARGAVHNGEY

SEQ ID NO: 27801 - protein, 410 aa, Bacillus anthracis str. A2012
MQNMKIIVQKFGGTSVRDENGRKHALHHIKKSLDAGYKVVTVVSAMGRKGEPYATDTLLSLVNQEESHISNREQDLLLSCGELISAIVFSNMLNENGIKAAALNGAQAGFVTNDDFTNAKIIEMNCDRIHEELENVDVIVVTGFQGQTKKGDTTTLGRGGSDTSASALGVALHAEYIDIFTDVEGVMTADPRIVKDARHLQTVTYNEICNMAYQGAKVVHPRAVEIAMHAKVPLRVRSTYSDSEGTLIAAYDGATKGQDVEERPVTGIAHVSNVTQIKVLAKETAYDIQQHVFKEMANEGISVDLINISPTGVAYTVNDNVSARAVEVLKQLGYEPIVTEHCAKVSIVGAGMAGIPGVTAKIVTALAEKGIQILQSADSHTTIWVLVKETDLVEAVNALHRAFELSKEKQ

SEQ ID NO: 27802 - protein, 416 aa, Thermoanaerobacter tengcongensis MB4
MSTESLNPLVIAQKQIKKACDILGVEESVYELLKEPMRVLEVSIPVQMDDGSIKVFKGYRSQHNDALGPTKGGIRFHPDVTLDEVKALSMWMTFKCGVVGLPYGGAKGGVVVNPKELSNDELQRLSRGYIRAIASIIGPEKDIPAPDVGTNAQIMAWMVDEYNKIVGYNSPAVITGKPLIYGGSKGRVAATGYGVALMAREAVKRLNMDFKDCTVAIQGFGNVGSHAGLSLQRLGAKIIAVSDVYGGIYNEKGIDAEKLVEHVNKTGTVCNFEGTTPITNEELLTMKVDILVLAALENQITSANANEVKAKIICEGANGPTTPEADKILSEKGVFVVPDILANSGGVIVSYFEWVQNLMNYYWTEKEVEERQEIMMVNAFNSIYDLAQQYKVDMRTAAYMISIKRVYEAMKVRGWL

SEQ ID NO: 27803 - protein, 489 aa, Bordetella bronchiseptica RB50
MTQLTQPLSRAELLRDACYIDGKWVGAGNGPSIPVDNPSTGKTIISVPKLGRKEAEQAIDAAEAALPAWSARTGKERAAILLKWAQLMMENQQDLAVIMTSEQGKPVAEAAGEIAYAASFLEWFAEEAKRIDGDILQSPKGGQRLMVLKQPIGVTAAITPWNFPAAMITRKVGPALAAGCTMVVKPAQQTPLTALALAVLAEQAGVPAGVFQVVTGSSREIGAALCESEVVRKLSFTGSTEVGRTLMEQCAPTIKKLSLELGGNAPFIVFDDADLDRAIDGILASKYRNAGQTCVCANRIYVQAGVYEEVAKRLVEKVNAMKVGDGFEQGVTQGPLIDTAAVAKVQEHIADATAHGAKVIAGGQPHALGGSFFQPTVVRDVTQSMRFAVEETFGPVAPLFKFESEDEVIGMANNTIFGLAAYFYTRDYARIWRVSEALEYGIVGINTGIISNEVGPFGGVKQSGLGREGSKYGIEDYLELKYLCVDLGA

SEQ ID NO: 27804 - protein, 185 aa, Synechococcus sp. RS9917
MSGSAAPTSLSTVQKVLLLACALVLAGLLFLLRGGLTAESPLDQLARRSLLPEQALTSGRPTLLEFYADWCEVCREMAPAMLANEQRYRDQLNVVLVNVDNPRWQDLIDRYDVNGIPQLNLFDAEGQPRGRSLGRRSQTELEALSEALIDNSPLPQLAGVGDTTPLTPATVATPAPSGVGPRSHG

SEQ ID NO: 27805 - protein, 568 aa, Bordetella parapertussis
MMLANPATKYVPFQPFARDFAERTWPSRRITQPPIWMSTDLRDGNQSLIEPMSVERKVRFFEQLVKIGFKEIEVGFPSASQTDFDFVRKLIDEKRIPDDVTIIVLTQSREDLISRTVEAAAGARQAMIHLYNACAPAFRKIVFNMSRDEIKNIAVTGTRMVKQYMAKYPQTQWRYEYSPEVFSTTEPEFALDVSNAVADEWYATPQRKMVLNLPATIEATSPNMYADQIEWMHKNLARRDSIVLSVHPHNDRGTAVAAAEFAVMAGADRIEGCLFGSGERTGNVDLVTLALNLYTQGVHPGLDFSDIDEVRRCAEYCNQLPVHPRHPYAGDLVFTAFSGSHQDAIKKGFAQQQADAPWEVPYLPIDPADLGRSYDAVIRVNSQSGKGGVSYLLEQEHGLVLPRRLQIEFSRAIQRVTDETGREVSSDDVYTIFDSEYLAQQQPWQLVRHRIDGDPSAGEGKHFSIEAELSFNGERRIVKGSGDGAISAFVAALDVPVRIMDYHEHAIGTGTDTRAACYVEVRVGDSPTGFGVGIDRDIVTASFKAVLGAVNRHHVAATQATETEAVAA

SEQ ID NO: 27806 - protein, 378 aa, Sulfolobus tokodaii str. 7
MVTSDKYYPYDRPPLSKEYLRGKIDRNSIFFEQPNYYTKRENIRIILNTSVEKINVKEKGVELSNGTIIHFDKALIATGGRPRKLKLPGEELEGIHYLRTLDDCDSLKQENGKEAVIIGGGFIGIEVASSLTMLGVKTTVIEVKPYIWNTFVDEKISRLIQNYFEKHGVNFILNEGVKEFIGDKRVSRVITEGGKTLNVDFALIAVGIVPNIEIAQKSGIEVDNGIIANEYLETSAKDIYVAGDVANIYDPSIGKRRRIEHWNNAEYTGKLAAKNMLGKREKYNFLSTIWSDIFDLHIESGGDTTDYDEYIIRGNFSVDNPNFNVIYLKGGVIKGYVAINRDYEELSALNKLIVSKVDVSNKKNELKDEKYDLSKLSL

SEQ ID NO: 27807 - protein, 157 aa, Leuconostoc mesenteroides subsp. mesenteroides ATCC 8293
MSIYDYFATLENGETYSLNKLANHPVVIVNTATKCGYAPQFGELEKLYKKYKDKGLVILGFPSNQFKQELETASQAAQACQLTYGVTFPMHQLVAVNGKNTDPLFKYLKENSKGMLGSSTIKWNFTKFLVDKEGNVVKRYAPKTEPKDLEEDIEDVL

SEQ ID NO: 27808 - protein, 374 aa, Carboxydothermus hydrogenoformans Z-2901
MSGRSCKGPFKILVLPGDGIGPEIIKEAVKVLKALGEKKGITFNFQYGLIGGAAIDERGVPLPEETVELGKQCDAILLGAVGGPKWDNLPPEIRPELGGLLKIRKVFDLYANLRPVMFFPELKNASPLKPDIIEGVDILMVRELTGGLYFGEKKRFTTEQGEQAVIDTLIYTEKEVERVVRLGFELAQKRRGKLTLVDKANVLESSRFWREITGEIKKEYPDVELSYMYVDNCAMQLIRNPRQFDVIVTENMFGDILTDEGSVLAGSIGLLPSASLNGKFGLYEPIHGSAPDIAGQNKANPLATILSAGMMLRYSLDCPEEALLIEKAVKAVLQKGYRTGDILEPGTTLVTCEEMGDLVAEEILGGVYDEGLPL

SEQ ID NO: 27809 - protein, 443 aa, Oryza sativa
MNALAATSRNFKQAAKLLGLDSKLEKSLLIPFREIKVECTIPKDDGTLASYVGFRVQHDNARGPMKGGIRYHHEVDPDEVNALAQLMTWKTAVANIPYGGAKGGIGCSPGDLSISELERLTRVFTQKIHDLIGIHTDVPAPDMGTNSQTMAWILDEYSKFHGYSPAVVTGKPVDLGGSLGRDAATGRGVLFATEALLAEHGKGIAGQRFVIQGFGNVGSWAAQLISEAGGKVIAISDVTGAVKNSNGLDIAKLMKHSSENRGIKGFDGGDAIDPRSLLTEECDVLIPAALGGVINKDNANEIKAKYIIEAANHPTDPEADEASTSDSIWQTNTPTATKCTICLKCFLSEFLLQILSKKGVLILPDILANSGGVTVSYFEWVQNIQGFMWDEEKVNNELKTYMTRGFRDVKEMCRSHHCDLRMGAFTLGVNRVARATVLRGWEA

SEQ ID NO: 27810 - protein, 405 aa, Glycine max
MATLFQGLGVVNPSLSSSNSNNFLLPSRTSLSERKDGIFVVRSDARVSSKVLKAGARKHELLVTNAVATKEGSSAASTSKSGHELLLFEALREGLEEEMERDPCVCVMGEDVGHYGGSYKVTKGLATKFGDLRVLDTPIAENSFTGMGIGAAMTGLRPVVEGMNMGFLLLAFNQISNNCGMLHYTSGGQFKIPIVIRGPGGVGRQLGAEHSQRLESYFQSIPGIQMVACSTPYNAKGLMKAAIRSENPVILFEHVLLYNLKERIPDEEYVLSLEEAEMVRPGEHVTILTYSRMRYHVMQAAKTLVNKGYDPEVIDIRSLKPFDLHTIGNSVKKTHRVLIVEECMRTGGIGASLTAAITENFHDYLDAPIVCLSSQDVPTPYAGTLEEWTVVQPAQIVTAVEQLCK

SEQ ID NO: 27811 - protein, 128 aa, Brassica napus
  misc_feature (2)..(2): Xaa can be any naturally occurring amino acid
  misc_feature (10)..(11): Xaa can be any naturally occurring amino acid
  misc_feature (22)..(22): Xaa can be any naturally occurring amino acid
  misc_feature (26)..(26): Xaa can be any naturally occurring amino acid
  misc_feature (35)..(35): Xaa can be any naturally occurring amino acid
  misc_feature (53)..(53): Xaa can be any naturally occurring amino acid
  misc_feature (65)..(65): Xaa can be any naturally occurring amino acid
  misc_feature (71)..(71): Xaa can be any naturally occurring amino acid
  misc_feature (83)..(84): Xaa can be any naturally occurring amino acid
  misc_feature (86)..(86): Xaa can be any naturally occurring amino acid
  misc_feature (93)..(94): Xaa can be any naturally occurring amino acid
  misc_feature (99)..(99): Xaa can be any naturally occurring amino acid
  misc_feature (101)..(102): Xaa can be any naturally occurring amino acid
  misc_feature (105)..(107): Xaa can be any naturally occurring amino acid
  misc_feature (111)..(111): Xaa can be any naturally occurring amino acid
MXSSMLSSAXXVTSPDQATMVXPFTXLKSSAAFPXTRKANNDITSIASNGGKXSCMKVRTPVGKXKFETLXLTFPDLTEVELXXEXDYPSPHXXIPCVXFXXEHXXXHRDXREAPPYAHVEFPTPSRF

SEQ ID NO: 27812 - protein, 848 aa, uncultured delta proteobacterium
MIDLFTLDNGLRVVTLADHLTPIVSIQVWFGYGSANETDRESGLSHLIEHMIFKGTHNRKNSEIAGAVESLGGDINAFTSFDHTVYYINISGRHFVKAMEILADAVQNAIFDQVDLEREKMVVIEEIRRGMDMPETRLMQSLFKTAFKNHPYGRPILGLEEHIHSFKREDILAYMDKWHNPLNTVISIAGNFNPEQAKETIAELFGMWNKKSAYIRAEQGEPLTLSPRIKILDFNSRQSMLAIGFPSIRSGDLDVAALDCISFILSADDSSRLQIKLKEGKKLLQKAEIQIFTPRDPGLIILKIFISENNIRELIPNLRYEIENLRQHPVSEEELKTAKYNLRAGMLRGRKTIDDQAGRLGFFLLELQEVNFEKSYLKKLEELNIEDIQKAAQKYLAPEHVSISLIMPMGYDNPITSEEFVDLWEKTLPISPNFIHKNKSLTQKTVLKNGITILTKINKRVPLFSICALFKGGQLTEQPWEQGISSFTAQLMTKGTKKNNPVAFLRDISSISAEFSSFSGRNTIGVNGEFLSGDWRKALDIIADILLEPAFDEKEINKLIPFYLSDIKYQKEHLGPYTIQLLYKHLFKGHPYSFNQLGAEETIGILKQEDVIAYYKKIAHPENLAIAVTGDIIHEEIIKRFDRLFSNFTGGDFNTFPYPTSARLEKNINIYKQRDITQSHIAIGYHSAPLDNPDRHAINIISSAFNGQGGRLFPLRDKHGVAYTVNAFSMAGVGTGSFIFYIACAPESTDMSIDFLYREIKNMIKNGLSQKELERAKEYFIGNYEMSLETNGSKSMQMAINELYGLGYDFSKTFINHIKSVSVDDVLETAKKYFDVPGHVRVVVGKNT

SEQ ID NO: 27813 - protein, 110 aa, Triticum aestivum
  misc_feature (60)..(60): Xaa can be any naturally occurring amino acid
  misc_feature (72)..(72): Xaa can be any naturally occurring amino acid
  misc_feature (94)..(94): Xaa can be any naturally occurring amino acid
MASTGRSMLLSLLLFAVTLSLLEMYRAKFASSELMTIAGGFVCSLLFLLLLTFIGNYQEXSGDRTGWGALLXSTTCTLIVAGTVHRVCITTCSXFPLDPLRVDSLDLRMI

SEQ ID NO: 27814 - protein, 445 aa, Salmonella typhimurium LT2
MSSDADAHKVGLIPVTLMVSGNIMGSGVFLLPANLAATGGIAIYGWLVTIIGALALSMVYAKMSSLDPSPGGSYAYARRCFGPFLGYQTNVLYWLACWIGNIAMVVIGVGYLSYFFPILKDPLVLTLTCVAVLWIFVLLNIVGPKMITRVQAVATVLALVPIVGIAVFGWFWFKGETYMAAWNVSGMNTFGAIQSTLNVTLWSFIGVESASVAAGVVKNPKRNVPIATIGGVLIAAVCYVLSTTAIMGMIPNAALRVSASPFGDAARMALGDTAGAIVSFCAAAGCLGSLGGWTLLAGQTAKAAADDGLFPPIFARVNKAGTPVAGLLIVGVLMTIFQFSSMSPNAAKEFGLVSSVSVIFTLVPYLYTCAALLLLGHGHFGKARPLYLLITFVAFVYCIWAVIGSGAKEVMWSFVTLMVITALYALNYNRIHKNPYPLDAPVKQD

SEQ ID NO: 27815 - protein, 403 aa, Francisella tularensis subsp. holarctica
MFEQIKNNVENAIEALKQGKPVVVLDDYDRENEGDLILPGQKATEENITFMLEHTSGIICLAMDSKKARELNLTPMVAADQNNSTFTTPFTVTIEAKEGVTTGVSAKDRAHTIQVASKADAKAEELARPGHIFPLIANDKGVLGRNGHTEATVDLMKLSGFNSAGVLCELMNKDGTMMKAAELEAFAKKHDLPLLTIAELYQYRLATEIFVTKMASSTIPFKKIGELEMSVYKDNFSGDEVVVLSKPYSGNNPLVRMHSSCITGDIFGSLRCDCQDQLHKGIEMISEEGGFFIYLDQEGRGIGLTNKLKAYNLQMNENMDTLEANLALGLPADARKYDLAIQVLKYNNVNRCRLISNNPEKLAALRNVDIETQPVYCEAFVNSHNRNYLITKKIKAKHTIKGI

SEQ ID NO: 27816 - protein, 564 aa, Pseudomonas aeruginosa UCBPP-PA14
MTETAKRPLYVPHAGPSLLEMPLLNKGSAFSTQERIDFNLQGLLPHNIETIEEQTERAYSQYNLCNTDLDRHIFLRSIQDNNETLFFRLLEEHLEEMMPIIYTPTVGQACQEFSKIYRTHRGLFISYPDRERIDDILRSATKNNVKIVVVTDSERILGLGDQGIGGMGIPIGKLSLYTACGGISPAYTLPVVLDVGTNNPDLLNDPMYMGWRHERVSGAQYEEFVDLFIQAIKRRWPNVLLQFEDFAQTNAMPLLERYKDELCCFNDDIQGTAAVAVGTLLAACKAKGEKLSEQTVTFVGAGSAGCGIAEQIIAAMQLEGLDEAQARRRIFMVDRWGLLTDDMSNLLDFQHRLAQKRADLGAWGGQQGDDLALLEVIRNARPTVLIGVSGQRGLFSEEVIRELHSHCKQPLVMPLSNPTSRVEATPQEILNWTDGQALVATGSPFQPVQVGDKRIPIAQCNNAYIFPGIGLGVIAARANRVTEGMLMAAANALANCSPIVTRGEGAVLPALGDIREVSKRIAVAVAKQAQAEGKALHTSDEVLNDAIEANFWFPRYRAYRRTSF

SEQ ID NO: 27817 - protein, 462 aa, Medicago truncatula
MSSIALKSFLGLRISSPETPQFSYRPKPITHRRKFTVVAAATSPKIDGRNLRVAVIGGGPAGGAAAETLAKGGIETFLIERKMDNCKPCGGAIPLCMVGEFDLPLDIIDRRVTKMKMISPSNVAVDIGRTLKSHEYIGMVRREVLDDYLRNRAKENGANIINGLFLKMDIPKEKNAPYVLHYSSYDGKTGGVGEKTTLEVDVVIGADGANSRVAKSIDAGDYEYAIAFQERIKIPDDKMAYYEDLAEMYVGDDVSPDFYGWVFPKCDHVAVGTGTVTHKGDIKKFQLATRKRAEDKILGGKIIRVEAHPIPEHPRPRRLSGRVALVGDAAGYVTKCSGEGIYFAAKSGRMCAEAIVQGSANGKRMVEEGDLRKYLEKWDKTYWPTYKVLDILQKVFYRSNPAREAFVEMCADEYVQKMTFDSYLYKTVVPGSPLEDIKLAINTIGSLVRANALRREMDKLNV

SEQ ID NO: 27818 - protein, 537 aa, Alternaria solani
MQTHLLILAAVVLLIIHIVNNFLIKPLQTLLKSRRLGCGPVPFEPTRWPLDIDTIRRSLKADKEQRTPDFVAGRFETMGRYTWGLSLLGTSNLITAEPRNVQALLATQFDDFIMGTARRTNLKTALGRSIFAVDGKAWHRARETMRPIFSRENVSRLELLEEHVQTMLQIIETKDEGLTTDANDRAWSAPVSLAVLLPRLTMDSATELFLGQSTHSLKKALARQQQKSGNEEHDADSFDHAFERMLAILGTRMRLRSLYWLYGNKELQKCINALHAFVDSAIDAADQARKSGSSQLRYDFLETLRTRCSDRAEVREQVLGLLAAGRDTTASLTAWVFYCLVRNPRVYKKLRDTVLAEFGPYSTNPGQKITFEKLKGCTYLQHVLNETLRLHSVVPFNSRCAARDTTLPVGGGPDGSMPVFVPKGTEVNFSTHVLHRRKDLWGEDADEFVPERWEKKRPGMTWQYVPFNGGPRICIGQQFALTEAGYVLVRMVQRYDVIEGLDIDVERDWHNFTVVCSPGSPVARDAAVMCRLRVAVE

SEQ ID NO: 27819 - protein, 117 aa, Triticum aestivum
MARMALLAVFAVLAALAVAEMASGAVTCGDVTSAIAPCMSYATGKASAPSAGCCSGVRTLNGKASTSADRQAACRCLKNLAGSFKGISMGNAATIPGKCGVSVSFPINTNVNCNNIH

SEQ ID NO: 27820 - protein, 218 aa, Carica papaya
  misc_feature (25)..(25): Xaa can be any naturally occurring amino acid
  misc_feature (117)..(117): Xaa can be any naturally occurring amino acid
YPQSIDWRAKGAVTPVKNQGACGSXWAFSTIATVEGINKIVTGNLLELSEQELVDCDKHSYGCKGGYQTTSLQYVANNGVHTSKVYPYQAKQYKCRATDKPGPKVKITGYKRVPSNXETSFLGALANQPLSVLVEAGGKPFQLYKSGVFDGPCGTKLDHAVTAVGYGTSDGKNYIIIKNSWGPNWGEKGYMRLKRQSGNSQGTCGVYKSSYYPFKGFA

SEQ ID NO: 27821 - protein, 579 aa, Chlamydomonas reinhardtii
MASPAPSGSPPLVIYSCTDEQMLEVTELVGDSATAAIVCSQYDCSFTAVSCVLKYLAAQQADLSEQMDGTAKAEVALSLDVAFLLFSAYLVFGPMQLGFALLCAGAIRSKNSMNVLMKNILDACTGAIGFYLFGYAFAFGHHANQTSNAFIGDHNFALSYTTQVSSLDSNVSYDGFATQGWHVFFFQWSFCAAATTIVSGAVAERCTFQAYLAYAFFISSFVYPVVVHWVWSASGWLSAFNTSRDGYALLLQTGAIDFAGGGVVHLTGGMAALMGAWIIGPRIGRFDASGKVNEMKGHSATLVVMGTFLLWFGFYGFNPGSNLTIATTASAIVVSRVAVTTTLSAGAAGLTGLFWRYMRTSTWDTVLVCNCCLAGLVGITCSCSVVEPWAALICGFVAAFVFIGFEYVVLYKMKIDDPVSAVALHLFCGVWGLLFPGLLAQPTYVADVYGAYGFGPDVKGSKKFGILYGGHGQVLLCQVIEALSICAWVGVMMGAFFGLLKVAKRLRVPVDQELAGLDVSKHTNEAYNGAIMPTAGGGAGGGGGYGSNGGERGSGFYTGAGPAGDTSTGGGHAANGGYD

SEQ ID NO: 27822 - protein, 262 aa, Desulfitobacterium hafniense Y51
MMSSYNDFTVEKKGAIALVTLNRPHKGNSWTLDTYQEMEKIQEDLHYDDEVRVVIFTGAGDKFFCAGADLSLLAKLTPHFISRDLYRYQGINTRWDRFIKPVIMAINGITVGSGLELALCGDIRIASSSSLFSINEVRIGLNPDMGGTQRLTRTVGPSQAKRLIFTAERIDAQEAARIGLVDILVEPENLLNEALKMAEQIAGMPPYAIRFAKKAINLAVDAPLEIGLMYEEAGSTFCMGTEDKKEAVDSILEKRQPKFHGR

SEQ ID NO: 27823 - protein, 144 aa, Zea mays
IVYVLPCFIVIDVQALFFKKKEVDVPTYICSELHSFPVPDVSKSTWQSLVVESELPVLVEFWASWCGPCKMIDPIVGKLSKEYEGKLKCYKLNTDENPDIATQFGIRSIPTMMIFKNGEKKDSVIGAVPESTLVTCIDKYVGGR

SEQ ID NO: 27824 - protein, 579 aa, Chlamydomonas reinhardtii
MASPAPSGSPPLVIYSCTDEQMLEVTELVGDSATAAIVCSQYDCSFTAVSCVLKYLAAQQADLSEQMDGTAKAEVALSLDVAFLLFSAYLVFGPMQLGFALLCAGAIRSKNSMNVLMKNILDACTGAIGFYLFGYAFAFGHHANQTSNAFIGDHNFALSYTTQVSSLDSNVSYDGFATQGWHVFFFQWSFCAAATTIVSGAVAERCTFQAYLAYAFFISSFVYPVVVHWVWSASGWLSAFNTSRDGYALLLQTGAIDFAGGGVVHLTGGMAALMGAWIIGPRIGRFDASGKVNEMKGHSATLVVMGTFLLWFGFYGFNPGSNLTIATTASAIVVSRVAVTTTLSAGAAGLTGLFWRYMRTSTWDTVLVCNCCLAGLVGITCSCSVVEPWAALICGFVAAFVFIGFEYVVLYKMKIDDPVSAVALHLFCGVWGLLFPGLLAQPTYVADVYGAYGFGPDVKGSKKFGILYGGHGQVLLCQVIEALSICAWVGVMMGAFFGLLKVAKRLRVPVDQELAGLDVSKHTKEAYNGAIMPTAGGGAGGGGGYGSNGGERGSGFYTGAGPAGDTSTGGGHAANGGYD

SEQ ID NO: 27825 - protein, 111 aa, Triticum aestivum
  misc_feature (43)..(43): Xaa can be any naturally occurring amino acid
  misc_feature (65)..(65): Xaa can be any naturally occurring amino acid
TGQFERTLIVADERSTVSYLEGSTAPAYDSNQMHAWVVELVCXEGAEIKYSTVQHWYAGNEEGIXGIYNCETMRGRCKRRCSKNSWTQIVTGSAITCKYPSVAVVGDYTVG

SEQ ID NO: 27826 - protein, 396 aa, Thiomonas cuprina
MAKSKFERTKPHVNVGTIGHVDHGKTTLTAAITTVLSSKFGGEAKAYDQIDAAPEEKARGITINTAHVEYETANRHYAHVDCPGHADYVKNMITGAAQMDGAILVVSAADGPMPQTREHILLARQVGVPYIIVFLNKCDMVDDAELLELVEMEVRELLSKYDFPGDDTPIIKGSAKLALEGDKGELGEGAILKLAEALDTYIPTPERAVDGAFLMPVEDVFSISGRGTVVTGRVERGIIKVGEEIEIVGLKPTLKTTCTGVEMFRKLLDQGQAGDNVGILLRGTKREEVERGQVLCKPGSIKPHTHFTAEVYVLSKDEGGRHTPFFNNYRPQFYFRTTDVTGAIELPKDKEMVMPGDNVSITVKLIAPIAMEEGLRFAIREGGRTVGAGVVAKIIE

SEQ ID NO: 27827 - protein, 432 aa, Bacillus anthracis str. A2012
  misc_feature (332)..(332): Xaa can be any naturally occurring amino acid
  misc_feature (342)..(343): Xaa can be any naturally occurring amino acid
  misc_feature (427)..(427): Xaa can be any naturally occurring amino acid
MLSLNNSIYLEKLAVGGKFLIKKYTCKNGVRIVMENIPTVRSVAIGIWIHAGSRNENEKNNGISHFLEHMFFKGTETRSAREIAESFDSIGGQVNAFTSKEYTCYYAKVLDEHAKYALDVLADMFFNSTFDEEELKKEKNVVCEEIKMYEDAPDDIVHDMLTKATYETHPLGYPILGTEETLNTFTGDTLRQYIKDHYTPENVVVSIAGNIDEAFLQTVEQYFGSYEGTTNREQVHSPIFHFNKVARKKETEQAHLCLGYKGLQMGHEDIYNLIVLNNVLGGSMSSRLFQEVREQRGLAYSVFSYHSSYEDTGMLTLYGGTGSQQLDTLYEXMQETLETLKXXGITEKELINSKEQLKGNLMLSLESTNSRMSRNGKNELLLRKHRSLDEIIESVNTVTKENVDELIRNMFTDEFSAALISPDGKLXKGIKL

SEQ ID NO: 27828 - protein, 359 aa, Vicia sativa
MEMKKLLFISLSLALIFTVANTFDFNEHDLESEKSLWNLYERWRSHHTVTRNLDEKHNRFNVFKANVMHVHNTNKLDKPYKLKLNKFGDMTNYEFRRIYADSKISHHRMFRGMSHENGTFMYENAVDVPSSIDWRNKGAVTGVKDQGQCGSCWAFSTIAAVEGINQIKTQKLVSLSEQQLVDCDTEENEGCNGGLMEYAFEFIKQNGITTESNYPYAAKDGTCDVEKEDKAVSIDGHENVPINNEAALLKAAAKQPVSVAIDAGGYNFQFYSEGVFTGHCDTDLNHGVAIVGYGVTQDRTKYWIMKNSWGSEWGEQGYIRMQRGISSREGLCGIAMEASYPIKKSSTKPTESSILKDEL

SEQ ID NO: 27829 - protein, 616 aa, Synechococcus elongatus PCC 7942
MAIALTDKVRNGRAADHIVMALIVQKYGGTSVGSVERITAVAQRIAQTVAAGNQVVVVVSAMGHSTDELLKLANAISANPSRRELDMLLATGEQVSIALLSMALHEQGCDAISMTGAQVGIITEAHHSRARILEIDPQRLQSQLDAGRVVVVAGFQGIASSDRTALTEITTLGRGGSDTSAVALAAALNADRCEIYTDVPGILTTDPRLVPEAHLLEEITCDEMLELASLGASVLHPRAVEIARNYGVRLVVRSSWTQEPGTGVVAPPRRSDRSLQGLEIGRPVDGLALDTDQAKVALLHVPDRPGIAASLFGEMAQRGVNVDLIIQSIHEGNSNDISFTVSQADLEKAEAGTTQLLADLGGEQQSEAAVAKVSISGVGIVGRPGIAAQMFSALAQGGINIQMISTSEVKVSCVIAAADQQRAIAALQESFELEEAIAATATDACTTDLPAVRGVALDRDQARLAILNVPDLPGMAATIFQILADRQISVDMIIQSQRGRIHNGQPCRDIACTLPPADAELAAAALQAFADQHGCSLEIQTEIAKVSIVGSGMVQQPGVAAQMFAALANHGINIHMIATSEIKVSCIVDASQAVEALQTVHAAFGLASDRRIEVPA

SEQ ID NO: 27830 - protein, 557 aa, Frankia sp. EAN1pec
MVHDTPAPLGSAPLGSAHLGAAGGLPFDRESLHIYDTTLRDGTQQEGLSLSVADKLAVARHLDDLGVGFIEGGWPGSNPKDAEFFRRARTELDLNGALLTAFGSTRRASKAVADDSQVAALRDAGTSVVCLVAKADRRHVERALRTTPAENLAMIRDTVRHLTNEGKRVFVDAEHFFDGHRADPAYALEMVRTAAEAGAEVIVLCDTNGGMLPTRIGDVVAATLASTGARLGIHTHDDAACAVANSLVAIEAGATHVQGTANGYGERCGNANLFSVVAGLETKLGRQVLPAGRLRELVRVSHAIDEVTNSAPSTHRPYVGASAFAHKAGLHASAVKVDPDMYQHIDPAAVGNDMRMLVSELAGRATLELKGRELGMDLSGEREALGRVLEMVKDREASGYAYEAAEASFELMLLDEVSGRERFFTLESWRVIVEQRSGGEVVSEATVKLTSHGERHVSTAEGNGPVNALDTALRKALEKAYPGLADLDLVDYKVRILDGRQGTGAVTRVLVETSDGRGRWDTIGVDENIIAASWVALQDAVTYGLRRQGERPDPDAV

SEQ ID NO: 27831 - protein, 412 aa, Shewanella sp. ANA-3
MSKRRVVVTGLGLVTPVGNTVDTTWKALLSGKSGIAPITKFDASEFTTRFSGSVKDFDVEQYLTKKDARKMDLFIQYGMAAGIQAIQDSGLDMSKENPGRVGTAIGAGMGGMWLIEQNHSALLSGGPRKISPFFVPSTIINMIAGHLSIMYGMTGPNFAVTTACTTGVHNIGFAARTIAYGDADVMIAGGAEDVTCPLGVGGFGAAKALSTRNDDPTAASRPWDKDRDGFVIGDGAGVMVMEEYEHAKARGATIYGELVGFGMSGDAFHMTSPPSDGAGAAAAMVNAVNDAKLSFEKIGYINAHGTSTPAGDKAEAAAVKSVFGDHAYNLLVSSTKSMTGHLLGAAGAVEAIFTLLALRDQAVPPTINLDNPDEGCDLDFVAHTARDVKLEYALCNSFGFGGTNGSLLFKKV

SEQ ID NO: 27832 - protein, 342 aa, Frankia sp. EAN1pec
MRLAVIGGDGIGPEVVAEGLRVLRAVHPKVETTDYDLGARRWHETGETLPDSVLAELRGHDAILLGAVGDPGVPSGVLERGLLLRLRFELDHHVNLRPVRLYPGVTSPLAGDPAIDMIVVREGTEGPYAGAGGTLRRGTPQEVATEESLNTRFGVERVVRDAFARASRRPRAHLTLVHKTNVLTKAGDLWARTVAEVGAEFPAVSVDYQHVDAASMFFVTDPARFDVVVTDNMFGDILTDIGAAITGGIGLAASGNLDPSGANPSMFEPVHGSAPDIAGQGLADPTATVASVAMLLDHLGHADEAARVEGAVAASLAARAAAGGARRSTREIGDDLATRAAG

SEQ ID NO: 27833 - protein, 143 aa, Triticum aestivum
AYLGDTLEQVCTKKQAGTGPEFPGYRRPTRPRPSARPSLLIVASKKAKKVQTAQPYGPGGGVVFKEGVDASGRAAKGKGVYQFADKYGANVDGYSPIYTPEEWSPSGDVYVGGKTGLFLWAVTLSGILLGGALLVYNTSALAS

SEQ ID NO: 27834 - protein, 112 aa, Streptomyces avermitilis MA-4680
MKLITAIVKPYRLDEVKTALQELGVHGLTVTEASGYGRQRGHTEVYRGAEYRVDLVPKVRIEVVVEDADSDAVIDAIVKAAQTGKIGDGKVWSVPVETVVRVRTGERGPDAL

SEQ ID NO: 27835 - protein, 409 aa, Roseovarius nubinhibens ISM
MRRVVVTGLGIVSSIGNNAEEVLASLKAGRSGITANEDMKEHGFRSQVAGAVNLDVSEHVDKRTLRFMGPGAAYAHIAMSQAIADAGLEESDIVNPRTGLIAGSGGPSTSAMLAAHQTVLKTGSTKRIGPFAVPKTMCSTISANLSTAFKIKGINYSITSACSTSLHCIGNAAEQIMMGKQDVMFAGGGEELDWTLSCLFDAMGAMSSKFNDTPERASRAFDVDRDGFVISGGGGILVLEELDHARARGAKIYAEVTGFGATSDGADMVAPSGEGGERAMRLALDGLPEGRKVSYINAHGTSTPVGDVGEVEAVRRVFGEGSTPPISSTKSMTGHSQGATGAQEAVYCLLALEHDFIIPSINVDTLDPALKPEEIATARVDNAGLDTVMTNSFGFGGTNGSMLLSKFQG

SEQ ID NO: 27836 - protein, 625 aa, Xanthomonas campestris pv. vesicatoria str. 85-10
MANERPAQQSDIKLLISKGLEQGYLTYAEVNDHLPDDLVDPEQIEDIISMINGMGIDVHEVAPDAETLLLNDGNTGNREVDDTAAEEAAAALTALDTEGGRTTDPVRMYMREMGTVELLTREGEIAIAKRIEEGLSQVQAALGVFPLSTEMLLADYEAHKEGKKRLAEIVVGFNDLIEEADAAAAALAAAGPVAVSDDEAVDEDDDEDGDDEAAEEEAGPTGPDPVEVATRMENLANEYAKFKKAYAKNGAEHKLVVKAREDMAAIFTTLKLPLPLTDALVTQLRGVVNGIKDHERKVLHLATTVARMPRKDFIRSWEGNQTNLEWVEDALKRKQKWSSALRDVKDQIISEQQGSIEMEKANYLTLGEIKEISRAMAYGEAKARKAKKEMVEANLRLVISIAKKYTNRGLQFLDLIQEGNIGLMKAVDKFEYRRGYKFSTYATWWIRQAITRSIADQARTIRIPVHMIETINKLNRISRQMLQQFGREATPEELAKEMDMPEDKIRKVMKIAKEPISMETPIGDDEDSHLGDFIEDTNVESPIDNTTNINLSETVRDVLAGLTPREAKVLRMRFGIDMNTDHTLEEVGKQFDVTRERIRQIEAKALRKLRHPSRSEQLRSFLDID

SEQ ID NO: 27837 - protein, 136 aa, Pyrobaculum aerophilum
  misc_feature (4)..(4): Xaa can be any naturally occurring amino acid
  misc_feature (91)..(91): Xaa can be any naturally occurring amino acid
  misc_feature (93)..(93): Xaa can be any naturally occurring amino acid
  misc_feature (103)..(103): Xaa can be any naturally occurring amino acid
KWVXSTKYVEAGELKEGSYVVIDGEPCRVVEIEKSKTGKHGSAKARIVAVGVFDGGKRTLSLPVDAQVEVPIIEKFTAQILSVSGDVIQLXDXRDYKTIEVPXKYVEEEAKGRLAPGAEVEVWQILDRYKIIRVKG

SEQ ID NO: 27838 - protein, 1576 aa, Gibberella zeae PH-1
MAPQDSFIDDEEDTCPLCIEEFDLSDRNFRPCPCGYQNNMNGLCPACRRPYDEKTIQWKVVTTEEVAEFRANIQKNQKKRATDQRQKELQKREAEKENRKNLIGVRVVQKNLVYITGLAPTVREDELLKTLRKPEFFGQYGNIQKISISNRKSSDGQHQSLGIYVTFEYPEEATRCIQAVHGSQNGDRVLKAQHGTTKYCSAWLKNEKCSNPGCMFLHEQGDEEDSYSRQDLSSMNSIASQRPLPAGGSRSASRQQGPHPTPPPVVSHPMTRSISKEGSESGVDGSALPSSANWARNPQRSRRGSLATSGAASSPAISSAQPVTAEPVPEEAVEDEEEEDEEEEDEEEEEEEPQPEEPEAGPSTSRAMEPESPAPARNVAESGLREILRTLGNCPWPVFSTAGADQYPPLFDPRGGEKRRAMREEEDSRLGGEQEERPEPREPSEGEPETGGSLALGGEPEDRDAPNDNRGFDRRGSTQPPIQRLSTDGLFGPALTGASPFGQSSGNPGSRSMTPQQLFLRSQSGFGDAPPGISNQSNAFQNQNQGQGQGQGHNRQSSRFSFANDNASSTSNVKVSTNPRIMAQQSSMMPNTFQSQGNNQFYGASMPGPPPGLKSTGTPPNMFGQFGGQGFGAPKDNSNELLQSLIGRSRAGNNQSHDAGKPPAPGLLPSLYGGTPSAYQDMSSKQKKKGKKHRHANTSSSGGSGLVDLADPSILQVRMQQHQSQGSGGVGQGLFGGQSQGGHELQAHFGSAHIREINAAQGDDELPSLDEATNSVDALVSDDPILPATTLEGRQSVPPGLGLPPGLAPISRPPSTTGNARLSNVLPALPKITPPGLSQGASTPDQSPRRLMSATPVSEAKKTSKTLATESGLSKEITSQPQPKQTKGINLQDEEFPALDALKSKSRPATPTPKPTPKAKRNAERIVDRMMAKAGASKQSSTTEEPKVQDAKVQGAKTQELKPQETKVPESKPMPFTLPTEKKPFSLKTQIEESSTPTQSATVDGRTPISLNTQVEKNTAPKAGESSATTEKPNTGNAAAFPPLPAPSSAATSSPVTRTGPKTLRVVATPKTEAPPASPALTTASVALPGSRGVSASYRPDTPASSEAVSDNASVVSNSVTHSRASSPPPSRIGSAAVRATTKSQQRKARKDVLKQETKMIAEAPKVEAEVHAPIIGRKKKQKKEKPVKAPQSGASTPAAPEPVKAEPTPEPPQPESAREPEQEPEEKPAKSRTAQKKAAKSKGKAKEVEPEPAAQPPSPAKEATPEAQETTDKPEPNPASVFNEIKNALWTSSVNKLQLFNPIASGSSRTDYSSAHSNANKAEHCKDCSCKCGEIQDDDLAALRAGKPVRKQFHLDGSRMLITPNGDCIRGLNAEEEDAFLELQAAIANTAENPGAFIAPRHQPGSGAFSLIKGRAVPNGRPNIFPTTSQLQSQDPIGKLQREDALSYINQYVLPRLNLGATNMGFPKGASPTKDAAAASLNSLAPYFYGPDAAAGVGIYSPPDGARAMQDFSSAGMSGEERGKNFGMGVGGMPLMSVEDAEGALGTARRETEKLEKGLNQVIRRNRRIVFGGSN

SEQ ID NO: 27839 - protein, 153 aa, Prochlorococcus marinus subsp. marinus str. CCMP1375
MEVRFREIDPFNCWIWLRFSQVPSQGEMNYLDGIFDSWYVIGRLGGFNSGNLQAHQAGADLSWMSYDNDEQSSNLPALMHNLGQLEYQNVWARCWVDLGTSDALAIDVLINTLSQIDGDLLKLEEILIGGVNEDWDVEDHPDAIFPSASKSNG

SEQ ID NO: 27840 - protein, 103 aa, Triticum aestivum
AYLGDSIEQVCTKKQAGTGPEFPGYRRPTRPRGNGANPTAACCSGVRSLAGAARSTADKQAACKCIKSAAGGLNAGKAAGIPSKCGVSVPYAISASVDCSKIR

SEQ ID NO: 27841 - protein, 337 aa, Aspergillus nidulans FGSC A4
MAGLIRLLRTQFIPPTEPSISFAGKTVVLTGATAGLGFEAAIKMLNLGVESLIIGSRNLQRGEATKTELEQRTNRLGVVQVWELEMSSFQSVKDFAARVESLKQLDVALLNAGIWNREFTTSTEGWEETLQVNTLSTSLLALLLLPKLRSCSTDSSPTHLTVVSSQQFVRVQAKSLRTDGPLLEHLNDARRFSGPKQYGVSKLLLEYVLKSVAAQLHNENGTVPVVVNTVSPGLCVSSLGRQYTGLHHRLVVWIMYKLFARTAEQGSRSLVSATYQGLESHGRRWRSDGYLDESTALTTGAEGKQFQAKAWKEIMAVLKEQSNLAVVLDSNTGVSAN

SEQ ID NO: 27842 - protein, 222 aa, Halobacterium sp. NRC-1
MSKHSNAAHAPGVGRAVDAFRDGQPVLVHDAADREGEVDLIYPAPAVTADAVARMRTDAGGLICVALGDAVADAFALPFIADELDHPAADHGHLGYDDRSSFSLTVNHRDTYTGITDDDRALTIAELGQAAADPAAVDFPATFRAPGHVHVLRAAPSLSARQGHTELGIALAGAAGVPPAVVVCEMLDADTGGARSVADAKRYASRHDIPYVEGSDLVAAFQ

SEQ ID NO: 27843 - protein, 453 aa, Erwinia carotovora subsp. atroseptica SCRI1043
MTSKLKPTLGALHLWGIAVGLVISGEYFGWSYGWGVAGTLGFLVTTLFIAAMYTCFIFSFTELTTAIPHAGGPFAYSRLAFGDLGGLIAGMATLIEFVFAPPAISMAIGAYLNVQYPELNPKLAAVGAYLIFMSLNILGVKLAAMFELVVTLLAVMELLVFMGVVAPGFSLSNFVAHGWAGQNEFSPSAISGMFAAIPFAIWFFLAIEGAAMAAEEAKDPKRTIPRAYVSGILTLVVLAIGVMVMAGGVGDWRQLSDLNDPLPQAMKLIVGENSNWMHMLVWIGLFGLIASFHGIILGYSRQFFALARAGYLPPGLAKLSRFHTPHRAILAGGAIGIAAIFCDGINLQGMNLTAAMITMAVFGAIVMYIMSMLSLFRLRRSAPNMARSYRAPGYPIVPAFALVCAIICLIAMLWFNPVVGGLFCTFMLLGYLYFLTTKARREHLLEPLVADAN

SEQ ID NO: 27844 - protein, 607 aa, Bacillus cereus E33L
MCGITGWVNWNKDLSNEHVILKKMANRIQHRGPDAEGFWFSPRAAFAHRRLIVIDPEGGAQPKTFRAGDYTYALTYNGEIYNFRELREHLQKCGHTFETHSDTEVLLHAYLEWKEDCVQHLNGIFAFALWDDQKQRLFLARDHLGVKPLFYTERNDSIIFGSEIKALLAHPSVPAEIDANGINEIFGLGLFRTPGCGVFKHIEEVRAGHSITFTRDKKVVTKYWNLESKVHTDSIEDTSSHILSILQDTVKRQLIADVPLVCMLSGGLDSSGITALAGKEFAAENKTLHTYSVDFVNSAKDFELTFARTGLDAPWVKRVSEHVGTSHHDIIVNAEELANRLFVPLRAKDLPSAGEMETSLYLLFCEMKKDATVALSGESADEVFGGYPWFHQEELLYVDKFPWLTNWKNTSPLLLHEVSNQCNLENYIDTRFQKAILEVPTLEGESKKSAKQRQMFYLFLTRFLPFLLDRKDRMSMAVGFEVRVPFCDYRLVEYLWNVPFNIKSIDNIEKGILRRALKPALPDDVRNRRKSAYPTSQDPHYLQTIRNLTLDMCSNKNNPIFSLINHSTLLAIANQSNKEINNFEARSAIEYMLQVNEWLKTYHIHIA

SEQ ID NO: 27845 - protein, 347 aa, Flaveria linearis
YIGLRQRRASGKEYAELMNEFMSAVKQNYGEKVLIQFEDFANHNAFDLLEKYRTTHLVFNDDIQGTASVVLAGLISALKLVGGSLADHKFLFLGAGEAGTGIAELIALEISKQTNAPLEETRKKIWLVDSKGLIVRSRLDSLQHFKKPWAHDHEPVNKFLDAVKAIKPTVLIGSSGAGQTFTKEVVEAMRSFNEKPIILALSNPTSQSECTAEQAYTWSEGRTIFASGSPFAPVEYNGKVYVSGQSNNAYIFPGFGLGLIISGAIRVHDEMLLAASEALAEQVTQEHFDNGLIYPPFTNIRKISAHIAAKVAAKAYELGLASRLPQPENLVAYAESCMYSPKYRNYR

SEQ ID NO: 27846 - protein, 396 aa, Burkholderia xenovorans LB400
MAKGKFERTKPHVNVGTIGHVDHGKTTLTAAITTVLTQKFGGEAKAYDQIDAAPEEKARGITINTAHVEYETANRHYAHVDCPGHADYVKNMITGAAQMDGAILVCSAADGPMPQTREHILLARQVGVPYIIVFLNKCDMVDDAELLELVEMEVRELLSKYDFPGDETPIIKGSAKLALEGDKGELGEVAIMNLADALDTYIPTPERAVDGAFLMPVEDVFSISGRGTVVTGRVERGVVKVGEEIEIVGIKPTVKTTCTGVEMFRKLLDQGQAGDNVGILLRGTKREDVERGQVLAKPGSINPHTHFTAEVYVLSKDEGGRHTPFFNNYRPQFYFRTTDVTGSIELPKDKEMVMPGDNVSITVKLINPIAMEEGLRFAIREGGRTVGAGVVAKILE

SEQ ID NO: 27847 - protein, 326 aa, Zea mays
MASPIPREWVGLQQFPAATQTKLHELLGKLKEEDVSTLTILVMGKGGVGKSSTVNSIVGERVASVSAFQSEGLRPMMCSRTRAGFTLNIIDTPGLIEGGYINEQAVDIIKRFLLGKTIDVLLYVDRLDAYRMDTLDEQVIRAITNSFGKDIWRRSLVVLTHAQLSPPDGIDYNDFFTRRSEALLRYIHSGAGINKREYGDFPLPIALVENSGRCKTNEHGEKILPDGTLWVPNLMKEITVVISNGSSPIHVDQKLIDGPNPNNRRKLFIPLILAVEYFLVVKGIRRAIHADIANGKVDDWEQRYRDLVGSRDLVEQKGSTSRNRKA

SEQ ID NO: 27848 - protein, 574 aa, Escherichia coli CFT073
MDIQKRVSDMEPKTKKQRSLYIPYAGPVLLEFPLLNKGSAFSMEERRNFNLLGLLPEVVETIEEQAERAWIQYQGFKTEIDKHIYLRNIQDTNETLFYRLVNNHLDEMMPVIYTPTVGAACERFSEIYRRSRGVFISYQNRHNMDDILQNVPNHNIKVIVVTDGERILGLGDQGIGGMGIPIGKLSLYTACGGISPAYTLPVVLDVGTNNQQLLNDPLYMGWRNPRITDDEYYEFVDEFIQAVKQRWPDVLLQFEDFAQKNAMPLLNRYRNEICSFNDDIQGTAAVTVGTLIAASRAAGGQLSEKKIVFLGAGSAGCGIAEMIIAQTQREGLSEEAARQKVFMVDRFGLLTDKMPNLLPFQTKLVQKRENLSDWDTDSDVLSLLDVVRNVKPDILIGVSGQTGLFTEEIIREMHKHCPRPIVMPLSNPTSRVEATPQDIIAWTEGNALVATGSPFNPVVWKDKIYPIAQCNNAFIFPGIGLGVIASGASRITDEMLMSASEMLAQYSPLVLNGEGLVLPELKDIQKVSRAIAFAVGKMAQQQGVAVKTSAEALQQAIDDNFWHAEYRDYRRTSI

SEQ ID NO: 27849 - protein, 487 aa, Hordeum vulgare
  misc_feature (231)..(231): Xaa can be any naturally occurring amino acid
MLPSFSPAVTAAAMAPPPPKPIPGGYGAPVLGPLRDRLDYFWFQGPEEFFRRRAAQHRSTVFRANIPPTFPFFVGINPRVIAIVDTAAFTALFDPELVDKRDCLIGPYNPSDSFTGGTRVGVYLDTEEPEHERTKAFAMDLLRRSSRVWAPEFLEGVDGMLAAIESDLAAGKEGGASFLVPLQRCIFRFLCRSVASADPAAEGLVDRYGLFILDVWLGLQLLPTQKVGAIXQPLEELLLHSFPFPSILAKPGYDLLYRFVAKHGAESVAVGVTNHGMSEKDAINNILFLLGFNAFGGFSVFLPFLILQIGKDAALRARLRDEVRAALDQHDGEVGFASVKGMPLVRSTVYEVLRMNPPVPLQFGRARRDFVLRSHGGEGFSVAGGEMLCGYQPLAMRDPEVFERPEEFVADRFVGAGGEALLRYVYWSNGPETGEPALGNKQCAAKDVVIATACMLVAELFRRYDDFECTGTAFTSLKKRPQPQPSS

SEQ ID NO: 27850 - protein, 513 aa, Ralstonia solanacearum
MSDKLIIFDTTLRDGEQSPGASMTKEEKIRIAKQLERLKVDVIEAGFAASSNGDFEAIRAIAQSVKDSRICSLARANDRDISRAAEALKPAGQFRIHTFIATSALHMEKKLRMTPDQVYEQARLAVRFARQFTDDIEFSPEDGSRSDMDFLCRVLEGVIAEGATTINLPDTVGYAVPEGYAALIRSVRERIPNSDKAIWSVHCHNDLGMAVANSLAAVKLGGARQIECTINGLGERAGNTSLEEVVMAVKTRRDYFNLDVGVDTTQIVPASKLVSQITGFVVQPNKAVVGANAFAHASGIHQDGVLKARDTYEIMRAEDVGWTANKIVLGKLSGRNAFKQRLQELGIELDSEAELNAAFTRFKELADQKAEIFDEDIVAIVSNEAQHAEGEHFRFVSLSQRSETGERPHARIVFVADGKEVTGEAEGNGPVDATLNAIESKVASGAEQLLYSVNAITTGTQAQGEVTVRLSKSGRIVNGVGTDPDIVAASAKAYLAALNKLQDKSSEKLNPQI

SEQ ID NO: 27851 - protein, 333 aa, Francisella tularensis subsp. holarctica
MQQYSSKYNKQAILLVNLGTPDNYDTKSIKRYLKEFLSDPRVIEANPILWKIILNLIILPIRAKKNIHTYKTVWNKQHNKSPLLFYTENLADKLDKKLDNYIVDYAMRYGNPSIESKIKSLQDQGATEIIIFPLYPQYSATTTATVYDEVYRVLSKLRWQPTIKGINPYYDNKFHIQTISQQIKEHLKKLDSTPDTVLFSFHGLPKEYFDKGDPYYCHCYKTYRLVKEELQNEYPNIDFELSFQSRFGPKKWLEPYTTVKLEEFAKQNKSVVIIAPGFSADCLETLEELAISEKENFIKKGGKEFSLIPCLNDSNQHVDMLYNIIDEEICLKK

SEQ ID NO: 27852 - protein, 654 aa, Cryptococcus neoformans var. neoformans JEC21
MTRDFDSLFFTGPIFVDYSFTARHLESFLSSFPPQVSHAMSSASTPTAPYLEDLVRNSLDQTLPWVVQKYGGTSVGKSLDNITKIVGSYIDNGSKVAIVCSARSTQTKSLGTTNLLLQASREALQPALSSSGDGRSGSMSGTATPFYPKRVGSGFFGKDQSTSMVSSVSSLSQLEPQLGRSGSPSPFQSSSSRSPPRSPATPSQDSSVSQEPAFHATVDLIKKGHLEAARASLKEGPLRDELEEEIERDCESLRSFLYAAQIIDEISPRSQDSIVGTGERLACKIVAAALRDRGVDSELVVLDNIVDASMSAASEAISVDAGDQGVAQLGQEFYDQLSFRLGERLRECGQRVPVVTGYFGPVPGSLLAQIGRGYTDLCAALCAVGLKASELQVWKEVDGIFTADPRKVPSARLVPIITPDEAAELTYYGSEVIHPFTMEQVIRARIPIRIKNVENPSGAGTVIYPDLGFPRGLDTEPPKAERIVEGVDERMPTAVTIKDEIIVLNIHSNRKTLSHGFLARIFGTLDRAGVVVDLISTSEVHVSMAMQDFLNRKRLERLVKDLEKIGEVTVSKDMAILSLVGRNMRNAIGSAGLMFASLARAMINIEMISQGASEINISCVIENKDAIKALNVIHESCLSYPRSPATEMAGLQLQ

SEQ ID NO: 27853 - protein, 896 aa, Desulfitobacterium hafniense Y51
MDSRLHLVDNLPALLWSSDRAGNYDYVNQAWLQFTGLTFAEVRGEGWLSCVHPEDSPGVMNVLEHSRRHKAPFEAEYRLRRYDGEYRHCLSRGQPYDDPKGELAGYTGVIIDITERKAAEIMTRENAEKFREIFNRITDCVFIHEVKDDGQIGKIQEVNDMACELIGLTRAEIIDLSREVIKVKSPLTLANEFTQKLLSKNYLVFEGMLLTHQGKEIPVEVKAHYHVLNGRRMLLSIARDISNQKRIHKILLASHNKYRQLFDNITDAVFVYELQKDGYPGLLIEINEKARRLMGYHEETFMFSAGPCIRPSSPQLTLDDVWQMLEETHSASFEGICTNLEGEDIPVEVNCHTFPLNGSKVMLTLLRDITERKQIEQERKRAEAEFQQAKEKAEAANRAKSEFLANMSHEIRTPINGIIGMIDLTLLTSLEKTQRENLKIAKNCAYSLFKIINDILDFSKIEAGKLTVEEIEFNLKEVIEQIIKTHSPEAERKGLDLAYTLSANLPDYYKGDPERIKQVLNNLLSNALKFTERGEVSLAVKRLQGDEDVSDLKFTVMDTGIGIAEEDQLHLFEEFNQVDGSITRKYGGTGLGLAISRKLVEMMGGRIWVESEKGKGSSFGVVLRLKHGDKDTLRFKSTQNNDQSREGSTARSYRILLAEDHIVNSIVITEMLKIQGHRVDIAMDGEEALALYHQNPYDVILMDIQLPRLDGIEVTKRIRASEGAQSHTPIIALTAYALQGDREGFLQAGMDEYIPKPVMMEELIMVLDRVVTKFASGQGQAQQEEVVITDEGVYLKDMPSSPESVNKDLELSEMAYDFKKLRIALHNGDSVALEHIAHRIKERCSVIGAHKLKALAFKIELAARRGNPGEAKDYLHDLDSEYNQLSGGMLNENTRS

SEQ ID NO: 27854 - protein, 290 aa, Geobacter sulfurreducens PCA
MNLLDGKKCAESLVAEIARKVAGYTESGLRTPHMTIILVGEHAPSESYVKSKIATSGLAGFESTLLRFPETIRESELLAKIKEVNEDPTTDGLIVQLPLPKHINQQHVINAIAPEKDIDGFHPANFGRMTLGQKAFRPATAYGICKLLQFYEVPVKAKHCVVIGRSNIVGKPISIMLSNDFDIGNATVTLTHIETPRELLLDETRRADIVIVAVGIPGFVTADMVKDGVVLIDVGINRLESGKIVGDVDFENVAQKCSWITPVPGGVGRMTVAALMINTLMAYQNNFNLA

SEQ ID NO: 27855 - protein, 391 aa, Haloarcula marismortui ATCC 43049
MRVVAKFGGTSLGSGDRINRAADSIAAAVQQGHEVAVVASAMGNTTDELLEEINYDADSADRAEIVSMGERTSVRMLKGALAARGIEAVFLEPGSEDWPIITDEYGEVDVEETQKRAHALAGQLKDVVPVITGFLAQDYQGNVTTLVRGGSDTSAVMMGDYMDADEVVIVTDVEGVMTGDPRVVEGARNVGKISVDELRSLSFRGAEVVAPSALSYKSEDLGVRVVHYQHGDLLSGGTSIEGEFQNLIDLQEQPIACVTVAGRAIRNSPGILADLSGAIADEDINIEANSSGMDSLTFYVDEDDAEEAEALLHARIVDDETLSSVTVEDEIAVIRVTGGDPSQSALAHQVVAPLADAHIHLYDVITSATSVSVFVPWEDREQALSLVQDVF

SEQ ID NO: 27856 - protein, 263 aa, Pseudomonas putida
MTFQHILFSIEDGVAFLSLNRPEQLNSFNAAMHLEVREALKQVRQSSDARVLLLTAEGRGFCAGQDLSDRNVAPDAEVPDLGESIDKFYNPLVRTLRDLPLPVICAVNGVAAGAGANIPLACDLVLAGRSASFIQAFCKIGLVPDSGGTWLLPRLVGMARAKALAMLGERLGAEQAQQWGLIHRVVDDAALRDEALTLARQLASQPTYGLALIKRSLNASFDNGFDEQLELERDLQRLAGRSEDYREGVSAFMNKRTPAFKGR

SEQ ID NO: 27857 - protein, 632 aa, Anabaena variabilis ATCC 29413
MTVSLPSPTSPSQTEKHTQSVNSPSVVVTPQRVTGGFALLDSLLRHGVEYIFGYPGGAILPIYDDLYKVEATGSLKHILVRHEQGAAHAADGYARATGKVGVCFGTSGPGATNLVTGIATAYMDSIPMVIVTGQVPRKMIGTDAFQETDIYGITLPIVKHSYVVRDPQDMARIVAEAFHIASTGRPGPVLIDVPKDVAFEQFDYVPVEPGSIKLRGYRPTVKGNPRQINAAIELIRESRRPLLYVGGGAIASGAHAEIQELAELFNIPVTTTLMGIGAFDEHHPLSLGMLGMHGTAYANFAVTDCDLLICVGARFDDRVTGKLDEFASRAKVIHIDIDPAEVGKNRIPEVPIVGDVRKVLLDLLRRCKQTGAKNTPNQNQEWLNLINRWREDYPLVIPQHPDSIPPQEVIVEVGSQAPHAFYTTDVGQHQMWAAQFLKNGPRRWISSAGLGTMGFGLPAAIGAKVAFPDEQVICISGDASFQMCLQELGTASQYGINVKTVILNNGWQGMVRQWQQAFHGERYSCSNMEVGMPDVELLAKAYGIKGIVVTQREQLKDAIAQMLAYDGPVILDVRVTKDENCYPMVAPGKSNAQMIGLPKQPQRTSVEPVYCSHCGTSNLPNHNFCSECGTKL

SEQ ID NO: 27858 - protein, 395 aa, Taxeobacter ocellatus
MAKETFDRSKPHVNIGTIGHVDHGKTTLTAAITTVLANKGLAAKRDFSSIDNAPEEKERGITINTAHVEYSTANRHYAHVDCPGHADYVKNMVTGAAQMDGAILVVAATDGPMPQTREHILLARQVGVPQLVVFMNKVDMVDDPELLELVEMEIRELLSFYDFDGDNIPVVQGSALGGLNGDAKWVGTIEQLMDSVDNWIPIPPRLTDQPFLMPVEDVFSITGRGTVATGRIERGVINSGEPVEILGMGAENLKSTVTGVEMFRKILDRGEAGDNVGLLLRGIEKEAIRRGMVICKPGSVTPHKKFKAEVYVLSKEEGGRHTPFFNNYRPQFYFRTTDVTGIISLAEGVEMVMPGDNVTISVELINAVAMEKGLRFAIREGGRTVGAGQVTEILD

SEQ ID NO: 27859 - protein, 119 aa, Zea mays
MKEAALNSRKTPWEAAALRAEALLASSESAGITCGQVGSALAPCIPYATGRASGLPGSGCSGAKSLNRAVRTSADRQAASTWLKSLANSDKSVNRGTNSTIPGKSGGSVGDRNSTGTDC

SEQ ID NO: 27860 - protein, 112 aa, Mycobacterium avium subsp. paratuberculosis K-10
MKLITAIVKPFTLDDVKTSLEDAGVLGMTVSEIQGYGRQKGHTEVYRGAEYSVDFVPKVRIEVVVDDSIVDKVVDSIVRAARTGKIGDGKVWVSPVETIVRVRTGERGTDAL

SEQ ID NO: 27861 - protein, 140 aa, Spinacia oleracea
MATSVMSSLSLKPSSFGVDTKSAVKGLPSLSRSSASFTVRASGVKKIKVDKPLGIGGGMKLRDGVDSSGRKPTGKGVYQFVDKYGANVDGYSPIYNEEEWAPTGDVYAGGTTGLLIWAVTLAGLLAGGALLVYNTSALAQ

SEQ ID NO: 27862 - protein, 974 aa, Anabaena variabilis ATCC 29413
MVSYASIRQSSDEADSTVDASQKLDARKQDLNNFIQRHIGPSSADIQHMLDVLGFSSLDDLIEKTVPSTIRLHKKLQLPTAQTEYAALAKLKQIASKNQVFRSYIGMGYYDTITPPVIGRNILENPGWYTAYTPYQPEIAQGRLEALLNFQTMIIDLTGLEIANASLLDEATAAAEAMSMSYGVSKNKANAYFVSHDCHPQTIDVLQTRAKPLGIEIIIGDHQTFDFQKPIFGAVLQYPASDGTIYDYRAFIETAHAQGALVTVAADPLSLTLLTPPGEFGADIAVGSTQRFGIPLGFGGPHAAYFATKEEYKRQVPGRIVGVSKDVNGKTALRLALQTREQHIRREKATSNICTAQVLLAVMASMYAVYHGPEGLKQIAENIHQLTVTLAEGLKRLGYKISSEHFFDTLRVELGTNNLETILAGCQARNINLRIFDETAVGISLDETTTPEDLIDLWQIFAGEDNLPFTPEELISSLNLPLRSSSYLTHPVFNRYHSETELLRYLHRLETKDLSLTTSMIPLGSCTMKLNATSEMIPVTWEEFGRIHPFAPLTQTRGYQILFQQLEAWLAEITGFAGVALQPNAGSQGEYTGLLVIRQYHESRGETHRNVCLIPTSAHGTNPASAVMCGMKVVAVACDAGGNIDIDDLKAKAEKHSHELAALMVTYPSTHGVFEAGIQEICAVIHSHGGQVYMDGANMNAQVGICRPGDIGADVCHLNLHKTFCIPHGGGGPGMGPIGVASHLVRFLPGHPVLGSGKNPQNIGAVAAAPWGSASILVISWMYIAMMGADGLTQATKVAILNANYIAKRLETYYPVLYKGQNGLVAHECILDLRALKKSANIEIDDIAKRLIDYGFHAPTVSWPVTGTIMVEPTESESQAELDRFCDALIAIRQEIAAIEAGKMDTHNNLLKNAPHTIESLIVGEWLHPYSREQAAYPVSWTREYKFWPSVGRIDAAFGDRNFVCSCLPMEAYN

SEQ ID NO: 27863 - protein, 364 aa, Burkholderia plantarii
MPKSKRHEPQAESEKISRATQASMGRAGASKDDDDDTAESEREYEARESDAEESDGEREGRGGSESAPEPDDFRAVLQAELTADTIQHYLNRISVKPLLTVEEEQRYSRLAKAGEFEARQVMIERNLRLVVSIAKGYLNRGVPLLDLIEEGNLGLMHAIEKFDPTRGFRFSTYATWWIRQSIERAIMNQARTVRLPVHVIRELNQVLRAKRHLEKNSMSTGEAAERREAGIDDIAYLTGKTAEEVTDILALNEHTASLDAPLDLDPASSLLDLLPDDQSQSPDAEVQHRELETLTRAWLSRLSDKHRHVIERRFGLNHIEPATLEELADEMGLTRERVRQIQQEALVRLKRFFASNGVRKDAVL

SEQ ID NO: 27864 - protein, 325 aa, Mycobacterium sp. KMS
MIVTVTPNPSIDRTVALPAPLTRGAVQRVTSVTSEPGGKGVNVARALTLARLDAVALLPAADGDPMVTALRAIGVPFRCVPIAEPVRTNLAITESDGTTTKLNERGAALDAAARDALTRGIIDAAEQASWVVLSGSLPPGLPDDWYAEVVARLVPLRCRVAVDTSERPLAALAAAFDHAAPDVIKPNAEELAGLVGASAEELESAAAQGDPEPVAAAARQLVDRGVGAVLATLGAAGAVLVDRTGAWMATPPPIVPRSTVGAGDASLAGYVRAAVAGAEPPRRLRMAVAYGSAAAALPGSALPSPAQLDLDGVAVSTIAPTPASS

SEQ ID NO: 27865 - protein, 543 aa, Blastopirellula marina DSM 3645
MTAAPSLTQTAAWQALQSHYDQLADVQLRDLFANEADRGEKFSLDAVGIYLDYSKNRITAETVSLLIALAEASGLRQRIDAMFRGDKINVTEDRAVLHTALRAPQGATIDVDGENVVPAVHAVLDKMAAFAAKIRGGDWRGQTGKPIKNIINVGIGGSDLGPAMAYDALKHYSDRNLTFRFVSNIDGADMAEAIHDLDPAETLFIIASKTFTTQETLTNAHTARLWCLETLKDEAAIAKHFVALSTNEKEVAKFGIDTANMFEFWDWVGGRYSFDSAIGLSLMIAVGGDHFREMLAGFHEMDEHFRTAPLDQNIPVLMALLNLWYNNFFGAQTQAVLPYDHYLGKFSMYLQQLDMESNGKRVTLDGSPVDYQTGPIVWGTPGTNGQHAYYQLIHQGTKLIPCDFIGFCQSLNPLGDHHDKLMANFFAQPEALAFGKTAAEVKADGVADFQISHRTFPGNRPTNSLLIDKLTPAALGKLIALYEHKVFTLGTIWRVNSFDQWGVELGKVLANRIVPELTSKSEPALEHDSSTNALIARYRKLKR

SEQ ID NO: 27866 - protein, 515 aa, Shewanella sp. ANA-3
MTTPADAPKWPRQIPYIIASEACERFSFYGMRNILTPFLMTALLLSIPEDLRGAVAKDVFHSFVIGVYFFPLLGGWIADRFFGKYNTILWLSLLYCVGHAFLAIFEHSVQGFYTGLFLIALGSGGIKPLVSSFMGDQFDQSNKSLAQKAFDMFYFTINFGSFFASLSMPLLLKNFGAAVAFGIPGVLMFIATVFFWLGRKRYVHMPPEPKDPHGFLPVIRSALLTKAEGKANIGLVLALIGGVSAAYALVNIPTLGIVAGLCSAMVLLMGFVGFGASLQLERARGVHPDAAVDGVRSVLRILVLFALVTPFWSLFDQKASTWILQANDMVKPSWFEPAMMQALNPLLVMLLIPFNNFVLYPAIERMGVKLTALRKMGAGIAITGLSWIVVGTIQLMMDGGSALSIFWQILPYALLTFGEVLVSATGLEFAYSQAPKAMKGTIMSFWTLSVTVGNLWVLLANVSVKSPAVTEQIVQTGMSVTAFQMFFFAGFAILAAAIFALYARSYQMQDHYRQV

SEQ ID NO: 27867 - protein, 565 aa, Frankia sp. EAN1pec
MITPQQPSGMPIEKYRPFPAVALPDRTWPNATITEAPRWCSVDLRDGNQALIDPMTPSRKMQLFELLVAMGYKEIEVGFPAASQTDFDFVRQLIEDDLIPDDVTIQVLTQAREELIERTVTSLVGSDRALIHLYNSTSTLQRRVVFGLDRAGVTDIAVQGARWCAQYAEKLLEGTDVRWQYSPESFTGTELDYALEVCEAVMDVWAPTPDNPVVLNLPATVEMSTPNVYADQIEWMSRNLTRRDAVVLSLHPHNDRGCAVAAAELGVMAGADRVEGCLFGNGERTGNVCLVTLGMNLFSQGIDPMIDLSDIDGVRRTVEYCNQLPVHPRHPYGGDLVYTAFSGSHQDAIKKGFEAMERTGQTLWEVPYLPIDPKDVGRSYEAVIRVNSQSGKGGVAYLMKSEYALDLPRRLQIEFSGVVQKHTDDAGGEVTAGQLWEIFTREYRPEGGDPAASLELLGSRTTAASGARDEVTVSVRLDGTETVITGSGNGPIDAFVAALSERGVPVRVLDYNEHALGSGADARAAAYLEVAVGETVLWGVGIDPNIVTASLRAVVSAVNRASRES

SEQ ID NO: 27868 - protein, 285 aa, Photobacterium sp. SKA34
MTAQIIDGKLISQTVRQEVAARVKARKDAGLRAPGLAVVLVGQDPASQIYVGSKRKACEEVGFVSKSFDLPPTASEDELLLLIDELNLDPTIDGILVQLPLPAGMDNTRILERIDPEKDVDGFHPYNVGRLSQRIPKLRSCTPKGIITLLDRYNIPVRGKEAIIVGASNIVGRPMTLELLLAGATTTTCHRFTKDLESHVRRADILVVAVGKPNFIPGAWIKEGATVIDVGINRLDNGKLCGDVEFDIASQKAKHITPVPGGVGPMTVATLIENTMLACEQYHGE

SEQ ID NO: 27869 - protein, 161 aa, Idiomarina loihiensis L2TR
MEYNTSELCDLYPDMVDVVEPMFESYGGRSSFGGSLVIIKCHEDKGLIEETIAADGGGKILLIDGGGSSRRALVDAAIAEQAMDNDWEGIVCYGAVREVDALEELDIGILGVASIPVGAISEGVGELNVPVNFGGVTFLPEDHLYIDTTGVILSPEPLDIE

SEQ ID NO: 27870 - protein, 598 aa, Frankia sp. EAN1pec
MTRETRQITGAQSLVHSLEAVGADVVFGIPGGAILPAYDPLFDSTRVRHVLVRHEQGAGHAAEGYAQATGRVGVCMATSGPGATNLVTPIADAYMDSVPIVAITGQVPSAAIGTDAFQEADICGITLPITKHNFLVQSADDIPRTIAEAFHIASTGRPGPVLVDLPKDILQAVTSVLPHEVWPPTLDLPGYRPVTRPHAKQVREAAKMISAARRPVLYVGGGVLKARAAAELRVLAELTGIPVVTTLMARGAFPDSHPQHLGMPGMHGSVAAVTAMQKADLLITLGARFDDRVTGKLSSFAPGAAVIHADIDPAEIGKNRIADVPIVGDCREVIVDLTAALRTEERPDLEGWWRSLDRWRATYPLGYDQPADGSLAPQQVIERIGRIAGPETVFAAGVGQHQMWAAQFISYEHPYTWLNSGGAGTMGYAVPAAMGAKVGRPEATVWAIDGDGCFQMTNQELATCALEGIPIKVAVINNGSLGMVRQWQTLFYDKRYSNTDLGTHPVSARTGVTRVPDFVRLAEALGCVGLRCESPADVDATIEKAMSIDDAPVVVDFVVHPDAMVWPMVAAGSSNDEIRVARDIAPDFDYSGDAEVNL

SEQ ID NO: 27871 - protein, 677 aa, Lycopersicon esculentum
MVESSVGGVVPAVKGEVMRRMGDKEEGGSVTLRDEEVGTVTEWELDRELLCPICMQIIKDAFLTACGHSFCYMCIVTHLHNKSDCPCCSHYLTTSQLYPNFLLDKLLKKTSARQISKTASPVEQFRHSLEQGSEVSIKELDALLLMLSEKKRKLEQEEAERNMQILLDFLQMLRKQKVDELNEVQHDLQYIKEDLNSVERHRIDLYRARDRYSMKLRMLADDPIGKKPWSSSTDRNFGGLFSTSQNAPGGLPTGNLTFKKVDSKAQISSPGPQRKDTSISELNSQHMSQSGLAVVRKKRVNAQFNDLQECYLQKRRQLANKSRVKEEKDADVVQREGYSEGLADFQSVLSTFTRYSRLRVIAELRHGDLFHSANIVSSIEFDRDDELFATAGVSRRIKVFDFSSVVNEPADAHCPVVEMSTRSKLSCLSWNKYTKNHIASSDYDGIVTVWDVTTRQSVMEYEEHEKRAWSVDFSRTEPSMLVSGSDDCKVKVWCTKQEASVLNIDMKANICCVKYNPGSSVHIAVGSADHHIHYYDLRNTSQPVHIFSGHRKAVSYVKFLSNNELASASTDSTLRLWDVKDNLPVRTLRGHTNEKNFVGLSVNNEFLSCGSETNEVFVYHKAISKPVTWHRFGSPDIDEADEDAGSYFISAVCWKSDSPTMLAANSQGTIKVLVLAA

SEQ ID NO: 27872 - protein, 333 aa, Rhodobacter sphaeroides 2.4.1
MTVKVAINGFGRIGRNVLRAIIESGRTDIEVVAINDLGPVETNAHLLRFDSVHGRFPATVTTTEKTIDVGRGPMDVTAIRNPAELPWGHVDIVLECTGIFTDKEKAKVHLESGAKRVLVSAPSTGADKTIVYGVNHETLTKDDLIVSNASCTTNCLSPVAKVLNDTIGITKGFMTTIHSYTGDQPTLDTMHKDLYRARAAALSMIPTSTGAAKAVGLVLPELKGKLDGVAIRVPTPNVSVVDLVFEASRATSVEEVNAAIREAADGKLKGILGYTDQPNVSMDFNHDPHSSIFHLDQTKVMEGNMVRILTWYDNEWGFSNRMADTAVAMGKLI

SEQ ID NO: 27873 - protein, 573 aa, Streptomyces avermitilis MA-4680
MANRQQPTSMPIHKYRPYEQVDIADRTWPDNRVTVAPRWLSTDLRDGNQALIDPMSPARKREMFDLLVKMGYKEIEVGFPASGQTDFDFVRSIIEDETAIPDDVTISVLTQAREDLIERTVESLVGAKRATVHLYNATAPVFRRVVFRGSKDQIKQIAVDGTRLVVEYAEKLLDERTTFGYQYSPEIFTDTELDFALEVCEAVMDVWQPGPDREIILNLPATVERSTPSTHADRFEWMSRNLSRREYVCLSVHPHNDRGTAVAAAELALMAGADRIEGCLFGQGERTGNVDLVTLGMNLFSQGVDPQIDFSNIDEVRRTAEYCNQMEVHARHPYVGDLVYTSFSGSHQDAIKKGFDAMEADAAAKGVTVDDIEWAVPYLPIDPKDVGRSYEAVIRVNSQSGKGGIAYVLKNDHKLDLPRRMQIEFSKIIQTKTDAEGGEVTPKDIWAVFQDEYLPNPRNPWGRIQVKTGQTTTDKDGVDTLTVEASVDGVDTVLTGSGNGPISAFFDALQSVGIDVRLLDYTEHTMSEGASAQAASYIECAIDGQVLWGIGIDANTTRASLKAVVSAVNRAAR

SEQ ID NO: 27874 - protein, 694 aa, Arabidopsis thaliana
MGYGGPHAAFLATSQEYKRMMPGRIIGISVDSSGKQALRMAMQTREQHIRRDKATSNICTAQALLANMAAMYAVYHGPAGLKSIAQRVHGLAGIFSLGLNKLGVAEVQELPFFDTVKIKCSDAHAIADAASKSEINLRVVDSTTITASFDETTTLDDVDKLFKVFASGKPVPFTAESLAPEVQNSIPSSLTRESPYLTHPIFNMYHTEHELLRYIHKLQSKDLSLCHSMIPLGSCTMKLNATTEMMPVTWPSFTDIHPFAPVEQAQGYQEMFENLGDLLCTITGFDSFSLQPNAGAAGEYAGLMVIRAYHMSRGDHHRNVCIIPVSAHGTNPASAAMCGMKIITVGTDAKGNINIEEVRKAAEANKDNLAALMVTYPSTHGVYEEGIDEICNIIHENGGQVYMDGANMNAQVGLTSPGFIGADVCHLNLHKTFCIPHGGGGPGMGPIGVKNHLAPFLPSHPVIPTGGIPQPEKTAPLGAISAAPWGSALILPISYTYIAMMGSGGLTDASKIAILNANYMAKCLEKHYPVLFRGVNGTVAHEFIIDLRGFKNTAGIEPEDVAKRLMDYGFHGPTMSWPVPGTLMIEPTESESKAELDRFCDALISIREEIAQIEKGNADVQNNVLKGAPHPPSLLMADTWKKPYSREYAAFPAPWLRSSKFWPTTGRVDNVYGDRKLVCTLLPEEEQVAAAVSA

SEQ ID NO: 27875 - protein, 285 aa, Zea mays
MAPAPASLSAPNALSLPAPARVTSGRWNRSLSVSAAARSVSRVVSVASAAAVTAQRRLVAAAAATEMAPAASGEDGSKPFVEEMRAVAMKLHTKDQAREGEKEPQAPPVAKWEPSVEGYLRFLVDSKLVFQTLEAIVERSAVPWYAEFRNTGLERSEALKKDLEWFRQQGHTIPEPSPPGTTYATLLEELSEKDPQAFICHFYNVYFAHTAGGRMIGKKVSEKILDKKELEFYKWEGNLSQLLQNVRNKLNQVASSWSREEKDHCLEETEKSFAYSGGLLRHIFT

SEQ ID NO: 27876 - protein, 476 aa, Salinibacter ruber DSM 13855
MREGGYVSTGQGVQFTHHGLTHHSSPQSTAFLFRSQYFRMTETVPAPPRDLPAAVDFQEASDGIECYRLVDNDLRILLLPQDGAPVATSMVTYHVGSRNERTGHTGATHMLEHLMFKGTERYHKRKGTSIFETLQSVGAKVNASTWLDRTNYYEMLPTEHLPLALDIEADRMRGALIDAEDVEDERTVILNERDRNQNDPVSRLFDEVWGAAFVAHPYHHPTIGWKSDIERITPDGLREYYDTFYWPNNATLSIVGRFDRGETLAEVAEHFGDIGPAPRDIPQVTTEEPEQSGPRRVTVRQDGQLGAVLMGFKSPPALEADSDVLDVLARILASGKGSRLFQRCTDQGLTSDVFGINFRLRDPGLFSVFAYLAPDQDHQTVEDAIHETIADVQENGVTQEELDRARSQLRAQIAFDRDGPMRVASQLNESLAAGDWKLYTQYLDRLDDVTAEDVQRVAQTYLTRDGVTIGRYVPTS

SEQ ID NO: 27877 - protein, 472 aa, Allium sativum
MSTSNGSTENIQKPLRKIPDITGTPILTAIKDRLDFFYNQGQYEYFQSRVKKNNSTILRMNMIPGPFASNPKIVALCDAASFPTLFDPSKVSKVNSLTGNYMPALSFTGGYRVCAYLDPSEPTHTKIKQVFFNAQAAKKDTFIPTFVSTFNSMFDKMDAEVESKKKAEFTKFNEAAVFEFVGLALVGPKPAREVFDSAKKSVFFQFHPFITAGLPALVEELAFHMFPFPSFVAKSSYKILYEYFSTGGSWILDNAEEIGLSREEAIHHLIFTWAINAYLGIRTCLMRLFKWIVASGPDLQEKLAREVRSVVRSEEGKITFAGIEKMELVKSVAYESFRFDPPVQVQYGTAKSDLIIESHDGKYQVKKGEMLCGFQPMATRDPKVFDRADEFVPDRFMGDGKKLVKHVLWANGYGTDAPKADDKICAGKDLGVLVGRLLIAVMFLRYDKIGGVVGKTMEEVDVIVNELTKVAV

SEQ ID NO: 27878 - protein, 499 aa, Rhodobacter sphaeroides 2.4.1
MEELSHWIDGKRVKGTSGRFADVFNPATGEVQARVPLASKAELDAAVASAAAAQPKWAATNPQRRARVMMEVVRLLNRDMDKLAEALSREHGKTIPDAKGDVQRGLEVIEFCIGAPHLLKGEFTDSAGPGIDMYSMRQPLGVAAGITPFNFPAMIPLWKMGPALAAGNAFILKPSERDPSVPLMLAEIFQEAGLPDGVLQVVNGDKESVDAILDNPTIAAVGFVGSTPIAEYIYSRGCANGKRVQCFGGAKNHMIIMPDADLDQAADALVGAGYGAAGERCMAISVAVPVGDETADALIERLIPRIEKLKVGPYTAGNDVDYGPVVTAAARENILRLVQSGVDQGAKLVVDGRNFSLQGYEKGFFVGPHLFDHVRPDMDIYRKEIFGPVLSTVRAASYEEALSLAMDHEYGNGTAIYTRDGDAARDFAARVNVGMIGINVPIPVPLAYHTFGGWKKSAFGDLNQHGPDSFRFYTRTKTITSRWPSGIKEGSAFNFKAMD

SEQ ID NO: 27879 - protein, 118 aa, Aspergillus nidulans FGSC A4
MAKLFIGGLAWHTTDDVLREGFSRYGTIEEAVVVKDRDTNRSRGFGFVRFASEPEADAAMGAMNNQEFDGRIIRVDKASERPAARNGGFQGRGGYNSPADGGYRGGGAGGWRNQAPGP

SEQ ID NO: 27880 - protein, 187 aa, Zea mays
  misc_feature (17)..(18): Xaa can be any naturally occurring amino acid
  misc_feature (20)..(20): Xaa can be any naturally occurring amino acid
  misc_feature (22)..(23): Xaa can be any naturally occurring amino acid
  misc_feature (25)..(25): Xaa can be any naturally occurring amino acid
  misc_feature (32)..(32): Xaa can be any naturally occurring amino acid
  misc_feature (36)..(36): Xaa can be any naturally occurring amino acid
  misc_feature (49)..(49): Xaa can be any naturally occurring amino acid
  misc_feature (53)..(53): Xaa can be any naturally occurring amino acid
  misc_feature (57)..(58): Xaa can be any naturally occurring amino acid
  misc_feature (75)..(75): Xaa can be any naturally occurring amino acid
  misc_feature (85)..(85): Xaa can be any naturally occurring amino acid
MYLARRIVHKENELFVXXVXMXXFXASLLGEXITGXGILAQLNLETGIXIYEXEPLXXFFILFTLLGAIGALGDXGRFVDEEVTXLDKAVIQPGKGFRGALGLSEGGPLFGFTKSNELFVGRMAQLGVAFSIIGEIITGKGALAQLNIETGVPINEIEPLVIFNVLFFFIAAINPGNGRFIIGEEEE

SEQ ID NO: 27881 - protein, 380 aa, Carboxydothermus hydrogenoformans Z-2901
MKLKDKPIYIVDTTLRDGEQTAGVVFANKEKIRIAQMLDELGVDQIEAGIPTMGGDEKEAITAICKLGLKASIMGWNRPVIKDIEESLRCGVDAVAISISTSDIHIEHKLRASREWVIENMVKACEFAKKEGLYVSVNAEDASRSDMEFLVQFGLAAKQAGADRLRYCDTVGILDPFTTYERVKELRERVGIEIEMHTHNDFGMATANALAGVKAGAKFVGVTVIGLGERAGNAALEEVVMALKHIYGIDLGFKTELFREVALYVSKASGRELPAWKAIVGSNMFAHESGIHADGALKNPKTYEAFQPEEVGLERQIVIGKHSGSAALKAKFAEYGIHLTDEQAAELLPHVRAHAVELKRSLFDKELVLIYEEHFGKRGM

SEQ ID NO: 27882 - protein, 337 aa, Pseudomonas putida KT2440
MSEPVQFPLAAVVGADDLKLALCLTAIDPRIGGVLIEGPRGMAKSTLARGLADLLGEGPFVTLPLGASEERLVGTLDLDAALGQGKAQFSPGVLAQADGGVLYVDEVNLLPDTLVDLLLDVAASGTNRIERDGISHRHSARFVLIGTMNPEEGELRPQLLDRFGLNVALEGLPEPEARQQIIRRRLAFDNDPQAFCAHWAQAQAQLRERCHAARQALADIALDDQALAWITERCYAAGVDGLRADLVWLRAARAHCAWRGAAAIEEVDVEAVAEFALRHRRRMTPQASPPSAPQPPDQQPGAGNPGERGGQGDWGALPAQPVASGARREVPNWAKKP

SEQ ID NO: 27883 - protein, 183 aa, Xanthomonas campestris pv. vesicatoria str. 85-10
MSQTLYDIPVTRIDGQPTTLADYRGKVLLVVNVASKCGLTPQYEGLEALYRDKRMQGLEVLGFPANDFNAQEPGSEAEIAQFCQLTYDVTFPMFAKIAVTGDQAHPLYRALTSTHPHTTGDGPMREKLAGYGIAPNPAPGVVWNFEKFLIGRDGKIVDRFAPDIPADDARLRAAVDAALATHA

SEQ ID NO: 27884 - protein, 1301 aa, Magnetococcus sp. MC-1
MAFAQSDLKPEARPFSLDMCQKGWLCSALLMSLWSLLVLSSLLWNLSVQTAHQQQQLLERNRHTFQLIQFTRQWNAQHGGVYARVTAETQPNPFLKNLPQRDLTSTDGVALTLINPAYMTRQIAELARHSGMLFHITSLKPLRPANRPDNWEAEALKRFETNPSERLERLGHGDSALYRYMAPLYVEQSCLKCHATQGYQLGDIRGGISITVSAKPLDAAQVDVTQKLVASHAGIWLLMSLILGLVWRRHNRYVETIKAHEQQLETRVQDRTDALRQANDRLERDRSQLQQIIDGVSEPLMVIRTDYRIVLMNEAARSYNPELATKQANCYCHLMTHQRNTPCEGHDHPCPLEQVVRTQQPFRTVHRHINRDGLARFVSLQASPLFDQNGALWAIIESSRDITEYMSMQEQLKQESDTSNAIIDALSGLFILLDADGCLVRWNSNLAKMTGLDEQSFAGRSILDFVAPTSRNAFIEAMEKVLTEGLATQESYLQTMGRQQIPFAFQINRIEIEGKLYLSGMGVDISEQLSMRHALQESQDILDQVQKVAQLGGIVWKPASGFMQWSAQVYPMLGLQPGQRSLSLRTLLHGLSRHARKGLLQRLGELRDTRHHVIERELHLLGFDGIKRYLHLRGQHRQSHDQEHPQILITLQDLTPHKIIQHQLQHQLTFQQTLLNTIPIPVFYKDRQLRYQIANEAFSKLLNQPLETLIGRTVYETSPLEMAKIYDIADHNLLDHPDRVQQYQATIQPQSDNPHHVVFYKAVVPGEQGQHAGIVGAILDVTEQTRAQKALEESNRRFETVLGSLESYLFVTNIESNMVLFTNHAARLRFGETVGQPCWKTFHLGCKEGGCQSCIQGGASIPHHGHHWEYHNKESGEWYTIRIRLIPWTDGHYVRLLVANDITVLKQAQEASRQAMEQAERANRAKSEFLATMSHEIRTPMNVVVGMSDILLESLPNPQAQKHIQLIQKAGTTLLDLINDILDLSKIEAGQLELEHAVFNPILLIEDTIAIFQMQAKLKGLTLTSSMTGHIPHALMGDRARLRQILVNLLGNAIKFTEKGSVEVQAGYANQQFWYAVVDSGVGIGSDSLLRIFDKFTQADSGVARRFGGSGLGLAICKNLMELMGGTIETQSTLGQGSRFYCAIPAPIADHLLPSDVVTKEPITAALPALTILLVDDSEDNRILVRTYLKQSQHKLDEAVDGAQAVKMAIEKRYHLIFMDIQMPIMDGYRATAEIRAHEQQQGLSPTPILALTAHALSADVEKSLAAGCNEHLTKPIRKKDLLRVVNHFAAQLETDENSPV

SEQ ID NO: 27885 - protein, 414 aa, Sulfolobus tokodaii str. 7
MAISLAKKYQGKLEIMPKIPIRSYEDFALIYTPGVAELVKEIQKDENQSFELTSRWNTIAILTDGSRVLGLGNVGPIASLPVMEGKALLFKFLGGVDAFPLPIKVSDKEEFIQVAKAIEPAFGGINLEDIESPKCFFILEELQKTLNIPVWHDDQQGTAGAVLAGLINAIKITGKDKNSKIVLMGAGAANIATAQLLIKYGFNPKNMILIDKEGPLYAERGDVDSLMFKHPWKYELAIQTNSERVKTIEEAFKGADILIAASSPEVRIDKKLIRMMNKPIVFALANPIPEIYPNEAKEAGAVIVATGRSDFPNQVNNSLIFPAVFRGVLDSRAKKITDEMIIAAAEELAKYAEEKGLREDYIIPRMDEIEVYYRMAAAVATKAVELGYARLKLSYREFLESAKERILRARRLSL

SEQ ID NO: 27886 - protein, 394 aa, Halobacterium sp. NRC-1
MRVVTKFGGTSLGSGDRVERAADSIADAVAAGHEIAVVASAMGNTTDELLDDITFDADEPDRAEIVSMGERTSVRMLKAALAARGVDATFLEPGTTDWPIVTNERGEVDADATAAGVDRLAGRLGDTVPVITGFLAEDPQGNVTTLGRGGSDTTAVMLGRYLDADEVVIVTDVEGIMTGDPQVVEGARNVGRITVDELRNLSFRGAEVIAPSALSFKDDALDVRVIHYQHGDLLSGGTRIEGTFESMIDMRDSPLACLTVAGRAIRNRPGITSALSTALSDSDINVDAVASGMDSMTFYVDESVAERAENILHQEVIAVSELSSVTVTDDIAAIRVLGGELPNRPGVLCRIIDPLADRNINVIDIISSATSVAVFVSWADREPALDVVQNGFGS

SEQ ID NO: 27887 - protein, 309 aa, Glycine max
  misc_feature (240)..(240): Xaa can be any naturally occurring amino acid
MMSFSLDSVSVLNPKLSHSHFSLPFNRFPHSLNFHPLLKPRAVNAAVPPNGLAACYLTLHRRKPLTVAFTASPQDSEHGEIEVEKERDVHAGSEESQEAWKQALDTFREQAEKFQGVSQEAYEVYSKKTAEQLKVLADKTKNELSVAAKEITDEGKEYLSAVADSSPEVKEIVETFTSPPEDIQKLSGVRDLYVGVPYGLLLSLGGFLSFMVTGNTAAIRFGMILGGALLALSILSLKSXRKGRTAPLALKGQAAIASILFLREISSIGKGSSYFTALISGAVVPFYIFRIVLERNQQKASNLETEPGN

SEQ ID NO: 27888 - protein, 97 aa, Arabidopsis thaliana
  misc_feature (31)..(31): Xaa can be any naturally occurring amino acid
  misc_feature (37)..(37): Xaa can be any naturally occurring amino acid
  misc_feature (39)..(39): Xaa can be any naturally occurring amino acid
  misc_feature (43)..(43): Xaa can be any naturally occurring amino acid
  misc_feature (47)..(47): Xaa can be any naturally occurring amino acid
  misc_feature (49)..(49): Xaa can be any naturally occurring amino acid
  misc_feature (56)..(57): Xaa can be any naturally occurring amino acid
  misc_feature (60)..(60): Xaa can be any naturally occurring amino acid
  misc_feature (62)..(63): Xaa can be any naturally occurring amino acid
  misc_feature (65)..(65): Xaa can be any naturally occurring amino acid
MASSMLSSATMVASPAQATMVAPFNGLKSSXAFPATXKXNNDXTCMXSXGGRVNCXXVWXAXXKXKGLVWIGGPLSPFRAPVAWVVSDAKARGEGTA

SEQ ID NO: 27889 - protein, 489 aa, Escherichia coli CFT073
MHLLTLSINPTFLMRSNHFKEFKMDKKQVTDLRSELLDSRFGAKSISTIAESKRFPLHEMRDDVAFQIINDELYLDGNARQNLATFCQTWDDDNVHKLMDLSINKNWIDKEEYPQSAAIDLRCVNMVADLWHAPAPKNGQAVGTNTIGSSEACMLGGMAMKWRWRKRMEAAGKPTNKPNLVCGPVQICWHKFARYWDVELREIPMRPGQLFMDPKRMIEACDENTIGVVPTFGVTYTGNYEFPQPLHDALDKFQADTGIDIDMHIDAASGGFLAPFVAPDIVWDFRLPRVKSISASGHKFGLAPLGCGWVIWRDEEALPQELVFNVDYLGGQIGTFAINFSRPAGQVIAQYYEFLRLGREGYTKVQNASYQVAAYLADEIAKLGPYEFICTGRPDEGIPAVCFKLKDGEDPGYTLYDLSERLRLRGWQVPAFTLGGEATDIVVMRIMCRRGFEMDFAELLLEDYKASLKYLSDHPKLQGIAQQNSFKHT

SEQ ID NO: 27890 - protein, 291 aa, Candida glabrata CBS 138
MTKIALVLKDLEEIDYSELQEQVLRKVILPIVNKSSVLDIILLDAFEDSVHLDDVLGRLYSASRDVLVSKGLELQPINVLFGSEWSESEHRKDYIWSYLVTEEGAEITGYKYENHIQYQKLKISHNTIPHGSQPDGNRYKVSALGGTFDHLHDGHKILLSVASYLTSQRLIVGVTDEELLVNKKYQEFLEDFEERCNGVNKFLQLLKPSLKMEVVAIRDVCGPTGTVPEIECLIVSRETIGGGEVVNKTRASKGMSQLDIYVVNVLGGQEDDGWKEKISSTDIRKRLASST

SEQ ID NO: 27891 - protein, 292 aa, Wolbachia endosymbiont strain TRS of Brugia malayi
MLIRIGTRGSSLAIAQALEAKQKLLDLFSSLSVEIIKIKTSGDKYANANLAEIGGKGLFIKEIETELIKSNIDMAVHSLKDVPAFFSKDLTIPCILERLSPYDTFISNKYKSLKSLPQQAIIATSSIRRKVQLLNFRPDLNIVPLRGNVTTRLQNQSFDGIILAEAGLIRLKKDYLITEVLSPKTMLSAVGQGAICIQCRKNDIKIIDLLEKINNNKSFIRVKSERSFMKTVNGSCFTPLAALAKYVSENVLHLYCMLADKKNIYFTERTSFVEDAEKMGMDAGLELKSKCL

SEQ ID NO: 27892 - protein, 326 aa, Rickettsia prowazekii
MQITVREALRDAMQEEMLRDEKVFVIGEEVAEYQGAYKVTQGLLEQFGSKRVIDTPITEYGFAGLAVGAAFAGLRPIVEFMTFNFAMQAFDHIVNSAAKTHYMSGGQVKCPIVFRGPNGAASRVAAQHSQNYTACYSHIPGLKVVAPYSAEDHKGLMLTAIRDDNPVIFLENEILYGHSFDVPDIIEPIPFSKAKILKEGSNVTIVTFSIQVKLALDVVNILQNDNIDCELIDLRTIKPLDTDSIIESVKKTNRLVIVEEGWFFAGVGASIASIVMKEAFDYLDAPIEIVSGKDVPLPYAVNLEKLAMPSANDLIEAVKKVCYYSI

SEQ ID NO: 27893 - protein, 483 aa, Rickettsia prowazekii
MAAFTPITIAYGDGIGPEIMEAVLYILRKAEARISLETIEVGEKLYKKHYTSGISEESWDVIQRTGIILKAPITTPQSGGYKSLNVTIRKTLQLFANIRPVVSFYPFTRTLHPNLNLTIIRENEEDLYSGVEYRQTHNMYESMKLISHTGCKKIIRYAFEYAIKNNRKKVTCLTKDNIMKFSDGIFHRVFNEIAKEYPQINNEHYIIDIGTAKLATKPEIFDIIVTSNLYGDIISDVAAEISGSVGLAGSANIGQHYAMFEAVHGSAPDIAGKGIANPSGLLNAAIMMLVHIGQGDIASLIENAWKKTIEDGVHTFDIYNEHSSSKKVCTKEFAVEVIKRLGQLPITLPKAAYPLIVKKQESNIDYKIDTREVKKLVGTDIFINMHVFSAHDIADKINKLDIGNFELKTISSKGLKLWPHDSRFEIISDHWCCRFMNKDGTEIKHLDITMLLQSLSKANIDFIKVENLFEFDGVAWYSLAQGE

SEQ ID NO: 27894 - protein, 133 aa, Prochlorococcus marinus str. MIT 9313
MRMLHTMLRVGDLDRSLRFYTEVLGMHLLRRKDYPSGRFTLAFVGYGKESDTTVLELTHNWDQDHYELGEGYGHIALGVEDIQSTCLAISKRGGRVVREPGPMQHGSTVIAFVEDPDGYKVELIQLASREAAS

SEQ ID NO: 27895 - protein, 483 aa, Thiobacillus denitrificans ATCC 25259
MLIFDHSRPGRTAAAQLPATGGDLGDLPAELRRKDAPALPEVSELDVVRHYTRLSQKNFSIDTQFYPLGSCTMKYNPRACNSLAMLPQFLARHPASPDETGQGFLASMFELQEMLKDVTGMAGVSMAPMAGAHGEFAGVAMIRAYHDAKGDAARREIIVPDAAHGTNPATATMCGYTVKEIPTDATGAVDLAALKAAVGPQTAGLMLTNPSTLGVFEKTIAEIQKIVHDAGGLLYYDGANLNAILGKVRPGDMGFDVIHMNLHKTFSTPHGGGGPGAGPVGVSGRLLPFMPIPLVLNDNGFYRLATEADLPQSIGRMSANMGNAGVLMRAYVYARLLGREGMHRVAEYATLNANYLMAKLREAGFDLAYPTRRASHEFIVTLKKLKDATGVSAMDFAKRLLDYGYHAPTTYFPLLVPECLLIEPTETESRETLDGFVDAMKTIKHEAETNPDLVKGAPYTLPVRRLDDVKAARELDLAYKPAA

SEQ ID NO: 27896 - protein, 465 aa, Bacillus clausii KSM-K16
MAKNMPDIGEYKYGFSDRDVSIFRSGRGLTKEIVEEISRMKEEPQWMLDFRLKSLEQFYKMPMPQWGGDLSELNFDDITYYVKASDKTERSWDEVPEEIKNTFDKLGIPEAEQKYLAGVSAQYESEVVYHNMKEDLESLGVVFKDTDSALKENEDIFKEYFATVIPAADNKFAALNSAVWSGGSFIYVPKGVKVDTPLQAYFRINSENMGQFERTLIIADEDSSVHYVEGCTAPVYTTNSLHSAVVEIIVKDNAYCRYTTIQNWAPNVYNLVTKRAVADKGATMEWVDGNIGSKLTMKYPAVIMRGEGAKGTVLSIAIAGKGQHQDAGAKVTHLAPNCSSTIVSKSISKQGGKVTYRGICHFGRKSDGSKSKIECDTLIMDNQSTSDTIPYNEILNNNITLEHEATVSKVSEDQLFYLMSRGVSEEEATEMIVMGFIEPFTKELPMEYAVEMNRLIKFEMEGSIG

SEQ ID NO: 27897 - protein, 585 aa, Solanum tuberosum
MELFMKSSSLWGLEIYLFCLFIVLSNINGVFASHNIFLDLQSSRAISVKNVHRTGFHFQPPKYWINDPNAPMYYNGVYHLFYQYNPKGSVWGNIVWAHSVSKDLINWIHLEPAIYPSKKFDKYGAWSGSATILPNNKPVILYTGVVDSHDSQVQNYAIPANLSDPFLRKWIKPNNNPLIVPDNSINKTKFRDPTTAWMGQDGLWRIVIGSMRKHRGMALLYRSRDFIKWAKAQHPLHSSPHTGNWECPDFFPVSLKNTNGLDASYRGKNVKYVLKNSLDVNRFEYYTIGMYDTKKDRYIPDNNSIDGSKGLRLDYGNFYASKSFYDPMKNRRIVWGWTNESDVLPDDEIKKGWAGIQAIPRKVWLDPSGKQLIQWPIEELETLRKQKIIQLNNKKLSKGEMFEVKGISASQADIEVSFSFSSLNKAEQFDPKWADLYAQDVCAIKGSTIQGGLGPFGLVTLASKNLEEYTPVFFRVFKAQKNYKVLMCSDARRSTMRQNEAMYKPSFAGYVDVDLVDTKKLSLRSLIDNSVVESFGAGGKTCITSRVYPTLAIHNNAHLFVFNNGSETITIETLNAWSMDVPKMH

SEQ ID NO: 27898 - protein, 128 aa, Pseudomonas aeruginosa UCBPP-PA14
MRILHTMIRVGNIDRSIDFYTRVLGMTLLRKNDYPDGQFTLAFVGYGNEADSAVIELTHNWGVDAYEIGTGYGHIAIEVDDAYQACDDIRNNGGQVTREAGPMKHGTTVIAFVTDPDGYKIELIQKSS

SEQ ID NO: 27899 - protein, 502 aa, Secale cereale
MDGGGEHSEALKNYYLGKILGVGTFAKVIIAEHKHTRHKVAIKVLNRRQMRAPEMEEKAKREIKILRLFIDLIHPHIIRVYEVIVTPKDIFVVMEYCQNGDLLDYILEKRRLQEDEARRTFQQIISAVEYCHRNKVVHRDLKPENLLLDSKYNVKLADFGLSNVMHDGHFLKTSCGSLNYAAPEVISGKLYAGPEIDVWSCGVILYALLCGAVPFDDDNIPNLFKKIKGGTYILPIYLSDLVRDLISRMLIVDPMKRITIGEIRKHSWFQNRLPRYLAVPPPDMMQQAKMIDEDTLRDVVKLGYDKDHVCESLCNRLQNEETVAYYLLLDNRFRATSGYLGAHYQQPMESASPSTRSYLPGSNDSQGSGLRPYYRVERKWALGLQQSRAPPRAIMIEVLKALKELNVCWKKNGDCYNMKCRWCPGFPRVSDMLLDANHSFVDDCAIKDNGDANSRLPAVIKFEIQLYKTKDDKYLLDMQRVTGPQLLFLEFCAAFLTNLRVL

SEQ ID NO: 27900 - protein, 581 aa, Solanum tuberosum
MDYSSNSRWALPVILVCFFIVLLSNNVVFASHKVFIHLQSQNAVNVQTVHRTGYHFQPEKHWINDPNAPMYFNGVYHLFYQYKPNGSVWGNIVWAHSVSKDLINWINLEPAIYPSKPFDQFGTWSGSATILPGNKPVILYTGIVDANQTQVQNYAIPANLSDPYLREWIKPDNNPLIVADASINKTKFRDPTTAWMGKDGHWRIVMGSLRKHSRGLAIMYRSKDFMKRVKAKHPLHSTNGTGNWECPDFFPVALKGTNGIDQYGEEYKYVLKNSMDLTRFEYYTLGKYDTKKDRYVPDVGSIDSWKGLRFDYGNFYASKTFYDTSKNRRVIWGWSNESDIFPEDDNAKGWAGIQLIPRKVWLDPSGKQLIQWPVEELETLRTQKVQLSNKKLNNGEKVEVTGITPAQADVEVIFSFASLDKAESFDSSWTDMYAQDVCGLKGADVQGGLGPFGLATLATENLEENSPVFFRVFKAQQNYKVLLCSDAKRSTLKFNETMYKVSFAGFVDVDLADKKLSLRSLIDNSVIESFGAGGKTCITSRVYPTLAINEKAHLFAFNNGTEPITIETLDAWSMGKAKIQY

SEQ ID NO: 27901 - protein, 668 aa, Ustilago maydis 521
MSLKVQLPHSSLCRIGQRTTGAQGGLSSDKAAQKEKVGPLKSGLLFSYMQNFCALQTRLRRPSRTTELDTMDFKPFLTLQHFRPQGFAGDVLAPGASYNQTWNTMASKFNGRGGNRVETGKVLEAASESLKETVPLLQLVVRARHHPLLVFLVGLFLGTIYLLYRYWDCAVGCERRPDLKGPKGLPLIGNLMWALKNRDPLSYQVYAQQKYGYGNTHTLPGLGRLIDISRPDWIEHVQKIKFSNYVKGEQFHDQMRDVLGDGIFTSDGERWKMQRKVASRIFTVSSFKAIITQTIREDCALVEQLIETYARQGTVFNLQELYFKFTLSSFVKIAFSQDIKSLSEPDRPDTFGDAFNYAQKVLDMRFVQPWWKIAERFNETGRKMRAARKIVEEFTTNIVEARRKESEAMGEKSKPESSRKDLLDLFMAYRSSDGQRLSNQQLKDTILNLMIAGRDTTAEALSWMSWHMLTKPDVYDRIRHEIDATLEEEGEQAGLEIDYDVFEQHTAKLTTFQETLRLHPSIPKNIRRALQDDVLPNGGPRVRKGDLMLYSDWAMGRNPDIWGPDACEFKPSRWTDQETGSSIKYSQFQAHFFNGGPRLCLGQKLASYEVVQLIHHIFAKFDLELIDLGPGRSAGFGKVPDYLNSLTHPMKRPLMVKATLRCCKEGTR

SEQ ID NO: 27902 - protein, 211 aa, Zea mays
MTSVWKTKVLPGLNKIFDKDGKKAAAAGFLKSFNKEEIDKEIEDKKTELEPKVVEAYEASPPEVKALFKDKKPVKVSKKNSAAVTKFLDELAKIDFPGAKVVSEAVAKSGTSPLLPAITFILDKVAPFIPKEEPKAEPAAEATSREVAVEEKKEEAEPAAATEAAPAPAETPSEAAVVEEKKEEEKKEEEDKPAAEEAAPPAEAAAAAEEK

SEQ ID NO: 27903 - protein, 464 aa, Thiobacillus denitrificans ATCC 25259
MPFIPHTEEDVSAMLGAIGAASIEDLFDEIPPALKTGKLKDVPDGLPEMAVARLMQERASQDGFWSNFIGAGVYEHHIPAAIWQITTRGEFYSAYTPYQAEASQGTLQLIYEYQTMMTRLTGLDVSNASLYDGASALAEAVLMAVRSHKSSRRVLVPKTVHPVYRSVVVTTVRNQGIDLVELEYDPATGKTVLPSEPGAFAGLVIPQPNFFGVLEDVHTMTDWTHANGGLAIALVNPTTLAVLEAPGKWGTKGADIAVGEGQPLGAPMASGGPYFGFMCCRQDFVRQMPGRIVGRTVDLDGKPGFALTLQAREQHIRRSKATSNICTNQGLVVTAATQYMALLGPQGLAKVAAASHANTVALAEKLGAIPGVARAFASPCFHEVVLKLDDGTLKGTSAKDVLRALRAQGILGGLDISGWYPELGQAILVCVTETKTGADLDHYAQHLERILSKRREAPPCAYKN

SEQ ID NO: 27904 - protein, 436 aa, Yarrowia lipolytica CLIB122
MTQGNIGAWQKSVGDALAPGEVLVEIETDKAQMDFEFQDDGYLAKILLDAGAKDIAVGTPIGVYVEDEADVAAFKDFTIDDAGGVPKPPKTEEQKEEEEYEAEKAEKAEKEAEASKETASPAPSSQSSAPAAPTPPSSRIFASPMAKTIALEKGIKLSEIKGSGPGGRIIKRDVENWTPPAAPAAKAAPAKGAAPAAAAAAGSAYTDIPLTNMRKTIASRLTQSKNTSPDYIVSSTVSVSKLLKLRAALNASSDGTYKLSINDLLVKALAVANTKVPQVNSQWLESEGVIRQFTNVDVSVAVATPTGLITPVVKNANLKGLAEISKEIKALGKKAKDGKLAPEEYQGGTVTISNLGMNHAVSFFTAIINPPQAAILAVGTTERKAIEDVDSEAGFVFDDVVTLTTSFDHRVVDGAVGGEWVKALKQVVENPIEMLL

SEQ ID NO: 27905 - protein, 607 aa, Candida glabrata CBS 138
MSDKGSRIAVVNADRCKPKKCRQECKRSCPVVKTGKLCIEVTPTSKIAFISEVLCIGCGICVKKCPFDAITIINLPTNLESHVTHRYSANSFKLHRLPTPRPGQVLGLVGTNGIGKSTALKILAGKQKPNLGRFDDPPEWQEIIKYFRGSELQNYFTKMLEDDIKAIIKPQYVDNLPRAIKGPVQKVGELLKLRMEKPQDTVKQYIKTLQLDHLLNREIGLLSGGELQRFAIAMSCVQDADVYMFDEPSSYLDVKQRLNAALIIRSLLEPSKYVIAVEHDLSVLDYLSDFVCILYGVPSVYGVVTLPSSVREGINIFLDGHIPSENMRFRTEALQFRIADSAADIIVDATRAYSYPDMKRTQGDFTLNVQSGEFSDSEILVMMGENGTGKTTLIKLLAGAIPADDGTSVPKLNVSMKPQTIAPKFPGTVRQLFFKKIRAQFLNPQFQTDVVKPLKIDDIIDQEVKHLSGGELQRVAIVLSLGIPADIYLIDEPSAYLDSEQRIICSKVIRRFILHNKKTAFIVEHDFIMATYLADKVIVFDGTPSQNTTATAPESLLTGCNRFLKNLNVTFRRDPNSFRPRINKLDSQMDKEQKLSGNYFFLDSNGV

SEQ ID NO: 27906 - protein, 436 aa, Bacillus clausii KSM-K16
MSVETNPLIGPDKLKERSEGKQEPKWLTDLRLDALNKVESLELPKPDKTKIHNWDFTSFTQELREPKEISSLDELSSDIQQFVDEEATGNSLLIQDNGKTIFQTNAAELAEKGVVFCDFATAVKEHGDLVKKYLLTEAVSADENKLTAMHAALMEGGAFIYVPKNVNVEVPLQAVYAVSDEKAGLFNHVLIVAEDNSSVTYVENYTGYGSGASVANLVAEVYVGAGARVSFGGVDTLNEDATTYVVRRAHVERDGRIDWALGQMNDGDTVAENITYLVGDGSYADAKLVSVGTGEQKQNFTTLIKHYGKHSEGYILKHGVMTERALGIFNGISKIEKAATKAHGEQTERILMLGERARGDANPILLIDEDDVTAGHAASVGRIDPLQMFYLMSRGISRAEAERLVIHGFLEPVVSQLPVASVRKQMKTVIERKAKR

SEQ ID NO: 27907 - protein, 388 aa, Desulfovibrio vulgaris subsp. vulgaris str. Hildenborough
MSFKKVDLSRYQFDGAQASSIGDLTQLDAADKQRLLYAGIDVNQQNLAGSFMHMNHSGVHCTSRQEGLEILDIKQALDTYHGLPDYFWKLVDRNKDEYTRAADEHLHGGYFIRARAGAKIEAPVQSCLFIKGNGVGQNVHNVVVVEEGAEMHIITGCATAHDTRSVAHLGISEFYVHKGGKLTFTMIHNWGEEAAVRPRSAGYLEEDAVFLSNYVLLKPVTDLQMYPTITLGGRGSVARFNSVIVAPTGSYVDTGNRILLEAPDTRGEIIARTMTTGGTIINRGHIAGHAVPARGHLECKGLILGGGVIHAIPELEGTQDGVELSHEAAVGKIAQEEIEYLMARGLDEDEATSTIVRGFLNVDIMGLPEELEKAVEEQINQLDAGDAM

SEQ ID NO: 27908 - protein, 506 aa, Burkholderia sp. 383
MNPVPAYTSDADVGHYVDGAPVAGRSGRFQDVLNPALGRAVRRVALADDNEVQQAVASANAAFPAWAATPPIRRARVMHRFLQLMNEHRDALAAIITAEHGKVFSDAQGEVARGIDIIEFACGVPQLLKGDFTDQVSTGIDNWTMRQPLGVVAGITPFNFPCMVPCWMFPVAIATGNTFVLKPSERDPSAALFIADLLTQAGLPAGVFNVVQGDKGAVDALLDHPDVQAVSFVGSTPIAAYVQQRAVQSGKRVQALGGAKNHLVVMPDANLEQAVDALIGAAYGSAGERCMAISVAVLVGDIADKIVPLVAERARKLVIGDGMSPEVEMGPIVTGEALKRIEGYIEQGVNEGAQLVVDGRGLRVPGREAGFFTGGTLFDHVTPDMRIYKEEIFGPVLGCVRVKDFGEAVDLINAHEFGNGVSCFTSDGGIAREFSRRIQVGMVGINVPIPVPMAWHGFGGWKKSLFGDMHAYGEEGVRFYTRQKSVMQRWSSSIGKGAEFAMPTAK

SEQ ID NO: 27909 - protein, 181 aa, Solanum tuberosum
MASSIVSSAAVATRSNVAQASMVAPFTGLKSAASFPVTKKNNNVDITSLASNGGRVRCMQVWPPINMKKYETLSYLPDLSDEQLLKEVEYLLKNGWVPCLEFETEHGFVYREHNSSPGYYDGRYWTMWKLPMFGCTDGTQVLAEVQEAKNAYPQAWIRIIGFDNVRQVQCISFIAYKPEGY

SEQ ID NO: 27910 - protein, 408 aa, Ustilago maydis 521
MITTVSSTPSVDRYGTRLNGSAQSNKVVNKPLAWLERVDSDPTEASKPVNQITVVNDSEFEIHLVFSDCSVFRANLQRLSAGHADPSFDVALRAMALAWFVGCQRNSESVNVAQEQQQLVLPTPESLLQLCRVHHNQHHDARVQHSRSSIILHHTHLAASLAMASTSTASQPWDVLRRNTRNLESAIDARLTTYSQLASKIARAADHTTLDMTGAGSSSASETREHSEHVELETELESLINELSNSVDALTAKLDDPAIPPTTPQLHAVQRHRELLFDFTRDFRRSQTNVRHAIDRRDLLGNVQGDIDAYKAAHASDADALLAERARIDNSHGMIDRTLEQAYATRADFADQRSTLQAISTRMSSSAAQVPGLNSIITLIGRRKTRDSVIMGCLIGTLTVLLLKFALG

SEQ ID NO: 27911 - protein, 412 aa, Geobacillus kaustophilus HTA426
MEKRRVVVTGIGAVTPLGNDAETTWKNIIAGQSGIDIVTRVNPDDFPAKVAAEVKDFDPSLFIDRREARKMDRFTQFAVAAALMAVKDANLDINESNAERVGVWIGSGIGGMETFEQQFEIFQQRGYRRVSPFFVPMMIPDMAAGQVSIILGAKGINSCTVTACATGANSIGDAFKVIQRGDADVMITGGTEAPITKMSFAGFCANTALSTNPDPKTASRPFDKKRDGFVMGEGAGIVVLEELEHALRRGAKIYAEIVGYGATADAYHITAPAPGGEGGVRAMRQALHDAGLKPEEIDYINAHGTSTEYNDKYETAAIKEVFGDHAYKLAVSSTKSMTGHLLGATGAVEAIFSVLAIRDGIIPPTINYETPDPECDLDYVPNEARKQDVRAVLSNSFGFGGHNATLIFKKYV

SEQ ID NO: 27912 - protein, 300 aa, Ustilago maydis 521
MAGTSRNVRVLVTGANGFVGSHIVSLLLSRGYVVNATVRRQTASEKLIATFACDRLHVFVIPDLTSEQALDEAIRGCKYVVHVASTVPSKEQASGIDIDSAISSIESVMNSAVAHASEKVVLTSSMSTHLDVKAPILNESTWYTPDRSSTKLMVQYMSSKTLVERRAWELSSTLKLPLTTVAPVYIGGPTIIHEQDPKSSVSNQDLLRCIEDESRSRIPGWIDVRTVAHLHLHAIEDHSLNGRRILACTHNRGVVPMDCSLMNSLLAKDSAALIDFDRTKRDLLEQIDAFNSGQTRRVVA

SEQ ID NO: 27913 - protein, 407 aa, marine gamma proteobacterium HTCC2207
MAKEKFERNKPHVNVGTIGHVDHGKTTLTAAMTRVCAEVWGGEMKAFDQIDNAPEERERGITISTAHVEYDSPDRHYAHVDCPGHADYVKNMITGAAQMDGAILVCGATDGPMPQTREHILLSRQVGVPYVLVFLNKADLLAEDCGGFGSEEYLEMLELVEMELRELLDLYEFPGDDTPIIVGSALMALEGRDDNELGTTAVKKLVEALDAYIPEPVRAVDQPFLMPIEDVFSIAGRGTVVTGRIERGVVKVGEEIEIIGITDTAKTTCTGVEMFRKLLDEGRAGENCGVLLRGTKREEVQRGQVLAKPGSVKPHTKFTSEIYVLSKDEGGRHTPFFKGYRPQFYFRTTDVTGACELPEGTEMVMPGDNVQMEVTLIHPIAMEEGLRFAIREGGRTVGAGVVAKIIE

SEQ ID NO: 27914 - protein, 230 aa, Streptococcus suis
PWTDKDGNVQVNRGYRVQFNSAVGPYKGGLRFHPTVNQSILKFLGFEQIFKNVLTGLPIGGGKGGSDFDPKGKTDAEIMRFCQSFMTELQKHIGPSLDVPAGDIGVGGREIGYMYGQYKRLRQFDAGVLTGKPLGFGGSLIRPEATGYGLVYFTDNMLAANGKSFKDQTVLISGSGNVAQYAVQKATELGAKVISVSDSNGYIIDETGIDFDLLVDIKEKRRARLTEYAA

SEQ ID NO: 27915 - protein, 472 aa, Lotus japonicus
SVMIPIFATQVSAIESAAGDIDEALKWNGNYQECRACVGSGGVCGSDGEFRCFCKDGPHTSACNSAIAPAPGALGAGFMTTLFFVLIICHRMRSMSFRQKMLFRKRRKYVDHNVEAFMKSYGSLAPRQYSYSEIKRITNSFLDKLGQGGYGVVYKATLPDGRLVAVKVISESNGSGEDFINEVASISNTSHVNIVSLLGFCYMNKRALIYEFMPNGSLDNFINGRGGSPNAVSYFDWNTLSKVAIGIARGLEYLHQGCNTRILHLDIKPQNILLDENLCPNIADFGLAKICKRKESIVSMLGTRGTPGYIAPEIFSRAFGGASHKSDVYSYGMLILEMVGGRENYDSGGGSQSSEMSFPDWIYKDLEQGDVHTNCLVITGEEHEMARKMILVSLWCIQTHPSERPSMSKVVEMLEGTLQSVPYPPKPILHSPEKLLLQNSDLTSGNTLETDSMTTEKDGSIELNVLSKNVPG

SEQ ID NO: 27916 - protein, 199 aa, Wolbachia endosymbiont of Drosophila ananassae
CVLERLSPCDAFISHKHNSLESLPQQATIATSAIRRKVQLLNFRPDLNIVPLRGNVTTRLQNQSFDGIILAEAGLIRLEKHHLITEVLPPKVMLSAVGQGAICIQCRRNDVKIIDLLEKINNNMSFIGVKSERSFMKTVNGSCFTPLAALAEYVSENMLYLRCMLADGKNIYFTERTSFIEDAEKMGMDAGLELKSKCL

SEQ ID NO: 27917 - protein, 459 aa, Thermoanaerobacter tengcongensis MB4
MNLFRKKSVDQLLEAAEKTGLNKKLTAIDLAALAIGSVVGTGIFVSTGEGALRAGPGVIISYIIGGITAALAAFIFAELVTMFPVAGSTYTYSYVAFGELIAWIIGWDLLLEYLVSASAVASGWSGTFVGLLKSFGITLPEAITKPPISGGIMDLPAILITAFVAWILYIGVRESATTNNIIVLVKIGVILLFLFLGFSHVKLSNLTPFAPYGWKGIMSAAAIIFFAYIGFDAVSTAAEETKNPTRDVPLGLVMAMVVILALYISVAVVLVGMVPYKTIIPDNALPGALMSIGINWGSALVATGAAVGMISTLLITLYGQIRIFMVMARDGLLPEVFSHIHPKYRTPHINTVITSLVAAIIAGFLPLDIIIELCNIGTLSVFVIVSIGILVLRVKMPNVERKFRVPAVWLVAPLTAAFSLYLMASLPWVTWLRFGIWMLVGLIIYFAYGRYHSVLNVQK

SEQ ID NO: 27918 - protein, 322 aa, Leptolyngbya boryana
MAQDQKPTVVITGASSGVGLYAAKALVKRGWHVVMACRNLEKADSAAKSLGMSPDSYTLMHIDLGSLDSVRKFVTQFRESGKSLDALVCNAAVHMPLLKEPMRSPEGYELSVATNHFGHFLLCNLLLEDLKHSTHNDPRLIILGTVTANSKELGGKIPIPAPADLGDLSGLEAGFKAPIAMIDGKPFKAGKAYKDSKLCNMITSRELHRRYHDSTGIVFNTLYPGCVADTPLFRNSLPVFQKVFPWFQKNITGGYVSQELAGERTAQVVADPEFKQSGVHWSWGNRQKEGRESFVQELSEKVTDDAKAKRMWELSEKLVGLA

SEQ ID NO: 27919 - protein, 558 aa, Synechococcus sp. RS9917
MTTARTTAISFDSISDALAAIRNGECVVVVDDERRENEGDLICSAQFASPDQINFMATHARGLICLAMEGERLDALDLPLMVDRNTDANQTAFTVSIDAGPEHGVSTGISADDRSRTIQVALRPDARPADLRRPGHIFPLRARQGGVLKRAGHTEAAVDLAQLAGLIPAGVICEIQNADGSMARLPELRDYARQWNLRLISIADLIRYRLNNERFVRRQAQATLPSLFGSFQAIGYRNELDGSEHVAIIKGDPQQLQEPVLVRMHSECLTGDAFGSLRCDCRPQLESALARIEAEGEGVVVYLRQEGRGIGLINKLKAYSLQDGGLDTVEANEKLGFPADLRNYGVGAQILSDLGIHRLRLLTNNPRKIAGLDGYGLEVVERVPLVIEPGDHNADYLAVKRDKLGHWIHEASTVICWDGTLPADALPQPLAMASEAAAIEGLVLVPVQSPRLLALWERPQFAWRLAEASAEATGEGQTSQAEPLDSRLKRLLSAMATWPITRRIGLYHTSRPDQLNHPPQTLEREERPLEELRTSSPERNGATELPLCSNDVALIQWS

SEQ ID NO: 27920 - protein, 397 aa, Chlamydomonas reinhardtii
MALTMSAKSVSARAQVSSKAQAAPAVAVSGRTSSRVMPAPALAARSSVARTPLVVCAATATAPSPSLADKFKPNAIARVPATQQKQTAIITGASSGLGLNAAKALAATGEWHVVMACRDFLKAEQAAKKVGMPAGSYSILHLDLSSLESVRQFVQNFKASGRRLDALVCNAAVYLPTAKEPRFTADGFELSVGTNHLGHFLLTNLLLDDLKNAPNKQPRCIIVGSITGNTNTLAGNVPPKANLGDLSGLAAGVPAANPMMDGQEFNGAKAYKDSKVACMMTVRQMHQRFHDATGITFASLYPGCIAETGLFREHVPLFKTLFPPFQKYITKGYVSEEEAGRRLAAVISDPKLNKSGAYWSWSSTTGSFDNQVSEEVADDSKASKLWDISAKLVGLSA

SEQ ID NO: 27921 - protein, 233 aa, Candidatus Protochlamydia amoebophila UWE25
MLRKRSMLYSNNSQPYSISVGARSSPLSRAQVQEILKALRSFYPSIEFTISYFDTIGDLDQKTSLRDLDKTNFFTKEIDEAILQKKCQIGIHSAKDLPDPIPDGLQLICLTKGVDCSDVLVLRDGETLQTLPPHSRIATSSIRRENIVKLLRNDFIFLDLRGTIHQRLALLEKKQADGVVVAEAALIRLGLTHLNRIRLPGTTVEGQGQLAIIARKDDAKMQTLFACLDVRKN

SEQ ID NO: 27922 - protein, 920 aa, Magnetococcus sp. MC-1
MYDLENTLMRQALELNGLGTIILDPQQTIVFWNAWMERGSQMFAAHVLGSKLLDVFPELQGSRLDRAVVSALRTGLPTMLSHRLNPTPFPLETASKNEELGQRMSQMVQIKAIRNEAGERYCVILIHDITNTVSREQMLRNQARELHSAKDEAQQANRAKSDFLANMSHEIRTPMNAIIGMSHLALKTDLNAKQRDYVGKIHDSALLLLGIINDILDFSKIEAGKLSMESVAFYLDDVLSNVANLVSMKVEEKGLEISFQVDRGVPLHLVGDPLRLGQILINLVNNAVKFTEQGNIVVAITAELDCESHVVVQFQVRDSGIGMTKQQIDRLFQAFSQADSSTTRRYGGSGLGLSICKRLVGMMDGDIWVESQPGRGSQFTFTAQLVSQRQDRRRFRLPSMHLVGLRVLVVDDNPVVRQILVESLAIFSFCVEALATVEEVIEALGQAIARGEPYGLVVLAGRFGGKGGVALAGEINRCYPQLTLPKMVLVGASERDDVVAMAGAQLVELFVTKPITQTILFEGVLEVLGYVVQAQQHAGGRDRTREKRVLSGCQILLVEDNEINQQVACELLQGEGVTVVVANSGQQAVDRVLSGERFDAVLMDIQMPGMDGYEATQVIRKQPQFSDLPIIAMTANAMAGDRERCLAAGMNDHIGKPIQPKLLFETLGRYVIKGDGVVEAGNKGILLPPIELTPLDGSVTTPLPPPVLPAAVGRAAMISPRAGAVPERLDGVDMEKGLVHVGGNEALYVKILKEIGERYKDVVVEIQGLFAARHFAQAIQLVHTYKGLTGTIGAMALSQSAAQLEEALKAGAYERLPQLLGDFSQLAERLNVALLPMVGVANVQALPSGAEQAGLEEGLLALGALIRDGDAEALDRVKQLRGMAAGQVYQPLMAQLESELDEYEFERAKVTYHHLLAQLK

SEQ ID NO: 27923 - protein, 245 aa, Triticum aestivum
MASDTVFVLPGDSIDPSLIPSHPKKPLRLGPGLRHVPPNDIIPTLAGQLVTDRQKNAIRVENARGRYTPRVGELVIGTIQRSAADFFFVTLSDYTAPAQLPQLSFEGATKKTRPQLAAGALVYARVALANRHMDPEIECVSASTGKSEGLGPLAGGMLYNVSLGMARRLMMPKSVQEGRVVVLEELGNAGLQFETATGRNGKFWVDSENVKTVIAVGRAVQETDEKNLDVEDQKKLVRKIIKELS

SEQ ID NO: 27924 - protein, 288 aa, Escherichia coli
SILIDKNTKVICQGFTGSQGTFHSEQAIAYGTKMVGGVTPGKGGTTHLGLPVFNTVREAVAATGATASVIYVPAPFCKDSILEAIDAGIKLIITITEGIPTLDMLTVKVKLDEAGVRMIGPNCPGVITPGECKIGIQPGHIHKPGKVGIVSRSGTLTYEAVKQTTDYGFGQSTCVGIGGDPIPGSNFIDILEMFEKDPQTEAIVMIGEIGGSAEEEAAAYIKEHVTKPVVGYIAGVTAPKGKRMGHAGAIIAGGKGTADEKFAALEAAGVKTVRSLADIGEALKTVLK

SEQ ID NO: 27925 - protein, 522 aa, Ricinus communis
MAGGSLAPAGVAKERAEQYQGKVTFAVFVACMVAAVGGSIFGYDIGISGGVISMDAFLEKFFRSVYLKKKHAHENNYCKYDDQRLAAFTSSLYLAGLAASLVAGPITRIYGRRASIISGGISFLIGAALNATAINLAMLLLGRIMLGVGIGFGNQAVPLYLSEMAPTHLRGGLNIMFQLATTSGIFTANMVNYGTHKLESWGWRLSLGLAAAPALLMTIGGLLLPETPNSLIEQGLHEKGRNVLEKIRGTKHVDAEFQDMLDASELANSIKHPFRNILEKRNRPQLVMAIFMPTFQILTGINIILFYAPPLFQSMGFGGNAALYSSAVTGAVLCSSTFISIATVDRLGRRFLLISGGIQMITCQVIVAIILGVKFGDNQQLSKSFSVLVVIMICLFVLAFGWSWGPLGWTVPSEIFPLETRSAGQSITVAVNLFFTFVIAQSFPSLLCAFKFGIFLFFAGWVTVMTAFVYIFLPETKGVPIEEMIFLWRKHWFWKKIVPGQPEVDDSRESMEMGEAVASRIK

SEQ ID NO: 27926 - protein, 532 aa, Synechococcus sp. RS9917
MSFPDFSASDAQTQWQRFCDLLWFHDDLGMWLDVSRMHVNSADLDALAPQFDQAFQAMQALEGGAIANADEQRQVGHYWLRHPQLAPSPDVADHISAEIDQIEQFGKAVIAGEIKAPNGAAFTDVLWIGIGGSGLGPLLMIRALQNQGEGLPFHFFDNVDPNGMSRVLAGLGEAIKTTLVITVSKSGGTPEPHLGMEQARHRLEACGGDWPGQAVAITMKNSHLDQQAQQEGWLQRFDMFDWVGGRTSITSAVGLVPGALIGANIRDFLAGAAQMDEATRLADLRRNPSALMAASWFVAGEGKGKRDMVVLPYRDRLEVFSRYLQQLVMESLGKRLDRSGAEVHQGIAVYGNKGSTDQHAYVQQLRDGVDNFFVTFIEELTDVEDIPEINGERPGDFLDGFLQGTRSALTEGGRQSISISMRHLDARRLGALIALFERAVGFYGELVNINAYHQPGVEAGKKAAAAILKLQGQVEALLADGVSRSAADVQQAIGASPVEPIFWILRHLCANKRGYIAQGSWDQPASLRFSKA

SEQ ID NO: 27927 - protein, 471 aa, Xanthomonas campestris pv. vesicatoria str. 85-10
MSSWLRRKSIDQVTVHETGRQLVRSLSWPHLIALGIGAIVGTGIYTLIGVGADKAGPAVLLSFVAAGIVCACAALAYAEMATMMPAAGSAYTYSYTALGESIAWVVGWSLVLEYSLVVSTVAVGWSGYFVGFLQWLGVGLPHELIAGPHAGGIVNLPAVVITFLVAGLLMAGTKESATLNAVLVVLKIIALGVFVAIALPAFNSANLQPFMPYGFSKAMGPDGVERGVMAAAAIIFFAFYGFDAISTAAEETKNPGRDLSIGIVGSMIGCTLIYVLVALAAVGAMSFTVFGKSPEPLALILRELGHGKAALVIGAVAIIALPTVLLAFLYGQSRIFFVMSRDGLLPRGLSKVNARTGTPVAITLFTAVLVAALAGVARLDEIAALANAGTLAAFTAVAACLLVLRVREPGRARAFRTPLAWVVGPVAIGGCLYLFWSLPSKTQVWFLLWNALGVVVYLAYGRRNSRLNQAG

SEQ ID NO: 27928 - protein, 398 aa, Mycoplasma mycoides subsp. mycoides
MAKEQFDRSLPHVNIGTIGHVDHGKTTLTAAITKVLSEQGNAEFKDYANIDNAPEERERGITINTAHVEYKTANRHYAHVDCPGHADYVKNMITGAAQMDGAILVVAATDGPMPQTREHILLSRQVGVPKIVVFLNKCDMVEDDEMIDLVEMEIRDLLTEYDFDGEGAPVIRGSALGALNGDSKWTGAINELMAAVDEYIPTPQRDADKTFLMPVEDVFTITGRGTVATGRVERGTVKVNEEVEIIGLKEEPTKTVVTGLEMFRKLLDFAVAGDNVGALLRGVDRHSVERGQVLAKPGTIKPHTVLKASVYALTQEEGGRHKPFFNKYRPQFYFRTTDVTGEVTLPQGTDMVMPGDNVEMEIQLIKPVAVEEGTKFSIREGGRTIGAGTRYLNWKIIN

SEQ ID NO: 27929 - protein, 356 aa, Oryza sativa
MAALTSYEMAASILLCAEDSSSVLGFGGEEEEEEEDVVAGKRARCAGPPPPPCVDVAGVDFAVPSEECVARLVETEADHMPREDYAERLRAGGGDGDLDLRVRMDAIDWIWKVHSYYSFAPLTACLAVNYLDRFLSLYQLPDGKDWMTQLLAVACLSLAAKMEETDVPQSLDLQVGEERYVFEAKTIQRMELLVLSTLKWRMQAVTPFSYVDYFLRELNGGDPPSGRSALLSSELILCIARGTECLGFRPSEIAAAVAAAVVGEEHAAFSHVNKERMSHCQEVIQAMELIHPKPSSPSRVFVSSSIPRSPTGVLDAAGCLSYRSDDSAVASHYAASSWGYEHDSSPVSSKRRKISR

SEQ ID NO: 27930 - protein, 154 aa, Yersinia pestis biovar Medievalis str. 91001
MQKVTKKSDLDHTFYGKARYAEVIQDGVDREVSHMTVNITSKQMDITPAIRKHVEDRLTKLDKWQAQLINPHIVLSKEPQGFVADASISTPMGPLVASAKHDDMYAAINELITKLERQLNKVQHKGEARRAASSVKDANLESVDEEETESEPEQ

SEQ ID NO: 27931 - protein, 120 aa, Yersinia pseudotuberculosis IP 32953
MTVNITSKQMDITPAIRKHVEDRLTKLDKWQAQLINPHIVLSKEPQGFVADASISTPMGPLVASAKHDDMYAAINELITKLERQLNKVQHKGEARRAASSVKDANLESVDEEETESEPEQ

SEQ ID NO: 27932 - protein, 369 aa, Pisum sativum
MEMTLYSSSSFSLPSAPSNPSLSLFTSSFRFSSFKTSPFSKCRIRASLAVEQQTQQNKTALIRIGTRGSPLALAQAHETRDKLMASHTELAEEGAIQIVIIKTTGDKILSQPLADIGGKGLFTKEIDEALINGDIDIAVHSMKDVPTYLPEETILPCNLPREDVRDAFISLSAASLADLPAGSVIGTASLRRKSQILHRYPSLTVQDNFRGNVQTRLRKLSEGVVKATLLALAGLKRLNMTENVTSTLSIDDMLPAVAQGAIGIACRSNDDKMAEYLASLNHEETRLAISCERAFLTTLDGSCRTPIAGYASRDKDGNCLFRGLVASPDGTRVLETSRIGSYTYEDMMKIGKDAGEELLSRAGPGFFNS

SEQ ID NO: 27933 - protein, 317 aa, Acinetobacter baumannii
MQKRHSKLVILGSGPAGYSAAVYAARANLKPTLIAGLQLGGQLTTTTEVDNWPGDPEGLTGPVLMERMQAHAERFGTEIVYDHINEVDLSVRPFLLKGDMEEFTCDALIIATGATAQYLGLESEAKFMGQGVSACATCDGFFYKNQKVMVVGGGNTAVEEALYLSNIAEHVTLVHRRDSLRSEKILQDHLFAKEKEGKISILWNNQVDEVLGDNTGVTSVRLKSTSDGSTQDVEVQGLFVAIGHKPNTGMFDGQLNLRDGYIQVQSGTSGNATATSVAGVFAAGDVADSIYRQAITSAGSGCMAALDAEKYLDQLSN

SEQ ID NO: 27934 - protein, 113 aa, Glycine max
  misc_feature (40)..(40): Xaa can be any naturally occurring amino acid
MAGSGSSMLYSFLLFTVILSLQEMYRGKLASSELYTILGXFIGNLQETIGARTGWGAVIVAEAVALIAASTVHRVCITTCFLFSAALLYEVNKISGSALSTSDSRIKKQSGRA

SEQ ID NO: 27935 - protein, 541 aa, Ralstonia metallidurans CH34
MPTDLQAWNALRQHHDVVRETPMQQWFAEAGAAQRVDAFSLEASGLYLDYSKNRITGETLALLMKLAEEAGVPARRDAMFAGEHINATEDRAALHVALRALPDAPFKVDGASVMPAIHDVLRRMREFAGRVRSGVWTGSTGQGITDIVNIGIGGSDLGPRMVCRALAHLADPRGPRVHFVSNVDGTELAETLQRLDPARTLAIVCSKTFTTLETMANACSMRDWFLRHGVAENQLARHFVAVSTNRDAVVDFGIDPNNMFEFWDWIGGRFSLWSSVGLSIALAVGFDAFEDLLLGARAMDDHFRTAPLAQNMPVVMAMLGIWYRNFHDMPTSCMAPYSTSLELFPAFLQQLEMESNGKSVQLDGRPVDADTAPVVWGTAGTNGQHAYFQMIHQGSQIVPVDFVAPLVPPRELPGHHVKLLANCFAQAEALMRGRSAEELQAAGVDAARIPHMVFEGNRPSNMLLMENLTPHVLGALIALYEHRTFVQGIVWNINSFDQWGVELGKILARPIEAELSGNATEAHDASTAALIARARRSLARS

SEQ ID NO: 27936 - protein, 145 aa, Yersinia pestis biovar Medievalis str. 91001
MNTVCTACMATNRLPEERIDDGAKCGRCGHSLFDGEVINATAETLDKLLQDDLPMVIDFWAPWCGPCRSFAPIFAETAAERAGKVRFVKVNTEAEPALSTRFRIRSIPTIMLYRNGKMIDMLNGAVPKAPFDNWLDEQLSRDPNS

SEQ ID NO: 27937 - protein, 466 aa, Yarrowia lipolytica CLIB122
MLNQMAFRTARVGGGLRTSFLQRRALHACHIARAVIPFKLADIGEGIKECEVIQWFVEPGARINEFDQICEVQSDKASVEITSRYTGVIKKLHYDAGDMALVGKPLVDIDTGEGGEGASEVAAESSDAAPSTAAATPATPLTASASVASSTATTVSSDPSKAYQKALATPAVRRLTRELGIDIASIKGSGKGGRVMKEDVLSYQKGGSAVSDSATGSVTAATTTSTAGSRLVPLTPTQMGMFKTMTNSLSIPHFLYTDEVCLDKLMELRASVNSLLAKSPSNGVSKISYMPFFIKALSLALKDYPMVNAKVDLSGDKPAVLMRDYHNISIAMDTPNGLLVPTIKNVQDKTIVEIAADLQRLQELGMAGKLSRDDLTGGTISISNIGNVGGTYLSPVIVSEQVAIVGLGKARKLPRYNSQGDIVPEQIINASWSGDHRVLDGMTMALMADKWKAYVVDPKAMLLQLR

SEQ ID NO: 27938 - protein, 341 aa, Fragaria x ananassa
MGLGAESGSVCVTGASGFVGSWLVMRLLEHGYTVRATVRDPANLKKVRHLLELPQAATRLTLWKADLDVEGSFDEAIKGCTGVFHVATPMDFESEDPENEVIKPTINGMLDIMKACLKAKTVRRLVFTSSAGAVAIEEHPKEVYSENNWSDVVFCRKVKMTGWMYFVSKTLAEQAAWKFAKENNIDFITIIPTLVIGPFLAPSMPPSLISGLSPLTGNEAHYGIIKQCQYVHLDDLCQSHIFLYEHPKAKGRYICSSHDATIHDIARLLNEKYPKYNVPKKFKGIEENLTNIHFSSKKLKEMGFEFKHSLEDMFTGAVDACREKGLLPLPQEEEAEKSRAG

SEQ ID NO: 27939 - protein, 335 aa, Rhodospirillum rubrum ATCC 11170
MAVRVAINGFGRIGRLVLRALVESGRKDVEVVAINDLGSPEANAHLIKFDSVHGVLPGDVSVSGDVMTIAGTPVKVLAERDPTKLPWGDLNIDIVMECTGIFSDREKAKVHLEAGAKRVLVSAPSNGADLTVVYGVNHDKLTKDHLVVSNASCTTNCLAPVAQVLHSVFGIEHGFMTTIHSYTGDQRTVDTLHKDLHRARAAAVSMIPTTTGAAKAVGLVLPELAGKLDGTSIRVPTPNVSVVDLKVVLSKTATAEAIGAAMKEAAAGKLKGVLGINELPLVSIDFNHNKNSSTFDLPQTKVVQGTFARVLSWYDNEWGFSNRMLDTAVEMGKLI

SEQ ID NO: 27940 - protein, 403 aa, Silicibacter sp. TM1040
MTHIAVIGAGQAGSSLVAKLRKCGFDGEITLIGAEKVLPYQRPPLSKAYLLGEMELERLFLRPESFYAENNITLRLGTKVDAIDAAAKTLQIGDETLSYDQLVLTTGSHPRHLPAAIGGDLGGVHVVRDLKDVDAMAPAVTDGARALIVGGGYIGLEAAAVCAKRGVSVTLVEMADRILQRVAAPETSDYFRALHSAQGVDIREGVGLSHLEGDAGKVTCAVLADGTRLDVDFVVVGVGITPASELAADAGLEIENGIRTDELGRTSDPAIWAAGDCASFPYKGQRIRLESVPNAIDQAEVVAENLLGAEKAYVATPWFWSDQYDVKLQIAGLNSGYDNVVTRQGADGSMSFWYYTGDQLVAVDAMNDPRAYMVAKRLIEAGKTADKAIVVDPEADLKPLLKA

SEQ ID NO: 27941 - protein, 175 aa, Triticum aestivum
MERKQADYSNLDERYTIQGERYQGQQYSHIYYTRLHHMRTLLHALVPSRKPHLLVTTVLGLEEGKDCVLVGTLYKHMKLKPSILDEYSKERSAIPLVKPHNFMHSDDNLILEDESGRVALAGAIPPAAYVTGVVVALHGKETSAGNFLVEDVMEAGLPPQTVLPSINEDKYVVFV

SEQ ID NO: 27942 - protein, 174 aa, Triticum aestivum
MAPAVMASSATTVAPFQGLKSTAGLPVSRRSRGSLGSVSNGGRIRCMQVWPIEGIKKFETLSYLPPLSTEALSKQVDYLIRSKWVPCLEFSKVGFVFREHNSSPGYYDGRYWTMWKLPMFGCTDATQVLNEVEEVKKEYPDAYVRVIGFDNLRQVQCVSFIAFRPPGCEESGKA

SEQ ID NO: 27943 - protein, 129 aa, Prochlorococcus marinus subsp. pastoris str. CCMP1986
MRILHTMLRVGDLDKSIDFYVNILGMNLIRRKDYPHGEFTLAFVGYGSEKDNAVIELTHNWSKKSEDYELGNKYGHIAIGVKDIYDICQGLEDNGCNVTTKPKTMKNSTTVLAFVEDPDGYKIELIERD

SEQ ID NO: 27944 - protein, 398 aa, Thermoanaerobacter tengcongensis MB4
MKILVQKFGGTSVSSEEKREKAVSKVIEAVKNGYNVVVVVSAMGRNGDPYATDTLINMAKSIYSDIPKRELDLIMNCGEIISSVLFAATLSNKGYKAKALTGGQAGIITDDNFGNAEVINVDPSRILEVLREGIIPVVAGFQGITQKGELTTLGRGGSDTTAALLGVALKAEAVEIYTDVDGIMTADPRIVSTAHIIDKISYNEVFQFAEQGAKVVHPRAVEIAMRGNIPLIIKNTMSDSGGTIITNYSDAYDSIYEVDKLVTGIANMNNRVQITIESTENVQDIFEKIGEEKISIDLISIFPDKQVFTISEADFEKLRRLFEKYGVKYSYRTNCAKVSIIGNRIRGVPGVMARVIKALSKRNIEIYQTADSHNTISCLVSQDKVEEAIRVLHDEFSL

SEQ ID NO: 27945 - protein, 446 aa, Candidatus Protochlamydia amoebophila UWE25
MDFISNKTPQIEAMLTEIGIQNVEELFKSIPSSLILQAPSVDDGLSEYEGIQLIESLAVRNTFPNLVSYLGAGAYEHHIPALVGAVCSKSEFLTAYTPYQAEASQGMLQIIFEFQSAICALTGMDVANASVYDGASACAEAILMSLRHHKTRRQILLSDSLHPHYKKVIEQYLKSQDCELITVPFLQEGTLDASFLKMYLNDQTAAILLQSPNFFGCIEDVQPITEMAKSQGALTILCANPISYGLLSSAKELGVDIAVGDCQPFGLSLSFGGPYAGYMACKQELMRQLPGRIVGETLDVQGSRGFVLTLQAREQHIRREKATSNICTNQALAALASLVAMLWYGKEGVKELALTNYQRANYLKFHLGKISTINVWNQGASFNEFVVDFKQDSNQVLEFFRLNGIEPGIELKRYYPSLKTCLLIAVTETKNQIQLDQFIKVCKELF

SEQ ID NO: 27946 - protein, 395 aa, Pseudomonas syringae pv. tomato str. DC3000
MFELVDNVPQSPVIKVIGVGGGGGNAVNHMVKSNIEGVEFICANTDAQALKNIGARTILQLGTGVTKGLGAGANPEVGRQAALEDRERIAEVLQGTNMVFITTGMGGGTGTGAAPIIAEVAKEMGILTVAVVTRPFPFEGRKRMQIADEGIRMLSESVDSLITIPNEKLLTILGKDASLLSAFAKADDVLAGAVRGISDIIKRPGMINVDFADVRTVMSEMGMAMMGTGCASGPNRAREATEAAIRNPLLEDVNLQGARGILVNITAGPDLSLGEYSDVGSIIEAFASEHAMVKVGTVIDPDMRDELHVTVVATGLGAKIEKPVKVIDNTLQTTQQAPAQQAARQEAPSVNYRDLDRPTVMRNQAHAGATAAAKMNPNDDLDYLDIPAFLRRQAD

SEQ ID NO: 27947 - protein, 639 aa, Alkalilimnicola ehrlichei MLHE-1
MCGITGFWGGPAVDEGIAGRMAARIASRGPDDAGAWRDVKAGVALAHRRLSVIELSPAGHQPMRSPCGRYTLVYNGEIYNHLDLRVALETAGGAPDWRGYSDTETLLAALAHWGVPETLTRLNGMFAFALWDNREATLFLARDRMGEKPLYYGRNGGTFLFGSELKALTAYPGWQGQVDRDALALYLRYNHVPAPRSIYRGIGKLPPAHYVAVRDGGRNVGEPQCYWSLGEIAEQGVMQAGGSAHELADELDGLLRDAVGRRMAADVPLGSFLSGGFDSSMVAAQMQAQSERPVKTFSIGFHEAGYNEADHARAVATHLGTDHTELYITPEEAMAVIPELPAIFDEPFGDSSQIPTYLVSRMAREHVTVSLSGDGGDELFGGYNRHVVGPALWGRLARLPAPLRRGLGRAVGVAARIDRLPGAGRVPQLGEKLDKLASAMRASGGTAFYKDLLSHWKTPATVVRGASEPASLPDRIEAMPNLPGLRERMLYLDMMTYLPDDILTKVDRASMAVSLEARVPLLDHRLVAFAWRVPTDYKVRDGQGKWLFRRVLDRYVPRALMERPKMGFAVPIEHWLRGPLRDWAEVLLDERRLEREGFFHPAPIRRMWAEHLSGRRRHHAPLWNVLMFQAWSERQERIG

SEQ ID NO: 27948 - protein, 313 aa, Yersinia pseudotuberculosis IP 32953
MLDKIIRIATRQSPLALWQAHYVQHLLQANHPGLQIELVPMVTRGDIILDTPLAKVGGKGLFVKELELALLDGRADIAVHSMKDVPIAFPEGLGLVAICEREDPRDAFVSSHYAHLDDLPAGSVVGTSSLRRQCQLRERRPDLIIRDLRGNVGTRLAKLDNGDYQAIILAVAGLKRLGLETRIRYAMSAEESLPAVGQGAVGIECRLDDDHTRQLLAPLNHRHTELRVCAERAMNIRLEGGCQVPIGSYAELEGDTLWLRALVGAPDGSQMIRGERRGPAAEAEQMGIELADELLSRGAREILAAVYLDNPAR

SEQ ID NO: 27949 - protein, 163 aa, Gloeobacter violaceus PCC 7421
MIESTQPATRRGYLMKFLVAIDGSETGLSALAKALELAKPTGASLLLLTVAEQANATFWPGMLPTGEPLYQGPPLAELEQIARSVGEAALEKGAKLCEAAGVDYQTRLEFGHARDTICEVAEQEKPDILVIGSRGLGSVQRLMLGSVSDYVIHHAHCPVLVVR

SEQ ID NO: 27950 - protein, 164 aa, Methanothermobacter thermautotrophicus str. Delta H
MKRKYSLVAVGGTFDRFHKGHRRLLDEAFRVGETVMIGVTSDEFAAAKGEGIEPCSVRMKNLEEYLRDKDADYHVMRLDDPYGTTVTDEAFEAIVVSRETEPVAREINAIRRNRGFRELDIITIDMVNADDGIPISSTRIRRGEIDPMGHIIKRIRGALRRRRE

SEQ ID NO: 27951 - protein, 628 aa, Francisella tularensis subsp. tularensis
MCGVVGFYSFNKEEGFDSIINQSLLSIKHRGSDDSGYWCDNQVTLGHTRLSIHDITNAGHQPMLSNSGNTAIVFNGEIYNYLSIKNQLLSEYSNLKFKSNSDTEVLVNAIELWGIDKTLEKCIGMFAFGVYSRKTSCLILARDRFGEKPLYFGIQNGILGFASELKALKPLKECGWRFDIDRDALATYMRYAYVPTPYSIYKNISKLNVGSYIKFDAKGNSKEYKYWDSKKVLDSEKYKDSYDQAILDLEIKLKSTLSIQMQSDVPLGAFLSGGIDSTTVVALMQSMSKDKINTFSIGFNQKEYNEAEHARAVAKHIGTNHTDMYVTERDALDVIPKLAGIYDEPFADSSQIPTYLVSKIAKSKVTVALSGDAGDELFGGYNRYFLAPNIAKKIKFAKLLKYAPDAWIKKAEILNFGKFALLADKLLKLKRVLEKAKTNKELYVLLCSQINDTSFVLGAKEYDILRDKNIYDIPQLSFQEWMMFVDSNTYMIDDILVKVDRAAMANSLETRVPFLDHNIYEFAYSLPIDYKIQRGNGKRILKDLLYKYVPESLVNRSKMGFGIPLAKWLREDLREWADNLLDYSKIDKQGYLSPEVVQKYWQEHLSGKRNWQAILWNILIFQEWLDNE

SEQ ID NO: 27952 - protein, 193 aa, Lactococcus garvieae
MKRIAVLTSGGDAPGMNAAIRAVVRKAISEGIEVYGINHGYAGMVAGDIFPLTSASVGDKVGRGGTFLYSARFPEFAQLEGQLAGIEQLKKHGIEGVVVIGGDGSYHGAMRLTEHGFPAVGLPGTIDNDIVGTDFTIGFDTAVSTVVDAIDKIRDTSSSHHRTFVVEVMGRNAGDIALWSGIAAGADDIAIPE

SEQ ID NO: 27953 - protein, 413 aa, Burkholderia xenovorans LB400
MSMALQRVVVTGMGIVSCLGNTLDEVASALRAGRSRIQRIDAWRERGFASQVAGVASVAHEPPFERKLERFMGDTARFACHAARNAISDAGLDAAALRSPRAGTVIGSGVGTMSTYDAAMATAHARGVDKVPPYTVPHAMSSTASANVAQVFGLEGVSYSPSSACTTSALAIGQAMQLIQTGRQQIVLAGGSESLHDNMTLMFDAMGALSRRFNDTPQRASRPYDTERDGFVIASGGGVLVLESLEYALARGARIYAELTGFGDCTDSAGMVAPRAAGIARAMRGALHEAGKRPDYVNTHAPSTPLGDTEELRALSEVFGAAFDRRVPAFSSTKGMTGHPLGACGAHEAIYTLLMMRDGFIAGTAGIDTPEPAVDGMPLVRVTREARIDTAMSVSFGFGGSCASLVFEAWQGG

SEQ ID NO: 27954 - protein, 412 aa, Arabidopsis thaliana
MLENPKFDLHAVGNHNNDNNYYAFTQDFYQKLGEEGTNMSVDSMQTSNAGGSVSMSVDNSSVGSSDALIGHPGLKPMRHPYSLSDGQSVFRPGKVTHALNDDALAQALMDSKYPTEGLVNYEEWTIDLRKLHMGPAFAQGAFGKLYRGTYNGEDVAIKLLERSDSNPEKAQALEQQFQQEVSMLAFLKHPNIVRFIGACIKPMVWCIVTEYAKGGSVRQFLTKRQNRAVPLKLAVMQALDVARGMAYVHERNFIHRDLKSDNLLISADRSIKIADFGVARIEVQTEGMTPETGTYRWMAPEMIQHRPYTQKVDVYSFGIVLWELITGLLPFQNMTAVQAAFAVVNRGVRPTVPADCLPVLGEIMTRCWDADPEVRPCFAEIVNLLEAAETEIMTNVRKARFRCCMTQPMTVD

SEQ ID NO: 27955 - protein, 145 aa, Yersinia pseudotuberculosis IP 32953
MNTVCTACMATNRLPEERIDDGAKCGRCSHSLFDGEVINATAETLDKLLQDDLPMVIDFWAPWCGPCRSFAPIFAEAAAERAGKVRFVKVNTEAEPALSTRFRIRSIPTIMLYRNGKMIDMLNGAVPKAPFDNWLDEQLSREPNS

SEQ ID NO: 27956 - protein, 110 aa, Arabidopsis thaliana
MPVPLAPYPTPPAPALAPSYNTPPANGSTSGQSQLVCSGCRNLLMYPVGATSVCCAVCNAVTAVPPPGTEMAQLVCGGCHTLLMYIRGATSVQCSCCHTVNLALEGLHAY

SEQ ID NO: 27957 - protein, 647 aa, Ralstonia metallidurans CH34
MLDFVRNNRRLMLLLLLVLVFPSFVFFGVESYSRFMDSSHDAAKVDGRAITVQEVDNVVRDQSERMRQMLGNNYDPRMFEGPAARQAVLDQLIQQRVISEATQKKHLTVSDAQIAAAIQSIPAIAQLRTADGKFDEKAYVQLLAAQGMTPEQLDARMRFELSTQQLGGAIGTTAFVPKSLLDRLIAIRDQQRDVQAIVIKPADFTAKVTPDAAALKAYYESHLAAYTMPEQAKVEYLVLSGDALAASQTITPDQLKSYYDSNIQRFHTDEQRRASHILIAAPKDGKEADRKAAKEKAEKLLEDLRKHPDTFADVAKKNSQDPGSAEKGGDLGFMGRGALVKPFEDAMFALKDGQISDVVETDYGYHIIKLTGIKPAATEPLEAVRPELEIELKKQLAAKAYTEQADAFGNMVYEQSESLKPAADKFKLTIQTADNVTRTPNPVLGKDNPLNNEKVLKALFSDDAIKNKRNTEAVQVGPTTLVSARIVDYRPAAARKFEEVEALVRQAYVAQQAAELARKDGEARLDALKKSGSADGFGSMVTVSRAKADGVSPKAVDSIMRADASKLPSLVGVDLGADGYAIYRIAKVGTPPQANANQREADAQQLGQMAGQTELAAFYDVLKAGAKVKILHPAKTDDAAASAPAAH

SEQ ID NO: 27958 - protein, 411 aa, Zea mays
MNALAATSRNFKQAAKLLGLDSKLEKSLLIPFREIKVECTIPKDDGTLASYVGFRVQHDNARGPMKGGIRYHHEVDPDEVNALAQLMTWKTAVANIPYGGAKGGIGCSPGDLSISELERLTRVFTQKIHDLIGIHTDVPAPDMGTNSQTMAWILDEYSKFHGYSPAVVTGKPVDLGGSLGRDAATGRGVLFATEALLAEHGKGIAGQRFVIQGFGNVGSWAAQLISEAGGKVIAISDVTGAVKNVDGLDIAQLVKHSAENKGIKGFKGGDAIAPDSLLTEECDVLIPAALGGVINKDNANDIKAKYIIEAANHPTDPEADEILSKKGVLILPDILANSGGVTVSYFEWVQNIQGFMWDEEKVNAELRTYMTRAFGDVKQMCRSHSCDLRMGAFTLGVNRVARATVLRGWEA

SEQ ID NO: 27959 - protein, 579 aa, Glycine max
MCGILAVLGCSDSSQAKRVRVLELSRRLKHRGPDWSGLHQYGDNYLAHQRLAIVDPASGDQPLFNEDKTVVVTVNGEIYNHEELRKQLPNHTFRTGSDCDVIAHLYEEHGENFMDMLDGISSFVLLDTRDNSFIVARDAIGVTSLYIGWGLDGSVWISSELKGLNDDCEHFESFPPGHLYSSKERAFRRWYNPPWLSLAIPSAPYDPLALRHAFEKLWIKRLMTDVPFGVLLSGGLDSSLVAAVTARYLAGTKAAKQWGTKLHSFCVGLEGAPDLKATKEVAEYIGTVHHEFHYTVQDGIDAIEDVIYHIETYDVTTIRASIPMFLMSRKIKSLGVKWVISGEGSDVFFGGYLYFHKAPNKEEFHQETCRTIIVLHRYDCSRANKSTFVWGLEARVPFLDKEFIRVAMNIDPECKMIKKEEGRIEKWALRRAFDDEEHPYLPKHILYRQKEQFSDGVGYGWIDGLKAHAEKHVTDRMMLNAANIFPFNTPTTKEAYHYRMIFERFFPQNSCRLTVPGGTSVACSTAKAVEWDAAWSNNLDPSGRAALGVHASAYGNQVKAVEPEKIIPKMEVSPLGVAI

SEQ ID NO: 27960 - protein, 420 aa, Triticum aestivum
  misc_feature (310)..(310): Xaa can be any naturally occurring amino acid
  misc_feature (319)..(319): Xaa can be any naturally occurring amino acid
  misc_feature (342)..(342): Xaa can be any naturally occurring amino acid
  misc_feature (363)..(363): Xaa can be any naturally occurring amino acid
  misc_feature (383)..(383): Xaa can be any naturally occurring amino acid
MDEAGRASAPAVVTVTASAAAPSPPPPPPPATATAAAADPPSPDPDALYEEGMWQQMAMSSGATMQSGPYPVRPGEPDCTYYLRTGLCRMKGEYPERVGQPECQYYLKTGTCKFGPTCKFHHPREKAGIAGMVQLNTLGYPLRPNERECAYYLKTGQCKYGNTCKFNHPEIFNAVASSRGSPIYPPVHNSGSTGPHSYTGTMASWTYPRGSFIPSPRWQSPSNYTPMIVPQGLVQVPSWNSYPGQMVPVSSPESRLQSPGAQQYYGTSRQGEASAGNQGMQSSYRSSSFPAPQYALQRENVFPERPDQPXECIYYIKTXGDCKFGAVCKFHHPRVRSQPPPXDCTLDPMGLPLPHFKGEELCXILSRYGICKFGVNCKFDHPXMAAPMGVYAYGYSASASPNAPMGRRLLESPSGSAYAS

SEQ ID NO: 27961 - protein, 541 aa, Ustilago maydis 521
MISLVQHSFDFFETRLGLAVGFIITLALVYRDRAVFVAKCDHIKGPPGLPLLGNTLQVFKEAADPLQAMLSRSAVYGLPNTMTVLGMGRAINITRPDWIQHVQKTNFSNYVKGPKLHTCLKDLLGDGIFNADGHSWKAQRKVGSNIMTMSNLKNLVAGVLDAQSQRFSDLLQQAAKQGTPIDLQKAYFDFTIQTFLRIAFSTDLETVQSTRIATRSEQQKAAQHLSFADAFDLAQRLTVRRINRPWWKLTRRWEPSEKKLEHAIRTIDRYLYPLIERRSQNKSKADKRHADLLDLFLSYRDDQDQPLTPKQLRDALLNYLLAGRDTTAESLSWASFELLRHPEVVHDLRQELMSHSIWFDPHQKIDDDDAEQRSSSFELSHTKQLHHVRSIYHESLRLHPSVPRSSKIALQDDVLPGGVVVPKDTTVIWSDWLLARNKSVWGDDADEWKPRRWLNAEGEFINESPWKFHAFNGGPRTCLGIQLAQFQGMYMLSRIFSDFDLELESDRGLHFEPEVENTLTLPMKHPLMVRVYTRAKTSRAP

SEQ ID NO: 27962 - protein, 658 aa, Rhodospirillum rubrum ATCC 11170
MCGLTGYWTRGGDGRGRGEMTALVLRMAGALAHRGPDGDGAWVDEDAGLALGHRRLSIVDLSPAGQQPMVSADGRLALAYNGEIYNAAELRPELEAAGIVFRGHSDTEVLLEGFARWGVVPTLRRAIGMFAFALWDRKERRLTLGRDRLGIKPLYVADHGGTLLFASQPKGMMPHPSWRGEVDREGLAAMLRLSCLPAPRSIFKGVSQLAPGTVVRFEADGRRSEEVFWSLEEVAARGVAQARSQPARPESASLAVEHLESLLLDAVRRRLIADVPVGAFLSGGVDSSTVVALMRKVASGPVKTFSIGFAEEGWDESVHAAAVARHLGTDHRELVVSPDEVPAIVGDLPRWYDEPFADASQIPTLLVSKLARSEVTVSLSGDGGDELFAGYNRHVQGQRLWDLAQRIPTVGRDLGAALIEAPSPGFWQRAVGLLPAGRRPPQAADKPAKIARLLRARSPEALYRTLVGAMPSAEVPLAGVSLAAEERWYAASAEGVDSFVDRMRLLDAKGYLPDDILTKVDRASMAYGLEARVPLLDHRVVEFAWSLPPEMLIREGQGKWLLRRVLHRHVPRALIERPKMGFGVPLAAWLRGPLRGWAEDLLDPQTMAVQGLIDPAPVRRWWLDHLAGRRDTHDRLWPVLSALSWHHHWKSAGAFTAA

SEQ ID NO: 27963 - protein, 372 aa, Pinus halepensis
IRRTPPTPQDEMRAGMSYFHETIWKGVPKFLRRIDTALKSIGINERMPYNAPLIQFSSWMGGDRDGNPRVTPEVTRDVCLLARMMAANLYYSQIEDLMFELSMWRCSDELRARALQLHSASKKDAKHYIEFWKQIPPNEPFRVILGDVRDKLYNTRERTRQLLSNGISDIPEEVTFTNVDGFLEPLELCYRSLCSTGDQPIADGSLLDFMRQVSTFGLSLVRLDIRRESDRHTDVVDAITKHLGIGSYEEWSEERRQAWLLSELQGKRPLFGPDLPKTDEVRDVLDTFHVISELPADNFGAYIISMATAASDVLVVELLQRECHVKKPLRVVPLFEKLADLEAAPAALARLFSINWYRNRIDGKQEVMIGYS

SEQ ID NO: 27964 - protein, 364 aa, Cryptococcus neoformans var. neoformans JEC21
MSLWSNIWLWIRYQVNVIIHCGFPCFFWVQPTWSIDKIENQEGKVVLITGGNSGTGYATALALYNAGATVYIACRNLTRAKEAAEDIKKGGERGIWGVTYPRKELDKAGGNKKGRVEIIQLDLTDLASVEKCAEEFLNKEKKLDLLFANAGIMATPEGQYTKQGYTLQFGTNTLGHHRLITLLLPLLLSSPPSLPSRVILTSSAGHSMAPKGGVNFKSVVRDPSDTGSGQGKYELDKWTEYAQSKWGNIASAKYLEDTYGKEGRLIAVAVHPGLVATNLTNHLPFVGIFYRWVPWLRHLFTRDPSTGALNQLYAATLPLPDAWFLNGEYVVPYNTVGICRSDLLDKKRIEEVWNWCDEQGKKFA

SEQ ID NO: 27965 - protein, 148 aa, Archaeoglobus fulgidus
MKVALGGTFEPLHEGHKKLIDVAIKLGGRDITIGVTSDRMARARIRSVLPFAIRAENVKRYVMRKYGFEPEIVKITNPYGKTLDVDFEYLVVSPETYEMALKINQKREELGKRKITIVKVDWMMAEDGKPISSTRIKRGEIDRYGGII

SEQ ID NO: 27966 - protein, 420 aa, Thermoanaerobacter tengcongensis MB4
MKLYQQKMIAGVKVASCKIPYAHSVYVGIWIKAGSMYETKNINGISHFIEHLVFKGSNLRSARQIAEEMDSIGGQLNGFTEKEDTCFYIKVLNSHIKKGIDILFDMVFNPAFCEEDIYKEKQVVFEEILTELDSPEDVAYNLLAKTAWRGHSLSLPVLGTFTTIKNLSKNHILEYYERHYTKDNIVVSIAGNFDDEIFEVLEGYLSKIKPTTSNFSLIPPLWHKDVSLYEKDFEQVNLCIGLPGIPYDLKKVYALAIANNAFGGGMSSRLFQKIREDKGLVYSIYSYPATYPTGGMFTIFASMTPSNFRKVYDLIIKEIEEISKKGLTKEEFDKFKEQLKINILMDQDSISTRMSSIGKSLLLFDKVHLIEDVLKIVEEISFEEVNQLAKEIIRPEEMTVSVVGKLNKKDKRWLENVNSA

SEQ ID NO: 27967 - protein, 637 aa, Saccharophagus degradans 2-40
MAKQIINVPDIGGADNVDIIEICVAVGDTVSAEDSLLVLESDKASMEVPSPVSGKVVGILVKEGGKVSEGDAIFEIEAEGAADAPAAEPAAAPAAAPAPEAAAPAASSEQLVKVPDIGGSENVEVIELCVAVGDEVAEGDSIIVLESDKASMEVPAPASGKVVSFAIKEGDKLSEGDDILVLEVSGGAAAPAAAPAESAPVAAAPAPAPAASGGVTDVNVPDIGGSENVEVIEVCVAEGDEISEGDSIVVLESDKASMEIPSPASGKVVSITVKEGDKVSEGAALLKLEIVGAAPAAAPAPAAAPAAPQAPAKPVEQPVKTTQELHPAEVSATTGEVYAGPAVRKLARQLGVNLSEVKPTGPRKRHTKDDVREFVKTVMKQRSTGGAAVTGGSGIPAVPAVDFSQFGEIEMQKMSKIKKVTAAAMVRNWLNVPHVTQFDDADITELEAFRKNMKAEAEAAGVKLTPLPFLLKACAAALKAEPSFNVSMHPDGEHIVQKKYIHIGMAVDTPNGLVVPVIRDVDKKGLFELAAETVALAKKARDGKLMPKDMQGGCFTISSLGPIGGTGFTPIVNAPEVAILGVSKADIKPRWNGKEFEPRQMLPLCLSYDHRAINGGDAGRFFTFLSAVLSDVRRLLL

SEQ ID NO: 27968 - protein, 526 aa, Cryptococcus neoformans var. neoformans B-3501A
MMRIPAAPRFASKASTSSRLLVPSRRATTAATSSAHTLNPAGTVTTLPNKLRVATESIPGHFHAVGVYIDAGSRYESQRTSGVSHLLDRLAFKSTDKHTDAQMTTLIDSLGSQVTCASSRETIMYQSTVFPQSLPLAFELISSTIRHPLLLPEELLAQKEAAAYEIREIWAKPELILPEILHTVAFRDNTLGMPLLCPESQLGVLGEEEVRGFMRDWYRPERMVVAGVGMPHEELVMLAEKFFGDMPATTTSPGSLHPSVTQAQQPLGSKSFATASALPVSQDYTDLAHAKAQYTGGELYMEKPEEEFVHIHIGFEGLGIHDPDIYALATLQTLLGGGGSFSAGGPGKGMYTRLYTKVLNQYHAVDFCAAFHHCYADSGLFGISASVYPQFASRIVDVMAGQLHALTGPMFGGVEEKEVRRAKNMLKSTLVMALESRLTAVEDLGRQVQIHGHKVPVEDMCAKVDALTMADLHRVANRILRPGNSSEGRVNYGLGSGKATVVAQGPGLGALGDVRRILKDRWVLGV

SEQ ID NO: 27969 - protein, 1628 aa, Magnaporthe grisea 70-15
MNGLCPACRRPYDEKTIQWKVVTTEEVAEFRANIQKNQKKRAAEQRQKEVQKREAEKENRKNLVGVRVVQKNLVYVTGLTPTGSEDELLKTLRKPEFFGQYGNIQKISISNRRSSDGQNQSLGIYVTFERKEDAQRCIAAVNGSQNGDRVLKAQLGTTKYCSAWLRHEQCSNRQCMFLHEQADEDDSYTRQDLSSMNSIHTQRPLSNAAGSSSRTSSRQQTQTPAPSSQTQPSSQAMARAGSKEGSDNGDSSALPSSANWARNPQVRSRRGSHATSGAASSPAVSMSLPATVEAPQEPVEESSQGDSETAQAQPPTEPVQSPSRTSTQAADESMPRRFDDATIEYIKAIGGGSTQLRLMEPFSLSAYPPLFDSRGGEKRRVLGDEDETRVSGVAEALDNQDLSEGEPEQGGSHALGGEPEDRDIGLDSAFDQHRPGTQPPIQRTGNSEGIFGPAIGSNYMPSSTAGSLGGRSMTPQQQQQLFSRPQAAFADHLPPGIGAAQTSLFQGQGQGQAHNRQGSRYSFANDNGAGSSTSVKLAANPRAMAQQSSMMPSSSSFHSQPASQYYATSISGPPPGLKSTGTPPNLFGAQGHAFGGSSAFGSVGVSKESNNDLLQSIMRGRGGQSAAGHDAGKREYLLHSFPNQLPPPSASSTLAPAPGLLASFYGNQAGNLQDFGMKQKKKGKKHRHANTSSSGGGVLVDLADPSILQARMQHQTNVNVGQGMFGGQSQGLRGIGLPGVSLLRGLWDERVKKTGRNADSTTDHLVISASFLIYDAGMRITRRDHTFQLGWLGNSTLSARTAARQASKPSSSSLRVFNTSTPWYSDCINALGKTMEEVVAYDDLELDEHVATNIDALVSDEPAELLPPPGNLTGVMGRSGTPSVPPGFGPPITTAQSSPTQLNSTMPMLTASPLSPAPSLSSKKANDEAKKSIRASAVESGLTKDIAAQSSKTSQGKAVLHEEDFPALNAPKPAPAAQPAVPAMQSASKATAPKTTTATNKNKKAGAGETLKVASPALTPALPATQKTMDKKPTPGILNIAAATRAAQTKGADSASATEKSADYPALPTPSSATSFNTTTAARTGPKTLRVVSTPTPRTEVPPPINAATAIAAAAGTSGRSSVLSSHRPGTPHSEFPSDSASVISGSITTSRPNSPPPAGASRIGSAAVRSTTKSQQRKQRKQATKKDAAELISTQTVPEEEVPVIAPILGRKKKQRKERAVASGPSTPTESCAATPGPVAHVDDADAEATQKEVPVKEVEQPVLVKDKGKQGKTSTDGTKNKGKDREDAREVSKAEANAPEKPPKEPIPETAPERGTNEPAEKQAPSPATTLRELESQGLVDTTAIKSLLEPPHSIHHRLERLDAVTTAKEMSTPTKSVVNDEDQVKLLGGEVVHKIVEGVRIMLTPNGDCVRGLSPEEEARFLRLQESLANSAGTPAFFMHPRYEAAGGFSLIKGRAVPNGPPSFFPPAGSAYASDPVAKIQREEAIYYINQFVLPKLNQGAVNSPAGGKANEQSDAGNCQLSNIAPWIQPGEPVSGPGATWTDEPLMSAFDGDVAADGQPQPIPGQPHMTAAAMTTRAFANVPLMSVEEAEKTLQAARRETEKLEKSLYSVIKKNRRLLLGTGGN

SEQ ID NO: 27970 - protein, 158 aa, Pyrococcus horikoshii
MKRFKKVVVGGTFDRLHLGHKALLRKAFEVGKIVYIGLTSDEMVKEKPYAEKILPYERRLKDLIEFLEVNNFKGYRIIKINNAIGFTTEIRSLEAIVVSEETYKGALIVNRAREEVGLKPLEIIVIPIIKSKLGCKISSSLIRAGLIDPFGNPMKPRS

SEQ ID NO: 27971 - protein, 147 aa, Methanocaldococcus jannaschii [sequence omitted]

SEQ ID NO: 27972 - protein, 140 aa, Shewanella sp. MR-4
MIIACPHCDTLNRVPQERLTEQPTCGKCKQDLFAAAPIELTSANFINHAHKSELPIVVDFWASWCGPCKSFAPTFSAAAKAWEPQFRFGKINTEEQQALAAQFGIRSIPTLMIFKQGHLIAQQAGALPKSALDQWLQSYC

SEQ ID NO: 27973 - protein, 147 aa, Prochlorococcus marinus subsp. pastoris str. CCMP1986
MNIAFREVDPFNCWIWIKFFEIPTEAEKNYLDGVFDSWYVLGRLGGFNSENLQTHEEGSDLSWMSYDNEQKESALPALMHNLGVMEYQNLWSRSWVDFGTSDSLSIDILINALNEISNNYVKIDELIIGGENSDWSIEEHEDLVFKN

SEQ ID NO: 27974 - protein, 316 aa, Musa acuminata
MDSFPVIDMEKLSGGERGAAMEILRDACEKWGFFEILNHGISHDLMDEVEKVNKEQYNKCREQKFNEFANKALENADSEIDHLDWESTFFLRHLPVSNISEIPDLDDQNAMKEFAAEIEKVAERLLDLLGENLGLEKGYLKKAFSNECKGPTFGTKVSSYPPCPRPDLVKGLRAHTDAGGIILLFQDDQVSGLQFLKDGEWLDVPPIRHAIVVNLGDQLEVITNGKYKSVVHRVVAQTDGNRMSIASFYNPGSDAVIFPAPALVEKEAEEKKEVYPRFVFEDYMKLYVGHKFQAKEPRFEAMKAMEAVATHPIATS

SEQ ID NO: 27975 - protein, 709 aa, Arabidopsis thaliana
MVVATTIALYASPPSSVCSTPHQISCDLDLTSRSSSTSSSMASSPQKPIVGGLSSLFSSASVKSSSSSSCSYSTGVDEFSSLRYDRSDDLKDLSFSSSFGYSPAKFVNSFRRDHQSPISVLHGPVSCSCSPPMRMSRDRNLDGSFRLGASGLFNGFVRKALGSCVDYEFGSDSVLVDELTFPMEVDTIKPYARDLLRRAQLRHKIFNDESVIKAFYEAEKAHRGQMRASRDPYLQHCVETAMLLANIGANSTVVVAGLLHDTIDDSFMSYDYILRNFGAGVADLVEGVSKLSQLSKLARENNTACKTVEADRLHTMFLAMADARAVLIKLADRLHNMKTLYALSPVKQQRFAKETLEIFAPLANRLGISTWKVQLENLCFKHLYPNQHNEMSTMLEDSFDEAMITSAIEKLEQALKKAGISYHVLCGRHKSLYSIYSKMLKKKLTVDEIHDIHGLRLIVDNEGDCYKALGVVHSLWSEVPGKLKDYITHPKFNGYQSLHTVVMDNGTVPLEVQIRTQEMHLQAEFGFAAHWRYKEGGCKYSSFVLQMVEWARWVVTWHCEAMSKDRSSISSSDSIKPPCKFPSHSEDCPASYKPNSSQDGPVYVIVIENDKMSVQEFPASSTVSDLLSRAGPGSSRWSMYGIPAKEELRPRLNQIPVSDLKWKLKMGDVVELTPTIPDESLTEYREEIQRMYDRGLAFSRPGTMVGWGS

SEQ ID NO: 27976 - protein, 544 aa, Aspergillus nidulans FGSC A4
MASLSPAQSGGASAPQSVEKISRLAQDYKFNPAVPLRYWLRTAATLVREARIYLREGHDEQAYLLLFRHAQLVLVHLADHPDLKDGKDVREERKALIAAEKEVKQNLEILEKLKPRINKRYERHTQLMRERQSRMSSSAAVSPAASSQPSPPPDPALSGVAEPLEAGKDNELAVKLARTEISRRATVRNAMRQGGLSGEDDSSRRAAGIWGDWEEALQRNERRDPDDLSRRIQEVRLNLEGRPQISSKSVTRPLADVSSTPTYKYPTVPRQKALDVPSVPVDIPKTEARELTKPPVLPPKESFQTSQPSGLELPPRPDKISQAVPPASAAAVPTKVPGDDKRKGLDPSSFTFKPSAYLENGTPLRTVFLPPQLRSHFLSLAASNTRKNLETCGILCGTLISNALFISRLLIPEQISTSDTCETVNESAIFDYCDSEDLMVLGWIHTHPTQTCFMSSRDLHTHCGYQVMLPESIAIVCAPSQTPNWGVFRLTDPPGLKSVLSCTQTGLFHPHAETNLYTDALRPGHVFEANGLEFETVDQRVNKS

SEQ ID NO: 27977 - protein, 653 aa, Avena sativa
MGNPGAFRCSVTLQALIVFSLIAVFAADHVQGGDDGCAPFSCGHLQDISSPFRRQGDPLECGVGAYELGCTSSKATIHINTGTYYVTAINYTNSYFRVMDTNFDTNSSCPLPLWNHLPYVESILDSHGFWDLSIRSGYTACFANCSRAVTNNGAYKPVDCLSADNSHVYIWMSGYFDCRVLDLEPYCGYLAMIPFGEEYSSDMQLQLQGASYADIIQLITKGFTIQFPYEEYREPSLSKDMNICLNHSISYFKELISHASFVNWTRAFFWSDMYFYRCVDRLYTFEHTTSPVVAQLIAVPKFLFVYKYLKTRITIDAVEKFLRIQQMIGPTRYAYTDIVALTSHFRDKLGQGGYGSVYKGVLLPGGAHVAVKMLEGNSSCNGEDFISEVSTLGRIHHVNVVRLVGFCSEELRRALVYEYMPHGSLDKYIFSAEKSFSWDKLNEIALGIARGINYLHQGCDMQILHFDIKPHNILLDTNFVPKVADFGLAKLYPRGDSFVPLSAMRGTVGYIAPEMISRSFGVISSKSDVYSFGMLLLEMAGGRRNADPNAAASSQGYYPSWVYDQLTLQGESGEISPVTANMHELEKKLYESRDRPTMSEVMDMLEAGADGLQMPSRPFFCDEGHIHVEDSYHFTSELTTVSEELTVVSEDEE

SEQ ID NO: 27978 - protein, 353 aa, Triticum aestivum
MVPSGYDCAASVLLCAEDNAAILGLDDDEEDCSWAAAAATPPRIAADAAAAAEGFLVDHPVQSDECVAALVETEKEHMPADGYPQMLLRRPGALDLAAVRRDAIDWIWEVIEHFNFAPLTAVLSVNYLDRFLSVYPLPEGKAWVTQLLAVACLSLASKMEETYVPLPVDLQVVEANSAFEGRTIKRMELLVLSTLKWRMQAVTACSFIDYFLRKFNDHDAPSMLAFSRSTDLILSTAKGADFLVFRPSEIAASVALAAFGERNTSVVERATTTCKFINKERVLRCYELIQDKVAMGTIVLKSAGSSMFSVPQSPIGVSDAAACLSQQSDDTAVGSPATCYQASSASKRRRIGR

SEQ ID NO: 27979 - protein, 494 aa, Ammi majus
MKMLEQNPQYLYFFSLFLVTIFLYKWLTLKKTPLKNLPPSPPQYPIIGNLHQIGPDPQASLRDLAQKYGPLMFLKFGTVPVLVVSSADAAREALKTHDLVFADRPYSSVANKIFYNGKDMVFARYTEYWRQVKSICVTQLLSNKRVNSFHYVREEEVDLLVQNLENSHSKVANLTELLIEVTGNVVCRVSVGSGDKVDSYKILILEIMDMLGYSRSIEDFFPLLGWVDWLTGLRGKVAEAAKGVDTFLEGVLKEHLSTTGSKYNDFVSILLEIQEADAGSSMDNECIKSLIWDMLGAGTETISTALEWTLAALIKNPDAMFKLQNEVREIGKGKSKISEADLVKMNYLQAVMKESMRLYFTAPLLVPREARQDIKFMGYDISSGTQVLINAWAIARDPLLWDKPEEFRPERFLNSPIDYKGFHYEFLPFGAGRRGCPGIQFAMCINELVVANLVHKFNFELPDGKRLEDLDMTAASGITLRKKSPLLVVARPHV

SEQ ID NO: 27980 - protein, 506 aa, Zea mays
MLPSFVSPTASAAASVTPPPRPIPGSYGPPVLGPLRDRLDYFWFQSQDEFFRKRAAAHRSTVFRTNIPPTFPFFVGVDPRVVAIVDAAAFTALFDPDLVDKRDILIGPYNPGAGFTGGTRVGVYLDTQEEEHARVKTFAMDLLHRSARTWSADFRASVGAMLDAVDAEFGKDDGSDKKPSASYLVPLQQCIFRFLCKAFVGADPSADWLVDNFGFTILDIWLALQILPTQKIGLVQPLEELLIHSFPLPSFLIWPGYYVLYRFIEKHGAEAVAYAEAQHGIGKKDAINNILFVLGFNAFGGFSVFLPFLVAKVGGAPALRERLRDEVRRAMVGKDGDGDGEFGFATVREGMPLVRSTVYEMLRMQPPVPLQFGRARRDFVLRSHGGAAYQVTAGEVLCGYQPLAMRDPEVFERPEEFVPERFLGDEGARLLQHLFWSNGPETAQPGPGNKQCAAKEVVVDTACMLLAELFRRYDDFEVEGTSFTKLVKRQASPSVAQAAAAAGAQQ

SEQ ID NO: 27981 - protein, 495 aa, Avena sativa
MLVHPFLGPCRVTAIYYSRFVIELIPLLASSPCPLQKLYSKTIPVHFAYEEHPRKAHCDIADIYDEKRAILQHNSLLVFVAANQLMTDLPLNCEVVSDGLIWLPYSWDQSGSYWQPTLNTSVERILKSAKTEQGWTGSHIKVIAATSSVATLIVLFLIVATAVYLSLKTNYNKEIHLKVEMFLKTYGTSKPTRYTFSEVKKIARRFKVKVGQGGFGSVYKGELPNGVPVAVKVLENSTGEGEVFINEVATIGLIHHANIVRLVGFCSEGTRRALLYEFMPNDSLEKYIFSPDSNIFQDLLVPEKMLDIALGIARGMEYLHQGCNQRILHFDIKPHNILLDYNFNPKISDFGLAKLCARDRSIVTLTAARGTMGYIAPELYSRNFGGISYKSDVYSFGMLVLEMVSGRRNSDQGIESQNEVYLPEWIYEKVTTGQDPVLTRELTGEERVKIRQLAIVALWCIQWNPKNRPSMHKCGKYVDREVAESTDTTKAFCVI

SEQ ID NO: 27982 - protein, 639 aa, Avena sativa
MSKLLVIAILLLPLISHGRDLSTIWVWEDKDFFKYCPPSQCSQHGPEIRYPFCLASSNTSSCGCGSRSVRKLVCSGQDTILVHPVLGPYNVSAIDYRHSSMKLIPLVDPCMVLQKKLISSRSSSSSQVYDDNDYDEDYDEYHEFLDPSATLVYCSREFTPSAADRIAGPVSCLSNTTHFLYFVASDEVISLLPLDCKVIPVSDGGGGRTIAMYMYAPVSMLDLYPQSFKESAESILSFAKKTVYWNGYNCRQCELSGGRCAFSAQRLEPFCMPHGSRTKVIAATSSVAAFVVLLLTVATALYLSLRTRYNEEIHLKVEMFLKTYGTSKPTRYTFSEVKKIARRFKEKVGQGGFGSVYKGELPNRVPVAVKMLENATGEGEVFINEVATIGLIHHANIVRLLGFCSEGMRRALIYEFMPNESLEKYIFSHDPNIFQNVLVPNKLLDIALGIARGMEYLHQGCNQRILHFDIKPHNILLDYNFNPKISDFGLAKLCAKDQSIVTLTAARGTMGYIAPELYSRNFGGISYKSDVYSFGMLVLEMVSGRRNSDPSTESQNDVYLPEWIYEKVINGQELALTLETTEEEKEKVRQLAIVALWCIQWNPRNRPSMTKVVNMLTGKLQNLQMPPKPFVTSENQPMP

SEQ ID NO: 27983 - protein, 478 aa, Roseovarius nubinhibens ISM
MYSYPELKLFINGEWRGAAEDMAVVNPATEEELGRLPKAGISDLQEALAAAEQGLRLWSRTPPRARADIILRAAALMRERQEEIAQSITAEHGKPLPQARLEVIRGVEFFEWDAGEAMRVYGRVIPAAPGSHISVHHHPIGVVAAFSPWNFPMSQPARKIAGALASGCSIILKAAEETPAGAIHIVRAFEDAGLPAGVLNLIFGTPSEISGYLIPQPSVRLVALTGSTAVGRQLTALAAQSDTRVLMELGGHAPVIVCEDTDVERAAISGAVRKMRNAGQVCTSPTRFFIHQDIFEQFAEAFTRRAAATVVGNGVEPGVEMGPLANDRRVPVLSALVEDAVAKGAELRCGGAAMGERGYFFAPTVLANVPDNARIMQEEPFGPIAILNPVRDLDEAIARANAVPYGLAGYGFTNRADYMARLVDEVEVGNLSINTLEASLPETPFGGVKASGYGREGGTEGLESYLTIKNVWHSAEIR

SEQ ID NO: 27984 - protein, 653 aa, Avena sativa
MGNPGAFRCSVTLQALIVFSLIAVFAADHVQGGDDGCAPFSCGHLQDISSPFRRQGDPLECGVGAYELGCTSSKATIHINTGTYYVTAINYTNSYFRVMDTNFDTNSSCPLPLWNHLPYVESILDSHGFWDLSIRSGYTACFANCSRAVTNNGAYKPVDCLSADNSHVYIWMSGYFDCRVLDLEPYCGYLAMIPFGEEYSSDMQLQLQGASYADIIQLITKGFTIQFPYEEYREPSLSKDMNICLNHSISYFKEHISHASFVTWTRAFFWGDMYFYRCVDRLYTFEHTTSPVVAQLIAVPKFLFVYKYLKTRITIDAVEKFLRIQQMIGPTRYAYTDIVALTSHFRDKLGQGGYGSVYKGVLLPGGAHVAVKMLEGNSSCNGEDFISEVSTLGRIHHVNVVRLVGFCSEELRRALVYEYMPHGSLDKYIFSAEKSFSWDKLNEIALGIARGINYLHQGCDMQILHFDIKPHNILLDTNFVPKVADFGLAKLYPRGDSFVPLSAMRGTVGYIAPEMISRSFGVISSKSDVYSFGMLLLEMAGGRRNADPNAAASSQGYYPSWVYDQLTLQGESGEISPVTANMHELEKKLYESRDRPTMSEVMDMLEAGADGLQMPSRPFFCDEGHIHVEDSYHFTSELTTVSEELTVVSEDEE

SEQ ID NO: 27985 - protein, 218 aa, Vibrio parahaemolyticus RIMD 2210633
MNQSSLLAEFGDPITRVENALIALKEGRGVLLLDDEDRENEGDIIYSVEHLTNEQMALMIRECSGIVCLCLTDAQADKLELPPMVVNNNSANQTAFTVSIEAKVGVTTGVSAADRVTTIKTAANPHAKPEDLARPGHVFPLRARPGGVMTRRGHTEGTIDLMQMAGLQPAGVLCEVTNPDGTMAKAPEIVAFGHLHNMPVLTIEDMVAYRNQFDLKLA

SEQ ID NO: 27986 - protein, 335 aa, Xanthobacter flavus
MSVKVAINGFGRIGRNVLRAIIESGRTDIEVVAINDLGPVETNAHLFRFDSVHGRFPGEVKVAGDTIDVGRGPIKVTAVRNPAELPHKELGVDIALECTGIFTSRDKAAAHLAAGAKRVLVSAPADGADLTVVYGVNHEKLTNEHLVVSNASCTTNCLAPVAKVLNDAVGIEKGFMTTIHAYTGDQPTLDTMHKDLYRARAAAMSMIPTSTGAAKAVGLVLPELAGKLDGTSIRVPTPNVSVIDLKFVAKRATSKEEINEAIIAAASQQLKGILGFTDQPNVSIDFNHNPNSSTFHLDQTKVMEGTLVRVLSWYDNEWGFSNRMSDTAVAMGKLG

SEQ ID NO: 27987 - protein, 641 aa, Avena sativa
MSKLLAIAILLLPLIDHGIDLATAWDDKDFFKYCPPSRCSQHGPEIRFPFCLESINTSSCGCGSRSIRKLACSGQDTILLHPVLGPYNVSAIDYRHSSMKLIPLVDPCMVLQKKLINFRSSPCPQIDDINDNLLVHFYRSTSLVCCSGEFTPSAADRIAGPISCLSNATHFLYFAAGYEDMSLLPLDCKVVPVSDGLYGRIPTYILDDPIVGRYQQSQLFKESAEIILSSAEMTVYWYDGAQNANTMGDTARSTHKGKLHSACLTLTNSTKVPLVAFLSNHIEPTTSSVAVFVVLLLTTVTMIYLSLRTRYSEEIHFKVEMFLQTYGTSQPTRYTFSEVKKIARRFKEKIGQGGYGSVYRGELQNRVPVAVKMLENSRGEGEVFINEVAPIGLIHHANIVRLVGFCSEGTRRALIYEFMPNESLEKYIFSHDPNIFQHLLVPQKLLDIALGIARGMEYLHQGCNQRILHFDIKPHNILLDYNFNPKISDFGLAKLCPRDQSIVTLTAARGTMGYIAPELYSRNFGEISYKSDVYSFGMLVLEMVSGRRNSDPSIESQNKVYLPEWIYEKVINDHELALPAETTEEEKEKVRQLAIVALWCIQWNPRNRPSMTKVVNMLTGSLQNLQMPPKPYVTSENQLMP

SEQ ID NO: 27988 - protein, 181 aa, Vibrio parahaemolyticus RIMD 2210633
MKGLLKLAAYLGFISMSSFVLASECPDILQGKQRMLNSTEEIELCEVFKGKTLLVVNTASQCGFTPQYEQLETLYQTYKDKNFAVIGFPSNDFRQDKGSEENTAKICYLDYGVTFPMMARSSVLGNDANPVFSEISTQAGVTPKWNFYKFLISKEGKVIATFPSSTSPTSTTLTNMIEQQL

SEQ ID NO: 27989 - protein, 272 aa, Francisella tularensis subsp. holarctica
MDALRPSLAIGKARVHMYLPVDPNLAQASLGSKNDNEQNIKNVYELVKLASDEGFEVEFSAEGYSRLGDTFDYVTNIFRAAVAAGVKVINCPDTIGGACERENDNYFVKNMAKHAEIIKKEFPDRNIIWSAHCHNDLGLALENSMNAVFDGPARQVEGCINGVGERAGNAPLEQCVMFINLFGKQKDYHYYNDVNIAHFKTISDFIGKRMLSRQPHHPITGLNSARHTSGGHTNAILKNPIAYQPFHPESVGNEISFIFGPLSGGNHAKKII

SEQ ID NO: 27990 - protein, 84 aa, Francisella tularensis subsp. holarctica
MDKQKIYIFDTTLRDGQQSPGAGMSFEDNIAYADLADKLNIDVLEAGFPSASNTDFEIINTISKRMAERNSNMIRTMSVKKKPS

SEQ ID NO: 27991 - protein, 129 aa, Brassica napus
MQDQLVCHGCRNTLLYPRGATNVRCALCNTVNMIPHHPSPHARAGMDMAHIVCGGCRTMLMYTRGGTSVRCSCCQTLNLVPAPTPSNQFAHINCGNCRTTLMYPYGASSVKCAVCQFVTNVNLMGNGRV

SEQ ID NO: 27992 - protein, 115 aa, Arabidopsis thaliana
MAGLMKLGCLVFVFVIAAGPITAKAALSCGEVNSNLKPCTGYLTNGGITSPGPQCCNGVRKLNGMVLTTLDRRQACRCIKNAARNVGPGLNADRAAGIPRRCGIKIPYSTQISVR

SEQ ID NO: 27993 - protein, 316 aa, Wolbachia sp.
  misc_feature (314)..(314): Xaa can be any naturally occurring amino acid
LCHKKIQLGINLTKGLGAGALPDVGKGAAEESINEIMEHIKDSHMLFITAGMGGGTGTGAAPVIAKAAREARAVVKDKGAKEKKILTVGVVTKPFGFEGVRRMRIAELGLEELQKYVDTLIVIPNQNLFRIANEKTTFADAFQLADNVLHIGIRGVTDLMIMPGLINLDFADIETVMSEMGKAMIGTGEAEGEDRAISAAEAAISNPLLDNVSMKGAQGILINITGGGDMTLFEVDSAANRVREEVDENANIIFGATFDQAMEGRVRVSVLATGIDSCNNKPEASSVNQNKIPAEEKNFKWPYNQIPISETKEXIQ

SEQ ID NO: 27994 - protein, 560 aa, Leavenworthia crassa
MTSSTALICDTEAWKDLKKHVEDIKKTHLRDLMNDANRCESMMLEFDGLLLDYSRQRATVETMNKLLKLAKDAQLPEKISRMFNGEHINSTENRSVLHVALRAPKDAVIMADGKNVVPEVWNVLDKIKEFSEKIRSGSWVGATGKPLEDVVPIGIGGTFLGPLFVHTAPQTDPESVECAKGRQLRFLPNIDPVDVARNIKGLNPETTLVVVVSKTFTTAETMLNARTLREWITAALGASAVAKHMVAVSTNLALVEKFGIDPNNAFAFWDWVGGRYSVCSAVGVLPLSLQYGFSVVEKFLKGASSIDQHFKSTSLEENIPVLLGLLSVWNVSFLGYPARAILPYSQALEKFAPHIQQVSMESNGKGVSIDGLPLPFETGEIDFGEPGTNGQHSFYQLIHQGRVIPCDFIGVVKSQQPVYLKGEIVSNHDELMSNFFAQPDALAYGKTPEQLHKENVSENLIPHKTFSGNRPSLSLLLPELSAYNVGQLLAIYEHRVAVQGFVWGINSFDQWGVELGKVLASQVRKQLHSSRTQGTELDGFNYSTTTLLKRYLETSSEPQM

SEQ ID NO: 27995 - protein, 570 aa, Ralstonia metallidurans CH34
MGKKVAEIIVEVLEQAGVKRCYGIVGDTLNLIAEHLDRSSIDWVGVRHEEAGAFAAGAEALYTNNLTACAGSCGPGSLHFINSLYEANRNRAPVVLIASQVAMSEMGFEFIQEVDFKSVFKECSVFCDMILTPEQARRKTAMACQTALTRRGVAVLIVPVDISHGEVKEDFPYRVHHSRPSIRPNDAEIGAIAEVLNAGRKTAIYAGSGCEQALAEIMAVAERLKAPVAHTSRAKNWLEPGNPYNIGMTGILGNEAGYNAVLECDTLLLLGADFAWRQFYPDGAKIVQIDIDPTHLGRRHPITLGAVGDIQTTLQALLPHLDQHEDASFQEKYIKRYAEAMVAARKPLIPGHNDSIPGSYLASIIDKHAADDALICADDGSPIVWALRLFDANGKRQIFGSLLHGTMASALPSALGLQKACPDREVIAMCGDGGITMLFGELLTTIQEEVPIKIVVFDNSKLGFVEIEQKAEGMLDTFTKLKNPDFGKVAEAIGLWGKTVRKASELDASVQEWLSQPGPALLNVIVNPLELVKPPFLEAGPVIGMAMYSVRAILNGRGADVLEMVRENFR

SEQ ID NO: 27996 - protein, 248 aa, Cocos nucifera
MGYLNSIAGIQADGSPVSGGGLSRNGKFSYGYASSPGKRASMEDFYDTRIDGDDGEIVGLFGVFDGHGGARAAEYVKQNLFSNLIRHPKFISDTKLAIADAYNHTDSEFLKSENNQNRDAGSTASTAVLVGDRLLVANVGDSRAVICRGGNALAVSKDHKPDQSDERQRIEDAGGFVMWAGTWRVGGVLAVSRAFGDRLLKQYVVADPEIQEEVVDGSLEFLILASDGLWDVVSNEEAVAMIKPIEDP

SEQ ID NO: 27997 - protein, 519 aa, Nicotiana attenuata
MAVATATATLSSSSSLPFHSLHQQFPSKYFTVRPITVSLSEKIPAVTQSSEFTKLPIRTIPGDYGLPLIGPWKDRQDYFYNQGKEEFFRSRIQKYKSTVFKTNMPPGNFISSNPNVVVLLDGKSFPTLFDVSKVEKKDLFTGTFMPSTELTGGYRVLSYLDPSEPTHEKLKKLLFFLLSSRRDYIIPQFHESYTELFKTLEKEMEKNGKADLNSANDQAAFNFLARSLYGANPVETKLGTDGPTLIGKWVLFQLHPLLTLGLPKVLDDFLLHNFRLPPALVKKDYQRLYDFFYESSTAVLNEAGNFGISRDEACHNLLFATCFNSFGGMKIFFPNMLKWIARAGVELHIRLANEIRSAVKSAGGKITMSAMEKMPVMKSVVYEALRIDPPVASQYGRAKRDLMIESHDGVFEVKKGEMLFGYQPFATRDPKIFDRPDEFVPDRFVGEEGEKLLKHVLWSNGPETESPTVENKQCAGKDFVVLVSRLLVTEFFLRYDTLDIDVGTSPLGAKITITSLKRA

SEQ ID NO: 27998 - protein, 370 aa, Thermoplasma acidophilum
MCLTSVIWMIVFSKRIIYTRDYSSHMVDQNESAEDIWTKDEDLTRIIEDRNFRIKVFGFGGSGSNTINRLMRENLVGVKLIACNTDAAHLLRIRAHAKILLGKNLTRGLGAGADPTVGEMAAKESESEILRHIDETSIVFITAGFGGGTGTGAAPYVAKLAKDRGALTIAFATLPFSSEGYVRMKNAAEGIRKLVKNSDAAIVIPNDKLIEKYNDVPVYKAFKFEDEVISTGIKGITDLIMNTGTINLDFNDLRKVMKDAGYAAIGMGSSNQAVNDRIVEALEKALDSPFMDYDISRAKGAIVNVTGGRDLQLQEAQQAADMLRKKIARDATIMWGTVIDENMRSGVRILIIVAGIKPNFKLDQDLEEVR

SEQ ID NO: 27999 - protein, 526 aa, Photobacterium sp. SKA34
MLEQSMKQQLKAYLENLKTDIQLVLSLDDSDTAQKLHELAHEIAELNDKVSVIEDNNASERKPVMQVVNPTKQTSISFAGLPMGHEFTSLVLALLHSGGHPMKIEQAVIDQIAALDQDIVVETFISLSCQNCPDVVQAFNMMAAINPRIKASMIDGAAFQDEVTERNIMAVPTIYVNGEVFGQGRMSLTEILNKLDTGAAKKVAANLNEKAPFDVLVVGGGPAGASAAIYAARKGIRTGVVAERFGGQVMDTMSIENFISVKETQGPRLAASLEEHVKQYNVDIMSEQRVNNIVEAADTEDGYTHVYLESGAMLKARSVIISTGARWREMNVPGEQEYRNKGVAYCPHCDGPLFKGKRTAVIGGGNSGIEAAIDLAGIVEHVTVLEFADTLRADQVLINKAESMPNIDIIKMAQTTEVVGDGTRVTGISYKDRNTDEIKHIELAGIFVQIGLVPNTEWLKESVVALTPRGEIEIGAHGNTNVNGIFAAGDVTTVPYKQIIIAMGEGAKASLGAFDYLIRTPVPNNK

SEQ ID NO: 28000 - protein, 69 aa, Chlamydomonas sp. HS-5
MDESNATCGKRLDSIGVENTEENRRAYRDLLLSTPGLGQYISGAILFEETLYQCTKDGKTFVQVMNDQG

SEQ ID NO: 28001 - protein, 601 aa, Xanthobacter autotrophicus Py2
MSPAGPKAPLMELQTMSIQMTGAEMVMRAFADQGVEHFFGYPGGAVLPIYDALFQQNAIEHILVRHEQAAVHAAEGYARSSGKVGVVLVTSGPGATNAVTGLTDALMDSIPLVCITGQVATHLIGNDAFQECDTVGITRPCTKHNYLVRDVNDLARVLHEAFYVAQNGRPGPVVVDIPKDVQFATGTYIGRENIQHKTYRPKLKAEDAQISAAVEMIAGAKKPIFYTGGGVINSGPEASRLLRELARLTGVPVTSTLMGLGAFPAANRQWLGMLGMHGTYEANMAMHDCDVMVCIGARFDDRITGRLDAFAPGSKKIHIDIDPSSINKNVKVDLPIIGDCTRVLADMVEAWNARSLKIDQPALAAWWTQIERWRSRNCLAYRPSDEIIKPQFAIERLYEATKDKDVYISTEVGQHQMWAAQFFRFEEPNRWMTSGGLGTMGYGLPAAIGAQKAHPNALCIDIAGEASILMNMQEMSTAVQFDLPVKIFILNNRYMGMVRQWQELLHGGRYSHSYSEALPDFVKLADAYGGVGIRCEKPGDLDAAIQEMINVKRPVIFDCIVDQQENCFPMIPSGRAHNEMILGDMAIDLDDAITDEGKMLV

SEQ ID NO: 28002 - protein, 490 aa, Silicibacter sp. TM1040
MLDATTDLKSLLADPTLLEDRAYINGAFVAGEGTFEVTNPARGDVIANVADVSRMQARDAIAAAQGAQKEWAKWTGKERAGVLRKWFDLMMAHQEDLAVILTAEMGKPLAEARGEIAYGASFIEFFAEEAKRVYGETIPGHQRDKRITVIKQPIGVAASITPWNFPNAMITRKAGPALAAGCAFVARPASETPLSATALAVLAERAGIPAGVFNVIPASDASGIGKEFCENPIVRKLTFTGSTNVGRILLRQAADQVMKCSMELGGNAPFIVFDDADLDAAVEGAIMCKFRNNGQTCVCANRIYVQSGIYDAFAAKLKEKVEAMKVGDGLEDGTHFGPLISEAAVKKVEDHIADAMDKGAEVILGGAPSELGGTFFEPTIVTGATPDMAFAQDETFGPLAPLFKFETEDEVIEMANDTIFGLASYFYAKDLSRVYKVAEALEYGIVGINTGIISTELAPFGGVKQSGLGREGSHHGIEDYLEMKYLCMSV

SEQ ID NO: 28003 - protein, 331 aa, Photobacterium sp. SKA34
MTIKVGINGFGRIGRFVFRAAQERNDIEVVGINDLIDVEYMAYMLKYDSTHGRFNGTVEVEGGNLIVNGKTVRVTAERNPEDLKWDAINVDVVAEATGLFLTDETARKHITAGAKKVVLTGPSKDATPMIVMGVNQDTYAGQDIVSNASCTTNCLAPIAKVLNDKFGIESGLMTTVHATTATQKTVDGPSAKDWRGGRGASQNIIPSSTGAAKAVGVVLPELNGKLTGMAFRVPTANVSVVDLTVNLKNGASYETICAAMKEASEGALKGVLGYTEDQVVSQDFIGETQTSVFDAKAGIALTDNFVKVVSWYDNEIGYSNKVLDLIAHISK

SEQ ID NO: 28004 - protein, 180 aa, Pisum sativum
MATVQLESFSLIPSSQHPRTVASSLSCRPIAARFPPYTGLKLRPLAATSLRSRFAASRVVPRGGRVLCEARDTAVEVASITDGNWQSLVIESDTPVLVEFWAPWCGPCRMMHPIIDELAKEYVGKFKCYKLNTDESPSTATRYGIRSIPTVIFFKDGEKKDAIIGSVPKASLITTIEKFL

SEQ ID NO: 28005 - protein, 412 aa, Salinibacter ruber DSM 13855
MRRRRTKMPPTRRTRPLPRRVEGLSGREKAPSTARLQRNSPGRTQFSMDDTRSYDIAWLPGDGIGPEVTREALRVLEAVGSAHGFSVTATEHRMGGVALDETGMPLPDSTRDACLESDAVLLGAVGGPKWADNTGDQRPESGLLALRKALGVYANLRPVRVPAALADASPLRPDRVGGTDILFVRELTGGIYFGTPEGRTDDGARSTMAYSDDEIERIAHVAFQRARRRDGNVTSVDKANVLEVSELWREVVTEVHDDCPDVTLRHLYVDNAAMQVVRDPRQFDVVLTGNLFGDILSDLAAALPGSLGLLPSASVGGTVGLFEPVHGSAPDIAGQDVANPTAAILSAALLLDEVGETAAADAVRHGVDAALDAGFRTADLAADNEEDASTSAFGREVATRAADSVPQNAPTP

SEQ ID NO: 28006 - protein, 83 aa, Bacillus anthracis str. A2012
MVLLMTVNPGFGGQKFIHSVLPKIKQVAEMVKERNLEVEIEVDGGVNAETARLCVEAGANVLVAGSAVYNQKDRGEAIRVIRG

SEQ ID NO: 28007 - protein, 89 aa, Bacillus anthracis str. A2012
  misc_feature (56)..(56): Xaa can be any naturally occurring amino acid
MIKIAPSILSADFSKLGEEIKDVEKGGADYIHVDVMDGHFVPNITIGPLIVEAIRXITSLPLDVHLMMKIQITIFQLSQKRERILLLFM

SEQ ID NO: 28008 - protein, 169 aa, Magnetospirillum magnetotacticum MS-1
MVMTSQPVPPPIDPTSTPSWTALTVHRDTVEPDLRTWFAADPDRARRLTHQAADLTVDLSKNLVTDETLELLVRLAEEVHLDDRLEAMFTGEHINVTEDRAVLHTALRRPTPLGDDEHLVVDGQDVDADVHAELAKVYAFADKVRSGEWTGVTGERVRTVVTSASRSTS

SEQ ID NO: 28009 - protein, 156 aa, Pyrococcus abyssi
MKFKKVVVGGTFDRLHLGHKALLRKAFEVGKIVYIGLTSDDMVKNKPYAEKILPYERRLKDLIEFLEVNNFRRYRIIKINNAIGFTTRIRSLEAIVVSEETYKGALLVNRAREEVGLRPLEIIVIPIIKSKLGDKISSSLIRAGLIDPFGNPIKRE

SEQ ID NO: 28010 - protein, 360 aa, Nostoc punctiforme PCC 73102
MGEPKRIGILTSGGDCSGLNAVIRAVVNCAVDTYGWEVLGIRQATLGLMARPPQFTKLEIDQVDSLLTAGGTMLGTTNKGDPFAFPMTDGSLCDRSEEIIAGYHELGLDALIGIGGDGSLAILRRLAQQGGINLVGIPKTIDNDIGVTEHAIGFDTAVNIATEALDRLHFTAASHSRVMILEVMGRDAGHIAIAAGIAGGANVILIPEIPYTVEHICHKIKERQEKGKNYCLIIVSEAVRTHDGENVTITNRLGQSRYGGIGEYLADKIIEHIGVETRVTVLGHIQRGGTASPLDRLVATAFGVAAVNLIAEDKYDRMVTWQNRQVLSVPITEAIAQYSAVDPNGTLVKTAHGMGIYLGD

SEQ ID NO: 28011 - protein, 206 aa, Zea mays
MASRRRTLLKVIILGDSGVGKTSLMNQYVNKKFSNQYKATIGADFLTKEVQFEDRLFTLQIWDTAGQERFQSLGVAFYRGADCCVLVYDVNSMKSFDNLNNWREEFLIQASPSDPDNFPFVLLGNKVDVDGGNSRVVSEKKAKAWCACKGNIPYFETSAKDGTNVEDAFQCIVKNALKNEPEEELYVPDTVDVVGGNRAQRSSGCC

SEQ ID NO: 28012 - protein, 619 aa, Avena sativa
MSREEMKGATFSCGHLQGISYPFRRRGDPLECGVGAYELGCTSSKATIHINTGAYYVTAINYTGSYFWVMDANFDTYSSCPLPLWNHLPYSGYYGKFDSHGFRNLATQSYYRACFANCSRAVTDNSAYKPVACLSADNSHVYVWVSNYECTVDDLEPYCGYLSMIPLGDDWQIQLQDASYADITQLITKGFTVQFPVDTNAWSVSVSKTISICLNDSISYFKEQISDASMVKRIRAYFWSEMHFYQCVAYRSYNSDYTATSILVVIAIVSAIAIPKFLFAYKYWKTRITIDAVEKFLRIQQMIVPTRYSYTDIVAITSHFRDKLGQGGYGSVYKGVLLPGGVHIAVKLLEGNSSCNGEDFISEVSTIGRIHHVNVVRLVGFCAEEMRRALVYEYMPHGSLDKYIFSADKSFSWDKLNEIALGIARGINYLHQGCDMQILHFDIKPHNILLDSNFVPKVADFGLAKLYPRGESFVPLSALRGTIGYIAPEMISGSFGVISSKSDVYSFGMLLLEMAGGRRNADPNAGTSSLGYYPSWVYDQLTRRDAGEISPVSNMHELEKKLCVVGLWCIQMRSRDRPTMSDVIEMLEAGAGGCRCLRGRFSAMKGTSMWRNLTISLLS

SEQ ID NO: 28013 - protein, 161 aa, Zea mays
MSDSEEHHFESKADAGASKTYPQQAGTIRKNGYIVIKNRPCKVVEVSTSKTGKHGHAKCHFVGIDIFTGKKLEDIVPSSHNCDVPHVNRVEYQLIDISEDGFVSLLTESGNTKDDTKLPSDEALQAQIKSGYDEGKDILLTVMSAMGEEQICAVKEIGGKN

SEQ ID NO: 28014 - protein, 481 aa, Haemophilus somnus 2336
MNIQHLLKTQAYINGEFISAKNHRTFPVINPANQQVICEITCCGKEETELAIKSAKQAQVHWKKYTAKERSKILKKWFELIMQHQESLAYLLSLEQGKPLSESRAEIAYGASFVEWFSEEAKRAYGEIIPQVREENRLLVIKQPVGVVAAITPWNFPNAMITRKAAPALAAGCAIIIKPAPETPLSALALAALAEQAGIPKGIFNVLPTVYAEEVGSVLTRSTDVRKLTFTGSTKIGKILMQQCADTVKKISLELGGNAPSLIFNDADLDRTVDSVIASKFRNSGQTCICTNRIYVQSEIYRAFADKLKQKVRSFIVGDFQQEAVNIGPLINESAVRKIERHIEDALSKGAILTLGGQRHSLGGTFFEPTILENVSQDMLVCHEETFSPLAALIPFDTEEQAISMANDSEFGLAAYVYTQDFSRIWRLSEELECGLVGVNEGIISNEVSPFGGVKQSGLGREGSRHGLDEFLEMKYLCMKV

SEQ ID NO: 28015 - protein, 740 aa, Cucumis melo var. cantalupensis
MENCYCIEPQWPADELLMKYQYISDFFIALAYFSIPLELIYFVKKSAVFPYRWVLVQFGAFIVLCGATHLINLWTFTMHSRTVAVVMTTAKVLTAVVSCATALMLVHIIPDLLSVKTRELFLKNKAAELDREMGLIRTQEETGRHVRMLTHEIRSTLDRHTILKTTLVELGRTLALEECALWMPTRTGLELQLSYTLHQQNPVGYTVPINLPVISQVFSSNRALKISPNSPVASLRPRAGRYVAGEVVAVRVPLLHLSNFQINDWPELSTKRYALMVLMLPSDSARQWRVHELELVEVVADQVAVALSHAAILEESMRARDLLMEQNVALDLARREAETAIRARNDFLAVMNHEMRTPMHAIIALSSLLQETELTPEQRLMVETILKSSNLLATLINDVLDLSRLEDGSLQLDIGTFNLHAVFKEVLNLIKPVTLVKKLSLTLHLGPDLPVFAVGDEKRLMQAILNVVGNAVKFSKEGSISISAIVAKSETFREIRVPDFHPVPSDSHFYLRVQVKDTGSGISPQDIPKLFTKFAQTTVGPRNSGGSGLGLAICKRFVNLMEGHIWLESEGLGKGCTATFIVKLGIADQSNESKLPYTSKIHENSIHTSFPGLKVLVMDDNGVSRSVTKGLLVHLGCEVTTAGSIEEFLRVVSQEHKVVFMDICTPGVDGYELAIRIREKFAKCHERPFMVVLTGNSDKVTKESCLRAGMDGLILKPVSIDKMRSVLSELIERRVLFETS

SEQ ID NO: 28016 - protein, 372 aa, Oryza sativa
MGCEGDVATLDVCKGKQQIENRWMAVDGGYYFSSLSRVSSPPMAAATTSRRGPGAMDDENLTFETSPGVEVISSFDQMGIRDDLLRGIYAYGFEKPSAIQQRAVLPIISGRDVIAQAQSGTGKTSMISLSVCQIVDTAVQRVMLAIGDFINIQVHACIGGKSIGEDIRKLEHGVHVVSGTPGRVCDMIKRRTLRTRAIKLLILDEADEMLGRGFKDQIYDVYRYLPPELQVCLISATLPHEILEMTSKFMTDPVRILVKRDELTLEGIKQFFVAVEKEEWKFDTLCDLYDTLTITQAVIFCNTKRKVSLVINYDLPNNRELYIHRIGRSGRFGRKGVAINFVKKEDIRILRDIEQYYSTQIDEMPMNVADLI

SEQ ID NO: 28017 - protein, 759 aa, Ustilago maydis 521
MPTRTNNRGIPVPRDQARGSVRGDNQQQAAWRSSLDLVWSYSRSQAFYGNNIATSPSFVERRWAGQDLEERDSIFEDEQEYVSGQDDEDESEDYDAHTSHSRFATDADADTDTASMASDARFGPSDQFEWEGEALPPNATQRIRTSRRSKARDRRLEQLESADEDERSRSRSRSPKRLAPGGPHERTSNSKLNPNRSAYSSATTGEMLRDPFAEDNINNNIKPSEVTPLLSNKRSTDANPARRKSATYGALQRPSDSATLSNRSADSGYHVYELGNSTLLQSWFNTVNALVGVGILALPLAFSYAGWIGGTILFLVCGLLTNYTGKVLAKIMSKEPSLRTYADIGSYAFGPSARILISLFFCLELWAVSVALIILFGDSMSAIFPNIAPAAFKLLGYCLVLPSVFLPLKFLSPISVIGIVSTFTLVVVVISDGLIKKHAPGSLWSIAPTTLGPRWDRLPLSFGLIMSGFSSHPIIPSLVRDMKDPAKFPRMLNLAYVGATVLYLSMGMVGYAMFGTQVSDEITKDLARTPGFPVALNSVAIWLIVINPLSKFALATRPIQTTFEILLGIDDQTAVRLQNRNVKARRRSSAAALAATSANVATDGSKIRMDDAAAAANKVVGPVQSRAQAQLTSEANSTTLSVSPNHRVSFATPGAPSSTVPQPEHQPPTSPTTHAAPANDNPLANSAISLRAAELTSTLSPRTRFILSILLKILLTLLIAVTAVVLPGFEKVMGVPRSIPGFCNMCLWSSVGQLEAFRQ

SEQ ID NO: 28018 - protein, 328 aa, Enterococcus faecalis
MAEMTYLEAINLGISEEMARDEKVVIFGEDVGGDKGGVFGVTKGLAAKYGDERCFNTPLTEGLIGGLAVGLGLMGYRAIGEFQFADYILPATNQLLSEARTMRYRTKGDWTAPIVYRTPYGGGVRGGLYHSQSTEKVFCGQPGLRVVTPSNPYDAKGMIKAAIRSDDPVIFYEHKRLYRLLKDEVPADDYIVPIDKANVVRTGSDLTVISYGMTLQLALAAAEKLAAEGIDAEIVDVRSLYPLDRETLVAAAKKTGKVLLVTEDNKEGSVMSEIAAMISEDALFDLDAPIQRLAGPDCPSMPYALPLEREFLINEEQVLAAMKELAEF

SEQ ID NO: 28019 - protein, 432 aa, Enterococcus faecalis
MATKEIKMPHLGESVTEAAIVQWLVKPGDSVKRYDPLMEVVSDKVTTEVPSDFEWCSKRISDFSRYRVPIGTAVMTLETEETTEKTEVATLAPVKEASAEQAQEHETVATTSTATSHQKNNGRYSPAVLKIAQEKKIDLTQVTGTGRDGRITRKDVTNFTPTQARTPEKTVSPGTSPSISEEPVASQNESAATASPTETSPDKIVSADPVRKAIAKKMVQSVNEIPHAWLMVEADVTNLVQLRNSLKDEFKQQEGLSLSFFPFFAKAVIQALKKNPKINTSWDDGSIIYHKDVNLSIAVTTDEHLYVPVIQQADNYSIAGLAKEINRLAQEVRQGTLASKEMQGGTFTLNNTGTLGSVQSMGIINHPQAAILQVESINKRLVPTADGGFKVADMVNLCLSIDHRILDGQQAGKFLRDVKDNLAKYNADTDVY

SEQ ID NO: 28020 - protein, 300 aa, Francisella tularensis subsp. holarctica
MKQITIASRESKLALWQTNFVKNRIQSELNIPCEISTMKTQGDIILDQPLNKIGGKALFMKELEVAMLSNKADIAVHSLKDVPYQLPQGFCLAGFMPREDPRDAFVSNKYNSIDDLPKGAVVGTSSLRRKAQLLHYRDDLEIRDLRGNIQTRLSKLDNGDYDAIILASAGLIRLELVERITQFIPVEISLPAVGQGIVVIEALERDNDLLEKIQKLNCRESSRVATAERAFNQELKGGCHVAIGAYAELDNNQITLMAMVASSDGKKILKRKMIGDDPTKLGKLLAQEMIALGAYKILES

SEQ ID NO: 28021 - protein, 162 aa, Glycine max
  misc_feature (138)..(139): Xaa can be any naturally occurring amino acid
  misc_feature (142)..(142): Xaa can be any naturally occurring amino acid
  misc_feature (151)..(151): Xaa can be any naturally occurring amino acid
  misc_feature (157)..(157): Xaa can be any naturally occurring amino acid
MSAAEGAVVFSEEKEALVLKSWAIMKKDSANLGLRFFLKIFEIAPSARQMFPFLRDSDVPLETNPKLKTHAVSVFVMTCEAAAQLRKAGKITVRETTLKRLGGTHLKYGVADGHFEVTRFALLETIKEALPADMWGPXXRNXWGEAYDQLXAAIKQXMKPFE

SEQ ID NO: 28022 - protein, 110 aa, Triticum aestivum
  misc_feature (72)..(72): Xaa can be any naturally occurring amino acid
  misc_feature (89)..(89): Xaa can be any naturally occurring amino acid
MARMALLAVFAVLAALAVAEMASGAVTCGDVTSAIAPCMSYATGKASAPFGGVAAAGLRTLNGKASNSGDRXAACRCLKNLAGPFKGHXTMGNAATSPGKCGVLRFPFPI

SEQ ID NO: 28023 - protein, 470 aa, Rickettsia prowazekii
MSFLRKKSFESVKEIGSSSGLSKTLGAFDLILLGLGAMIGTGVFVVTGIIAAKFSGPAVMISYMIAGITCIFVALVYTELAAMLPTSGSIYTYSYVAFGEVFAWMIGSVIILELGVSAGIVAAGWSGYVQGILEAGGIYLPKVLTTVPSNGGVINLPAFLISAFIGFILFLGTKDSKKINAILVFIKMVAIFAFVLAAAPHFDATNWSNFMPFGFGSVVMGSSILFLAFTGFGTIATAAEECKNPKRDIVIGIIGSLILTTLVYVIMSGLVTGIAPFDQLNNDRPLAYALTINNSKIGSAIVSTGAVCGMMTVLMMNIYGTSRIFYAIARDGLLPKSFAKLHPKYDSPYITIIIFSALAAFLGGFCPTEIITQLTSMGALIDYIAVAIIVMMFRIKLPTAQRAFKCPIVFIIAPFILFACIYLLLTQMYGDEIYKGNFNLLTSGRVLIYWFITIFILYLVRSFFMGKEQH

SEQ ID NO: 28024 - protein, 643 aa, Oryza sativa
MRGFVGAAVLLVCNLATASAWKDKDFFSACPAKQCGKVEIRYPFRFEPSNTSSSCGLPCMKLTCSDRQETILDIKNYLGRPYKVTAIDYKRATLTIVPLADDSSLPPTPGCPLPNLISEGALDHRCEPYAMCCSSEFAAPATIPDAADYIAGPISCLSNKTHFFYTLSAYAPMSFLPLDCEAVSGNLIALPRGNTYSPLVDSSTLKDVAERIFSFNETPISWISVMSSPDQIDLATDCRDCETQGRRCAFSSQRNQTFCMPHHHGSRIRIIAGKIQCANFLLSACSATSSAAALVVLLLLGATVLYLSLKTRYNEEIHLKVEMFLKTYGTSKPTRYSFSEIKKIARRFKIKLGQGGFGSVYRGELPNGVPVAVKMLENSKGEGEEFINEVSTIGRIHHANIVRLLGFCSEGTRRALIYEFMPNESLEKYIFSDGYNILQELLVPNKMLDIALGIARGMEYLHQGCNQRILHFDIKPHNILLDYNFSPKISDFGLAKLCARDQSIVTLTAARGTMGYIAPELYSRNFGEISYKSDVYSFGMLVLEMVSGRRNSDPSVESQNVVYFPEWIYEQVNSGQDLALGREMTQEEKETVRQLAIVALWCIQWNPKNRPSMTKVVNMLTGRLQNLQVPPKPFLSADSYPVL

SEQ ID NO: 28025 - protein, 282 aa, Zea mays
MSAVVCGKRSSSIFADELLPPSPSSPHSSHQPAAKRSRRSPSHRGGSDGLRPEALVDYLLALFPDMDPQLLEKALEASGDDLDSAIKSLNLLRLESAEAILSSTGFKPENCLQTAIQPSLEGIPNGGVDTATEHPPSVDNYQTSYNGSEWVELLVTEMRNASDINDARARASRALEALEKTIVERAGAEATQNLHKENMMLKEQLTVVLRENSVLKRAVAIQHERQKEFDERSHEVQNLKQLVLQYQEQVRTLEMNNYALTMHLKQAQQNSSIPGRFNPDVF

SEQ ID NO: 28026 - protein, 393 aa, Pyrococcus furiosus DSM 3638
MKYDVVVVGSGVAGPIVARDVAKAGFSVLLVDKKPAIGTPKQCAEGINVNVFKEFDIPYDKRFINREIYGARIYSPSGYTAELRYDKVSGVILERKVFDKMLAYYAAKAGADVWARTEVIDLLRKEGKIMGVKAKHEGELVEIEAKIIVAADGVESTVARLAGINTYAPPHEFDSAYEYEMIIEGYDPDLIHLWFGNEIAPRGYVWVFPKDEDRANVGIGINSDNEKTAKYYLDKWLKENNIPTKKILEINVGLVPVGGFVRELVKENVAVVGDAARQVNPVHGGGMYEAMKAANILAKWIVKALEEENLELLKNYTKEWWEVEGPKMERLLKLRRAMEKLTDEDIDVFVQLLGGTDLEKLAGGNYFEVVKALMKHPKVLMSKRRLEILKALL

SEQ ID NO: 28027 - protein, 435 aa, Geobacillus kaustophilus HTA426
MGVRTDCECLVPSINRVKEANETMEENMFLSTQRVIKEALAKLGYGEEMYELLKEPLRVLTVRIPVRMDDGTVKVFTGYRAQHSDAVGPTKGGIRFHPDVTEEEVKALSMWMTIKAGIVGLPYGGGKGGIVCDPRNMSMGELERLSRGYVRAISQIVGPSKDIPAPDVFTNSQIMAWMMDEYSRIREFDSPGFITGKPLVLGGSQGREKATALGVTICIEEAAKKAGIELQGARVIIQGFGNAGSFLAKFLHEAGARVIGISDAYGALYDPNGLDIPYLLDRRDSFGTVTTLFENVITNQELLEKECDILVPAAVANQITRDNAANIRAKIVVEAANGPTTLEATKILTERGVLLVPDVLASAGGVTVSYFEWVQNNQGYYWTEEEVVEKLKEKLTSAFHRVYELAESRRVDMRMAAYMIGLRQTAEAARYRGWV

SEQ ID NO: 28028 - protein, 464 aa, Yarrowia lipolytica CLIB122
MTSVMKRQNGGGNPFQQHRLLTQIKDKPISFVRAKNPEPVAIKPASYILIKPKQREEEDTSPGTTLSAATPTNFIPLSATLDPGSRSPSKIQKAWKKGTPSPAGLINQGVTCYMNSAVQLLMHMPAMSNYLADILLAKKYPGSVTQVFAQLYGKLFGGKKNIFPRQLIGRLDDINCMMSEWNQEDAHEYFMSLMSRLQEDSTPKGEKLNSSVIYDMFGGNLEQVVVCGGCGNESVTKQDFYDLSVNLDEKKPEGRISLKRCITRFFEEEQIQKKDGYKCDECQKTTSAKKTSRIHEFPEHLVVHVKRFKFVNDQPRKMGAPLDYPADLDLGHYSRDKQRAGVVPYKLIGVIAHCGRTTGSGHYIAHVRQPNGKWATYDDDLIEPLSEKKALKEEDAYMLMYQRLTPQASKSKSASGPKSVAMGTPKAAGKVTKPVVKTGKGQRKMADIDNIFASAKRKKNSGFV

SEQ ID NO: 28029 - protein, 107 aa, Phaseolus lunatus
NEINLGDYKGRVLIIVNVASQCGLTNSNCTELSQLYEKYKQKGLEILAFPCNQFGAQEPGSNEQIQEFVCTRFKAEFPVFDKVDVNGDKADPLYKYLKSSKGGLFGD

SEQ ID NO: 28030 - protein, 462 aa, Mesorhizobium loti MAFF303099
MISRAEWLRTTLLATSLAFTFTGPVLADSTALPDKTPAEFKVTDFLLDNGMEVVVIPDHRAPIVTHMVWYKIGSADEPPGKSGIAHFFEHLMFKATTNHAAGEFDRAVSDIGGSNNAFTSYDYTAFHETVAPSALEQMMGFEADRMRNLILTDDVIKTERDVILEERRSRIDNNPQAVLDEEVDATLWQNQPYRIPVIGWMQEMEQLNRTDAVAFYDKYYRPNNAVLIVAGDVEPETVKALAEKTYGKVARGPDLPPRIRPVEPEQNTKRTVTLADARVSVPSFSTQWVVPSYHTAKPGEAEALDLLAEILGGGNRSRLYQALVVKQGIASNAGAYFQGTMLDDTNFTVYGAPRGDAKLADVEAAVDAEVARIASGGVTPDELEKAKDRYIRSMVFARDKQDSMAEIYGSTLATGGNVQDVQQWPDRIRKVTADEVKAVAARYLVLARSTSGYLLPQQQAGN

SEQ ID NO: 28031 - protein, 121 aa, Zea mays
  misc_feature (45)..(45): Xaa can be any naturally occurring amino acid
MGASMISSSARGGGPQGLPPLGRRASSFAGVGSKKKIKTDKPYGXGGGLNRQRRTPTVKKGKGKGGYQFVDKNGANVDGYSPIYNEDDGSPTGDVYVGGTTGLLIWAATLAGILGGGDLLV

SEQ ID NO: 28032 - protein, 368 aa, Zea mays
YEEGVWFFVPLANRLGIASWKEQLENLCFKYLNPEEHRELSSKLTESFDEELITSAVDKLDKGLRDAGVSYHNLSGRHKSVYSIHSKMLKKNLAMEEIHDIHGLRLVVDNEEDCYEALCVVHKLWPRVTGRFKDYISRPKLNGYRSLHTVVMGEGVHPFEVQIRTREMHLQAEYGFAAHWRYKEGTCRHSFVLRMVEWARWVLTWQCEAMDRERTASLGSDDGTVSVRPPPACPFPQHAEDCPYSYTRQCNHDGPLFVILLEHGKMSVQEFPANLTVMDLMDRVGANSSRWSPYSIPMKEDLRPRVNGEPICDPDRRLNMGDVVELTPALPRKSLSGYREEIQRMYDRGGFALSARGGGGGGGGARRC

SEQ ID NO: 28033 - protein, 500 aa, Streptomyces cinnamonensis
MTKTVNHWIGGKAVEGASGNHGPVTDPATGAVTTQVAFASVDEVDAAVGAAREAFATWGTSSLAKRTAILFKFRALLDANRDAIAELIVAEHGKVHSDALGEVARGLEIVDLACGITVQLKGELSTEVASRVDVSSIRQPLGVVAGITPFNFPAMVPMWMFPLAIACGNTFVLKPSEKDPSASMKIAELLSEAGLPDGVFNVVHGDKVAVDRLLEHPDVAAVSFVGSTPIARHIHATASANGKRVQALGGAKNHMLVLPDADLDAAADAAVSAAYGSAGERCMAISAVVAVGSIADELVAKIKERAEKIKIGPGNDPTSEMGPLITAAHRDKVASYVTGAAAEGCEVVLDGTGYTVEGYEDGHWIGLSLLDRVPTTAKAYRDEIFGPVLCVLRVDTYDEGVALMNASPFGNGTAIFTRDGGAARRFQLEIEAGMVGVNVPIPVPVGYHSFGGWKDSLFGDHHIYGNDGTHFYTRGKVVTTRWPDPSDAPAGVDLGFPRNH

SEQ ID NO: 28034 - protein, 589 aa, Thermoplasma volcanium GSS1
MHVAVLDKDRCHPKKCHHECQYYCPPVRNHVMAIDFPDPDGQPLISETLCIGCGICIRRCPFGAIRIVTLPDELNKNVFHRYGVNGFRIYSLPTVVPGKVSAILGQNGLGKTTTLNILSGITVPNLGNYDKPPSKDAVIDRFARTTMGAYFKGLYEENKRAVLKNQYVDYIPKVVSGTIGEILRKNNENGNFDEVVSLLNLENALSKDVKECSGGELQKLAIGTTLEKEADIYLFDEMTSYLDIGERLNVSNIVQDLSKKKTVIVVEHDLAILDWLADSVNIVYGDPGVYGIFSEPLSTNRAINAYLSGFLREENVRIRSYPIEFEEKSSKRDKFEHILITWTDIKKKLGDFSLDVHAGQIHTGEISGVLGRNALGKSTFVMMLAGVMNPDEGSISQNVKVSYKPQYISTDFKGTVSDLIASALKDRAEDTYVKNEIFHPLNIPDIMENPVDGLSGGEMQRLSIAITLSREADVYLIDEPSAHLDSSYRMVVAKVIRRVMENTKKTALVVDHDIYLIDLISDSLIVFSGEPGSHGASDGPMDMKEGMNRFLKMVGVTFRRDQSSNRPRINKKGSSLDRLQKEENRYYYA

SEQ ID NO: 28035 - protein, 243 aa, Glycine max
  misc_feature (94)..(94): Xaa can be any naturally occurring amino acid
PTRPAMCRTWEVLARKKNDLGELPLPMAIYVVSGDEDGERGGAPVVCIEDASKRCFEFSSGLAAWTPLLLLVPLVLGLDKVNPRYIPLLRSTFXFPQSLGIMGGKPGASTYIIGAQNEKAFYLDPHDVQQVVNISGDTQEPTSTSSYHCNIMRHIPLDSIDPSLAIGFYCRDKDDFDDFCSQASKLAEESNGAPLFTVTQSRSFSKQVSNDVSGDNTGFQEDDFPGMDCGNDTVTNEDDWQLL

SEQ ID NO: 28036 - protein, 123 aa, Glycine max
MAGTGRSMLLSLLLFAVTLSLLEMYRGWFAASELKTIAGGFVSSLLFLLLLTFIGNYQEASGVRTGWGAVVVAQLVALIVAGTVHRVCITTCFLFSAGILYEVDKLSGMILARSESRRGGTED

SEQ ID NO: 28037 - protein, 270 aa, Pisum sativum
  misc_feature (1)..(1): Xaa can be any naturally occurring amino acid
  misc_feature (45)..(45): Xaa can be any naturally occurring amino acid
  misc_feature (79)..(79): Xaa can be any naturally occurring amino acid
  misc_feature (106)..(106): Xaa can be any naturally occurring amino acid
XASQQQTVREWSGINTFAPATQTKLLELLGNLKQEDVNSLTILVXGKGGVGKSSTVNSIIGERVVSISPFQSEGPRPVXVSRSRAGFTLNIIDTPGLIEGGYINDXALNIIKSFLLDKTIDVLLYVDRLDAYRVDNLDKLVAKAITDSFGKGIWNKAIVALTHAQFSPPDGLPYDEFFSKRSEALLQVVRSGASLKKDAQASDIPVVLIENSGRCNKNDSDEKVLPNGIAWIPHLVQTITEVALNKSESIFVDKNLIDKLAAADHHHHHH

SEQ ID NO: 28038 - protein, 409 aa, Haemophilus influenzae R2866
MTIEILVPDLPESVADATVATWHKKLGDTVKRDEVIVEIETDKVVLEVPALSDGVLAEVVQAEGETVVSKQLLGKISTAQEGDVSSATLKATNEPTPSDRQNAAIENSHNHNADQSPAIRRLLAEHDLQADQIQGSGVGGRLTREDIEREIAKRQAQQVKQEAATEQNTISTVAYSARSEKRVPMTRLRKRIAERLLEAKNSTAMLTTFNEVDMQPIMTLRKTYGEKFEKQHSVRLGFMSFYIKAVVEALKRYPEVNASIDGDDVVYHNYFDISIAVSTPRGLVTPVLRDCDKLSMAEIEKQIKALAEKGRDGKLTVEDLTGGNFTITNGGVFGSLMSTPIINPPQSAILGMHAIKERPIALNGQVVIRPMMYLALSYDHRLIDGRESVGFLVAIKELLEDPTRLLLEI

SEQ ID NO: 28039 - protein, 358 aa, Arabidopsis thaliana
MAGNYDRAGEVKAFDQMKIGVKGLVDAGITKVPRIFHHQDVAVTNPKPSSTLEIPTIDVGGGVFESTVTRKSVIAKVRAAVEKFGFFQVINHGIPLEVMESMKDGIRGFHEQDSEVKKTFYSRDITKKVKYNTNFDLYSSQAANWRDTLTMVMAPDVPQAGDLPVICREIMLEYSKRMMKLGELIFELLSEALGLKPNHLKELNCAKSLSLLSHYYPPCPEPDRTFGISSHTDISFITILLQDHIGGLQVLHDGYWIDVPPNPEALIVNLGDLLQLITNDKFVSVEHRVLANRGEEPRISSASFFMHTIPNEQVYGPMKELLSKQNPPKYRNTTTTEMARHYLARGLDGTSPLLHFRI

SEQ ID NO: 28040 - protein, 362 aa, Arabidopsis thaliana
MEATYDRASEVKAFDELKIGVKGLLDAGVTQIPRIFHHPHLNLTDSNLLLSSTTMVIPTIDLKGGVFDEYTVTRESVIAMIRDAVERFGFFQVINHGISNDVMEKMKDGIRGFHEQDSDVRKKFYTRDVTKTVKYNSNFDLYSSPSANWRDTLSCFMAPDVPETEDLPDICGEIMLEYAKRVMKLGELIFELLSEALGLNPNHLKEMDCTKGLLMLSHYYPPCPEPGLTFGTSPHSDRSFLTILLQDHIGGLQVRQNGYWVDVPPVPGALLVNLGDLLQLMTNDQFVSVEHRVLANKGEKPRISVASFFVHPLPSLRVYGPIKELLSEQNLPKYRDTTVTEYTSHYMARGLYGNSVLLDFKI

SEQ ID NO: 28041 - protein, 233 aa, Magnaporthe grisea 70-15
MPSTDSIPKSNFDAIPDVIQAFKNGEFVVVLDDPSRENEADLIIAAESVTTEQMAFMVRHSSGLICAPLTPERTTALDLPQMVTHNADPRGTAYTVSVDAEHPSTTTGISAHDRALACRMLAAPDAQPSHFRRPGHVFPLRAVAGGVRARRGHTEAGVELCRLAGKRPVAVISEIVDDGQEVEGRAVRAAPGMLRGDECVAFARRWGLKVCTIEDMIAHVEKTEGKLETNGSG

SEQ ID NO: 28042 - protein, 161 aa, Prochlorococcus marinus str. MIT 9313
MSMAINISQIVVRTPEGAEKSLSEYSGTVLLIVNVASRCGFTKQYKGLQALQNTYGPQGLKVLGFPCNDFGAQEPGTLEEIKSFCSTTYGASFELFDKVHAMGKTTEPYTTLNQTEPAGDVAWNFEKFLVGKDGTVLKRFKSGVEPESTELKAAIDQALMA

SEQ ID NO: 28043 - protein, 336 aa, Brassica oleracea var. botrytis
MSIPMELMSIRNPNSTFLHRPHSHPPATLRSLRFQHLPNQRHHLTSPSLVSCTGLRLRFTSDTKLNRSFVAFAASHEDSEPSDVEVEKEKSVVDGDDNDSTSQEAWKQTLASVKEQVSKIQSVSSEAYNVNSQKAMTILKDTSEQLRIQAEKAKEELGTKAKEVGEEGREYILKAAEESPSDVKEIVEAFSSTEDLRDVSRTQDFHVGIPYGLLLFVGGFLSFMISGSIPAIRFGVILGGALFALSMASLKAQRLGESSAKFLKGQMAIVAIIFLRELKLVLFQRSTFMGFLTTLTSGGVLAFYGYKLVSNKEKGPNKEQGGEEDETSEGFVSREG

SEQ ID NO: 28044 - protein, 489 aa, Haloarcula marismortui ATCC 43049
MSQPDSQTAWDRLYIDGEWRDAGTSETIPVTNPATGDEIAAVPAGTEGDVNDAYQAAEAAQSDWAALSREERNEYVQAMIGVMQERLDEIVELLATESGSVQAKATAEANFAMADFQSALEMVPPEEEVRDSMYHEDKDHHIVREPAGVVGIISPWNFPLHLTTRALGPALALGNTVVIKPATDTPITGGLLLADIAEEAGLPDGVVNVVTGHGSDIGDRMAGHPTARVMSFTGSTAVGRSVASQAGDALALPALELGGNGPFVVTEDADIEAAAKAGSVGAFGHQGQVCISINRHLVHEDVYDEYVEKLVEHAESLTIGNPLDEDVEFGPIINESQVEQLTSFIEQTVDAGATLETGGEVEDLFLEPTVLSECTNDMSAACNEHFGPVAPVIPFESDEEAVELANDTEYGLAAGVYSSDVEHGRSIADQIDAGMVHVNDHPIQDEPNAPFGGMKNSGLGRYNGEWIMDELTETKWISVQHEERDYQLL

SEQ ID NO: 28045 - protein, 386 aa, Medicago sativa
MAIHHHHHNHQQLQQHTSSLFDALYCDEEEKWEDDDEGEVVDEGAQSDVTTTNYDILDSTSLLPLLLLEQNLFNEDEELNTLFSKEITQQETYYEDLKNVINFDSLSQPRREAVEWMLKVNAHYGFSALTATLAVNYLDRFLLSFHFQKEKPWMIQLVAVTCISLAAKVEETQVPLLLDLQVQDTKYVFEAKTIQRMELLILSTLKWKMHPVTTHSFLDHIIRRLGLKTNLHWEFLRRCENLLLSVLLDSRFVGCVPSVLATATMLHVIDQIEQSDDNGVDYKNQLLNVLKISKEKVDECYNAILHLTNANNYGHKRKYEEIPGSPSGVIDAVFSSDGSNDSWTVGASSYSTSEPVFKKTKNQGQNMNLSPINRVIVGILATATSP

SEQ ID NO: 28046 - protein, 785 aa, Burkholderia xenovorans LB400
MSTTPPTATEVEHDADSPSSARKYIDAVLEQSFRHLFGPTATPEQPRRHDVVSIAKLTSALSGYLQPEEIKEVKAAFHFSDEAHLGQYRQSGEPYITHPVAVAEICAGWNLDAQSIMAALLHDVMEDQGVTKAELAERFGAKVAELVDGLSKLDKMEFRNREEAQAENFRKMLLAMARDVRVILVKLADRLHNMRTLGAVPAEKRRRVARETLDIYAPIAHRLGLNNTYRELQDLSFANFNPHRYATLEKAVKAARGNRREVVGKILESVQRAIADAKLDAEVTGREKTIFSIYKKMRDKQLSFSQVLDVYGFRVVVESALECYTCIGALHALYKPVPGKFKDYIAIPKVNGYQSLHTTLVGPFGAPIEFQVRTRKMHEIAEAGVAAHWLYKNGGADLNDVQKRAHQWLKSLLDIQSEAGDSSEFLEHVKIDLFPDAVYVFTPKSKIMALPRGATALDFAYSIHSDLGNQCVAVKINNELLPLRTELKSGDIVEVITAPYSKPNPAWLGFVRTGKARSAIRHYLKTMRLNESVQLGERLVDQALKGYGLALSDVTPEAWEKLVQWTGNKNRQEIFADIGLGRRVAAVMAKRIEVLMSGRDADDDGSRSDSNAPHAPPVVITGTEGMSVQLSACCRPIPGDDIMGYIGIGLGMAIHTTDCRVAQRIHRRDPGRWIDVAWAPQPGRLFDVAVKVLVKNTKGVFARVAADITSADANIVHIAMDEDLSQESTVLRFVIQVSDRVHLANVMRRVRTNPDVMRIARERPSEEGHHRHEGGMRIDRERADY

SEQ ID NO: 28047 - protein, 384 aa, Bacillus cereus ATCC 10987
MLEFDTTQDQLANIKVIGVGGGGNNAVNRMIEHGVQGVDFIAVNTDAQALNLSKAETKMQIGGKLTRGLGAGANPEVGKKAAEESKEQIQEALRGADMVFVTAGMGGGTGTGAAPVVAQVAKELGALTVGVVTRPFTFEGRKRATQAASGIAAFKENVDTLIVIPNDRLLEIVDKNTPMLEAFREADNVLRQGVQGISDLIATPGLINLDFADVKTIMSNRGSALMGIGSGNGENRAAEAAKKAISSPLLETSIDGAQGVIMNITGGANLSLYEVQEAADIVASASDPEVNMIFGSVINEGLKDDIVVTVIATGFDDTIATQPPKPIIRPNVNHTQQQQQPVAQPPKQREVKREMKREEPVVHERHSDSDDIDIPAFLRNRRRR

SEQ ID NO: 28048 - protein, 120 aa, Haloarcula marismortui ATCC 43049
MASQSIFERIGGRDAVDAVVSDFYDRVRDDPLLEPYFEETDMDQLRSHQTQFISTVAGGPVDYDGDDMQTAHEGMGITEDAFASVATHLEAALRANGVPDDDVEAILTEVAAMKDDIVEA

SEQ ID NO: 28049 - protein, 447 aa, Desulfitobacterium hafniense DCB-2
MWSIAKVVAALFLVALNAFFVAAEFSLVKVRKTRLAELSESGSRKATLALAVTSQLDAYLSACQLGITLASLGLGWLGEPAIATLLAPLFKNLVAWDGVLTHTVSVVIAFLLITFLHIVLGELVPKSIAIQRAESAALWTAGPLKMFYKLFYPVIRFLNGLANLILKLGGISPANESDLAHTEEELRMLVDASQRHGILDKMEGKLLDNVFEFSDRVVSEVMVPRQDMMCLYIQDSMEEVLETVKTSGHTRYPLCDDDKDNVIGLVHMRDLLSLSESSVKNIGELKRDILIVPEGMPISHLVQKMRVQRTHLAVVVDEFGGTAGMVTIEDLIEELVGEIYDEFESAEQAEIIKSGESEYLINGRVLLDDLSELLAVEFEDETVSTIGGFVFNRLGRKPVKGDRIDFMDYTFTVMEVVGFRITRVKASRRPAPDSADMSPDTREDSGK

SEQ ID NO: 28050 - protein, 654 aa, Haloarcula marismortui ATCC 43049
MRADQPEIATVAVLGAGTMGHGIAEVAAIAGYDVVLRDIDAAIVEDGYDEIEWSLEKLAEKGRLDEDPDDVAARVATTTDLEAAVSDADLVIEAGPEQLSVKQDIFESVDAAAPADALLATNSSSLSITEIAAATERPESVLGLHFFNPPVKMDLVEVIYGKATTDETAQRGYEFIESLGKTPIYVRKDVRGFVVNSVLGPFMSEPAWMVSAGEATIRQADAAMVHERGYPMGPFELGDLTGIDIGYHVRTEAGRPVPPIMAEKVENGNLGRKTGEGYYDYDDGDGSDYVPEDSEGFDHRRVEAVMANEAAKLVGDDVATAEAIDTGMQLGAGFPEGTCRRADDIGLDTILEKLRALSDEHSDDRYEPADYLVELVEAGHTGTEAGRGFHEYDTGDGLGDYHTINWELDDDGLLEVELDRPSRMNAISETLADEVVDLLSSVDDDEVRAVVFEGAGDRAFSAGADISGFADRDPAQTSEPTDVFTTVAEYPRPTLARIDGYCLGAGLELALACDLRLATTDSEFGFPEITLGLLPGGGGTQRAIRMLTDARAKELVFRGEHISAERAADWGLINRAVDADEFDDVVGEFVDDLVSGPPIALRKAKRVMNEGADESLDAGLEMESQAFALLLTTDDVAEGTAAFAADREPEFEGE

SEQ ID NO: 28051 - protein, 225 aa, Triticum aestivum
MDSEHWISRLAAAKRFYAAQLGHADRAGMDELDMDGDENAGRPDFACPYCYEDHDVASLVAHLEEDHPFEPHAAPCPVCSEKVSKDMLNHITMQHGYLFKNRRRLRRFAVPGSQSLSLLSRDLREAHLQVLLGGGGHRSSNNNATNISADPLLSSFGLSFPTLDAEETSKLSTPAQSDVPVLKEAAARPWRSSIDSSLTREEREQARVRAAFVQDLLLSTLFRDQ

SEQ ID NO: 28052 - protein, 445 aa, Pseudomonas aeruginosa PAO1
MTQSVDAFLERLKRRDPDQPEFHQAVEEVLRSLWPFLEANPHYLEAGIIERIVEPERAILFRVPWVDDQGRVRVNRGYRVQMSSAIGPYKGGLRFHPSVNLGVLKFLAFEQVFKNSLTTLPMGGGKGGSDFDPKGKSDAEVMRFCQSFMSELYRHVGADLDVPAGDIGVGAREIGYLFGQYKRLSNQFTSVLTGKGLSYGGSLIRPEATGFGCVYFAQEMLKDRGRGFDGQRVAISGSGNVAQYAARKVMEMGGKVISLSDSEGTLYAEAGLSDEQWEYLMELKNVRRGRIREMAEQFSLQFLEGRRPWGLACDIALPCATQNELDAEDARRLLANGCVCVAEGANMPSTLEAVDLFLEAGILYAPGKASNAGGVAVSGLEMSQNAMRLRWSEGEVDTKLHGIMQSIHHACLLYGEEQGRVNYVKGANIAGFVKVADAMLAQGVV

SEQ ID NO: 28053 - protein, 856 aa, Brassica rapa
QRCVRNIYYQSYTFSFVLAFVVLILFHPAISMHFNTLLSTESLTISGNRTLVSPGHVFELGFFKNTLNSRWYLGIWYKNLSDRTYVWVANRDSSLSNAIGTLKLCRSNVVLRGRSNKFVWSTNLTRGNERSPVVAELLANGNFVIRYSYNNDASGFLWQSFDFPTDTLLPEMKLGYYLKTGLNRFLTSWRNFNDPSSGEFSYKLETRRLPEFYLLKNGSPGQRSGPWNGGQFSGIPEDQTLSYMVYNFTENSEEVAYTFRMTDNSIYSRIQLSPEGLLERLTWTPTSGTWNLFWSAPVDIQCDVYMTCGPYAYCDVNTSPVCNCIQGFMPFDMQQWALRDGTGGCIRRTRLSCSSDGFTRMKNMKLPDTKMAIVDRSIDVKECEKRCLSDCNCTAFANADIRNGGTGCVTWTGELEDIRNYIGNGQDLYVRLAAADLVKKRKANGKIISLIVGVSVLLLLIMFCLWKRKKNRAKASATSIDNQQRNQNVLMNGMTQSNKRQLSRENKTEEFELPLIELEAVVKATENFSNCNELGQGGFGIVYKGMLDGQEVAVKRLSKTSLQGIDEFMNEVRLIARLQHINLVRILGCCIEADEKILIYEYLENSSLDYFLFGKKRSSNLNWKDRFAITNGVARGLLYLHQDSRFRIIHRDLKPGNILLDKYMIPKISDFGMARIFARDEIQARTDNAVGTYGYMSPEYAMDGVISEKTDVFSFGVIVLEIVSGKRNRGFYQVNPENNLPSYVWTHWAEGRALEIVDPVILDSLSSLPSTFKPKEVLKCIQIGLLCIQERAEHRPTMSSVVWMLGSEATEIPQPKPPVYCLIASYYANNPSSSRQFDDDESWTVDKYTWSVIDAR

SEQ ID NO: 28054 - protein, 68 aa, Brassica napus
GRVGFCQSFMNEMYRYMGPDKDLPSEEVGVGTREMGYLFGQYRRLAGQFQGSFTGPRIYWAASSLRTE

SEQ ID NO: 28055 - protein, 403 aa, Ustilago maydis 521
MAGAQRGSRVVFVGNIPYDMSEEQLTDVFREVGKVVGFRLVNDRETGKFKGYGFCEFEDPETAASAVRNLNEVEVGGRPLRISFADIDPLMEGRSTQHGQFDQDDLRRRAAAAGRAGRPGTFGHGGTARGGGMAGGGGWQQRGPADSGFGQRQFGGPPGGQAYGGPVGAQMGGGAPGGYAGAGAASMGVGGGPYTLPANLPAGVPLPAGVGSTDAITQTLATLPPNQLLDIMSQMKSLVATSPDQARALLTGHPQLAYALFQAMLMMNVVDPDILQRILAASGAVPGAVAAAAASVPPHMQTHSGASNGSATPPQRYGTAAAATRYAAPARPPPTSYAQPGYGGAPSAPAANDAVAALAGQNLPEEQKALLMQVLQLTPDQINALPPDQKASILQLKAQFGQA

SEQ ID NO: 28056 - protein, 777 aa, Pinus lambertiana
MKGVELLKKWEGTSCFKFFHSLRYGFQIRQLEGEISDFLRYQMPVNIFLEVKNLIAELTNLRQQYELGSMDESKMNETIFKHVSKLTNDPQQNAIILNQMGADNMFDGALVEVPCNHVGLGMSDFAVGLEKNIWNLKRALLQSEVTVVGVHGMGGLGKTTLALALSNDKDIKDVFQNNIIFITVSESPNLKVILETMWEKIVRRKRPEFQNVEEAHRQLQQQLLRQAKPTLVILDDVWSRANLEKLLFEGVGYKTLVTTRDRSTIPKMTSTQLYELPLLDDGDALSLFCFWAFGQKSIPSTANEHLVKQVQAQCKGLPLALKVIGSSLHGEPWPVWESAKKKLLNGESISDYHKEGLFKCLETSIGVLDEEARECFLDLGSFPEDRKISVDALLDIWVYVRKIEWQDAFVILLELASRNLLNLTSNLRSQAINYGSASELYFSQHDVMRALALDMASRDRIFCRKRLFMPRKEESLPGKWELFKDQAFDAQIVSIHTGTMEEDQWCKMNFCEAEALVLLFSATNYFLPSFLSKMRKLKVLIVFNYGSKRATVKGLPLLSSLAQLKTIRLERLVVPPLQEHSKVLQKLEKVSLSLCEGLGNMSRFNGNQSNLKLPVMLDFNMDHCCDLEELPLGICDMSSAQKWSITNCHLLRKLPDDLGRLSSLRMLRISACLGLKELPASIGKLGKLEYMDISLCECLKELPEEIGQLKKLEELDMRECARLRKLPKSVGGLKSLKHVICDEKIGQQWNRLKSFSATMDLRVEIVEAHFSLDWLDG

SEQ ID NO: 28057 - protein, 465 aa, Bacillus anthracis str. 'Ames Ancestor'
MAKQLPDIGDYKYGFKDKDVSIFRAGRGLTKEIVEEISRMKEEPQWMLDFRLKSLDKFYEMPMPQWGGDLNDLDFDEITYYVKPSEKSEKSWDEVPDEIKATFDKLGIPEAEQKYLAGVSAQYESEVVYHNMKEDLEALGIVFKDTDSALKENEDIFREHFGKVIPPTDNKFSALNSAVWSGGSFIYVPKGVKVDTPLQAYFRINSENMGQFERTLIIVDEGAHVHYVEGCTAPVYTTNSLHSAVVEIIIKKDAYCRYTTIQNWANNVYNLVTKRAVCEENATMEWIDGNLGSKLTMKYPAVILKGEGARGLTLSIAIAGKGQHQDAGAKMIHLAPNTSSTIVSKSIAKHGGKVTYRGIVHFGPKAKNSRSNIECDTLIMDNQSTSDTIPYNEIKNDYVSLEHEAKVSKVSEEQLFYLMSRGISEQEATEMIVMGFIEPFTRELPMEYAVEMNRLIKFEMEGSIG

SEQ ID NO: 28058 - protein, 953 aa, Yarrowia lipolytica CLIB122
MIEGISFASFVTHEKPKFVRALDFYKALGFLPTKEYKHGTDHHATDEEGAGSIQEVWLTSSRAGVPSVTVKLRLSRHGNEHVSLPNLKHDWRSLVPSLVYYAPDLDAVRAAITPFLHEDHSTLLERPSHTNFIELYAIDPMGNLVGFSRRENPYSSAMQKPFSADDIGPQNFSKPNETKIKGKKRIGVMTSGGDAPGMCAAVRAVVRAGIARGCEVYAVREGYEGLVKGGDLIEPLSWEDVRGWLSLGGTLIGTARCKEFREREGRLAGALNMVKNGIDALIVIGGDGSLTGADLFREEWPSLIEELVTNGSITAEQAERHRHLDICGMVGSIDNDMATTDVTIGAYSSLDRICELVDFIDATAQSHSRAFVVEVMGRHCGWLALMAGTATGADYIFIPEAAPDATQWAEKMTRVVKRHRSQGKRKTVVIVAEGAIDSDLNPITAKMVKDVLDGIGLDTRISTLGHVQRGGPPVAADRVLASLQGVEAIDAILSLTPETPSPMIALNENKITRKPLVESVALTKKVADAIGNKDFAEAMRLRNPEFVEQLQGFLLTNSADKDRPQEPAKDPLRVAIVCTGAPAGGMNAAIRSAVLYGLARGHQMFAIHNGWSGLVKNGDDAVRELTWLEVEPLCQKGGCEIGTNRSLPECDLGMIAYHFQRQRFDGLIVIGGFEAFRALNQLDDARHAYPALRIPMVGIPATISNNVPGTDYSLGADTCLNSLVQYCDVLKTSASATRLRLFVVEVQGGNSGYIATVAGLITGAYVVYTPESGINLRLLQHDISYLKDTFAHQADVNRTGKLLLRNERSSNVFTTDVITGIINEEAKGSFDARTAIPGHVQQGGHPSPTDRVRAQRFAIKAVQFIEEHHGSKNNADHCVILGVRGSKFKYTSVSHLYAHKTEHGARRPKHSYWHAIGDIANMLVGRKAPPLPETLNDEIEKNIAKEQGIIDPC

SEQ ID NO: 28059 - protein, 853 aa, Oryza sativa
MSAAQQQKHEVDRATVAGAVAALFKWMRARAAEAPPNLLADERDDLLLLQLSLRRIPPSPTTKPRLLPLPHPVIVPGESASICVISDDRPKSRSPAASDLLDASRSHHLPVSEVIPLSALRTDYRPYESRRRLAASHDLFIADRAVLPLLPRVLGKAFYSTKKAPVAVDFARTGWLEQVRKVMNSTFLYLRTGTCSGIKVGRLDMKEEDTVENVMAAVEAAVENVPKKWANVRSLHLKAVDSVALPIYQAVPELGMKIEVRFAQLEGEVGSGEVIDASEAGAALKGVGKKKAKKALKHVEEENAGEEAAQESGKRKRGKKQLAEDLMEQDIQDVSEKRKKVKEGTPAAETPKISKKGKEKSKRALDKEGEDASVEEASNKKKKGKKEVVSDVGEKNSKVKKSNGDKEKRRTRLRIADAKRPQEEHVFGYIDWIPEHHGFQFSPCYKRSLPATERYIRGEAPLLSVSNSTEDQTPNGLSEAIVVRKGLSSICQRFPSFLHDFRLGQQLAFHLRELCSAVASEIHAKLARFLHRFWTTLQGSSKDIGWLKRTKTLPCSVDGLFSNHSPLYFVNTKRIFSKMGLTCHIARIHSEASVEKNARELKLYIEELYWGSGKQVLLLGHSKGGVDAAAALSLYWSELKGKVAGLALVQSPYGGTPIASDILRKGQIADKETRRIMELIICKLIKGDIRALEDLTYDKRRDFISKHKLPVDELPIISFHTEASTAPTMLVTLSRVAQAELLPWLPLPRFLSSSEYAESLLASLKLPVVVPASAAMAVSALHLRLRYGERSDGLVTRRDAEVPGSVVVRPERRLDHAWMVHSTLRKDHAEADATQMCEALMAMLVEIGRKKCC

SEQ ID NO: 28060 - protein, 513 aa, Geobacillus kaustophilus HTA426
MTTHVQVHHFPLFIDGQWQPATSGETFHVYNPATGEVVATVAKATADDVDRAVKAARKAFDETDWKAMKPKERARVLNAIAQAIAANAQELAYLEAISSGGTIRRISSIDILQTVDLFQTMANIVQEYPFSETLPIPPFPGPAHNFVWREPIGVCAAITPWNLPLMIASWKIAPALAAGNTIVVKPASYTPLSTLKLAEIISSFVPPGVINVVAGPGADVGEALVRHPQVDKVAFTGSTEVGRRIMALAAETVKNVTLELGGKSPNILLEDADLDLAVPGSLFGVFLHSGQLCESGTRLFVPDRLHDEVVERLVALTKTLQIGHPLDPATDVGPVISKRQKETVLSYIEAGKQEGATIVCGGHEVEVPGCEGGHFVAPTIFSNVTNDMKIAQEEIFGPVLSIIRYHDVEEAVTMANDTIYGLAAGVWTRDVNKAYAIAGRLQAGVVWINDWHMLRNDAPFGGYKQSGIGREMGKYSLDAYTQLKHVHTSMVPELGKRKWYQVLFSRLHTMMKK

SEQ ID NO: 28061 - protein, 385 aa, Neurospora crassa
MLSRNSMRLARAVAQPTPRLARGFASVQDTPAQTLQSDIFKPTKYGGKYTVTLIPGDGIGAEVAESVKTVFKADNVPITWEQIEVSGVQDNASRTEEAFQQAVASLRRNKLGLKGILHTPISRSGHQSFNVAMRQELDIYASISLVKNLPGLQTRHKDVDLCIIRENTEGEYSGLEHQSVDGVVESLKIITRAKSERITKFAFQFALANQRKKVTCIHKANIMKLADGLFRGTFNRLAKDFPQLECNDMIVDNASMQCVSKPQQFDVMVMPNLYGGILSNIAAALVGGPGVVPGCNMGRDVAVFEPGCRHVGLDIQGKDQANPTALLLSGTMLLRHLGLDDHANRISNAVYDVIAQGKVRTRDMGGEASTHEFTRAILDSMEKSL

SEQ ID NO: 28062 - protein, 394 aa, Cryptococcus neoformans var. neoformans JEC21
MASTITRSIPRALRARTAPLSTAARLVARNALLTTAAPTVPRSPARFLLAEGQRRAASSDEGVTMMTVRDALNQAMEEEMIRDETVFIIGEEVARYNGAYKITKGLLDKFGEDRVIDTPITEAGFTGMAVGAALAGLRPVCEFMTWNFAMQSIDQIVNSGGKTHYMSGGNVPCPVVFRGPNGAAAGVGAQHSQDYCAWYGSVPGLKVISPWSASDCKGLLKSAIRDSNPVCFLENELLYGVQFPMTKEELSEDFLIPIGKAKIEKAGSDVTIVAHSKMVTHSLEAAELLEKEEGIKVEVINLRSIRPLDIETIITSVKKTKHLITVEGGFPAFGVGSEILAQICESTAFDFLDAPPERITGADVPTPYAESLETMAFPDTPLIAKVIRRHLYRQ

SEQ ID NO: 28063 - protein, 111 aa, Oryza sativa
  misc_feature (21)..(21): Xaa can be any naturally occurring amino acid
  misc_feature (44)..(44): Xaa can be any naturally occurring amino acid
  misc_feature (50)..(50): Xaa can be any naturally occurring amino acid
MARAQVVLVALVAVLLLASPXAGEAITCGQVNYDDGPCLTYARXGAGPTXSACSGARSLMADARTTADRGTACNCLKNEARGIKGLMAGDADSIPSKSGVSEPYTMSASID

SEQ ID NO: 28064 - protein, 534 aa, Parachlorella kessleri
MAGGAIVASGGASRSSEYQGGLTAYVLLVALVAACGGMLLGYDNGVTGGVASMEQFERKFFPDVYEKKQQIVETSPYCTYDNPKLQLFVSSLFLAGLISCIFSAWITRNWGRKASMGIGGIFFIAAGGLVNAFAQDIAMLIVGRVLLGFGVGLGSQVVPQYLSEVAPFSHRGMLNIGYQLFVTIGILIAGLVNYGVRNWDNGWRLSLGLAAVPGLILLLGAIVLPESPNFLVEKGRTDQGRRILEKLRGTSHVEAEFADIVAAVEIARPITMRQSWRSLFTRRYMPQLLTSFVIQFFQQFTGINAIIFYVPVLFSSLGSASSAALLNTVVVGAVNVGSTMIAVLLSDKFGRRFLLIEGGITCCLAMLAAGITLGVEFGQYGTEDLPHPVSAGVLAVICIFIAGFAWSWGPMGWLIPSEIFTLETRPAGTAVAVMGNFLFSFVIGQAFVSMLCAMKFGVFLFFAGWLVIMVLCAIFLLPETKGVPIERVQALYARHWFWKKVMGPAAQEIIAEDEKRVAASQAIMKEERISQTMK

SEQ ID NO: 28065 - protein, 367 aa, Mesembryanthemum crystallinum
MAYNKCNTLLLVSLALLAMIVGLSEGIDFTDKDLESDETLWDLYERWRSVYTSARSFGEKQNRFHVFKENVKYINEVNKMDKPYKLRLNQFGDLTPSEFARTYANSKIIEGTRNESGGFMYENVEVPRSIDWRVKGAVTPVKNQGRCGGCWAFSAAAAVEGINQITTGQLISLSEQQLIDCDTQNSGCRGGTMGRAFEYIKQRGGITSEANYPYKAQAGMCKNNLIQRPTVSIDGYYNIRRSEDAVLKILAHQPVSVAVDATTWSSLDWMFYFQGVFTGPCGTKLNHGVTAVGYGTTNDGYDYWIIKNSWGETWGERGYMRMLRGVSPYGLCGIAMQASFPIKRVSAGKAKFEPKRLIDLLVYVLNA

SEQ ID NO: 28066 - protein, 634 aa, Rickettsia conorii str. Malish 7
MSNSNIDNDLDKIDSLLKKAKSKKIPVTYDDINNALPLNKNPSIRQLEEAILKFSDAGVDILESNEDDEIKLDIGMDEEFKLSTNVDNEPEDEVEEENIGTTDDPVRLYLKDMGGVDLLTREHEVEIAKRIEEGHKTMIASLCRSPIAMRCFIVWYEDLVNEKMLLRDLIDLEANMLHDETPENDEENSSETEGEEHEDNHLSMSRVETQILPNIIERMKKIAFICEELLIEAKKCYEKSFEPKVLQNSKKYNNLELLINEVSEIHFNSKRTEEILGKMYGINRDLINKETAFLKLAEKYGVTRQNFLDEYIGSVINAAWKEKMLKNKKVAWKELMTKESDYIDQMIAELSVIESKTGLLVNDFKKLVNTIQKSERQTLQAKKDMIEANLRLVISIAKKYANRGLQFLDLIQEGNIGLMKAVDKFEYRRGYKFSTYATWWIRQAITRAIADQARTIRIPVHMIETINKILRTSRQMLNELGYEPTATEIANRLSMPLDKVRKVMKIAKEPISLENPVGDDSDGGQLGDFIEDKNAVAPIDAAIQSNLREVTTRVLATLTPREERVLRMRFGIGMNTDHTLEEVGQQFKVTRERIRQIESKALRKLQHPIRSKKLNSFRSGGKRGDGNSSDLLEA

SEQ ID NO: 28067 - protein, 465 aa, Lactococcus lactis subsp. cremoris
MGFMRKADFELYRDADKHYNQVLTTRDFLALGVGTIISTSIFTLPGQVAAQFAGPGVVFSYLLAALVAGFVALAYAEMSTVMPFAGSAYSWISVLFGEGFGWIAGWALLAEYFIAVAFVGSGFSANLQQLLAPLGFQLPKVLANPFGTDGGIVDIISLLVILLSAIIVFRGASDAGRISQILVVLKVAAVIAFIIVGITVIKPANYHPFIPPHNPKTGFGGFSGIWSGVSMIFLAYIGFDSIAANSAEAKNPQKTMPRGIIGSLLIAVVLFAAVTLVLVGMHPYSAYAGNAAPVGWALQQSGYSVLSEVVTAIALAGMFIALLGMVLAGSRLLYAFGRDGLLPKGLGKMNARNLPANGVWTLAIVAIVIGAFFPFAFLAQLISAGTLIAFMFVTLGIYSLRRRQGKDLPEATYKMPFYPVLPALGFIGSLFVFWGLDVQAKLYSGIWFLIGIAIYFAYGNRRKKK

SEQ ID NO: 28068 - protein, 594 aa, Arabidopsis thaliana
MAKLNRSNIGLSLLLSMFLANFITDLEASSHQDLNQPYRTGYHFQPLKNWMNDPNGPMIYKGIYHLFYQYNPYGAVWDVRIVWGHSTSVDLVNWISQPPAFNPSQPSDINGCWSGSVTILPNGKPVILYTGIDQNKGQVQNVAVPVNISDPYLREWSKPPQNPLMTTNAVNGINPDRFRDPTTAWLGRDGEWRVIVGSSTDDRRGLAILYKSRDFFNWTQSMKPLHYEDLTGMWECPDFFPVSITGSDGVETSSVGENGIKHVLKVSLIETLHDYYTIGSYDREKDVYVPDLGFVQNESAPRLDYGKYYASKTFYDDVKKRRILWGWVNESSPAKDDIEKGWSGLQSFPRKIWLDESGKELLQWPIEEIETLRGQQVNWQKKVLKAGSTLQVHGVTAAQADVEVSFKVKELEKADVIEPSWTDPQKICSQGDLSVMSGLGPFGLMVLASNDMEEYTSVYFRIFKSNDDTNKKTKYVVLMCSDQSRSSLNDENDKSTFGAFVAIDPSHQTISLRTLIDHSIVESYGGGGRTCITSRVYPKLAIGENANLFVFNKGTQSVDILTLSAWSLKSAQINGDLMSPFIEREESRSPNHQF

SEQ ID NO: 28069 - protein, 394 aa, Oryza sativa
MAAATTSRRGPGAMDDENLTFETSPGVEVISSFDQMGIRDDLLRGIYAYGFEKPSAIQQRAVLPIISGRDVIAQAQSGTGKTSMISLSVCQIVDTAVREVQALILSPTRELAAQTERVMLAIGDFINIQVHACIGGKSIGEDIRKLEHGVHVVSGTPGRVCDMIKRRTLRTRAIKLLILDEADEMLGRGFKDQIYDVYRYLPPELQVCLISATLPHEILEMTSKFMTDPVRILVKRDELTLEGIKQFFVAVEKEEWKFDTLCDLYDTLTITQAVIFCNTKRKVDWLTERMRSNNFTVSAMHGDMPQKERDAIMGEFRSGATRVLITTDVSLVINYDLPNNRELYIHRIGRSGRFGRKGVAINFVKKEDIRILRDIEQYYSTQIDEMPMNVADLI

SEQ ID NO: 28070 - protein, 479 aa, Methanosarcina acetivorans C2A
MVAMKMQINGKAVEACGGEVFGIKNPATGELIEQVPRGTEEDVAVAVEAASSAFTGWASASPQQRGEVLYRAAEIVRQRKDELASLLTQEQGKPIVEARNEIEGFAHVLEYYCGLSGSQRGDFIPVPGNGYAFTVKKPLGVCAAIIPWNMPALIMGWKIAPVLISGNTLVLKPASNTPLTNLTLASIFVEAGLPAGVLNVVTGPGETVGESLVRSPEVRKISFTGEARTGKRVAELAACGMKRITLELGGSDPMLVCDDADLESAAAGALRGRFYNCGQTCTAVKRLYVFESVAEEFIKKLETGIKSLRLGNGMDKNISMGPLNNRTQWEYIKELAAEIEEKDAGRIITGGKVPEFKDSEKGYFFEPTLVSDVPGDSRLLKEEVFGPLLPVVTVKNLDEAIVGANSTCYGLGASIWTKNIDRARKGCEQLNAGIIWINQHLKVAPEVPFGGVKESGFGRENGPESLSEYLETKTIMLKI

SEQ ID NO: 28071 - protein, 231 aa, Wolbachia endosymbiont of Oeciacus vicarius
LEELQKYVDTLIVIPNQNLFRIANEKTTFSDAFKLADNILHIGIRGVTDLMVMPGLINLDFADIETVMSEMGKAMIGTGEAEGEDREISAAEAAISNPLLDNMSMKGAQGILINITGGGDMTLFEVDAAANRVREEVDENANIIFGATFDQTMEGKVRVSVLATGIDGDTVCDDKSETPSVNQSETSEKEKFKWSYSQTPVPETKPAEQVNEGVKWSNNIYDIPAYLRRKK

SEQ ID NO: 28072 - protein, 550 aa, Ralstonia metallidurans CH34
MIQQNTGGVGSRRHQMFPVLTPIQVEAASRFASGPPRVFASGETVFATGDRNVPVWLVLDGSIDVLRRNGLDESAPITTHRAGQFTGEVSQIDGRASLALAQAGPDGATLLPFDPPHLRALMIGSAEVGEIVMRALILRRVSLIEHGGSGTILIGASDDLHLLRLQGFLTRGGYPNHIMDPRVDGDGRSFVERMALLPTDMPLVVCPGGAVLKRPDERELAACLGILPKIEQRKTYDVAVVGAGPAGLAAAVYGASEGLSVIVLDERTMGGQAGASARIENYLGFPTGISGQALAGRAFTQALKFGAEVAIPVSVGRLDRDGDRLTLGLSDDSTVAARTVVIASGAAYRQPDIAGLRHFEGAGVSYWASPIEARLCAGKEIALVGGGNSAGQAIVFLAPHVKRLHVFVRRELSETMSRYLINRISALPNVDIHVGTDLIGLAPHGETLASATVRDRASAALTQYEICHLFLFIGATPHTCWLNGSLAMDDKGFILTGGSTSSLETSMPGVFAIGDVRAGSTKRVAAAVGDGAAAISQIHNYLSKQAKEAA

SEQ ID NO: 28073 - protein, 532 aa, marine gamma proteobacterium HTCC2207
MEYRSYYAIYCAIFVSLGGFVFGFDASVVSGIIGPVTIEFGLTPIQAGFVVAAPTLSSAIGTLMIGPLSDAFGRKKILMFIAVLYLISAVSSALSTSYYMLLAARALGGFAFTSLVIAPMYIAEIAPAKRRGKLVSVNQLNIVIGLSAAYFANYYILGLSSSGADWVSAWGVDQHAWRYMLGFEIVPALIYLVALFAIPDSPRWLIQKGREQEARAVIAKLVPADQVDSEMSLITQSSATVTESLWARIGGIFGPKMRLALIVGIIVAVVQQITGINAIFFYAPTIFEQSGIGTDAAFAQAVLVGLINVVFTLVAIALIDRWGRRPLLLVGLSGIAISMALCTYGFSQATYELKSESVVQMQQMETADANFDASQLNSLVGVVYQSDVEFKTAVSEAIGIEAARKYESELIKSSAQMNALLILVGILGFVASFAMSLGPVMWALFSEIFPNQLRGVAISFVGMINSMVSFMVQLLFPLELSVLGAALTFFSYFVFAVIGLILVAWLLPETKGKSLEELETMFGTKASTGSPA

SEQ ID NO: 28074 - protein, 317 aa, Bacillus licheniformis ATCC 14580
MERKKVGLLVMAYGTPYQEEDIIPYYTHIRHGKRPSDDMIEDLKKRYKHIGGISPLAKITLAQAKELEKTLNERQDKVEYVMYLGLKHISPFIEDAVEQMKKDQIEEAVSVVLAPHYSTFSTEVYNRRAKQAAAAIGGPRIASIDEWYQEEGFIRYWSEEIGSILNDMSEKEREKAAVIFSAHSLPEKIREHGDPYPDQLEKTAQLIGERLSFDQIAVGWQSEGNTPDPWLGPDVQDLTKELYEEGFRSFIYAPVGFVSDHLEVLYDNDYECKVVTDELGASYHRPPMPNTDPRFIDTLASVVERTYNSTEQEKAEL

SEQ ID NO: 28075 - protein, 283 aa, Cryptococcus neoformans var. neoformans JEC21
MLARTLLKPSQSTYRLTIRAMSTSAEQLVIPSRSPSNNVAILTLNRPKALNALSTPLFNALNSELEKAETDESVRAIVITGGDKVFAAGADIKEMKDKEFAEAYTSNFLGSWNQIASIRKPIVGAVAGYALGGGCELAMLCDILVASPTAVFGQPEITLGIIPGMGGSQRLTSLIGKARAMDMVLTGRKIDAETAERWGLVSRVTKEGESVTEEAVKVAENVSKFGKVAVQAGKEAVNGSLDLPLEQGLRLERRLFQQLFATKDQKEGMAAFAEKRKPTWSDK

SEQ ID NO: 28076 - protein, 430 aa, Bacillus anthracis str. 'Ames Ancestor'
MTIGTLPFDQETIRQRASEVNEAAWLTEFRLQALAQATELPMPTPDKTKIEKWDFIGKGDAAKQEPVSSLTELPEAVKNLIDENNSVLVQRTGTTAFVSLADEAKEKGVIFTDIVTAATEHAELVQKYLMKDGVKVDEHRLTALHAALINGGAFVYVPKNVVLETPLQAVFLVDGEEANVYNHVLFVADANSTATYVENYVANENAKGIANIVAEVIVEQGAQVKFGAVDLLAKDVTTYVNRRGVVGRDGRIDWALGLMNDGNTISENVTNLMGDGSYADTKTVTIGRGNQTQNFTTKVVHFGKHSEGWILKHGVQKDSATSIFNGIGKIEHGASKSNAQQSSRVLMLDEKARGDASPILLIDEDDVMAGHAASVGRVDPVQLYYLMSRGIPKREAERLVIHGFLAPVVNELPIEGVKAQLVEVIERKVR

SEQ ID NO: 28077 - protein, 378 aa, Burkholderia xenovorans LB400
MTLASTPEIIAELKAGRMVILVDEEDRENEGDLVIAAEFVTPEAINFMARYGRGLICLTLTQERCKLLNLPLMTYRNGTQYGTAFTVSIEAAEGVTTGISAADRARTIATAVAPDAKAEHIVQPGHVFPIMAQPGGVLVRAGHTEAGCDFTALAGLTPAAVICEVINDDGTMARLPDLMEFAKEHGLKIGTIADLIHYRSRTESIVERICERTMQTAHGAFRAVMYLDQPSGQPHIALVRGTPCTDQDTLVRVHEPLSVLDLLEVGESTHSWTLDAAMKEIARRDCGVIVLLNCGDSKDHLIDVFKAFDSKERAEALKRRPVDFKTYGIGAQILRELGVGKMQVLSNPRKLGSMSGYGLEVTGFVPMPGSTAQAPQQG

SEQ ID NO: 28078 - protein, 408 aa, Frankia sp. CcI3
MTTPPRQVVVTGLGATTPLGGDVASTWEGLLSGRSGVRRLTEGWVEQLPVHIAAPLAVEPPLGRVEARTLDRSQQMALTAAREAWADAGSPEVDQERLAACVASGIGGVLTLLHQHDVIREKGPRRVSPHLVPMLMPNGPASTVGLAFGAKAGVHAPVSACASGSEAIALALDIIRAGRADVVIAGGTEAAISALTMAGFAQMQALSRRNDAPEAASRPFDKARDGFVLGEGAAILILEAAEHAAARGARVHGTLAGAGISSDAYHIAAPEPTGAGAARAIRAALRSGSLEPRDVVHVNAHATSTPAGDAAEALALRSAFGDHIDEIAVTSTKSTTGHLLGAAGAVEAVFSVLALREHLVPATRNLDALDDEIALDVVRIDNRTIRPGAALSNSFGFGGHDICLAFTA

SEQ ID NO: 28079 - protein, 362 aa, Arabidopsis thaliana
MATVTDLPDDLVREIFSRVPLTSLRAVRSTCKKWNAISKYDILGKKAAAKNQFLEFMVTDSRVCSLRLDLQGIRSEEDLIDLSIKQISIPNKVDQVEISQVYHCDGLLLCIAKDNSSVMVWNPYLGQTKLIQPRKKLHRYDKFALGYDNNRNHKILRFLYEGSPRNVIIDVYDFSSDSWRVLDIDIDWHELFSHNSVSLKGNTYFFGRKGPRLPMLFKPPSRRFEYLTLSCVRNEKLAVLYSHLNRFGTIEICISTKIDPSAVSWTTFLRIDMTLINGLPDNFFVHSYATSFFFDEEKKVAVLFGTNRYRGRETCQYYQRACIVGDSGYFKAVNIELVFNSQLQSCQLVSSSYVPSLVQLQD

SEQ ID NO: 28080 - protein, 562 aa, Xanthomonas smithii subsp. citri
MSLNGGAGASRAGGRSDHRGGVRQHERRRSQDLQAQSGICERAQRDLPHQPQHPHPGRMTQTNGFDALHAHAQRLRGAAIPALLAAEPERPTQYARQVGPLYFNFARQKYDRAALDALFAIARERDLSGAFQRLFRGEQVNVTEQRAALHTALRGDLTDAPVASEAYATAEEVRQRMGSLIQQLEATDVTDIVSVGIGGSDLGPRLVADALRAPSGARFRVHFVSNVDGAAMQRTLATLDPARTAGILISKTFGTQETLLNGSILHAWLGGSERLYAVSANPERAAKAFDIAPGRVLPMWDWVGGRYSLWSAVGFPIALAIGFERFEQLLEGAAQFDAHVLNTPLEENVAVLHGLTAVWNRNLLGSATHAVMTYDQRLALLPAYLQQLVMESLGKRVKLDGSAVDSDTVSVWWGGAGTDVQHSFFQALHQGTSVVPADFIGTVHNDDPYAENHTALMANVLAQTEALANGQDSSDPHRSYPGGRPSTVILLDALTPQALGALISMYEHSVYVQSVMWGINAFDQFGVELGKQLASQLLPALKGESVDVADPVTRELLNKLRG

SEQ ID NO: 28081 - protein, 316 aa, Tulipa gesneriana
MASFPVINLEKLEGGERSKVMEVLHDACANWGFFELLNHGISHELLDKVEKLTKGHYKKCMEERFREFASKTLQDVSKVDVDNLDWESTFYLRHIPTSNMSEIPDLSDEYRETMKEFVLSLEELAEQLLDLLCENLGLEKGYLKKAFSGSKGPTFGTKVSNYPPCPKPELIKGLRAHTDAGGLILLFQDDKVSGLQLLKDGEWVDVPPMHHSIVINLGDQIEVITNGKYKSVLHRVLAHPDGTRMSIASFYNPGSDAVIYPAAALLEEVENQSEVYPKFMFEDYMKLYAVQKFQAKEPRFETMKAMKIANVQPIAT

SEQ ID NO: 28082 - protein, 334 aa, Gibberella zeae PH-1
MQSILQKATGIGPQVIKPENLQGRVAIVTGGALGIGYEVSRALAHAGCKVIMVNRKEEQGTSAIEAVKNEKHDADIDWKECDMGNLSQIREVFGGFRESLDRLDFLVLSAGINTNQFGLDSDGIERHFGVNFLGHFYVCNQLWPLLRKTSKMENVSPPRVVFEASEMHRLAQLSNVQFKTKEEINDPDLDPTARYNRTKLAMILFAKYGLAGKVIAENKDKIYALSVHPGAVNTAMQQQWKDAYPGLTGKLLSWTMQAIGRDVEQGSYSALWALTSSRIEEENLNGYYFVDPDKEGEETSQASNPELASNLWDLSTSFIKEKLGEDALADWNGS

SEQ ID NO: 28083 - protein, 271 aa, Triticum aestivum
  misc_feature (2)..(2): Xaa can be any naturally occurring amino acid
  misc_feature (5)..(5): Xaa can be any naturally occurring amino acid
  misc_feature (26)..(26): Xaa can be any naturally occurring amino acid
  misc_feature (62)..(62): Xaa can be any naturally occurring amino acid
AXPYXWLTSTLSLACGSAMMLFSWVXCLVRAPKTDLDFWKALFPVAVAHTIGHVAAHRSNVXRVTVSFTHIIKSAEPAFSVLVSRFILGESFPMPVYLSLLPIIGGCGLAAATELNFNMIGFMGAMISNLAFVFRNIFSKRGMKGKSVSGMNYYACLSIMSLIILAPFAIAMEGPQMWAAGWQKALADVGPNVLWWIGAQSVFYHLYNQVSYMSLDQISPLTFSIGNTMKRISVIVSSIIIFRTPARAAAQSLVRPPAGRPYGRAPNALDA

SEQ ID NO: 28084 - protein, 394 aa, Chlamydophila abortus S26/3
MSKETFQRTKPHINIGTIGHVDHGKTTLTAAITRALSAEGLANFCDYSSIDNTPEEKARGITINASHVEYETPNRHYAHVDCPGHADYVKNMITGAAQMDGAILVVSATDGAMPQTKEHILLARQVGVPYIVVFLNKIDMISQEDAELVDLVEMELSELLEEKGYKGCPIIRGSALKALEGDASYVEKIRELMQAVDDNIPTPEREVDKPFLMPIEDVFSISGRGTVVTGRIERGVVKVGDKVQIVGLRDTRETIVTGVEMFRKELPEGQAGENVGLLLRGIGKNDVERGMVICQPNSVKSHTQFKGTVYILQKEEGGRHKPFFTGYRPQFFFRTTDVTGVVTLPEGVEMVMPGDNVEFDVQLISPVALEEGMRFAIREGGRTIGAGTISKIIA

SEQ ID NO: 28085 - protein, 1026 aa, Nostoc sp. PCC 7120
MGSVLYSLSESANLYPASELFLRHRLQIVEELWESVLRQECGQNMVDLLRQLRDLCSPEGQATKDQAVSAVKLIEQLNINEAIRAARAFALYFQLINIIEQEYEQRQQLTRYSDLEAETAPLNGSENITSSSNHNEDDVIFNRGLGTDFLGKNWTNRGQGKQKGTFAALFPLLSKLNVPPQQIQRLISQLDVRLVFTAHPTEIVRHTIRDKQRQVVDLLQQLDEVENRAKDGGGYPWEAGEIREKLLEEIRLWWRTDELHQFKPTVLDEVDYALHYFQEVLFDGIPQLYKRFKYALNQTFSWLEPPSKDFCSFGSWVGSDRDGNPSVTPEITWQTACYQRKMVLERYIKSVTQLIELLSISMHWSDVLPDLLESLELDQSQLSEVYDALALRYRQEPYRLKLAYVLKRLENTRDRNLALYKGETPTNEDSPMYRSGSEFLAELRLIQHNLTETGLSCRELDNLICQVEIFDFNLTKLDIRQESTRHSDALNEILDYLQLLPQPYNDLSEEQRVAWLTTELQTRRPLISSELPFSDKTNDVIKTFRVVRSLQQEFGINICQTYIISMCRQVSDVLEVLLLAKEARLFDPAIAVGTIQVVPLFETVEDLQRSRSVMRQLFELPLYRALLAGGYKNTEVKVPNTELTPQSPAPSPQSVLTPDLQEVMLGYSDSNKDSGFLSSNWEIHKAQKSLQQIAEEYGVNLRIFHGRGGSVGRGGGPAHEAILAQPGHSINGRIKITEQGEVLASKYSLLDLALYNLETITTAVIQASLLRTGFDDIEPWNEIMEELAARSRQHYRGLIYEQPDFIDFFHQVTPIEEISQLQISSRPARRPSGKKDLSSLRAIPWVFSWTQTRFLLPSWYGVGTALQEFFNEEPEEHLKLMRYFYVKWPFFKMVISKVEMTLAKVDMQMAGHYVQELSDPEDKPRFEKVFEQIANEYYLTRDLVLKITDHGRLLDGDPVLQRSVQLRNGTIVPLGFIQVSLLKRLRQSKNNTATSGVIHSRYSKGELLRGALLTINGIAAGMRNTG

SEQ ID NO: 28086 - protein, 413 aa, Oryza sativa (japonica cultivar-group)
LSKESSILPASYVNRVETRTYPSYTTLVRKLCTCIFPAMLCKIIESGPRVTIIAATSSVGTFIVLSLIVATALYISLKSRYNEEIHLKVEMFLKTYGTSKPTRYTFSEVKKIARRFKDKLGHGAFGTVYKGELPNGVPVAVKMLENSVGEGQEFINEVATIGRIHHANIVRLLGFCSEGTRRALIYELMPNESLEKYIFPHGSNISRELLVPDKMLDIALGIARGMEYLHQGCNQRILHFDIKPHNILLDYSFNPKISDFGLAKLCARDQSIVTLTAARGTMGYIAPELYSRNFGAISYKSDVYSFGMLVLEMVSGRRNTDPTVESQNEFYFPEWIYERVINGQDLVLTMETTQGEKEMVRQLAIVALALWCIQWNPKDRPSMTKVVNMLTGRLQNLQVPPKPFISSQNQLVI

SEQ ID NO: 28087 - protein, 318 aa, Silicibacter sp. TM1040
MTLTLPSPASPLKIGTRGSPLALAQAYETRDRLARAFELEPTAFDIVVIKTTGDNRAMIDADRPLKEIGNKGLFTKEIEEALLSGGIDIAVHSMKDMPTLQPEGLTLDCYLPREDVRDAFVSPGIHSIADLPEGAVVGTSSLRRRAQLLHRRPDLQVVEFRGNVQTRLQKLENGVASATFLAMAGLRRLDMAEAVPATPISVDDMLPAVAQGAIGIERRSSDITTAAMLEAIHHAETSLRLAAERAFLAALDGSCETPIAALADLSGGTIQLRGQILRPDGSEALSDEQDGAIEDGAELGRQMGETLRARAGAGFFAH

SEQ ID NO: 28088 - protein, 188 aa, Zea mays
MRPLTEKETQTLFEKLANYTGGSLKNLIAPLDDSPNADRYVFRLVRDRVFYVRLSIANLATSIAREKLLSLGTCLGKFTKTGKFRLHVTALPIIAEHARYKIWVKENGTMPFLYGSNIVKAHVGRWSEDCPEHQGVVVYSMNDTPLGFGVTARSTAEARRLDPTGITCFRQADCGEYLRDEDNLFATG

SEQ ID NO: 28089 - protein, 99 aa, Arabidopsis thaliana
  misc_feature (54)..(54): Xaa can be any naturally occurring amino acid
MVSSMLSSAAVVTSPAQATMGAPFTGLKTSAEFPVTRKTNKDITSIASNGGRVXCMKVWPPIGKKKSETLSYLPDLSDVEIGSGKWTTLPRKKAGFPWG

SEQ ID NO: 28090 - protein, 649 aa, Lactobacillus johnsonii NCC 533
MCGICAFFDPELKDKDCAIQGMMDTIKHRGPSSDGKYTNDKVALGFRRLSIIDLRGGSQPIFNEDKSRAIIFNGEIYNFKPLRKELIDAGHTFTTKADTEVLLHGYEEWGMDGLLKKVRGMFAFVIWDDNTKTLYGARDFFGIKPMYYSDQNGKLIVGSELKSFLAYPGFKKELNTEAVKPYLMNQYNDLKETFFKGVYRFPAGHWFEYKDGKMKTHQYWDAKYVENSLSFEETLDKINEDLKETVDLYRNADVPVGAFLSEGIDSSYLTSLLDPEDVFSVSFDDSTYNEASKAKALSDLHGWKFFADKVDADEAMRDFPEMQYHMDEPDANPSIIPLWYLCKLARKHVTVALSGEGADELFAGYVNYGMHTHNDVIKVFTAGLKKLPKKSRVRLAHKIKKMPNFPGKVHMYTNLAEPSEFYVGQSVIYDMDYPTIFTSKDANGILRDKYKNDLTVNGIYQEDFKKVKNIDEVKQMQYIDLHHFMLNDIEQKADKISMAHSLELRVPYLDKKIAELANSIPTKYLVNRHDTKYALRKASEKVLPEEWAQRPKLGFPTPIKQWLKEPRFYKQVRALFTEDFVDDIFDQKKIVKLLDDNYKGDGSARRQIWAIYTFLVWYKLFFVDYDETVKKYQHVQPEVAELIESGRLV

SEQ ID NO: 28091 - protein, 120 aa, Triticum aestivum
  misc_feature (47)..(47): Xaa can be any naturally occurring amino acid
  misc_feature (68)..(68): Xaa can be any naturally occurring amino acid
  misc_feature (87)..(87): Xaa can be any naturally occurring amino acid
MARVALVAVFAVLAALAVAEMASGAVTCGDVTSAVAPCMSYATGKAXAPSGACCSGVRTLNAKASTPXADRKAACNCLKNLAGSGIXMGNAANIPGKCGGLPSLSPSSTKTNCNKYILKS

SEQ ID NO: 28092 - protein, 410 aa, Exiguobacterium sibiricum 255-15
MSTFEALHIQEQWVKKLQKQGIKQPTPIQEQAIPHLLAGRDLIGKAQTGTGKTLAFLLPILEQIDLESKTVQALIVAPTRELARQIADETHKLIRNMEDIRALAVYGGQDVFKQIQRLGRMPQIIIGTPGRILDHVGRGTLDLSELKTLVLDEADQMLQIGFLPEIEDIIAAAPVDRQFVMLSATMPEKVEQLAKTYLRDPIEVQVEAEKVTVDAIEQFVVETTDRRKQATLRTMLDEMRPYAAIIFCRTQRRVSKLNEELQMQGYPTDELHGGLTQGKREKAMAKFYQGKTPFLIATDVASRGLDVTGVTHVFNYDLPDDAESYVHRIGRTGRAGNDGVAISIVTPRDGRSFRDMERELGVEVTPIVVELSDEMIRAQHDQSKGTKKPAEGRGNTRRSSNRRPGRDHHK

SEQ ID NO: 28093 - protein, 157 aa, Brassica napus
  misc_feature (2)..(2): Xaa can be any naturally occurring amino acid
  misc_feature (8)..(9): Xaa can be any naturally occurring amino acid
  misc_feature (32)..(32): Xaa can be any naturally occurring amino acid
  misc_feature (44)..(44): Xaa can be any naturally occurring amino acid
  misc_feature (52)..(53): Xaa can be any naturally occurring amino acid
  misc_feature (59)..(59): Xaa can be any naturally occurring amino acid
  misc_feature (61)..(61): Xaa can be any naturally occurring amino acid
  misc_feature (70)..(70): Xaa can be any naturally occurring amino acid
  misc_feature (72)..(72): Xaa can be any naturally occurring amino acid
  misc_feature (75)..(76): Xaa can be any naturally occurring amino acid
  misc_feature (78)..(78): Xaa can be any naturally occurring amino acid
  misc_feature (81)..(83): Xaa can be any naturally occurring amino acid
  misc_feature (85)..(89): Xaa can be any naturally occurring amino acid
  misc_feature (105)..(106): Xaa can be any naturally occurring amino acid
  misc_feature (109)..(109): Xaa can be any naturally occurring amino acid
  misc_feature (111)..(111): Xaa can be any naturally occurring amino acid
  misc_feature (117)..(117): Xaa can be any naturally occurring amino acid
  misc_feature (120)..(120): Xaa can be any naturally occurring amino acid
  misc_feature (122)..(122): Xaa can be any naturally occurring amino acid
  misc_feature (124)..(124): Xaa can be any naturally occurring amino acid
  misc_feature (126)..(126): Xaa can be any naturally occurring amino acid
  misc_feature (131)..(131): Xaa can be any naturally occurring amino acid
  misc_feature (133)..(133): Xaa can be any naturally occurring amino acid
  misc_feature (136)..(136): Xaa can be any naturally occurring amino acid
  misc_feature (138)..(139): Xaa can be any naturally occurring amino acid
  misc_feature (146)..(146): Xaa can be any naturally occurring amino acid
  misc_feature (148)..(151): Xaa can be any naturally occurring amino acid
  misc_feature (153)..(154): Xaa can be any naturally occurring amino acid
  misc_feature (156)..(156): Xaa can be any naturally occurring amino acid
MXYSAPIXXSLSFFKTPQLAGFSFPFSPLYSXPRIQNLSLPTMXNKTWSSSXXSAATAXAXKQKKKRYPXEXKGXXEXMRXXXMXXXXXEQAKEGEKETNAPEEXXVAXWXPTVEGXLRXLXHXKXDYDTXEXIIXQXXFPTYAKXLXXXXGXXEXL

SEQ ID NO: 28094 - protein, 412 aa, Haloarcula marismortui ATCC 43049
MQDIVNEALERDEQEQKQLSDSDVDGFGDPRIVIVGCGGAGNNTVNRLYNIGVEGADTVAINTDKQHLKMIEADTKILVGKSLTNGLGAGGDPSMGERATEMAQGTIKEVLGDADLVFVTAGMGGGTGTGAAPVVSKIAKEQGAIVVGMVSTPFNVERARTVKAEEGLEKLRNEADSIIVLDNNRLLDYVPNLPIGKAFSVMDQIIAETVKGISETITQPSLINLDYADMTSIMNQGGVAVMLVGETQDKNKTEEVVKDAMNHPLLDVDYRGASGGLVHITGGPDLTLKEAEGIAQNITERLEADANVIWGARIQEEYKGKVRVMAIMTGVQSAQVLGPTTQKQANKSREAIQEVGDDTSFDASDNVESFDSPAPNSGSQSSGGRTTGYSETDGGQDQREKNNGLDVIRTNK

SEQ ID NO: 28095 - protein, 457 aa, Bacteroides fragilis YCH46
MNRENKPLFLYTFITVFGGLIVGLNMAGISGAVPFLQEQFMLDDMALGLVVSILTVGCLCGALLGGGFSDRYGRQKVMFSSAVFFIVSSLGCALSGNLVSLLVFRLICGLGIGVISAVAPIYISEISPARLRGTLVSYNQLAIVIGILIAYIVDYILLDYERNWRLMLGFPFFFSVAYLLLLGILPESPRWLSARGKAGRARQVASKLNLEAGEMTVSDTNTQEGRDRIKVTELFKGNLAKVVFIGSILAALQQITGINVIINYAPSIFEMTGVAGDIALVQSILVGVVNLLFTLIAVWLVDKVGRKILLLCGSLGMGISLLYLVYTFVVPAANGIGALIAVLCYIGFFAASLAPLMWVVTSEIYPSRIRGTAMSLSTGISWLCTFLTVQFFPWILNNLGGSVAFGIFAVFSIAAFAFILFCVPETKGKSLEAIEKELGVDKEAEENVKEEHAFSKI

SEQ ID NO: 28096 - protein, 407 aa, Arabidopsis thaliana
MAGVIHVSSTQIPVAFMSATKQSFRRASVIRCAANTPKKQYTIAVLPGDGVGNEVIPVAVDVLCLAGSLEGIDFSFEELPIGGVALDLVGVPLPKETLIRAKQSDALLLGAVGWPKWDNNPKHLKPITALLQLRAALQVFANLRPITVLPQLVDSTYLRKDTAQGVDLLIIRELTGGIYNAHPRGFTTNEQGDEVGFCTESYSASEVDHIARVAFDIAKQRRGKLCSVDKATILEGSMLWRKRVTAIASEYPEVEVSHLLIDTAAMDLVRHPRQFDTILTGVMFGDILSDLAAMIPGSVGLLPSAALGDSGPGIFEPVHGSAPKHYGKDTVNPIAAVLSAAMLLRYGLKEENAAKRIEEAVSDVLDRGFRTRDIHTPGTTLVGCKRMGEEILRSLDAKVSASTGNLV

SEQ ID NO: 28097 - protein, 170 aa, Oryza sativa
  misc_feature (47)..(47): Xaa can be any naturally occurring amino acid
  misc_feature (65)..(65): Xaa can be any naturally occurring amino acid
MAALPLATAEVCDANSNPIIAGELRALPPIFKIYGRRQVFAGPVATXVKVFEDNVLVRELLQEKXGHGRVLVVDGGGSVRCALLGGNLAQLAQINGWVGIVVNGCIRDVDEINGCDVGVRALNSHPMKSGKKGAGEKRVPVTIEGTRICDGEWLYADADGILISRTELTV

SEQ ID NO: 28098 - protein, 647 aa, Oryza sativa
MGGGGPLVDGFRRLFHRRTASGSNQSSNAGEEAASSDLEVADDPDLVALRSIRIRVPKRKMPLPVESHKKFGGEMKVSGFLVILDSWPRGVLRLDQIFVAPELLAYCTISLFLFFYDLCKVQYSSSAGLTWSGLCISLVRTVSIGNKSRLAHGMEQNTVEMEFFTEYGEASQYQIQEVIGKGSYGVVAAAVDTRTGERVAIKKINDVFEHVSDATRILREIKLLRLLRHPDIVEIKHIMLPPSRREFQDIYVVFELMESDLHQVIRANDDLTPEHYQFFLYQLLRALKYIHAANVFHRDLKPKNILANSDCKLKICDFGLARASFNDAPSAIFWTDYVATRWYRAPELCGSFFSKYTPAIDIWSIGCIFAELLTGRPLFPGKNVVHQLDIITDLLGTPSSETLSRIRNEKARRYLSTMRKKHAVPFSQKFRNTDPLALRLLERLLAFDPKDRSSAEEALADPYFASLANVEREPSRHPISKLEFEFERRKLTKDDVRELIYREILEYHPQMLQEYMKGGEQISFLYPSGVDRFKRQFAHLEENYSKGERGSPLQRKHASLPRERVGVSKDGYNQQNTNDQERSADSVARTTVSPPMSQDAQQHGSAGQNGVTSTDLSSRSYLKSASISASKCVAVKDNKEPEDPCMD

SEQ ID NO: 28099 - protein, 735 aa, Chlamydomonas reinhardtii
MAATYSLATSPLTRSTPIPFSTKRVPSGRSSGALPVPGSQARLSGAGAVALDGLEGGRDDWHQRYSLSTSGRRRSVASGSPSNTGSSEAKNVVMASNNVTVGFSVGASSSAFSDASSFSFPARSAPAGPVARPPRTGVSLLSRALSTGEKEQDLLAHLPPVLPSTDAADPLLFFPGIPLELLREAQAEFPIFNNELLVHAYGLAARAHQNQQRKNGESLLSHCVAVAKTVAGLGLDAETVAAALLHECVDMVSRSQLEEFMPPSVVSVLEHVNTISEMSRLYRQHSATGSFSDETFQRLLVGFEDVKAVIVKLSDRLAELRTISVLPADRQAALARETLEVYSVVANRLGVWCLKAELEDLAFSVLHPQEYNWLKEAVRTRQDPVALETAINSIKGALQAQGVAYEDISGRPKNLYGIFMKLQKDGKPLTIESLNSLYDLMALRVVVAHKHECYTALRAVQSVYRVMPSRSKDFIKDIKKPNGYQSLHETVYGEGDVPVEVQIRTHKMHYIAEYGFAAHWKYKEQMDSEDEWLEKETQYKRWLTQYKLRVHDKKVRPQGSPPTDSSLKSLGVAYMDMPEEQQRGLLDPFLQHERFKLQVPAKTEVSVLLQTCDGIETKDFPLGTTANQLWRDLGLGAQPGYALTVNSRLPSGEAALQSGDLVQVLPLSTILSRSPPQSAPLAAVLEDWEEEQAHAAAEAAALAASANNYLEVYSRDGMTTWSMGPNAGAAVPAGM

SEQ ID NO: 28100 - protein, 334 aa, Streptomyces avermitilis MA-4680
MTTVALKPATMAQALTRALRDAMAADPAVHVMGEDVGTLGGVFRVTDGLAKEFGEDRCTDTPLAEAGILGTAVGMAMYGLRPVVEMQFDAFAYPAFEQLISHVARMRNRTRGAMPLPITIRVPYGGGIGGVEHHSDSSEAYYMATPGLHVVTPATVADAYGLLRAAIASDDPVVFLEPKRLYWSKDSWNPDEPGTVEPIGRAVVRRSGRSATLITYGPSLPVCLEAAEAARAEGWDLEVVDLRSLVPFDDETVCASVRRTGRAVVVHESGGYGGPGGEIAARITERCFHHLEAPVLRVAGFDIPYPPPMLERHHLPGVDRILDAVGRLQWEAGS

SEQ ID NO: 28101 - protein, 1147 aa, Saccharomyces cerevisiae
MPNPNTADYLVNPNFRTSKGGSLSPTPEAFNDTRVAAPATLRMMGKQSGPRNDQQQAPLMPPADIKQGKEQAAQRQNDASRPNGAVELRQFHRRSLGDWEFLETVGAGSMGKVKLVKHRQTKEICVIKIVNRASKAYLHKQHSLPSPKNESEILERQKRLEKEIARDKRTVREASLGQILYHPHICRLFEMCTMSNHFYMLFEYVSGGQLLDYIIQHGSLKEHHARKFARGIASALQYLHANNIVHRDLKIENIMISSSGEIKIIDFGLSNIFDYRKQLHTFCGSLYFAAPELLKAQPYTGPEVDIWSFGIVLYVLVCGKVPFDDENSSILHEKIKKGKVDYPSHLSIEVISLLTRMIVVDPLRRATLKNVVEHPWMNRGYDFKAPSYVPNRVPLTPEMIDSQVLKEMYRLEFIDDIEDTRRSLIRLVTEKEYIQLSQEYWDKLSNAKGLSSSLNNNYLNSTAQQTLIQNHITSNPSQSGYNEPDSNFEDPTLAYHPLLSIYHLVSEMVARKLAKLQRRQALALQAQAQQRQQQQQVALGTKVALNNNSPDIMTKMRSPQKEVVPNPGIFQVPAIGTSGTSNNTNTSNKPPLHVMVPPKLTIPEQAHTSPTSRKSSDIHTELNGVLKSTPVPVSGEYQQRSASPVVGEHQEKNTIGGIFRRISQSGQSQHPTRQQEPLPEREPPTYMSKSNEISIKVPKSHSRTISDYIPSARRYPSYVPNSVDVKQKPAKNTTIAPPIRSVSQKQNSDLPALPQNAELIVQKQRQKLLQENLDKLQINDNDNNNVNAVVDGINNDNSDHYLSVPKGRKLHPSARAKSVGHARRESLKFTRPPIPAALPPSDMTNDNGFLGEANKERYNPVSSNFSTVPEDSTTYSNDTNNRLTSVYSQELTEKQILEEASKAPPGSMPSIDYPKSMFLKGFFSVQTTSSKPLPIVRHNIISVLTRMNIDFKEVKGGFICVQQRPSIETAAVPVITTTGVGLDSGKAMDLQNSLDSQLSSSYHSTASSASRNSSIKRQGSYKRGQNNIPLTPLATNTHQRNSSIPMSPNYGNQSNGTSGELSSMSLDYVQQQDDILTTSRAQNINNVNGQTEQTNTSGIKERPPIKFEIHIVKVRIVGLAGVHFKKVSGNTWLYKELASYILKELNL

SEQ ID NO: 28102 - protein, 455 aa, Streptomyces avermitilis MA-4680
MAQVLEFKLPDLGEGLTEAEIVRWLVQVGDVVAIDQPVVEVETAKAMVEVPCPYGGVVTARFGEEGTELPVGSPLLTVAVGAPSSVPAASSLSGATSASSASSVSSDDGESSGNVLVGYGTSAAPARRRRVRPGQAAPVVTATAAAAATRVAAPERSDGPVPVISPLVRRLARENGLDLRALAGSGPDGLILRSDVEQALRAAPTPAPTPTMPPAPTPAPTPAAAPRGTRIPLRGVRGAVADKLSRSRREIPDATCWVDADATALMHARVAMNATGGPKISLIALLARICTAALARFPELNSTVDMDAREVVRLDQVHLGFAAQTERGLVVPVVRDAHARDAESLSAEFARLTEAARTGTLTPGELTGGTFTLNNYGVFGVDGSTPIINHPEAAMLGVGRIIPKPWVHEGELAVRQVVQLSLTFDHRVCDGGTAGGFLRYVADCVEQPAVLLRTL

SEQ ID NO: 28103 - protein, 288 aa, Triticum aestivum
  misc_feature (245)..(245): Xaa can be any naturally occurring amino acid
  misc_feature (264)..(264): Xaa can be any naturally occurring amino acid
  misc_feature (276)..(276): Xaa can be any naturally occurring amino acid
AYLGDSLEQVCTKKQAGTGPEFPGYRRPTRPHYLANFVQSTFNALPADQVKGATIVVSGDGRYFSKDAVQIIAKMAAANGVRRVWVGQDSLLSTPAVSAIIRERISADGAKATGAFILTASHNPGGPTEDFGIKYNMGNGGPAPESVTDKIFSNTKTVTEYLIAEDLPNVDISVIGVTSFTGPEGPFDVDVFDSATDYIKLMKTIFDFESIKKLLASPKFSFWFDGLHGVAGAYAKRMFVDELGXASESSLVDCVPKEDFWKWXHPDPNLTYAKEXLVNRMGPGKNLN

SEQ ID NO: 28104 - protein, 462 aa, Thermoplasma acidophilum
MENKKENFSEWYNEIITLAELSDKRYPVKGMNVWLPYGWKIMSLIDSIVRRAVDKRNFQEVNFPILIGRSMLEVEFEHIRGFENEIYWVTKGGKEKLEEELALRPTSESAMYPMFSLWIRSHADLPLKIYQIVSVYRYETKHTRSFIRIREIHFFEAHTAHATYEDAEAQMDQYKEIWREISSLLCLPYFYDQRPDWDKFPGAMYTIAFDTVLPSGRSLQIGTIHQYGTNFSKNYDIKYLKEDGTFDYAHQTTYGMSERLLAAIIGIHGDDKGLVLPPDVAPIQVIIIPIPGAGVMEYARDVENTLNSINIRVKVDDRENYTPGYKFNDWEMRGVPLRIEIGEREVKNRTLTISMRNIQGKLTIERSKLIYEVPDTLIRIREKMMENAQKVFKDHVFRATKLEEFNRDGLITAFWCGSKECSDKIEAETEKSVLGFMVDSSETGKCVVCGKNGKMAVFSRSY

SEQ ID NO: 28105 - protein, 440 aa, Chlamydophila abortus S26/3
MPPVVYKFGGTSLGTAESIRKVYDIVHKDTPWFIVVSAVAGITDLLDMFCSVSSEYREHIILDIANKHNEIIHDLQLTFSIAPWMEKLQRCMHKEKISLRDRAEILAIGEDISASLFHAFCCSHDFSLEFLEARTVILTDGEYSCATPDIPRMRENWHALNFRSDVCYITQGFIGANAAGETTLLGRGGSDYSGALIAEMSHAKEVRIYTDVNGIYTMDPRIIEDAQLIPELSFEEMQNLATFGAKILYPPMLSPCVRSGIPIFVTSTFDLSKGGTWIYAMDKIMSHEPRVKALSLRQHQRLWSIDCSGSSTVGFDKILSILDTHHVLPGLITSQDSTVSFTTDDDDVSDDVIRELYDQLSSIGTVHMLYDLALITMIGSGLASTKVVTTVTEKLRHYPSPIFCCCQSCMALSLVVPENLAGNVVEQLHNDYVKQKFSVV

SEQ ID NO: 28106 - protein, 309 aa, Mesorhizobium loti MAFF303099
MRDPYEVLGVAKNASAKDIKSAYRKLAKKHHPDQNPNDPKAKDRFAAANQAYEIVGDEKNRAAFDRGEIDADGKPRFQGFEGAAGGGDPFAGFRRQQGAGGSRFEFRSGRPGGDPFDGNSDIFSQIFGDAFSGARGAGMGDRRQPATAADLNVTLDVTIEEAATAEKVTAMFPDGRKVAVKLPAFVEDGQTIRLKGQGEQGPGQPGDALVKIHIRRHPRYRIEGRDLHADVPVSLADAVLGAKVPVETPTGRLAVNVPAWSSSDKVLRLKGRGLPEKAGGHGDLYAHVRIMLPEGGDSALEALLRGQKG

SEQ ID NO: 28107 - protein, 490 aa, Zea mays
MVLSKAVSESDMSVHSTFASRYVRSSLPRYRMPENSIPKEAAYQIINDELMLDGNPRLNLASFVTTWMEPECDKLIMAAINKNYVDMDEYPVTTELQNRCVNMIAHLFNAPLGESETAVGVGTVGSSEAIMLAGLAFKRRWQNKRRAEGKPFDKPNIVTGANVQVCWEKFARYFEVELREVKLRDGYYVMDPEKAVEMVDENTICVAAILGSTLNGEFEDVKLLNDLLQAKNRETRWETPIHVDAASGGFIAPFLYPDLEWDFRLPLVKSINVSGHKYGLVYAGIGWCIWRSKEDLPEELIFHINYLGADQPTFTLNFSKGSSQVIAQYYQLIRHGFEGYRNIMENCHENAMVLKEGLEKTGRFDIVSKDEGVPLVAFSLKDRSRHDEFEISDMLRRFGWIVPAYTMPPDAQHVTVLRVVIREEFSRTLAERLVLDIEKVMYQLDALPSRLPPPPPAAPLLRKKTELETQRSVTEAWKKFVLAKKTNGVC

SEQ ID NO: 28108 - protein, 166 aa, Brassica napus
  misc_feature (11)..(11): Xaa can be any naturally occurring amino acid
  misc_feature (19)..(19): Xaa can be any naturally occurring amino acid
  misc_feature (21)..(21): Xaa can be any naturally occurring amino acid
  misc_feature (31)..(31): Xaa can be any naturally occurring amino acid
  misc_feature (36)..(36): Xaa can be any naturally occurring amino acid
  misc_feature (39)..(40): Xaa can be any naturally occurring amino acid
  misc_feature (42)..(42): Xaa can be any naturally occurring amino acid
  misc_feature (45)..(45): Xaa can be any naturally occurring amino acid
  misc_feature (48)..(48): Xaa can be any naturally occurring amino acid
  misc_feature (51)..(51): Xaa can be any naturally occurring amino acid
  misc_feature (55)..(55): Xaa can be any naturally occurring amino acid
  misc_feature (60)..(60): Xaa can be any naturally occurring amino acid
  misc_feature (63)..(63): Xaa can be any naturally occurring amino acid
  misc_feature (67)..(69): Xaa can be any naturally occurring amino acid
  misc_feature (75)..(76): Xaa can be any naturally occurring amino acid
  misc_feature (88)..(89): Xaa can be any naturally occurring amino acid
  misc_feature (91)..(93): Xaa can be any naturally occurring amino acid
  misc_feature (95)..(96): Xaa can be any naturally occurring amino acid
  misc_feature (100)..(102): Xaa can be any naturally occurring amino acid
  misc_feature (105)..(107): Xaa can be any naturally occurring amino acid
  misc_feature (115)..(115): Xaa can be any naturally occurring amino acid
  misc_feature (119)..(120): Xaa can be any naturally occurring amino acid
  misc_feature (139)..(139): Xaa can be any naturally occurring amino acid
  misc_feature (147)..(148): Xaa can be any naturally occurring amino acid
  misc_feature (151)..(151): Xaa can be any naturally occurring amino acid
  misc_feature (153)..(153): Xaa can be any naturally occurring amino acid
  misc_feature (155)..(156): Xaa can be any naturally occurring amino acid
  misc_feature (159)..(163): Xaa can be any naturally occurring amino acid
SEKKKKKKSVXASSMLSSXAXVTSPAHATMXAPFTXLKXXAXFPXTRXANXDITXIASNXGRXSCMXXXPPVGKXXVETLSYLPDLTXXEXXXEXXYLLXXXWIXXXEVELEHGXVYRXXGSTPVYYDGRYWTMWKLPXFGCTDSAXXLKXAXNXXGEXXXXXRDI

SEQ ID NO: 28109 - protein, 420 aa, Rubrobacter xylanophilus DSM 9941
MGDPNIRRREFPGGLRVFTEPLEEATSVSLGVWIRAGSRDERDEVAGITHLMEHMLFKGTPRMDALGIAQAFESIGAQENAATGEEYTVLYARFLPEHLERALDIMSDMVLHPTLADLEREREVIVEEIRMYEDRPDQMADEHLSSLIFHGDPLGRPIIGYVDTVRGVDHERLRRFHAATYTAPNVFVVGAGRLEPERFEALVEERLGGLPGGEPFARAVRPKAPESRFLFKPKETEQYHVSLGSRGLPAGSEDRFAMAALNNVLGGGMSSRLFQEVREKRGLAYAVYSYHQGYSDAGALKVYVGSTTNNVEEAVRVIAEQLERLREEPVSEEELERTKQQLKSSTLLALESTAARMNRIGRGVVTGTELLAPEEMARRIEAVSAEDILRLAREHLDLKNMYLSAIGPREIDLGRYLEGA

SEQ ID NO: 28110 - protein, 545 aa, Pseudomonas putida KT2440
MTLSPLAGKPAPASVLVDIPRLLTAYYTGRPDATVAAQRVAFGTSGHRGSSLELSFNEYHVLAISQAICLYRQEKGIDGPLFIGADTHALSAPATASALEVLAANGVQVMLSKDDEYTPTPAVSHAILCHNRGRTQGLADGIVITPSHNPPQSGGFKYNPPNGGPADSDVTKWIEGKANELLAANLAGVKRMDHAQALQAPTTHRHDYVSNYVADLENVIDFDVIRGAGLRLGVDPLGGAGVRYWSAIAKHYQLDLEVVNTEVDPTFRFMTVDWDGQIRMDPSSPYAMQGLIGLRERFDVAFACDPDHDRHGIVTPDGLLQPNNYLAVAIDYLFRHRPQWRSDAAVGKTVVSSGLIDRVTQRLGRDLYEVPVGFKFFAQGLFDGSLGFGGEESAGASFLRRDGSVWATDKDGLIPALLAAEMTARTGRNPSQAYADLTEALGKPFATRVEAKADARQKALLSKLAPEQVKSTELAGEPIVQILSHAPGNGQAIGGLKVMTANGWFAARPSGTEDIYKIYAESFIDEAHLQRLVEEAQVLVDEAIA

SEQ ID NO: 28111 - protein, 83 aa, Pyrococcus horikoshii
MSGTKKVGSAGRFGARYGLKIRRRVAAVEAKMRQKHVCPVCGRRAVKRISTGIWQCTKCGAIFAGGAYLPVTPAGKVARRIME

SEQ ID NO: 28112 - protein, 741 aa, Diospyros kaki
MESCYCIEPQFPADELLMNYQYISDFFIALAYFSIPLELIYFVKKSAVFPYRWVLVQFGAFIVLCGATHLINLWTFNAHTRTVAIVMTIAKALTALVSCVTALMLVHIIPDLLSVKTRELFLKNKAAELDREMGLIRTQEETGRHVRMLTHEIRSTLDRHTILRTTLVELGRTLALEECALRMPTRTGLELQLSYTLRHQSPVEFTVPTHLPVINKVFSTNHAVKISPNSPVARLRPLAGKYMPGEVVAVRVPLLYLSNFQINDWPELPTKCYALMVLMLPSNSARQWRTHELELVEVVADQVAVALSHAAILEESMKARDLLMVQNVDLDRARREAETAIRARNDFLAVMNHEMRTPMHAIIALSSLLQETILTPEHRLTVETILKSSNLLATHYKDVLDLSRLEDGSFQLDRRTFKLHALFREVLNLIKPIVSVKKLSISLNLEPDLPEYAVGDDKRLMQIILNIVGNAVKFSKGGSISIMAFIAKLFSLQDPRAPDFFPVPSDGHFYLHVQVRDSGSGINPLDLPKLFTKFRNCQSPEARNSGGCGLGLAICKRFVNLMEGHIWIESEGLGKGCTANFIVKLGIPEQPNDSRLPLVPKVPANHGPSSFPGLKVLIVDDNGVSRMVTKGLLLHLGCNVTAVSTGDECLRAISNEHKVVFMDVPLPGLDGYEVVLRIRERFTKRHERPLVVALTGNTDRVTKENCMRVGMDGVVLKPVSVDKMRGVLSELLEHGVLFEYQ

SEQ ID NO: 28113 - protein, 462 aa, Oenococcus oeni PSU-1
MAKTVQRSGTEFHDQFKPIYSTGIGLDEKVVREISAAKHEPDWMLDYRLKSLAIYNKMPMPDFGPDLSGLELDRLHYFQRATDKKYRDWNDVPATIKETFDRLGVPEAERQYLAGSSAQYESEVVYHNIKDQFAKQGIIFTDTDTALQKYPELFKKWFGKLVSPATNKFSALNGAVWSGGAFIYVPKGVRVKTPMQSYFRINEINTGQFERTLIIVDEGASVNYVEGCTAPRYDSDSLHAAVVEVNVQRDAYCRYTTIQNWSTNVYSMETKKASAAENATMEWVDGNLGSKITMKYPSVYLNGPGARGTMLSIAVAGAHMDQDNGARMIHNAPNTSSSIISKSISKNGGAVDYRGTVRFGEHSQGSKAHVECDTIIMDDKSSSDTIPINEIHNGQVSMEHEARVSKISEEQLYYLMSRGISEATATQMIIMGFIEPFTKQLPMEYAVELNRLIEFQMAGSIG

SEQ ID NO: 28114 - protein, 566 aa, Bacillus cereus E33L
MFGKTAGEALVDLLIDWGVEHIYGMPGDSINSIIEALRKKQDKIKFIQVRHEEAGALAAAAYAKLTGKLGVCMAIAGPGAIHLLNGLYDAKLDKAPVLAISGQVETDLLGTDFFQEVNLERLFDDVAVYNQRIMSAEQLPAVVNQAIRMAYTKKGVSVLTIPDDVPKFEVKNGARVTNTSFTLPELFPQEEDLHAAILAINEAKKPVILAGKGAKHARESLLTFAEHIGAPIVLTLPAKGIIPDEHPLCIGGLGLIGTKPSYDAMKHADTLIMVGTSYPFTGFLPEKAKTIHIDTDPAQIGKRYVTDIGLAGDADKTLKWLIENVEKHEDHSFLEHHQEMMKKWEEKLHNQEDDSSTPIKPQRVMHALQHVAHDDAILSVDVGNVTVWTARHFRMTNQQFIISSWLATLGCGLPGALAGKIAFPDKQVFAVCGDGGFGMTMNDFVTAVKYKLPIIVVVLNNNKIAMIKFEQEVMGNIEFGTDLTNPDFAKYAEACGGIGYRVENVDELLPAFESAVKQNSPCIIDVVVDVNEAPMPAKITFGQAAGYTKHMIKELFEEGKIDLPPL

SEQ ID NO: 28115 - protein, 426 aa, Oenococcus oeni PSU-1
MIKTRRSDFFKRQLNVLADLHEAEWLTEHRKKALSVSRDLDWPDYPRVLKTTFQAISAPSSWSLQEEKTFLTEKSQIRIEQSNLSSLKIYLPRELQKLGVVVMNLFEAAEKRPDLVQQYLQKDPHNRLLAIHQAYWNCGLLIYLPNDLHLEKPIEISLTVDNYASAIEQHILFITGSGVTATVVQTTKSSTGLEKVQLNSVFDLIAGPGSRLDCFAVDQLNHSKISYFNRFSRLGVDAEVNWLLAEMNLNNLVGECSAILNGNGSKANLRVVSLADRKQKQALMTKLIHIGQHTTGNINQRGVILQDGRLIYNAVGKIVKGAHGANSEQSSRILLLSPTATGDANPILLIDENDVEAGHAASIGRVSPEQLYYLMSRGLTVDRARQLLVKGFFDDLLDRLPIDNLRVELDQALERRLLTNAQKSVS

SEQ ID NO: 28116 - protein, 227 aa, Triticum aestivum
MNDTDVSKQIQQMVRFIRQEAEEKAGEISVSAEEEFNIEKLQLVEAEKKKIRQEYERKEKQVDVRKKIEYSMQLNASRIKVLQAQDDLVNKMKEDAMKELLNISSNHHEYRNLLKELVVQGLLRLKEPAVLLRCRKEDHHNVESVLHSAKNEYASKADVHEPEILVDHSVYLPPSPSHGDEHGQICHGGVVLASRDGKIVFENTVDARLEVVFRKKLPEIRKLLVAA

SEQ ID NO: 28117 - protein, 333 aa, Mycobacterium sp. KMS
MPVRNGRKAHMTSSSTVHDVIIIGSGPAGYTAAVYAARAQLKPLVFEGSQFGGALMTTTEVENYPGFRNGITGPELMDEMREQALRFGADLRMEDVDEVSLDGPVKTVTVGDETHRARAVILAMGAAARHLGVPGEDALLGMGVSTCATCDGFFFRDQDIAVIGGGDSAMEEATFLTRFARSVTVIHRREEFRASRIMLDRARANEKITFMTNTAVTEIEGDPKVTGIRLRDTVTGEESKLAVTGVFVAIGHVPRSDIVRGQVDVDEDGYVLVEGRTTNTSVEGVFAAGDLVDRTYRQAITAAGSGCSAAIDAERWLAEIGVAPSDQEISAPI

SEQ ID NO: 28118 - protein, 424 aa, Ginkgo biloba
MEALKGSPRLMIVSDLDNTMVDHQDPENISLLRFDALWEADYRHDSLLVFSTGRSPTLYKKLRREKPLLTPNITIMSVGTEITYGDSLIPDKGWEEWVNQGWNRGIVVEEASKIPHLKFQAETEQRAHKVSFYIEKTNAPEVIDTLSKRLEECQLDVKIIYSGGIDLDILPKGAGKGQALAYLLKKFNSEGRSPLNTLVCGDSGNDAELFSVADVYGVMVSNAQEELLQWYEENAKGNSRIIHASERCAAGIIQAMKHFNLEPNVSPRDVVGHAQAGPAYFAIGHEIVEFYLISERWRRAEVEDSDDLFQKLKSVIDPNCSLIHPWGVEENLFTSIDVLRKCYGDQKGKRFRIWIDRIHPLKIASDTWLVTFDKWELIEQERRCCITTAVMKAKPDAPNRLLWLHIHETWLDGYGSSVNLCCSI

SEQ ID NO: 28119 - protein, 322 aa, Yarrowia lipolytica CLIB122
MSLNRSKFTEYKQTARNFWAGKPRFTEENYPSLDGKTFLITGGHSGVGLESTKLLISKGAKVVIVGRSKDKAQEVLAELPSQQYEFVEANLADLTTIKAAGEYIQNNYPELQGVILNAGVMIPPYSKTPQGHELQWGTNVVGHHALMKYLGPILIHTAKSSPKNSVRVIWVSSSATVVSPYEGGINFDDINLDKVDSPNDHILYSQSKIGNAYQAYLWSKHHPGSGVVSVSVDPGNLRSNLQRHGNGVLFYVLDYFLYPAKFGAYTELSALLNTEVRDTDHLIPWGQVGHLRNDVDYCRRGDKGEALWQQLDSDVKDFVAKL

SEQ ID NO: 28120 - protein, 616 aa, Arabidopsis thaliana
MFRRKSRSISPRRHRSRSVTPKRRSPTPKRYKRQKSRSSTPSPAKRSPAATLESAKNRNGEKLKREEEERKRRQREAELKLIEEETVKRVEEAIRKKVEESLQSEKIKMEILTLLEEGRKRLNEEVAAQLEEEKEASLIEAKEKEEREQQEKEERERIAEENLKRVEEAQRKEAMERQRKEEERYRELEELQRQKEEAMRRKKAEEEEERLKQMKLLGKNKSRPKLSFALSSKMTTMSDLDEIMVAEILCRTPMTCLKTVRSVCKKWNALSKKWFFFGKAKQFLGFMMMDSRVCSLRFDLRKDLVVEPPSIKQVSILDQIEVSKIFHSDGLLLCIIKNDTTRLLVWNPYLEQTRWIQPRHNFHILDCYAIGHDKNRKHKILRFVDDFLPVENVVFGYEIYDFSLDSWRVLDCFQRGVSLRGNTYFFAKERYIFEGKGPEEIDITETEDFLLCFDFTAERFGPRLPLPFHSYYAETVTLSCVKEDQLSVLCQRQPSEPSEILEIWVSTNIQPNAVSWSIFLKVDMRPLTGFQFNDMAGSFFIDQENKVAVVFDLDPSQICRYQTAYIIGQEYGGYFNSVNIGEVPNLWIPGSVGYADTTSCIPPVCSSYVPSLVQIG

SEQ ID NO: 28121 - protein, 111 aa, Glycine max
  misc_feature (98)..(98): Xaa can be any naturally occurring amino acid
MSSRDQVKASHILIKHQGSRRKASWKDPEGKVIMTTTREAAVEQLKSIREDILSGKANFEDVAARVSDCSSAKRGGDLGPFGRGQMQKPFEEATYALXVGDISEIVDTDSG

SEQ ID NO: 28122 - protein, 548 aa, Bacteroides fragilis YCH46
MHLTTKLFFTATLLAGNLFTSFAGDVTLKITKKYINLPVSHQVDWKKMTFEVKGTPERNFVIRLADEKPDYWVFCDVSSWKGKTLRISYEGESAGLEKIYQDDVIAGQDSLYAEKNRPQFHFTTRRGWINDPNGLVFYEGEYHLFYQHNPYEREWENMHWGHAVSRDLVHWEELPDALHPDELGTIFSGSAVIDYDNTAGFNKKNEPALVAAYTVDNPEKQRQCIAYSLDKGRTFTKYEGNPVIDSKAKWNSKDTRDPKVFWYAPGKHWVMVLNERDGHSIYNSADLKNWEYKSHVTGFWECPELFELPVDGDKNHTKWVMYGASGTYMLGSFDGQTFTPEAGKYYYYTGSMYAAQTYSNIPASDGRRIQIGWGRISHDGMPFNGMMLLPNELTLRTTSKGVRLFSVPVRETEQLFQPVGNWTSLSSDAANQRLQAFSGKDCLRIKTTIKLSHATSAGLNLYGQPLVDYDMNSNLINGVFYSPDDRTSMELTADIYIDRTSIEVFIDGGAYSYSMKRSPREGNREGLHFWGNNIEVKNLEVFSVKSIW

SEQ ID NO: 28123 - protein, 161 aa, marine gamma proteobacterium HTCC2207
MSNDQSIYDFTVADSSGNPVSLEDYRGKVMLIVNTASKCGFTPQYTQLQELYDQYSDRNFVVLALPCNQFGGQEPGSNAEVQEFCQMNFGLSFPVMGKIDVNGKDQHALYTHLKSQAGGMFNSKIKWNFTKFLVDREGQVIERYAPIRKPKDIAADIEKLL

SEQ ID NO: 28124 - protein, 577 aa, Salmonella enterica subsp. enterica serovar Typhi str. CT18
MPGTVIRKRVSNMETTTKKARSLYIPYAGPVLLEFPLLNKGSAFSVEERRNFNLSGLLPEVVESIEEQAERAWLQYQGFKTEIDKHIYLRNIQDTNETLFYRLVQNHLEEMMPVIYTPTVGAACERFSEIYRRARGVFISYPNRHNMDDILQNVPNHNIKVIVVTDGERILGLGDQGIGGMGIPIGKLSLYTACGGISPAYTLPVVLDVGTNNQQLLNDPLYMGWRHPRITDDEYYAFVDEFIQAVKQRWPDILLQFEDFAQKNAMPLLTRYRDEICSFNDDIQGTAAVTVGTLIAASRAAGSQLSEQKIVFLGAGSAGCGIAEQIIAQTQREGLSEDAARQNVFMVDRFGLLTDRMPNLLPFQAKLVQKCDNLQHWDTENDVLSLLDVVRNVKPDILIGVSGQTGLFTEEIIREMHKHCPRPIVMPLSNPTSRVEATPQDIIAWTEGNALVATGSPFSPVIWKDKVYPIAQCNNAYIFPGIGLGVIASGASRITDEMLMSASETLAKHSPLVNNGEGLVLPALKDIQVVSRAIAFAVGKMAQQQGVAVKTSAEALQQAIDDNFWKPEYRDYRRTSI

SEQ ID NO: 28125 - protein, 485 aa, Magnetospirillum magnetotacticum MS-1
MTDLDASLLKTHAYIDGHWAEADDGRRFDVLDPATGHLLASVPDMGGAETRRAIEAAEMAWGPWRRRTAKERAAILMAWFEQIIAHKDALARLLSAEQGKPLPEAQGEIVYGAAFIQWFAEEGKRAYGDLIPTTASDRRLLVMKQPIGVVAAVTPWNFPMAMITRKCAPALAAGCPVVVKPAEDTPLSALVLAELAERAGLPRGVFNIVTTRQPGAVGGEMTANPLVRKLSFTGSTRVGKMLMAQCAETVKKVSLELGGNAPFIVFDDCDLDAAVAGALASKYRNSGQTCICTNRFLVQAGVYEEFGRKLAEKAAAMVVGHALKGPVQQGPLINAAAVAKVASHVADAVSKGARVLTGGRPHELGGGFWQPTVLADVTAQMLCFQEETFGPVAPLVRFETEEEAVELANASQFGLAGYFYSRDLARVFRVAEAMECGMVGVNESLISNEVAPFGGIKESGLGREGSKYGLDDFMETKYVCIGGLS

SEQ ID NO: 28126 - protein, 241 aa, Oryza sativa
  misc_feature (76)..(76): Xaa can be any naturally occurring amino acid
FERSNLIQDKKKPGLERKGKVVTDIKDAVEHYANAYVFTYDNMRNQKLKDLREQLKSSSRIFLAGKKVMQIALGRXPADEAKTGLHKLSKFLQGDTGLFFTNLPRDDVERLFREFEEHDFARTGSIATETVELKEGPLEQFTHEMEPFLRKQGMPVRLNKGAVELVADHIVCEEGKPISPEAAQTLIGIFDDVNIVTKPMRLLGMQMATFRLYLVCRWSSDDFEVYKEGLAQLRAEADDSS

SEQ ID NO: 28127 - protein, 393 aa, Acinetobacter sp. M-1
MHPIVIIGSGMAGYTVAREFRKLSPEQELVMICADDAVNYAKPTLSNAFAGNKAPEQIALGDATKMATQLNMRIDADTWVKAINAENHELTLEKNGQTITQPYSKLVLAVGANPIRLAIAGDGSDDIHVVNSLVDYRIFRENLANRKDKRVVILGAGLIGCEFANDLLHSQYDVTVIDLAPQPLGRLLPNHVAEAFKTNLEQAGIKFALSTTVEKVTKINNGEDYEVTLANGKTLVADIVLSAIGLQPNISLAKAADIQTSRGIITNTLLETNQADIYAVGDCAEVNGTLLPYVMPIMQQARALAKTLSGQSTAVHYPAMPVAVKTPAAPLTVLPAPLNVDVNWETEEFDDGMLAKAADGEGTLRGFVLLGPTAGKQRLTLTKLVPDLIPAQV

SEQ ID NO: 28128 - protein, 485 aa, Silicibacter sp. TM1040
MTHPAQPKASHFINGEYVEDTSGTPIPVIYAATGETIATVYAATPAIVEQALTAAEAAQKEWAKMSGTERGRVLRRAADIMRERNHELSVLETYDTGKPLQETLVADATSGADALEYFGGLAGSLTGEHIQLGEDWVYTVREPLGLCVGIGAWNYPTQIACWKGAPALACGNAMVFKPSETTPLCALKVAEILMEAGAPAGLYNVIQGMGEVGGKLVTDPRVDKVSLTGSVPTGKKVYAAAAEGMKHVTMELGGKSPMIVFEDADIESAISGAINGNFYSSGQVCSNGTRVFVHKDIKEKFLARLAERTATAKLGDPMDESVNFGPMVSERQMEIVLGYIEKGKSEGARLICGGNRADMDGFFVEPTVFADVKDDMVIAREEIFGPVMCVLDFESEDEVIARANDTEFGLSAGVFTKDFTRAHRVIGQLEAGSCFINSYNDAPVEAPFGGVKASGVGRENSKEAIKHFSQVKSVYVRMGDCEAAF

SEQ ID NO: 28129 - protein, 366 aa, Mesorhizobium loti MAFF303099
MPYDQKKIVEAIRAFERGEIVVVMDDDGRENEGDLIVAAVHCTPEKMAFIVRNTSGIVCTPMPREEAKRLNLQPMVADNDSAHTTAFTVSVDFKHGTTTGISADDRTLTVRNLANGNVGASDFVRPGHIFPLIAREGGVLMRSGHTEAAVDLCKLAGLPPIGVISELVNDDGTVKRGPQVQAFAEEHGLKQVSVADLIAYRQRKETLVERVACSDIDTLGGKAQVFTYTLPWDTMHHVAVVFGDIRDGEEVPVRLHSEDVVTDVFGTSHRLDGIMKAMGERKRGVIVYLREGSVGVAHQERKRPLSGDREDHEEARRRENEWREIGLGAQILKDLGISSINLIASRERHYVGLEGFGIHIAKTEIL

SEQ ID NO: 28130 - protein, 118 aa, Oryza sativa
MAALNGKVVVAVMVVAMVVAAPGASAAITCGQVGSAIAPCISYVTGRSGLTQGCCNGVKGLNNAARTTADRQAACRCLKSLAGSIKSLNLGTVAGVPGKCGVNVGFPISLSTDCNKVS

SEQ ID NO: 28131 - protein, 373 aa, Candida albicans
MSVKTQTITVLPGDHVGTEIVNEPTKVLKAIEAPTPYQKIQFDFKHHLIGGAAIDATGVPLPDDALESAKSSDAVLLGAVGGPKWGTGTVRPEQGLLKIRKELNLYANIRPCNFASDSLLELSPLKAEVVKGTNLIIVRELVGGIYFGERQEQEESEDHQTAWYRPKYTVDEVTRITRMAAFMALQHNPPLPIWSLDKANVLASSRLWRKTVDKVISEEFPALSVQHQLIDSAAMILIQNPTKLSGIIITSNMFGDIISDEASVIPGSLGLLPSASLASLPDTNTAFGLYEPCHGSAPDLPANKVNPIATILSAASMLRLALDCVKETEALEEAVKQVLDSGIRTADLRGTSSTTEVGDAIAETVTKILKQNT

SEQ ID NO: 28132 - protein, 381 aa, Burkholderia pseudomallei K96243
MMRDAANFEPADSRVTRPAFWQALPERWTSDVEETLVCCHVRQETHDVKSFFFRSPQGRAFSFEPGQFVTLELDIDGETINRCYTISSSPARPHTISITVKRVPGGKVSNWLHDNLQPGAPLRVLGPAGEFTCARHPARKYLFLSAGSGITPLMSMSRAHHDLAEDRDIVFVHSARTPDDIIFARELDLIASTHANFRTAFVCERLGARTNWHGVTGFLSLPLLKLVAPDFMEREIFTCGPAPYMKAVRELLAEAGFDRSRYHEESFSFETLAQREAPADAPAGEDAAARGAQVRQYTIAFAKSHREIACGADQHVLDAARRAGVRLPASCTQGMCGTCKVKLVSGQVDMKHNGGIRQREIDQGMVLLCCSKPLSDLVVDK

SEQ ID NO: 28133 - protein, 380 aa, Acremonium chrysogenum
MTTTYKILVLPGDHIGPEIMAEAIKVLTTIETHRPNLHFNLTTDLVGGTSIDTHGVPITQSVLDAAKASDAVLFGSIGGPEWAGVHPTPESGLLQLRQHLDAFANLRPCEFLVPSLVGASPIREHVVKGTRFIVVRENCGGAYFGEKKEEEDVASDLWVYTRPEIERLARVSAAVARIMGRSEDDNQAATVWSADKANVLASGRLWRRITSDIFAKEFPDITLQHQLADSMAMLMVRDPRRFNGVIHTDNTFGDILSDISGAITGTLGLMPSASLCGVPGEGHRSNGIYEPVHGSAPDISGKGLANPVAQILSVAMMLRYSMGLEKEATAVERAVVKVLDAKSEGGLEIRTGDLGGRATCSQVGDAVCEVLGPLLQGKKA

SEQ ID NO: 28134 - protein, 594 aa, Rubrobacter xylanophilus DSM 9941
MAKSTGQFILERLADWGVRRIYGYPGDGINGLLGAFHEVGDRVEFTQTAHEEIAAFAATAHAKFTGEVGVCMGTSGPGAIHLLNGLYDARLDHQPVVAIVGQQKRMGLGSNYQQEVDLVSLYKDVAHEFVQVCMVPQQAPHLIDRAIRIAKSTRSVTAVIVPDDVAELDYEEPPRAHGAVYSQVGFPSPPRVVPREEDIRRAAEVLNAGERVAMLVGAGAFGAAGEVKEVADILGCGVAKALNGKAALPDDLPFVTGSIGLLGTKPSNDMMENCDTLFMVGTGFPYSEWLPEPGQARGVQIDLDGKMVGIRYPMEVNLVGDAAETLRALIPHLERKQDRSWRRRIEENVRRWWEILDDRAHQSADPLNPQLVFHELSERLPERAILTADSGSGTNWWARHLKVREGMQAALSGTLATMCPAVPYALAAKFAYPDRPVIATVGDGAMQMLGINALIDVGKYWERWADPRLIVLVLNNKDLNQVTWEQRVLAGDPKLEASQVIPDFPFARYAELLGFKGLRVDSPEAVAPAWEEALAADRPVVYEAITDPEVPPLPPHIRFEQASGLARALAKGEPEAVRIVKQSLKGKLTEFTNR

SEQ ID NO: 28135 - protein, 366 aa, Aspergillus nidulans FGSC A4
MPSYNIVVFGGDHCGPEVTAEAVKILRVIEKSRDDITFNLQDHLLGGCSIDATGSPLTDQALEAAKNADAVFLGAIGGPEWGTGAVRPEQGILKLRKEMGTFANLRPCNFAAPSLVESSPLRPEICRGVDFNIIRELTGGIYFGERKEDDGSGFALDTEPYSRAEIERITRLGAHLALQHNPPLPVWSLDKANVLATSRLWRKTVTEIMAKEFPQLKLEHQLIDSAAMIMVKDPRKLNGIVITSNLFGDIISDEASVIPGSLGLLPSASLSSIPDGKGKVNGIYEPIHGSAPDISGKGIVNPVAAILSVGLMMQYSFALFEEARAVATAVSNVIEAGVRTGDIGGKASTKEVGDAVAAELEKLLKK

SEQ ID NO: 28136 - protein, 479 aa, Thiomicrospira crunogena XCL-2
MKTLVWLQRELRINHHPALEAAMAASDDIIVAYFHDPEQTIGAANTVWLANSLQQLQQDFKTRHGRLWCLEGIFEQQLEQVIQTHQIEQVFYTFQLGHPFKAMQQQALNVCQRCQVPLRAFETENWLHYNQLLNQSGQPYKVFTPFYNTLSRKLSELEPFSDPIDTLEKTARTVCQSGQDQNLPQSLNQILARPWARKIMQHWQVGEHKAWSKFETFITEGLANYEQDRDFPAIDGTSQLSPHLHFGELHSRAIVFELLSLETEPTIANQAIRVWLRQLAWREFARAILWHFPHTETHPFQAKFETFYRPLAEDDSESSKNYQAWCEGRTGVPIIDAGMKQLWETGWMHNRVRMLVASWLTKNADIDWRAGAQWFNDTLVDADPANNTLGWQWVAGCGVDAAPYYRLFNPVRQSEKFDANGQYLRQWLPELKTYSNKHIHAPWLIAPNEKHFCPIIDLTESRQHHLDKVATLKSLNQIH

SEQ ID NO: 28137 - protein, 470 aa, Saccharophagus degradans 2-40
MTDSALPSGENKSFVILISCIATIGGFLFGFDSGVINGTVDGLVTSFGVTKTAVGVHVAFMLLGCAVGAAAAGRLADLYGRRAMLIVAAILFIVSAWGSGVATGIVEFDIYRLLGGLAVGAASVMAPAYISEVAPARYRGRLTTIQQVAIISGLTAAFLSNYVLAHTAGSSLEPFWMGIATWRWMFWIEIAPAAIFFFALMVIPESPRFLVASGKKDKALTVLTKLYGAQAAPGKVAEIDSSLDHDHKPRLSDLISKVTGKVRPIVWVGIGLATFQQLVGINVIFYYGSILWQSVGFSEDHALLINVVSGAVSIGAVVLSLVLVDKIGRKPLLWIGSAGMAVTLTLTAIAFATGTLDANGDLQLSDNMGILALVAANVYVIFFNMSWGPVMWVMLGEMFPNQIRGSGLAVAGLFQWGSNWAITMSFPALLAGLGLAVTYGFYALCAFISIIFVIKYVNETNGVELEDMEG

SEQ ID NO: 28138 - protein, 510 aa, Camellia sinensis
MALDTVFLLRELSFATLVILITHIFMRSILSKPLRMLPPGPTGLPLIGAIPHLGSMPHVALAKMAKIYGPIVYLKMGTCGMVVASTPDSARAFLKTLDLNFSNRPPNAGATHLAYGAQDMVFADYGPRWKLLRKLSNLHMLGGKALENWAQVRSSELGHMLKAMYDLSCRGEPVVVAEMLCYAMANMIGQVILSRRVFETKGSESNEFKDMVVELMTTAGYFNIGDFIPSIAWMDLQGIERGMKRLHKKFDVLITKMIEEHKASAYQRKETPDFLDVFMAQQKNPGEEKAQHDTIMHYSGPYSLPGTDTSSSIIEWALAEMLKDPKILNRAHDEMDRVIGRNRRLQESDLPKLPYLQAICKETFRMHPSTPLNLPRVAAQTCRVNGYYIPKNTRLSVNIWAIGRDPDVWERPLEFIPDRFLSGKNAKTDPRGNDFELIPFGAGRRICAGTRMGIVLVEYILGSLVHSFDWKLADDGVELNMDESFGLALQKAAPLSAMVSPRLPPNAYAA

SEQ ID NO: 28139 - protein, 358 aa, Acidithiobacillus ferrooxidans
MKKIAIFAGDGIGPEIVAAARQVLDAVDQAAHLGLRCTEGLVGGAALDASDDPLPAASLQLAMAADAVILGAVGGPRWDAYPPAKRPEQGLLRLRKGLDLYANLRPAQIFPQLLDASPLRPELVRDVDILVVRELTGDIYFGQPRGLEVIDGKRRGFNTMVYDEDEIRRIAHVAFRAAQGRRKQLCSVDKANVLETTRLWREVVTEVARDYPDVRLSHMYVDNAAMQLIRAPAQFDVLLTGNMFGDILSDEASQLTGSIGMLPSASLGEGRAMYEPIHGSAPDIAGQDKANPLATILSVAMMLRHSLNAEPWAQRVEAAVQRVLDQGLRTADIAAPGTPVIGTKAMGAAVVNALNLKD

SEQ ID NO: 28140 - protein, 317 aa, Synechococcus sp. RS9917
MALEHLRIASRRSQLAMVQTNWVKAELEQAHPGLPISVEAMATQGDKILDVALAKIGDKGLFTKELEAQMLVGRAEIAVHSLKDLPTNLPEGLMLGCITEREDPADALVVNAKNADHKLETLPEGAVVGTSSLRRLAQLRHHYPHLEFKDVRGNVITRLEKLDAGDYDCLILAAAGLTRLGFADRIHQIIPSHISLHAVGQGALGIECVEGQPDVLELIKVLEHSPTASRCLAERAFLRELEGGCQVPIGVNTRIEANELVLTGMVASLDGKRLIRDERRGTVDKAEAIGQLLAADLKSQGAGDILQEIFAAVRPEA

SEQ ID NO: 28141 - protein, 63 aa, Arabidopsis lyrata
MADKGRPLPKFGEWDVNDPSSAEGFTVIFNKARNEKKGGGKSDSPGKDEPGYNKNGEVLEKPA

SEQ ID NO: 28142 - protein, 623 aa, Lolium perenne
MESRAIPSAAYAPLLPSAADDVALAKQDRPGVGWRGFLTVLAACGVVVLLVGATLLAGSRMGQAGDGEGNTDEDGAGGFPWSNEMLQWQRAGFHYQPEGHFMSDPNGPVYYRGYYHLFFQYNRRGVAWDDYIEWGHVVSQDLVHWRPLPLAMRPDHWYDKKGVLSGTITVLHNGTLVLLYTGVTEDPMAESQCIAVPTDPNDPLLRHWTKHPANPVLAHPQGVQGMDFRDPTSAWWDKSDSTWRILIGSKDDDNGSHAGIAFIFKTKDFLSFERVPGIVHRVEGTGMWECIDFYPVGGGHNSSSEELYVIKASMDDERHDYYSLGRYDAAANTWTPLDAELDLGIGLRYDWGKLYASTSFYDPLKQRRIMLGYVGEVDSARADVAKGWASLQSIPRTVALDEKTRTNLLLWPVEEVEALRYNSTDLSGITVENGSIFHLPLHQATQLDIEASFRLDASDVAAINEADVGYNCSSSGGAAARGALGPFGLLVHAAGDLRGEQTAVYFYVSRALDGSLRTSFCNDETRSSRARDVTKRVVGSTVPVLDGEALSMRVLVDHSIVQSFAMGGRVTATSRVYPTEAIYARAGVYLFNNATGASVTAERLIVHEMASAVYDETVMVKDS

SEQ ID NO: 28143 - protein, 362 aa, Pinus caribaea var. hondurensis
SDSGKDAGRLSAAWALYKAQEDLIKVAFEFGVKLTMFHGRGGTVGRGGGPTHLAILSQPPDTIHGSFRVTVQGEVIEQSFGEEHLCFRTLQRFTAATLEHGMRPPIAPKPEWRALMDEMAVVATKEYRSIVFQNPRFVEYFRSATPELEYGRMNIGSRPSKRKPSGGIESLRAIPWIFAWTQTRFHLPVWLGFGGAFKHVMEKDIRNLHTLQQMYNEWPFFWGTIDLIEMVFAKGDPGIAALYDKLLVSDDLWAIGGQLRANYVETKDLLLQVAGHKDLLEGDPYLKQRLRLRDSYITTLNVCQAYTLKRIRDPNYHVNLRPHLSKESSTKPAAELVKLNPTSEYAPGLEDTLILTMKGIAA

SEQ ID NO: 28144 - protein, 362 aa, Pinus caribaea var. hondurensis
SDSGKDAGRLSAAWALYKAQEDLVKVAFQFGVKLTMFHGRGGTVGRGGGPTHLAILSQPPDTIHGSFRVTIQGEVIEQSFGEEHLCFRTLQRFTAATLEHGMRPPIAPKPEWRALMDEIAVVATKEYRSIVFQNPRFVEYFRSATPELEYGRMNIGSRPSKRKPSGGIESLRAIPWIFAWTQTRFHLPVWLGFGGAFKHVMEKDPRNLHTLQQMYNEWPFFWGTIDLIEMVFAKGDPGIAALYDKLLVSDDLWAIGGQLRANYVETKDLLLQVAGHSDLLEGNPYLKQRLKLRDSYITTLNVCQAYTLKRIRDPHVHVNLRPHLSKESSTKPAAELVKLNPTSEYAPGLEDTLILTMKGIAA

SEQ ID NO: 28145 - protein, 308 aa, Cicer arietinum
MAVPVIDFSKLNGEERAKTMAQIANGCEEWGFFQLINHGIPEELLERVKKVSSEFYKLEREENFKNSTTVKLLNDIAEKKSSEKLENVDWEDVITLLDNNEWPENTPCFRETMLEYRSELKKLAENIMEVMDENLGLPKGYIKKALNDGDEDNAFFGTKVSHYPPCPYPELVNGLRAHTDAGGVILLFQDDKVGGLQMLKDGEWIDVQPLPNAIVINTGDQIEVLTNGRYKSCWHRVLTSTDGNRRSIASFYNPPLKATISPAPQLAEKENQQVDDTYPKFVFGDYMSVYAEQKFLPKEPRFKAVKAI

SEQ ID NO: 28146 - protein, 364 aa, Zamia dressleri
SDSGKDAGRLSAAWQLYKAQEELIKVAKQFGVKLTMFHGRGGTVGRGGGPTHLAILSQPPDTIHGSLRVTVQGEVIEQSFGEEHLCFRTLQRFTAATLEHGMHPPVSPKQEWRELMDEMAVVATKEYRSIVFQNKRFVEYFRLATPETEYGRMNIGSRPSKRKPSGGIESLRAIPWIFAWTQTRFHLPVWLGFGAAFRHVLEKDIRNLHMLQQMYNEWPVFRVTIDLVEMVFAEGDPGIAALYDKLLVSEDLWLLGSQLRSNFAETKDLLLKVAGHRDLLEGDPYLKQRLRLRDSYITTLNVCQAYTLKRIRDPNFHCNLRPHLSKETMSSSKPAADLVKLNPTSEYAPGLEDTLILTMKGIAA

SEQ ID NO: 28147 - protein, 445 aa, Frankia sp. CcI3
MGAPILVDNADLAVKTLGVCRIDSPLLPLLGERPTTQHYIDESDKVLYDDTALMISSRGVALDDLPGFEPAGPRRKIYFDPSKTRVGIVTCGGLCPGLNNVIRGLVLELTSHYRVRRIFGFRNGYQGFIARYGHDVVDLTPESVANIDEDGGTILGSSRGQQDPAEIVDCLSRMNINILFVIGGDGTLRGAGQIAREAETRGEKIAVVGIPKTIDNDIPYIDQSFGFQTAFGKAAESIRVAHAEATSAPGGLGVVRLMGRHSGFIACYATLAKSNADVVLIPELPFKLEGDGGLLNYVRRRVAERGHAVVVVAEGAGQELVVGQPESTDASGNRKLHDIGPELSRRIKEYFDAEGIELNLKYIDPSYVIRSVPANPYDSVYTIRLAHAAVHAAMSGRTEMVVGRWRRRFIHIPIPLAISQRNQVDPAGDLWMSVLEATGQPPRFE

SEQ ID NO: 28148 - protein, 498 aa, Oryza sativa
LISPIVAARRARVPSFPQPASAAAATRPIPGSYGPPLLGPLRDRLDYFWFQGPDDFFRRRAADHKSTVFRANIPPTFPFFLGVDPRVVAVVDAAAFTALFDPALVDKRDVLIGPYVPSLAFTRGTRVGVYLDTQDPDHARTKAFSIDLLRRAARNWAAELRAAVDDMLAAVEEDLNRAPDPAAASASYLIPLQKCIFRFLCKALVGADPAADGLVDRFGVYILDVWLALQLVPTQKVGVIPQPLEELLLHSFPLPSFVVKPGYDLLYRFVEKHGAAAVSIAEKEHGISKEEAINNILFVLGFNAFGGFSVFLPFLVMEVGKPGRDDLRRRLREEVRRVLGGGDGGEAGFAAVREMALVRSTVYEVLRMQPPVPLQFGRARRDFVLRSHGGAAYEVGKGELLCGYQPLAMRDPAVFDRPEEFVPERFLGDDGEALLQYVYWSNGPETGEPSPGNKQCAAKEVVVATACMLVAELFRRYDDFECDGTSFTKLDKRELTPS

SEQ ID NO: 28149 - protein, 237 aa, Taxus sp. HHG-2001
SDSGKDAGRLSAAWQLYKAQEDLIKVAKQFGVKLTMFHGRGGTVGRGGGPTHLAILSQPPDTIHGSLRVTVQGEVIEQSFGEEHLCFRTLQRFTAATLEHGMHPPDSPKPEWRALLDEMAVVATEEYRSVVFKEPRFVEYFRLATPELEYGRMNIGSRPSKRKPSGGIESLRAIPWIFAWTQTRFHLPVWLGFGAAFKHIIKKDIRNLHMLQEMYNAWPFFRVTIDLVEMVFAKGDP

SEQ ID NO: 28150 - protein, 663 aa, Arabidopsis thaliana
  misc_feature (249)..(249): Xaa can be any naturally occurring amino acid
  misc_feature (259)..(259): Xaa can be any naturally occurring amino acid
  misc_feature (267)..(267): Xaa can be any naturally occurring amino acid
MASSLLRNPNLYSSTTITTTSFLPTFSSKPTPISSSFRFQPSHHRSISLRSQTLRLSCSISDPSPLPPHTPRRPRPEYIPNRISDPNYVRVFDTTLRDGEQSPGATLTSKEKLDIARQLAKLGVDIIEAGFPAASKDDFEAVKTIAETVGNTVDENGYVPVICGLSRCNKKDIERAWDAVKYAKRPRIHTFIATSDIHLEYKLKKTKAEVIEIARSMVRFARSLGCEDVEFSPEDAGRSEREYLYGILXGEVIKAGATXLSNIPDTXFGITLPSEFGQLITDLKANTPGIENVVISTHCQNDLGLSTANTLSGAHAGARQMEVTINGIGERAGNASLEEVVMAIKCRGDHVLGGLFTGIDTRHIVMTSKMVEEYTGMQTQPHKAIVGANAFAHESGIHQDGMLKHKGTYEIICPEEIGLERSNDAGIVLGKLSGRHALKDRLTEVHSNLTHTNTCIAIFVGDTNVLLSFVHFQLGYQLDDEQLSTIFWRFKTVAEQKKRVTDADIIALVSDEVFQPEAVWKLLDIQITCGTLGLSTATVKLADADGKEHVACSIGTGPVDSAYKAVDLIVKEPATLLEYSMNAVTEGIDAIATTRVLIRGSNKYSSTNAITGEEVQRTFSGTGAGMDIVVSSVKAYVGALNKMMDFKENSATKIPSQKNRVAA

SEQ ID NO: 28151 - protein, 392 aa, Arabidopsis thaliana; identical to SEQ ID NO: 643

SEQ ID NO: 28152 - protein, 355 aa, Burkholderia vietnamiensis G4
MKIAVLPGDGIGPEIVNEAVKVLNALDEKFELEHAPVGGAGYEASGHPLPDATLKLAKDADAILFGAVGDWKYDSLERALRPEQAILGLRKHLELFANFRPAICYPQLVDASPLKPELVAGLDILIVRELNGDIYFGQPRGVRAAPDGPFAGAREGFDTMRYSEPEVRRIAHVAFQAAQKRAKKLLSVDKSNVLETSQFWRDVMIDVSKEYADVELSHMYVDNAAMQLAKAPKQFDVIVTGNMFGDILSDEASMLTGSIGMLPSASLDKNNKGLYEPSHGSAPDIAGKGIANPLATILSAAMLLRYSLNRAEQADRIERAVKTVLEQGYRTGDIATPGCQQVGTAAMGDAVVAAL

SEQ ID NO: 28153 - protein, 308 aa, Staphylococcus aureus subsp. aureus MRSA252
MRKLVVGSRRSKLALTQSQQFIDKLKAVEPNLEIEIKEIVTKGDRIVDKQLSKVGGKGLFVKEIQHELFEKNIDMAIHSLKDVPSVIPEGLTLGCIPDRELPFDAYISKTHTPLSQLPEGSIIGTSSLRRGAQILSKYPNLEIKWIRGNIDTRLEKLQTEDYDAIILAAAGLRRMGWSDDIVTSYLDRDTLLPAIGQGALGIECRSDDEELLTLLSKVHNDEVAKCVTAERTFLAEMDGSCQVPIAGYATISDQKEIEFTGLIMTPDGKERFEYTMNGTDPVELGKKVSNKLKEQGAYEIIKRLNEQH

SEQ ID NO: 28154 - protein, 396 aa, Rhodopseudomonas palustris CGA009
MAKAKFERTKPHCNIGTIGHVDHGKTSLTAAITKVLAETGGATFTAYDQIDKAPEEKARGITISTAHVEYETQNRHYAHVDCPGHADYVKNMITGAAQMDGAILVVSAADGPMPQTREHILLARQVGVPALVVFLNKCDMVDDPELLELVEMEVRELLSKYDFPGDDIPIVKGSALAALENSDAKLGHDAILELMRQVDAYIPQPERPIDQPFLMPVEDVFSISGRGTVVTGRVERGILKVGDEIEIVGIRDTQKTTCTGVEMFRKLLDQGQAGDNIGALLRGTKREDVERGQVLCKPGSVKPHTKFKAEAYILTKEEGGRHTPFFTNYRPQFYFRTTDVTGVVHLPEGTEMVMPGDNIAMEVHLIVPIAMEEKLRFAIREGGRTVGAGVVAAIIE

SEQ ID NO: 28155 - protein, 473 aa, Cunninghamella elegans
MNNFIFKRLNVKEFYEAETKKLVENGHEFHLRLERTGYVIHTCNPQAIKEILLKGDKFPKYDYNTSNNEDGSFFHEFVGFENVLMTNGSTWKKHRMIVNPAFKTALPSRLFGDCTRDLFKLWDNEYANEPFDSDIHNITERLTLQIIGKAAFDFDFNAILDEKSIWKQTYDGINKAASDPLFILFPILEEKFLWLFPKRQQSFKLLNEWKKMLLSIIEKKREAIQNNVDHGVEEAEKDLLTLMIESEHRGEGALSNEELLSDLIIFFIAGHDTTAFALSAAIYYLAKHPDIQEKARQEAISVLCPNGEVDEDIFPTTEDTKHFVYINQIMKETLRINGSVLFLLSPRLVTQDVNLSGVFIPKGSQINVNIHEVHHNPNVWHDPETFDPDRWASNGEAEQLAGKGMAWVPFSNGNRQCIGMNFSLLEQRVILGSLLRKYEWTLPEDSIHQDYMVNKFNLIPKPIDLKIRFKRRY

SEQ ID NO: 28156 - protein, 325 aa, Streptomyces avermitilis MA-4680
MAEKMAIAKAINESLRKALESDPKVLIMGEDVGKLGGVFRVTDGLQKDFGEERVIDTPLAESGIVGTAIGLALRGYRPVVEIQFDGFVFPAYDQIVTQLAKMHARALGKIKLPVVVRIPYGGGIGAVEHHSESPEALFAHVAGLKVVSPSNASDAYWMMQQAIQSDDPVIFFEPKRRYWDKGEVNVEAIPDPLHKARVVREGTDLTLAAYGPMVKVCQEAAAAAEEEGKSLEVVDLRSMSPIDFDAVQASVEKTRRLVVVHEAPVFLGTGAEIAARITERCFYHLEAPVLRVGGYHAPYPPARLEEEYLPGLDRVLDAVDRSLAY

SEQ ID NO: 28157 - protein, 462 aa, Streptomyces avermitilis MA-4680
MTEASVREFKMPDVGEGLTEAEILKWYVQPGDTVTDGQVVCEVETAKAAVELPIPYDGVVRELRFPEGTTVDVGQVIIAVDVAGDAPVAEIPVPAQEAPVQEEPKPEGRKPVLVGYGVAESSTKRRPRKSAPASEPAAEGTYFAATVLQGIQGELNGHGAVKQRPLAKPPVRKLAKDLGVDLATITPSGPDGVITREDVHAAVAPPPPAPQPVQTPAAPAPAPVAAYDTARETRVPVKGVRKATAAAMVGSAFTAPHVTEFVTVDVTRTMKLVEELKQDKEFTGLRVNPLLLIAKALLVAIKRNPDINASWDEANQEIVLKHYVNLGIAAATPRGLIVPNIKDAHAKTLPQLAESLGELVSTAREGKTSPTAMQGGTVTITNVGVFGVDTGTPILNPGESAILAVGAIKLQPWVHKGKVKPRQVTTLALSFDHRLVDGELGSKVLADVAAILEQPKRLITWA

SEQ ID NO: 28158 - protein, 396 aa, delta proteobacterium MLMS-1
MAKEKFERTKPHVNVGTIGHIDHGKTTLTAAITRVLSNKGYASATAFDQIDKAPEEKERGVTISTAHVEYESDNRHYAHVDCPGHADYIKNMITGAAQMDGAILVVGADDGPMPQTREHILLARQVGVPSIVVFLNKCDMVDDPELIELVEMELRELLSKYDFPGDDTPIIHGSALQALENPDDEAAAKPIWDLMAALDDFIPAPERDVDKPFLMPVEDVFSISGRGTVATGRIERGIVKVGDEIEIVGIRDTQKTTVTGVEMFRKILDEGQAGDNVGILLRGTKREEIERGQVLAKPKSITPHTKFKAECYILSKEEGGRHTPFFNGYRPQFYFRTTDVTGVVTLGEGVEMVMPGDNVTVDAELITPIAMDEGLRFAIREGGRTVGAGVINKIIS

SEQ ID NO: 28159 - protein, 435 aa, Saccharomyces cerevisiae
MTTNEEFIRTQIFGTVFEITNRYNDLNPVGMGAFGLVCSATDTLTSQPVAIKKIMKPFSTAVLAKRTYRELKLLKHLRHENLICLQDIFLSPLEDIYFVTELQGTDLHRLLQTRPLEKQFVQYFLYQILRGLKYVHSAGVIHRDLKPSNILINENCDLKICDFGLARIQDPQMTGYVSTRYYRAPEIMLTWQKYDVEVDIWSAGCIFAEMIEGKPLFPGKDHVHQFSIITDLLGSPPKDVINTICSENTLKFVTSLPHRDPIPFSERFKTVEPDAVDLLEKMLVFDPKKRITAADALAHPYSAPYHDPTDEPVADAKFDWHFNDADLPVDTWRVMMYSEILDFHKIGGSDGQIDISATFDDQVAAATAAAAQAQAQAQAQVQLNMAAHSHNGAGTTGNDHSDIAGGNKVSDHVAANDTITDYGNQAIQYANEFQQ

SEQ ID NO: 28160 - protein, 117 aa, Medicago truncatula
MASGVMAGFTRIGVGAAYYGLKPVLEFMTFNFSMQTRCNKFSEDARGLLKAAIRDPDPVVFLENELLYGESFLVSAEVLDSSFCLPIGKAKIEKEGKDATITAFSKMVGFALKGCLP

SEQ ID NO: 28161 - protein, 327 aa, Gibberella zeae PH-1
MSFNPNNDIPDLSGKVIIVTGASSGLGKESALQLAKHNPATIFVTARTEKRGNAAIKEIQDAVPNFKGQIKFLELDLSSFASIQKGATAFLNQSDRLDILMNNAGLMATPAGLTTDGYEVQFGSNYMGPALFTKLLLPTIVRTAQQQGDARVINLSSELFKQAPKEGVLLSRVKTPLEDISSLARYGQSKLADYYHTRSLSKYYPSVKFVAIHPGVVNTGLFDDLRKRRPWLGGLIGVMGSIFLTDVHAGAKAQLWASTAKSESVRSGGFYNQKLKEYKDAVLDDEKAVEELWDWTEKEFAIIITSIQQKRKVIVEVGYAKLPLQLS

SEQ ID NO: 28162 - protein, 357 aa, Colletotrichum lagenarium
MAEFIRAQIFGTTFEITSRYSDLQPVGMGAFGLVCSARDQLTNQNVAVKKIMKPFSTPVLAKRTYRELKLLKHLRHENVISLSDIFISPLEDIYFVTELLGTDLHRLLTSRPLEKQFIQYFLYQIMRGLKYVHSAGVVHRDLKPSNILVNENCDLKICDFGLARIQDPQMTGYVSTRYYRAPEIMLTWQKYDVEVDIWSAGCIFAEMLEGKPLFPGKDHVNQFSIITELLGTPPDDVINTIASENTLRFVKSLPKRERQPLKNKFKNADPSAIDLLERMLVFDPKKRITATEALSHDYLAPYHDPTDEPVAEEKFDWSFNDADLPVDTWKIMMYSEILDYHNVDASAQQIEEQFNGQ

SEQ ID NO: 28163 - protein, 552 aa, Aspergillus nidulans FGSC A4
MSGLDVEALLESTAAPATQRPDDRSKAENGDRRDERDRSWDRDRRRRDRSRDRRRSKDVDGDDDMRSPRSEHGSANGSHRSRKRSRSRDSDRRRARRDRHGDDYRSNGDYYRGGGRARTRSRSPYDDRYYRPSGRSRRDERDEERRPRREREPRKRSDSRDRSPELNEDERDRRTIFVQQLAARLRTKELIAFFEKVGPVKEAQIVKDRVSGRSKGVGYVEFKDESSVAPAIQLTGQKLLGIPIIAQLTEAEKNRQARNSEASSGNKHSAPFHRLYVGNIHFSIDENDLQSVFEPFGELEFVQLQKDETGRSRGYGFVQFRDPNQAREALEKMNGYDLGGRAIRVGLGNDKFTPENTQRTQSQSANQSNFQGSMFSGSGGRGVQAGGTSNFDRAGGREPEKGTAASALDDTDVAGVNFNNFSRDALMRKLARTDEPAEPSADDKQQKILLPKTEPKPLPVNVNMASREEGESWVKELEDDVRAECEEKYGHVVHIALDPNSQGDIYLKFDRVQGGENAIKGLNGRFFGGRQITAQPVVDAVYSSLFSRTKAI

SEQ ID NO: 28164 - protein, 165 aa, Magnetococcus sp. MC-1
MPRSLFFELSVGNLEMSESLIATCAGCGTGNRIPTNKAGFNARCGKCGEPLNRVGPDFPVTVGELQFHDEVLHSPMPVLVDFWAPWCGPCRQMSPLLADFAREMAGRIKVVKVNTDDNRILANQFNIRSIPTLMLFDHGQLKDQVSGSMTLPALRDWINRILEIS

SEQ ID NO: 28165 - protein, 496 aa, Crocosphaera watsonii WH 8501
MVSTRTKKDVPIWQPLKVIARSFSPYWIACIPLAAIITIVWNKAVVAESVELITAEGNSEAIAQLQGTLNAIWVLIAAILVIFMNAGFGMLETGFCRQKNAVNILSKNLIVFALATLAYWAIGYSLMFGGPENPFIGFGGWFLSGEPATYGLDPFPAGLPISVAFLFQAAFAGTAATIVSGAVAERIKFTDFIIFSLLLVGISYPITGHWVWTGNGWLGSIGFSDFAGSTVVHSVGGWAALMGAAILGPRMGKYVEGRPQAIPGHNMSIATLGCLILWIGWFGFNPGSQLAADEAVPYIAVTTNLAAAAGGVAATFVAWFKDGKPDLSMIINGILAGLVGITAGCDGVSYFGAVIIGAVAGVIVVYSVSMIDSLLKIDDPVGAVSVHLVNGIWGTLAVGLFNTESGLFYGGGFAQLGSQIVGIVAIGAFTAIFSGIVWTVLKSTMGIRVSPEEELEGLDVGEHGMEAYAGFLKETDTFSGSGSSTADEDVTTGAGI

SEQ ID NO: 28166 - protein, 726 aa, Arabidopsis thaliana
FLSLPKRNRIASCRFTVRASANATVESPNGVPASTSDTETETDTTSYGRQFFPLAAVVGQEGIKTALLLGAVDREIGGIAISGRRGTAKTVMARGLHEILPPIEVVVGSISNADPACPNEWEDDLDERIEYNADNTIKTEIVKSPFIQIPLGVTEDRLIGSVDVEESVKRGTTVFQPGLLAEAHRGVLYVDEINLLDEGISNLLLNVLTDGVNIVEREGISFRHPCKPLLIATYNPEESAVREHLLDRVAINLDLPMSFEDRVAAVGIATQFQERCNEVFSMVNEETETAKTQIILAREYLKDVKISREQLKYLVLEAVRGGVQGHRAELYAARVAKCLAAIEGRKKVTIDDLRKAVELVILPRSSLDETPPEQQNQPPPPPPPPQNSESGEDENEEEQEEEEDESNEENENEQQQDQIPEEFIFDAEGGLVDEKLLFFAQQAQKRRGKAGRAKNVIFSEDRGRYIKPMLPKGPVKRLAVDATLRAAAPYQKLRREKDISGTRKVFVEKTDMRAKRMARKAGALVIFVVDASGSMALNRMQNAKGAALKLLAESYTSRDQVSIIPFRGDAAEVLLPPSRSIAMARNRLERLPCGGGSPLAHGLTTAVRVGLNAEKSGDVGRIMIVAITDGRANITLKRSTDPESIAPDAPRPTSKELKDEILEVAGKIYKAGMSLLVIDTENKFVSTGFAKEIARVAQGKYYYLPNASDAVISATTRDALSDLKNS

SEQ ID NO: 28167 - protein, 572 aa, Salmonella enterica subsp. enterica serovar Paratyphi A str.
MKQTVAAFIAKTLEQAGVKQIWGVTGDSLNGLSDSLNRMGTIEWMPTRHEEVAAFAAGAQAQLTGELAVCAGSCGPGNLHLINGLFDCHRNHVPVLAIATHIPSSEIGSGYFQETHPQELFRECSHYCELVSSPEQIPQVLAIAMRKAVLNRGVSVVVLPGDVALKPAPENAVTHWYHAPHPVVTPAEEELKKLAQLLRYSSNIALMCGSGCAGAHEELVALAAKLKAPIVHALRGKEHVEYDNPYDVGMTGLIGFSSGFHTMMNADTLILLGTQFPYRAFYPSDAKIIQIDINPGSIGAHSKVDMALVGDIKATLRALLPLVEEKSNRKFLDKALEHYRDARKGLDDLAKLSDKAIHPQYLAQQISHFAADDAIFTCDVGTPTVWAARYLKMNGKRRLLGSFNHGSMANAMPQALGAQATAPGRQVIAMCGDGGFSMLMGDFLSVVQMKLPIKIVVFNNSVLGFVAMEMKAGGYLTDGTELHDTNFARIAEACGITGIRVEKAADVDGALQRAFSIDGPVLVDVVVAKEELAIPPQIKLEQAKGFSLYMLRAIISGRGDEVIELAKTNWLR

SEQ ID NO: 28168 - protein, 364 aa, Vanilla planifolia
SDSGKDAGRLSAAWQVYKTQEELVQVAKQFGVKLTMFHGRGGTVGRGGGPTHLAILSQPPDTINGSLRVTVQGEVIEQCFGEERLCFRTLQRYTAATLEHGMNPPISPKPEWRSLLDEMAVIATNEYRSIVFQEPRFVEYFRLATPELEYGRMNIGSRPSKRKPSGGIESLRAIPWIFAWTQTRFHLPVWLGFGAAFKHVIAKDNKNLHTLREMYNGWPFFRVTIDLIEMVFAKGNPGIASLYDKLLVSSELLPFGVQLRENYEETKRLLLQVAGHKDLLEGDPYLKQRLRLRDPYITTLNVCQAYTLKRIRDPGYHVTERPHLAKETTESIKSAAELVKLNPTSEYGPGLEDTLILTMKGIAA

SEQ ID NO: 28169 - protein, 347 aa, Arabidopsis thaliana
MAVSGFEGFEKRLELRFFDDDKPITKNPMGLRLIDFESLDQVLNEVQCTVVSAVANRSFDAYVLSESSLFVYPTKIIIKTCGTTQLLKSIRPLIHLARNLGLTLRACRYSRGSFIFPKAQPFPYTSFKDEVIVVEESLPKSLCYRKASVMTPSNNPSRAWHVFTASADVESDEHVVVVEVCMTELDRVNARSFFKRKGDEKNNSDSAGKEMTRLSGIDNINANAYICDFAFDPCGYSMNGVDGDRYSTIHVTPEDGFSYASFECGLSLYDNGHEDISEVLSRAIDVFRPSDVSIATTYGGEDYNHEVTKRVERVLAKKLDLKCRSRLMDEFPGSGTVVYQSFTPRRK

SEQ ID NO: 28170 - protein, 230 aa, Lactobacillus johnsonii NCC 533
MSKLVLIRHGQSEWNLSNQFTGWVDVNLSEKGVEEAKKAGRLIKEHGLEFDQAYTSLLTRAIKTLHYALEESDQLWIPETKTWRLNERHYGALQGLNKKDTAEKYGDEQVHIWRRSYDVLPPAIDDDNEYSQAHDRRYANLDPHIVPKAENLHVTLDRVMPFWEDHIAPDLLDGKNVIIAAHGNSLRALTKYIENISDDDIMDLEMKTGEPVVYTFDDKLDVVNKEKLDD

SEQ ID NO: 28171 - protein, 364 aa, Vanilla planifolia
SDSGKDAGRLSAAWQLYKAQEDLIKVAKKYGVKLTMFHGRGGTVGRGGGPTHLAILSQPPDTIHGSLRVTVQGEVIEQSFGEEHLCFRTLQRFTAATLEHGMHPPISPKPEWRTLLDEMAVVATNEYRSIVFQEPRLVEYFRLATPELEYGRMNIGSRPSQQKPSGGIESLRAIPWIFAWTQTRFHLPVWLGFGTAFKHVVQKDIKNLRILQEMYNEWPFFRVTIDLVEMVFAKGNPGIASLYDKLLVSEDLWSFAERLRANYQETKDLLLQVAGHKDLLEGDPYLKQRLRLRDSYITTLNVCQAYTLKRIRDPNFHVKVRPHISKEISDASKPAAELVKLNPTSEYAPGLEDTLILTMKGIAA

SEQ ID NO: 28172 - protein, 789 aa, Vibrio angustum S14
MKQVKILAQYYVDLMVKLGIVRFSLLLALALVALAVVVQVSVTLVLHGTVNDIDIVRSVTFGLLITPWAVYFLSVVVDQLEDSRQRLSKLVTKLEEMRSRDMELNKQLQDNIAQLNLEIEEREKAEEAREEAMHDLENEVYQRENAQVAVAEQSALLKSFLDASPDLIYYRNEKNQFSGCNRAMSELVGKTEKELVGLTPWDVYPEEVAKKIIKTDEELFNEDSAMTDEQWLVYPNGKRALFELRKVPFYNRNGRRLGLMGFGRDITERKKYEDALEKASSDKTSFISTISHELRTPLNGIVGLSRMLLDTDLTDEQRGYLRTVHVSAITLGNIFNDIIDLDKSDRRRLELMPKPLDFNEFIDEMGNISQLMAEQKGLRFDLECLTELPKNIEVDSTRLRQVLWNLIGNATKFTKQGGVILSVSSEIHEHDADIIFEVEDSGVGIPKSEIDNIFAMYYQVKQGDDNIHAVGTGIGLAVSRQLVQLMGGDITVHSEVGEGSTFTVKIRVPLVEDVIEEEIVTEVKPELTGLSIFMVEDIELNITVAKSLLESLGHEVTVAMRGDEALAMFKPEDYDLVLLDIQLPDMTGFDIAQKLREKYQDLPALVALTANVISDKSEYLEKGMDEAISKPLSVKAITSVIENLVLSCSYEEDEINDLTDTNSDGTGPSDKMIDKLLDLEMLTSYVDIVGTKPVYASIEMFEKMMPDYIAILDSNMVAKDQDGIKFEAHKIKGAAGSIGLKHIQQVAQKAQSPELPAWWENINDWVDEIKNGYQNDIDVLKTWLKQYEK

SEQ ID NO: 28173 - protein, 364 aa, Vanilla planifolia
SDSGKDAGRLSAAWQLYKAQEDLIKVAKKYGVKLTMFHGRGGTVGRGGGPTHLAILSQPPDTIHGSLRVTVQGEVIEQSFGEEHLCFRTLQRFTAATLEHGMHPPISPKPEWRTLLDEMAVVATNEYRSIVFQEPRFVEYFRLATPELEYGRMNIGSRPSKRKPSGGIESLRAIPWIFAWTQTRFHLPVWLGFGTAFKHVVQKDIKNLRILQEMYNEWPFFRVTIDLVEMVFAKGNPGIASLYDKLLVSEDLWSFAERLRANYQETKDLLLQVAGHKDLLEGDPYLKQRLRLRDSYITTLNVCQAYTLKRIRDPNFHVKVRPHISKEISDASKPAAELVKLNPTSEYAPGLEDTLILTMKGIAA

SEQ ID NO: 28174 - protein, 125 aa, Methanosarcina mazei
MKEITAIIRMNRVQKTKDVLLECGFPSFTVRRVMGRGKQKGLCFEFNPPLPEPEKEAETCIHFIPKRMFTIVVDDENVNEVVRKIIEVNQTGHPGDGKIFVSSISEAYRIRTGESGEATVNKEMV

SEQ ID NO: 28175 - protein, 363 aa, Tillandsia usneoides
SDSGKDAGRLSAAWQLYKAQEELVKVAKKYGVKLTMFHGRGGTVGRGGGPTHLAILSQPPETINGSFRVTVQGEVIEQSFGEERLCFRTLQRFTAATLEHGMLPPISPKPEWRAILDEIAVVATEEYRSVVFKEPRFVEYFRLATPELEYGRMNIGSRPSKRKPSGGIESLRAIPWIFAWTQTRFHLPVWLGFGAAFKHILQKDIRNLQVLKEMYNEWPFFRVTLDLLEMVFAKGDPGIAALYDKLLVSDELKSFGEQLRANYEETEQLLLQVAGHKDLLEGDPYLKQRLRLRESYITTLSVCQAYTLKRIRDPNFQVHMRAPLSKEILDSNKPAELVKLNPSSEYAPGLEDTLILTMKGIAA

SEQ ID NO: 28176 - protein, 226 aa, Zea mays
MAASLLHAAASSPLAGPYPAARAAFRPLASSPFLRLARSSPDRRARLDFPLRALSGGARLSTGVAALRPRRFVAALAGEEPMSSELGDDKEKETEKIEIEPEEAQEVWREMLKQFKAEAIRMQALTTQAYDVYSKRAREVLLEASEKLRIQADKAQKDLTIIAAEVGEEGQEYLQLAAKNSPDSIKDITETINAVGNLNGPSEYKDYHVGISFGTFPTVGGFLNFC

SEQ ID NO: 28177 - protein, 91 aa, Oryza sativa
ITCGQVNSAVGPCLTYARGGAGPSAACCSGVRSLKAAASTTADRRTACNCLKNAARGIKGLNAGNAASIPSKCGVSVPYTISASIDCSRVS

SEQ ID NO: 28178 - protein, 141 aa, Triticum aestivum
FSEEQFAGTFEGRRPCYFNTGVMVLDLARWRRAGYTRRIERWMEIQKSPPGRIYELGSLPPFLLVFAGQVAAIEHRWNQHGLGGDNILGSCRDLHPGPVSLLHWSGSGKPWARLGGGRPCPLDALWAPFDLYGPAAVEPSR

SEQ ID NO: 28179 - protein, 327 aa, Yersinia pestis biovar Medievalis str. 91001
MVKKIGVLTSGGDAPGMNAAIRGVVRAALSAGLDVFGIEDGYLGLYENRMKKLDRYSVSDMINRGGTFLGSARFPEFRDPEVRKVALKNMHERGIDGLVVIGGDGSYAGADLLTKEGGIHCVGLPGTIDNDVAGTDYTIGFFTALETVVEAIDRLRDTSSSHQRISIVEVMGRYCGDLTLAAAIAGGCEFIAIPEVEFKRDDLVAEIKAGIAKGKKHAIVAITEKLDDIDSLAKYIEKETGRETRGTVLGHIQRGGAPVAYDRILASRMGAYAVDLLLQDHDYKKGGFCVGVQNEKMVHELISVCIAPENKKSKFKEDWYDTAKKLF

SEQ ID NO: 28180 - protein, 421 aa, Wolbachia endosymbiont strain TRS of Brugia malayi
MPEVTKLDNGLRIITEQMRDIDSVALNIRVGVGSRAESANQNGISHFLEHMAFKGTKTRTAFEIAKTFDDIGGVFNASTGRERTSYYAKVLKKDVKIGIDILIDILMNSTFPKDELEREKGVVIQEIFQINDSPSDIIFDKYFEAAYKDQPFGRSILGTQDTVKSFAQGDLNNYINEHYFGENIIFAVAGNVEHEEIAQLTKDFLSKVSSQKLKESQNANCTGGEYLEHRKLDQVHLLIGFPSVSCHDDRYHTFQVLDSILGSGMSSRLFQEVREKQGLAYSVYSFNSSYTDTGMLSIFAGTDSSNLDKLLKSITTELKKLSTNDLREEEVNRVKERIKSQILMSRESVSSCAEALEHYYGNYNRYISKDELIEKTSAVTTADVKRAVEELLSKHEKTTLAAIGEIKSLPGYDKVVSMLRA

SEQ ID NO: 28181 - protein, 307 aa, Magnetospirillum magnetotacticum MS-1
TLEDPPNWMTRVATLGGKGWKNFVERGGRQVADLREQILTLASETGLQIGEYRKIVAMVQKGEREARQAKKEMIEANLRLVISIAKKYTNRGLQFLDLIQEGNIGLMKAVDKFEYRRGYKFSTYATWWIRQAITRSIADQARTIRIPVHMIETINKIVRTSRQMLHEIGREPTPEELAEKLAMPLEKVRKVLKIAKEPISLETPIGDEEDSHLGDFIEDKNVVLPIDAAIQSNLRETTTRVLASLTPREERVLRMRFGIGMNTDHTLEEVGQQFSVTRERIRQIEAKALRKLKHPSRSRKLRSFLDN

SEQ ID NO: 28182 - protein, 142 aa, Zea mays
KEQFSDGVGYSWIDGLKDHASQHVSDSMMMNAGFVYPENTPTTKEGYYYRMIFEKFFPKPAARSTVPGGPSVACSTAKAVEWDASWSKNLDPSGRAALGVRDAAYEDTAGETPASADPVSDKGLRPAIGESLGTPVASATAV

SEQ ID NO: 28183 - protein, 455 aa, Ustilago maydis 521
MSNLPSEPEFEQARNELATTLAPFLEQYPEYNKAFEIVQIPERIIQFRVVWEDDNHVSQVNRGYRVQFNSALGPYKGGLRLHETVNLSVLKFLGFEQIFKNALTGLNIGGGKGGSDFNPKGKSDGEVRRFCKAFATELQRHIGPNTDVPAGDIGFSTREAGFVFGTYKQLRNEWTGVITGKALDWGGSNIRPEATGYGLIYYVEHMINHVEQGTNGFNGKKVVISGSGNVAQYAALKVLELGGTVLSLSDSKGSLIAKDTKGFTAEMISKIAEIKYNRGELESFGTASGALEWHAGARPWKLFSSYDVALPCATQNELNADEAKFSLSAGCRYVAEGSNMGLDQAAIDVYEQSRITDPSKACWYGPGKAANSGGVAVSGLEMAQNSARLTWSPEEVDQKLKDIMKNAYENCFKTGQAFPAKNDKVADKLPSLVGGANIAGFKKVADAMKQHGDWF

SEQ ID NO: 28184 - protein, 384 aa, Debaryomyces hansenii CBS767
MVASKISNVAKTASLAAQALKTSGSANGRTLAQAGQYHALRMSGQRPASSSSGPQTMTVRDALNSAMAEELDRDDDVFLMGEEVAQYNGAYKISRGLLDRFGERRVIDTPITEMGFTGLAVGSALAGLKPICEFMTFNFAMQSIDQIINSAAKTYYMSGGKQPCNITFRGPNGAAAGVGAQHSQCYAAWYGSIPGLKVLSPYSAEDYKGLFKAAIRDPNPVVFLENEMSYGESFEMSEEALSSDFVLPIGKAKIEREGTDITLVSHTRNVMHCLQAAEKLESEYGVKAEVINLRSIKPLDTDSIIQSVKKTNHLVTCEAGFPAFGVGSEICAQIMESEAFDYLDAPVERVTGCEVPTPYAKELEDFAFPDVEIVMRASRKVLGL

SEQ ID NO: 28185 - protein, 91 aa, Arabidopsis thaliana
  misc_feature (33)..(33): Xaa can be any naturally occurring amino acid
  misc_feature (48)..(48): Xaa can be any naturally occurring amino acid
  misc_feature (50)..(50): Xaa can be any naturally occurring amino acid
  misc_feature (62)..(62): Xaa can be any naturally occurring amino acid
  misc_feature (68)..(68): Xaa can be any naturally occurring amino acid
  misc_feature (70)..(70): Xaa can be any naturally occurring amino acid
  misc_feature (75)..(75): Xaa can be any naturally occurring amino acid
  misc_feature (78)..(78): Xaa can be any naturally occurring amino acid
  misc_feature (83)..(83): Xaa can be any naturally occurring amino acid
MASSMFSSTAVVTSPAQATMVAPFTGLKSSASXPVTRKANNDITSITXNXGRVSCMKVLPPXGKKKFXTXFLLPXLSXGEFAXESTFFLNK

SEQ ID NO: 28186 - protein, 481 aa, Saccharophagus degradans 2-40
MKIHNMKNFINGEYIASQADGAIDVLSPSTGKKVGDIPAGCVEDAQLALDTANAAQKLWAKKTNRERAKILRVFAANIRAAADDLAKLLVSEQGKLLSVAQMEVEATATFIEYACDNALTIEGDILPSDNPNEKIYIHKVPRGVVVAITAWNFPLALAGRKIGPALVTGNAIVVKPTQETPLATLALGELANAAGIPAGVLNIVNGRGSVVGQHLCESPITRLITMTGSTPAGQRIYRTSADHLTPVMLELGGKAPFIVMEDANLESAVEAAFTTRYANCGQVCTCAERLYVHESIYPAFMDKLLEKVKAIKVGDPMAADTDMGPKVNQSEIENIDALVKKGIEQGATLLHGGKRAHVPGFEGGNWYEPTLLGDVQQSNILVHEETFGPILPVVKINSIEQAIEYTNDSEYGLSTYLFTQNLKYIHQYIAEVEAGEVYVNRGIGEQHQGFHNGWKLSGAGGEDGRYGLEQYLEKKTVYFAE

SEQ ID NO: 28187 - protein, 115 aa, Triticum aestivum
MARAAVARLVLVALVATMLLITTDAAISCGQVNSALSPCISYARGNSANPSAACCSGVRRLAGAVRSTTDKKTTCNCIKSAAGGLNAGKAADIPSKCSVSIPYAISPSLDCSTIR

SEQ ID NO: 28188 - protein, 341 aa, Staphylococcus aureus subsp. aureus MRSA252
MSTNIAINGMGRIGRMVLRIALQNKNLNVVAINASYPPETIAHLINYDTTHGKYNLKVEPIENGLQVGDHKIKLVADRNPENLPWKELDIDIAIDATGKFNHGDKAIAHIKAGAKKVLLTGPSKGGHVQMVVKGVNDDQLDIEAFDIFSNASCTTNCIGPVAKVLNNQFGIVNGLMTTVHAITNDQKNIDNPHKDLRRARSCNESIIPTSTGAAKALKEVLPELEGKLHGMALRVPTKNVSLVDLVVDLEKEVTAEEVNQAFENAGLEGIIEVEHQPLVSVDFNTNPHSAIIDAKSTMVMSGNKVKVIAWYDNEWGYSNRVVDVAEQIGALLTSKETVSAS

SEQ ID NO: 28189 - protein, 329 aa, Burkholderia pseudomallei K96243
MHAWSAQHVPPQGGKVAVVTGANSGLGWQIAQTLAAKGAQVVMGCRDTAKGELAAHAIRTRYPRARIEVEALDLADLASVCRFADAVADRHGRVDILCNNAGVMFLPLRHTRDGFEMQMGTNHLGHFALTGLLLPALRASHRARVVTMSSGFNRLGKIRLDNMLAERGYNKYRAYCDSKLANLMFTLELQRRFDQACLPILSVAAHPGYAATHLQFAGPEMANSSLGTFAMRLSNRLVAQSADVGALPAIHAATAVDVDGGAYIGPAHLCETRGYPAEARIPRQARDVRMGKRLWEKSEQLTGVRYLDTPPPPGSRRRASRDDATFGAL

SEQ ID NO: 28190 - protein, 531 aa, Chlamydophila abortus S26/3
MMDRKGFLDSPSTKILQDLAVAPVDLTTPGIISQERVERFSLSIGGFTLSYATERVDEGVVSALTDLASERGLVSSMQAMQSGEVVNYIDNFPSESRPALHTATRAWVKEIPLTGNAEDIALRSKIEAQRLKDFLHQYRDAFTTIVQIGIGGSELGPKALHRALKGCCPSDKKVYFVSNIDPDNAAEVLQEIDCSKTLVVTVSKSGTTLETAVNEEFIADHFLKQGLHFRDHFIAVTCEGSPMDDRSKYLEVFHIWDSIGGRYSSTSMVGGVVLGFAYGFDVFFQLLEGAAAMDLAALAPQMSENLPMLAAMLGIWNRNFLGYPTSVIVPYSAGLEYFPAHLQQCGMESNGKSIAQTGEIIGFATSPILWGEVGTNSQHSFFQCLHQGSDVIPIEFIGFLDNQRGRDIVISGSTSSQKLFANMVAQSIALAKGRENTNPNKSFRGNRPSSLLVAERLTPYTMGALLAFYEHKIVFQGFCWGINSFDQEGVTLGKDLANQVLGIMQGQAKEGACLEAEALLKLFNSTQKKKS

SEQ ID NO: 28191 - protein, 269 aa, Saccharomyces cerevisiae
MSNNKIKRKDASPEQEAIESFTSLTKCDPKVSRKYLQRNHWNINYALNDYYDKEIGTFTDEVSTVAHPPVYPKELTQVFEHYINNNLFDIDSLVKFIEELGYNLEDLATLCLAHLLGYKKLEEPLKREDFLSTWFMQGCSTISDMQECIKTLDVKLHEDLQYFTQIYNYAFNLILDPNRKDIDTDEGIQYWKLFFQPEYPVRMEPDLLEAWFRFLRDEGKTTISKDTWRMLLLFFKRYPTIQKIISDYDETAAWPFIIDEFYECLQDQQ

SEQ ID NO: 28192 - protein, 177 aa, Streptococcus pyogenes M49 591
MTYCPHCDGPLFEGKDVAVIGGGNSGLEAALDLAGLAKHVYVLEFLPELKADKVLQDRAAKTNNMTIIKNVATKDIVGEDHVTGLNYTERDSGEDKHLDLEGVFVQIGLVPNTAWLKDSGVNLTDRGEIIVDKHGSTNIPGIFAAGDCTDSAYKQIIISMGSGATAAIGAFDYLIRQ

SEQ ID NO: 28193 - protein, 811 aa, Alkalilimnicola ehrlichei MLHE-1
MQRERLVLVGNGMAGVKTLEELLAVAPERYEITVFGAEPHGNYNRIMLSPLLSGEKTVDDIMLNRPEWYAENGITLHTGCPVTEINRRHREVISGDGRRTPYDRLLLATGSNPFIIPVPGNDLPGVLAYRDIGDVEAMLEASRQHRHAVVIGGGLLGLEAAWGLHQQGMAVTVVHLAPHLMERQLDALAGGMLEQSLRERGVEFRLEAQTQALLGDDRVEAVRFADGEEIPADLVVMAAGIRPNIHLAKAAGILCERGIVVNDTMQTFDPRIYAVGECVQHRGQCYGLVAPLFEQAKVCANHLAEAGFAAYEGSVTSTKLKVTGVDLFSAGDFSEAEGTEAIVYQDPAGGIYKKLVLQEDRIRGAVLYGDTSDGAWYFQLLKDGTSVSDFRDSLLFGQAHLGDAGHGGQSHAEAMPMDAQVCDCNGVCKGDIVNAIQEQGLFSLEEVQSHTKASASCGSCTGLVEQILQSTVGGGYAEPRVKPLCACTDHSHDQVRKAIREQHLTCLQQVFDTLEWKTPDGCDKCRPALNYYLISTWPEEAQDDEMARLVNERMHANIQKDGTYSVVPRMWGGTTTPAELRKIAEVAERYDVPTVKVTGGQRIDLLGVKKEDLPGMWGELAEAGFVSGHAYGKALRTVKTCVGSEWCRFGVQDSTSLGIALERMCWGAWTPHKVKLAVSGCPRNCAEASIKDLGVVAIESGWEILVGGNGGVKVRACDTLCRVETAEEVMEYAAAYLQLYRETGRYLERTAPWIERVGLSWVREQVVDDDVNRKRLAERFERAQSIYRKDPWATLARQGQRDRFQPLRQVG

SEQ ID NO: 28194 - protein, 347 aa, Anthurium andraeanum
MMHKGTVGVTGAAGFVGSWLIMRLLEQGYSVKATVRDPSNMKKVKHLLDLPGAANRLTLWKADLVDEGSFDEPIQGCTGVFHVATPMDFESKDPESEMIKPTIEGMLNVLRSCARASSTVRRVVFTSSAGTVSIHEGRRHLYDETSWSNVDFCRAKKMTGWMYFVSKTLAEKAAWDFAEKNNIDFISIIPTLVNGPFVMPTMPPSMLSALALITRNEPHYSILNPVQFVHLDDLCNAHIFLFECPDAKGRYICSSHDVTIAGLAQILRQRYPEFDVPTEFGDMEVFDIISYSSKKLTDLGFEFKYSLEDMFDGAIQSCREKGLLPPATKEPSYATEQLIATGQDNGH

SEQ ID NO: 28195 - protein, 1402 aa, Xanthomonas oryzae pv. oryzae KACC10331
MRCRRKELHSHSIVRRYNEVDVRRPELWARNGQREGTNMPKSRWDLRRIYGRRAFFGALLILSAGLIAAIVTGVWLQQHNEREREQRFQYVVRTLTRNISERMSTLEHGLRGARGAVIGAGSDIISRERFTSYSRSRDYPREFPGVLGYGYIHRVAPADEDAFLQNARADGAPDIQRRPLAPWDGERYIVLYFEPESSGNHPLGIDIASDPHRRAAALQAARSGEPIMTSPISLFGYRVPRESGFWLLLAIYREGMPLQTPQQRMVATSGWVYAPFSLAQIVQSALGERDDIALDISDRNEPTHNLYRSGTPAIDSALGPPVVTLLPMYGRTWVITAHPTASFIASLNQNSPWLIGGLVMAGSVLFAALLVLYFSNGLRREEVLRKQMELAALVSHSSEAIVAETPDGRITLWNPAAEAMFGYTAEEAIDQDLTMLLAPQAYAMPEIDHADAALAANASAAQTMHHRDGHQVHVLASKSPIIESEGTLSGHSHFFRDISDRVRSHQRSIDLNASLEHQVAERTGELVKFSVLQRAILAHAGYAIIATDSSGFVTLFNPAAEKMLGYNAAEVIGRRKASQFIEQDELQERARMLADQTGTPVAHTLEAIAALTSLGRSDTSEWTYVSHDGRRLPVLLTLSTLRDDHDQVIGYLGVAVDLTEQKLHEKQLRLAMDAAKSANQSKSDFLANMSHEIRTPMNAILGMLYLLQRSELPGAAQDMVAKIDRSARTLLEIINDILDFSKIEAGRIDLECAPFDLNQLFDNIAELMRSSLSAKPVEMIVEPLPRDSRWLLGDALRINQVLVNLVGNAIKFTEQGEVVLSVRRFPSGDPNKFKLLFSVRDTGIGISKEKQSLIFSPFLQADTSTSRRYGGSGLGLTISRRLIELMGGELEVESVPGRGSEFYFVITLEKSAPPQEQRDLPSLPPEAMPRVLIADDHDAALNNLVRIATELGWRVDAVASGQAALQAIEHAAEPYDIFLLDWRMPDIDGVAIAREIRARATPGPHPVIVMVTAYERRLLEQHPEQQDLDAVMTKPVTGAALHRLFEQLMDQRPGTRAATPTFVARRLEGVHLLLVDDSEINCEVAQRILEGEGAMVTVAHDGEQAVSTLKRTPNLFHLVLMDVQMPVVDGYEATRRLRQIPALASLPVIALTAGAFRPQQEKALAAGMNGFIAKPFNVEELVTAIRHFLQPGTRRIPSLPHETEVYAGPEWEHSEPELLDATRARSLWREREPYARYLTKLLRDNPDPAEVAAEHLRRNELPAIGAMAHKLRGAAGSLALPALADAAGDLETSIDEGHDITASLIALKDVMQRTAEAIQAFLQHGDTDIAADEDGVALDADSVQILTSAFASDNADQIDHALMICAPRLPRTLQEALQRAVEDFDFRRAETTLREWQTTHLH

SEQ ID NO: 28196 - protein, 112 aa, Triticum aestivum
  misc_feature (54)..(54): Xaa can be any naturally occurring amino acid
  misc_feature (72)..(72): Xaa can be any naturally occurring amino acid
  misc_feature (84)..(84): Xaa can be any naturally occurring amino acid
  misc_feature (86)..(86): Xaa can be any naturally occurring amino acid
CGQVDSKLAPCVAYVTGRASSISKECCSGVQGLNGLARSSPDRKIACRCLKELXATSIKSIKHGAKAPGVPXAKCGVQRAFPIXIXTNWQHVNLVNIYPFPVHAWTRWWSYF

SEQ ID NO: 28197 - protein, 178 aa, Glycine max
MLLDKNDTQETHYEVLNVKEDANYEEIRASYRSAVLSLHPDKLLKTSETSSSNQTAEERFLKVQKAWEILSNSSSRSFYDNDLRSSRQDVLAADVAEDLSLQDMMIEDDGEALELFYQCRCGDYFSVDSLELKNMGYSLLREGSGISIMNVDTSPGSVILPCGSCSLKARLLINMDVN

SEQ ID NO: 28198 - protein, 363 aa, Tillandsia usneoides
SDSGKDAGRLSAAWQLYKAQEELVKVAKKYGVKLTMFHGRGGTVGRGGGPTHLAILSQPPETINGSFRVTVQGEVIEQSFGEERLCFRTLQRFTAATLEHGMLPPISPKPEWRAILDEIAVVATEEYRSVVFKEPRFVEYFRLATPELEYGRMNIGSRPSKRKPSGGIESLRAIPWIFAWTQTRFHLPVWLGFGAAFKHILQKDIRNLQVLKEMYNEWPFFRVTLDLLEMVFAKGDPGIAALYDKLLVSDELKSFGEQLRANYEETEQLLLQVAGHKDLLEGDPYLKQRLRLRESYITTLSVCQAYTLKRIRDPNIQVHMRAPLSKEILDSNKPAELVKLNPTSEYAPGLEDTLILTMKGIAA

SEQ ID NO: 28199 - protein, 481 aa, Rubrobacter xylanophilus DSM 9941
MAQLLVGGERVSARGGGEMPVVNPATEEVVDTVPKGTAEDVEAAVAAAKGALAEWSGKDPDERAAIMRAGIGAVKERGREIAELLVREQGKPLSEAMGELHHFIHGMDFYADLASKVRGAYAPLPSSLGKSYGMVIKRPVGVCAAIVPFNFPLTLMGTKVGPALAGGNTVVVKPAETTPLATLRVAELFAEAGLPAGVFNVVTGEGPEVGEALVAHPDVRRVAFTGSTEVGRRIMELAGPQFKRVSVELGGSDPVIVCPDADVDAAVKGVNIGRFFNAGQACLAAKRVYVFDEVYDEFMEGLIKRVSRYELGDGLTKAEKPKIRMGPMNSARYRDQVASQLEEALGRGARVVYQGEWGGEKGYFFPPAVIEGAPHDSRVVREETFGPLLPVFRVGDLDEALRLANDSRYGLGSSIWTRNIRWIHRAAQEIEAGMTWVNQLHYGYDELPFGGVKDSGVGREHGPEALEYYLESKSVVIGGLD

SEQ ID NO: 28200 - protein, 258 aa, Rubrobacter xylanophilus DSM 9941
MAVSYGREGVVGYITLDRPPANSYDYEFMRELGEAVRAAEEDAEAGAVIVRSANERFFSAGADVKAFAASTTEENMRMIREAHQNLARIASVPKVFVAQISGTALGGGLEIALACDLRFGAEGEYFLGLPEVTLGLLPGNGGTQRLPRLIGRSRALDLMVTGRRLSPSEAHELGILDRLFEAGEIEERTRQYAEGLARGASEAIGKIKRAVHEGLEGTLERGLALERELIEGLFESPDAREGIKAFTEKRKPEFGRRG

SEQ ID NO: 28201 - protein, 301 aa, Agrobacterium tumefaciens str. C58
MTKWTEANIPNQRGRSAVVTGTGGLGLETALALARAGCDVTIAGRNPEKGSDAVSRIQRAAPHVTVSFEKLDLADLTSIALFAQRMENDRESLDLLVNNAGIMVPPKRQETRDGFELQFGTNYLGHFALTAHLMPLLKKGTDARVVTVSSVAARAGKINFADINSEKNYHPMRAYSQSKLACLMFALELQDRSRAAGWGVSSIAAHPGVSRTDLLHNAPGRNSLQGLARTFLWFLFQPVAQGALPQLFSATSKEVKSGGYYGPDRLGETRGHPQPARIPPEALDRVAGKQLWEISQRMTGL

SEQ ID NO: 28202 - protein, 118 aa, Glycine max
SNKENAADVKAKFVIEAANHPTDPDADEILSKKGVIILPDIYANAGGVTVSYFEWVQNIQGFMWEEEKVNRELKKYMTKAFQDIKAMCKIHNCDLRMGAFTLGVNRVARATLLRGWEA

SEQ ID NO: 28203 - protein, 363 aa, Tillandsia usneoides
SDSGKDAGRLSAAWQLYKAQEELVKVAKKYGVKLTMFHGRGGTVGRGGGPTHLAILSQPPETINGSFRVTVQGEVIEQSFGEERLCFRTLQRFTAATLEHGMLPPISPKPEWRAILDEIAVVATEEYRSVVFKEPRFVEYFRLATPELEYGRMNIGSRPSKRKPSGGIESLRAIPWIFAWTQTRFHLPVWLGFGAAFKHILQKDIRNLQVLKEMYNEWPFFRVTLDLLEMVFAKGDPRIAALYDKLLVSDELKSFGEQLRANYEETEQLLLQVAGHKDLLEGDPYLKQRLRLRESYITTLSVCQAYTLKRIRDPNFQVHMRAPLSKEILDSNKPAELVKLNPTSEYAPGLEDTLILTMKGIAA

SEQ ID NO: 28204 - protein, 357 aa, Solenangis aphylla
SDSGKDAGRLSAAWQLYKTHEDLVKGAKEYGAKLTMFHGRGGTVGRGGGPTHLAILSQPPDTILGSLRVTVQGEVIEQSFGEEQLCFKTLQRFTAATLEHGMQVPITPKPEWRALMDEMAIIATNEYRSIVFKEPRFVEYFRLATPELEYGRMNIGSRPSKRKPSGGIESLRAIPWIFAWTQTRFHLPVWLGFGAAFKHVIQKDPKNLQMLREMHNEWPFFRVTIDLLEMVFTRGNPGIAALYDKLLVSPELLPFGEQLIANYEETQNLLLQVAGHKVLLESDPYLKQRLRLRYPYITTLNVFQAYTLKRMRDPSYAEPHLSNAHKPADELVKLNPISEYGPGLEDTLILTMKGIAA

SEQ ID NO: 28205 - protein, 235 aa, Solenangis aphylla
MCSRTPLCEYSRLATLELEYGRMNIASRPSKRNPRGGIESLRAIPWIFAWTQTRFHLPVWLGFGAAFKHVIDKDIKNLLMLQEMYTRWPFFRVTIDLVEMVFAKGDPGIAALYDKLLVSEDLWPFGEQLRNNYNETKNLLLQVAGHKALLEGNPYLRQRLRLRDSYITTLNACQAYTLKRIRDPSYQVPVRPPIAKEIMEGSVSSANQLVKLNPTSEYAPGLEDTLILTMKGIAA

SEQ ID NO: 28206 - protein, 103 aa, Glycine max
  misc_feature (65)..(65): Xaa can be any naturally occurring amino acid
  misc_feature (84)..(84): Xaa can be any naturally occurring amino acid
MGGEKAPLVQADITCGHGTNSLINCIGYLQNGGTPPSGCCNAQKSLNAAAKTTVDRQTARNCLRXAASQIYVFKVNNAASLPGXCGVYMPYTISTSTNCATIK

SEQ ID NO: 28207 - protein, 473 aa, Oenococcus oeni PSU-1
MVARKKATENNNNDLVMPAAQSGYGANIKVIGVGGGGSNAIDRMIEEGIEGVQFIVANTDMQALSASKAPNKLQLGPKLTRGLGAGSTPEVGEKAGEESQQSIQEVLQGADLVFVTAGMGGGTGNGAAPVIARIAREVGALTVGVVTRPFNFEGPKRARFAAEGIAKLKENVDTLVVVSNNRLLEIMDRKASLADSFRAADNTLLQGVRGISDLITKPGIINLDFADVKTIMTNGGMALMGIGSATGENRAAEATKAAIASPLLEVDLKGASDVILSVTGSADMSLYEAQTAADVVTQAAGQDVNIVFGTSVDDKLEDEVRVTVVATHINQAPGQSQDGPDSTDVFTVDTPAEQSSSSSDQTNKKGSVFDDIPNVTVDPVTGNNKVVPNSSAAPKSSLAQPEQKQSSGKLFEDWQLNTVHRGRNQSSQSNNSPFNNDQQFSNNQSQQSSSFNQSSDPSSDDDSSSRPSFFKRH

SEQ ID NO: 28208 - protein, 93 aa, Arabidopsis thaliana
GPWAPSRLSSVPRVAFPVKAIMAAPLNGLKSSVAFPATRRVTTDITSITGNGGGVNCMQVGPPMGRKKLGTFFYLPDLTDSEWVKEVASLIRT

SEQ ID NO: 28209 - protein, 1021 aa, Daucus carota
MGVLRVYVILILVGFCVQIVVVNSQNLTCNSNDLKALEGFMRGLESSIDGWKWNESSSFSSNCCDWVGISCKSSVSLGLDDVNESGRVVELELGRRKLSGKLSESVAKLDQLKVLNLTHNSLSGSIAASLLNLSNLEVLDLSSNDFSGLFPSLINLPSLRVLNVYENSFHGLIPASLCNNLPRIREIDLAMNYFDGSIPVGIGNCSSVEYLGLASNNLSGSIPQELFQLSNLSVLALQNNRLSGALSSKLGKLSNLGRLDISSNKFSGKIPDVFLELNKLWYFSAQSNLFNGEMPRSLSNSRSISLLSLRNNTLSGQIYLNCSAMTNLTSLDLASNSFSGSIPSNLPNCLRLKTINFAKIKFIAQIPESFKNFQSLTSLSFSNSSIQNISSALEILQHCQNLKTLVLTLNFQKEELPSVPSLQFKNLKVLIIASCQLRGTVPQWLSNSPSLQLLDLSWNQLSGTIPPWLGSLNSLFYLDLSNNTFIGEIPHSLTSLQSLVSKENAVEEPSPDFPFFKKKNTNAGGLQYNQPSSFPPMIDLSYNSLNGSIWPEFGDLRQLHVLNLKNNNLSGNIPANLSGMTSLEVLDLSHNNLSGNIPPSLVKLSFLSTFSVAYNKLSGPIPTGVQFQTFPNSSFEGNQGLCGEHASPCHITDQSPHGSAVKSKKNIRKIVAVAVGTGLGTVFLLTVTLLIILRTTSRGEVDPEKKADADEIELGSRSVVLFHNKDSNNELSLDDILKSTSSFNQANIIGCGGFGLVYKATLPDGTKVAIKRLSGDTGQMDREFQAEVETLSRAQHPNLVHLLGYCNYKNDKLLIYSYMDNGSLDYWLHEKVDGPPSLDWKTRLRIARGAAEGLAYLHQSCEPHILHRDIKSSNILLSDTFVAHLADFGLARLILPYDTHVTTDLVGTLGYIPPEYGQASVATYKGDVYSFGVVLLELLTGRRPMDVCKPRGSRDLISWVLQMKTEKRESEIFDPFIYDKDHAEEMLLVLEIACRCLGENPKTRPTTQQLVSWLENIDVSS

SEQ ID NO: 28210 - protein, 230 aa, Onoclea sensibilis
ATSATIRWSSSMMGGARLIVPTSSSSPAAPTTPPSTLRVMCSSNKAPSPPGLLSSLKENVDRSTKQELSRADIERTRPRPPQSSSLSGLTRFTPASTVPWPRSELDRRLRQVTLAHYPLSCRWCRPETINGRMAMVGFVWALVVEKMTGLGVMDQLFNPSTSGLLWFGAVVQLFTLASIIPFVNGESTDARRWGPFNAKAERWNGRLAMVRSPPSSLARWCARLPSSKPK

SEQ ID NO: 28211 - protein, 157 aa, Saccharomyces cerevisiae
MSDEEHTFENADAGASATYPMQCSALRKNGFVVIKGRPCKIVDMSTSKTGKHGHAKVHLVTLDIFTGKKLEDLSPSTHNLEVPFVKRSEYQLLDIDDGYLSLMTMDGETKDDVKAPEGELGDSMQAAFDEGKDLMVTIISAMGEEAAISFKEAPRSD

SEQ ID NO: 28212 - protein, 611 aa, Thiomicrospira crunogena XCL-2
MSEQLIDILWVLISAVLVALMQPGFTALEAGATRTKNSISTAIKNVSDFLIAFMIFVVVGASIMLGTSHHGLFGWSPIFFYETSLSELVLTLFHAMFVSTAVTIISGSIAERTKYTSYLIIAVIVSLFIYPVQAHWIWNADGWLAQLGFIDFAGSTVVHSVGGWAALAAILIIGPRLGRFETKESPFEQANLAYSALGVFLIWLGWIGFNGGSVLALNFETGKVVLNTLIAGAIGGITGLIISRLYTGYYQVIDIINGILAGLVAITASAHLASPDAAILVGMLGYLAYLAGKILLVKWKIDDALEAVPVHLFAGVAGTLLVAFLADDVGFWQQLKIQLLGIIVVGLLTFLVSYTLLSIINRFYPLRVSESKEILGLNISEHQASTSMFDLAQAMNNQAQQQDFSKKIMVEPYSDASLIATYYNHVTQAFNQLNDEKEALIEESYQMANYDQLTGLAKRRLLVNELGRSIARLDRHTQSNAILFIDLDGFKSINDRYGHNAGDALLKESAARIQKIIRKTDLAARFGGDEFVVLLEDIQNESFAAQVADKIIAALRSPILLSNNSEGQISASIGLKIFSQSGKQHVDDILNQADKAMYEAKRRGKGQWVLA

SEQ ID NO: 28213 - protein, 410 aa, Methanothermobacter thermautotrophicus str. Winter
MLRDTLKKAEKARDKKALYGEDIDLERFIKEEAGEHEEVPRAREVPKKVQETLLKVGVDPEERERAGTFIQVDQSGICTTCASESIEIMGMNVALDRYSWLKDYMWKAVAVDTDKYTATTALREAEGEMGGYFIRSMPGSREVFPLQACMFIGDENVMQTAHNIIIAEENSELHIITGCATGQDVSSALHVGVSEFYLKKGAKITFTMVHNWAEQVEVRPRTGIMVGDDATYISNYILTSPVKSIQSYPTAYCTGENSRVVFQSILGGQKDSVLDMGSRVILEGRGSSAEMVSRAVSKDASQIYSRGHLAGRVPEVKGHLECHGLVLSDDSMIYAVPELEGSATELEMSHEAAVGKIAEEEVMYLTSRGLTEDEAASMIVRGFLSMDITGLPPELAAETKRMLDMSLKGM

SEQ ID NO: 28214 - protein, 374 aa, Oryza sativa (japonica cultivar-group)
MLGIARRRLGSGCALGQLMQALRPAAAAAAARTYSAAAKEMTVREALNSALDEEMSADPSVFLMGEEVGEYQGAYKISKGLLDKYGPDRVLDTPITEAGFTGIGVGAAYQGLRPVVEFMTFNFSMQAIDHIINSAAKSNYMSAGQINVPIVFRGPNGAAAGVGAQHSQCYAAWYAHVPGLKVLTPYSAEDARGLLKAAIRDPDPVVFLENELLYGESFPVSAEVLDSSFCLPIGKAKIEQEGKDVTITAFSKMVGYALQAAEILSKEGISAEVINLRSIRPLDRATINASVRKTNRLVTLEEGFPQHGVGAEICMSVVEDSFEYLDAPVERIAGADVPMPYAANLERMAVPQVEDIVRAAKRACYRAVPMAATA

SEQ ID NO: 28215 - protein, 261 aa, Coccidioides immitis RS
MSAPLILLPGDTVPSHLKTASNNSLKLGQNLHVLSHATSPIPITSTQAGLLLQDPKRNSVNILTFPRRRYIPQPSDLVIAQIHHSSADYFHCTLSPHTPHVFLPQLAFEGATRKTRPQLKSGELVYARVLSVGLGPGAEIELTCVNPATGKAEPGGLGPLNGGMVFDVSVGLAGRLMSPGGSGGVVVLEELGKKLESLGGFEIAVGKNGRVWVDSSAGGEEGIKMIVAVGRCLREVDEENLEVGEQKKLVSRVLKQMGLGA

SEQ ID NO: 28216 - protein, 1245 aa, Magnetococcus sp. MC-1
MHSEGTVHRMVGTVQDITEQKEADQALRSLLREVNFQKYALDQHAIVSATDAAGRIIYANEKFVSISGYERDELLGQNHRILKSTEHPPAFYQEMWRTIQKGETWHGEVKNNKKQGGYYWVRATIVPFMDDKGKPEQYVSIRTDITEQKESERKLISLLHEVNFQKHALDQHAIVSITDRDGFITYINEPFSLITGYSELEIVGGKHRLLHSGVHDHAFYRDLWGTISSGKAWKGELCNRAKNGKLFWVSTAIVPFMNEAGQVERYISIQTDITQRREIERELENNNYLSDMALRLSNSGYWHLLLEDEGYYISSERKALIMGDPPHPGFRYHIQDDWLANIRKTDPAMAEQVFANFTQSIATGQDIHFSYPYVRPVDGRTIWLETAGYVERDETGKPYRVYGVTQDITTRRAAEREILRAKEIAEEATQAKSDFLANMSHEIRTPMNAIIGMSYLALQTELSRKQQDYINKIHNAANALLGIINDILDFSKIEAGKLDMENLPFLLSDTLESLTNLIAVKAREKGLELLIAMDPAVPDGLIGDDLRLGQILVNLVNNAVKFTDTGEIVVRVKQVEANDREVMLQFSISDSGIGMTEAQVAKLFNSFSQADASTTRKYGGTGLGLTISKKLTEMMHGKIWVESTPGVGSTFLFTARFGLSTHPAKSKLKLTGDLQGLRVLIVDDSATSREIFEQLAISLGFDAHLAASASEALLAIYRAEAADTPYQLVYTDWKMPGMDGVELTHRLKTATDLQHPPKIIMVTAYDRDEMLRRLGSNTVDGFLTKPATCSSLMEAAMLVFGLEARTDLENGGELLGLEELQSRAGARILLVEDNEINQQVATELLEMAHLEVAVASNGQIGVEMVRAEPFDLVLMDMQMPVMDGYTAARTIRQEARFQTLPILAMTANAMAGDREKCLAAGMNDHVAKPIDPKELFTALAKWIEPRQQPLPTTTKLAVVDDAQEQLPELPGIDTRNGILRMGGRVASYKKLLSKFILNQANSIVEIEQALEAADIKLATRLAHTVKGIAGTIGADLLQTRAAEIETTLNKGDTAQALAQCPAAQAALQETIAVIQQALPSTAATPQPQAYEALPLPPDFILQLETVIAQAEQFSGEAIERLETLLPTAQGNPCAHSLKNAYQAMAEYDFEKAIAEIQEVVASLRGEDNAAATGVDPAQRDALFTQLYAQLQQYSAQGVDTLEALDALLPAGDDKEAVQKMRQALSQYDFEGALEYLTPIMAVKII

SEQ ID NO: 28217 - protein, 290 aa, Methanosarcina acetivorans C2A
MSDESYESRIIDGKVLAQQVEEEVRSGVEDLESNRGIVPGLATILVGDDPASKMYVRLKHRACERVGIKAEDYLLPGDATQEELLTLIDSLNKNKDVHAILLQLPLPKHFSPQETQEAMEAISPTKDADGFHPYNMGKLMIGDEDLVPCTPHGVIRALEEYGVSVQGKNAVIVGHSNVVGKPMAAMLLNRNATVSVCHIFTDDLKKYTLGADIIVVATGVKHLIKADMVKEGTVIFDAGITKEEDGVYGDVDFENVIKKASLVTPVPGGVGPMTIAMLMKHVLLCAEKSL

SEQ ID NO: 28218 - protein, 417 aa, Halobacterium salinarum
MPEANPFESLQEQLDDAGEFLDVNADVLERLKHPERVLETTLSVEMDDGTIETFKAFRSQFNGDRGPYKGGIRYHPGVTRDEVKALSGWMVYKTAVADIPYGGGKGGIILDPEEYSDSELERITRAFATELRPFIGEDKDVPAPDVNTGQREMNWIKDTYETLEDTTAPGVITGKALENGGSEGRVNATGRSTMFAAREVFDYLDRDLSDATVAVQGYGNAGSVAAKLIADQGADVVAVSDSSGAVHNPDGLDTRAVKAFKTETGSVSGYEGATEELSNEALLTMDVDLLVPAALENAIDEDLAHDVDADVVVEAANGPLTPDADDVLTERGVTVVPDILANAGGVTVSYFEWVQNRQRFQWTEDRVNEELEAIITDAFDAMTDAHEDAGTPNLRTAAYVVAVQRVVDAYEGSGSWP

SEQ ID NO: 28219 - protein, 232 aa, Solenangis aphylla
SDSGKDAGRLSAAWQLYKAQEDLVKVAKEFGVKLTMFHGRGGTVGRGGGPTHLAILSQPPDTIHGSLRVTVQGEVIEQSFGEEHLCFRTLQRYTAATLEHSMCPPASPEPEWRELLDEMAVAATKEYRSIVFHEPRFVEYFRLATPELEYGRMNIGSRPSKRKPSGGIESLRAIPWIFAWTQTRFILPVWLGFGAAFKHVIDKDIKNLLMLQEMYTRRPFFRVTIDLVEMVF

SEQ ID NO: 28220 - protein, 319 aa, Thermoplasma acidophilum
MEFNLHAVSSEEKERDFDVVIVGAGAAGFSAAVYAARSGFSVAILDKAVAGGLTAEAPLVENYLGFKSIVGSELAKLFADHAANYAKIREGVEVRSIKKTQGGFDIETNDDTYHAKYVIITTGTTHKHLGVKGESEYFGKGTSYCSTCDGYLFKGKRVVTIGGGNSGAIAAISMSEYVKNVTIIEYMPKYMCENAYVQEIKKRNIPYIMNAQVTEIVGDGKKVTGVKYKDRTTGEEKLIETDGVFIYVGLIPQTSFLKDSGVKLDERGYIVVDSRQRTSVPGVYAAGDVTSGNFAQIASAVGDGCKAALSLYSDSISKK

SEQ ID NO: 28221 - protein, 240 aa, Solenangis aphylla
RKSGRCAANKPFQEILHPCFTDLMYVWMNIGSRPSHRKHSGGIESLRAITWIFAWTQTRFHLTVWLGCGAAFKHVIDKECRKPFTCIQHMYNQWPFLRVTIDLVEMVFAKGDPGIAALYDKLLVPQELSPFGEQLRLNYEGTNELLVQIAGHKDLLEGDPYLKQRLRLRHAYITTLNVCQACPLKKTRDPASHVTVRPHLSKEYIESSKPAAELVKLNPTREYAAGLEDTLILTMKGIAA

SEQ ID NO: 28222 - protein, 486 aa, Bacillus cereus E33L
MITTEIKRVKNHINGEWVESTGTEVEAVPNPATGKIIAYVPLSPKEDVEKAVEAAKAAYETWSKVPVPNRSRQLYKYLQLLQENKEELAKIITLENGKTLTDATGEVQRGIEAVELATSTPNLMMGQALPNIASGIDGSIWRYPIGVVAGITPFNFPMMIPLWMFPLAIACGNTFVLKTSERTPLLAERLVELFYEAGFPKGVLNLVQGGKDVVNSILENKDIQAVSFVGSEPVARYVYETGTKHGKRVQALAGAKNHAIVMPDCNLEKTVQGVIGSAFASSGERCMACSVVAVVDEIADEFIDVLVAETKKLKVGDGFHEDNYVGPLIRESHKERVLGYINSGVADGATLLVDGRKIKEEVGEGYFVGATIFDGVNQEMKIWQDEIFAPVLSIVRVKDLEEGIKLTNQSKFANGAVIYTSNGKHAQTFRDNIDAGMIGVNVNVPAPMAFFAFAGNKASFFGDLGTNGTDGVQFYTRKKVVTERWF

SEQ ID NO: 28223 - protein, 1067 aa, Zea mays
  misc_feature (718)..(718): Xaa can be any naturally occurring amino acid
  misc_feature (916)..(916): Xaa can be any naturally occurring amino acid
EIRDVCIGPWLLCGDFNLIFKPEDKNNSNINRTLMGNFRSLINSMELKEIPLIGRKFTWSNQRQDPTLVKLDHVFCTSSWEDFFPDCLLYSNASVCSDHCPLTLKFREDCRGKRRFHFEGFWPKLPGFNEVVADSWNQPMLATCPLERLSLKLRRLAKQLQSWGHREVGNVSNQLGLAREVMHRLESAQDFRVLSEDEFWLIGKLKQHCFVYASMERTIARLRSRIKYLKEGDANTKFFHMQARFRKKRNFISYLEDEGRVVSNHEDMQEVLDGFFSGLLGADFLRQSTINLSSCHREAVDLSDLECPFSEKEVLDTIACLPSDKAPGPDGFTGRFYKSCWSIIKVDLLAALSIIHQGNFQRLGQLNSSYIILIPKKMDASSAGDFRPISLIHSVAKLVTKLLANRLGPRLHELVEANQSAFIRGRSIHDNFMLVQQSIKSLHKRKVDSLFLKLDISKAFDSVSWAFLLEVLSHLGFGPIWRNLISNLLATASTQVLLNGSPGIHIKHRRGLRQGDPLSPMLFVLIMDVLSSLFRAAECRGLLHSLERAGVRNRLSIYADDVVLFVKPIEEDLKCVRLILNCFGSASGLVTNLNKSYAIPIRCEEHVVQEGCNVLRCSLASFPCSYLGLPISDRKLKRNDLKMWIDKIADRLPNWKARLLNLAGRTTLVRFVLSAIPIYLLIAIKIPKWVIKSIDKIRRGFLWKGRKEVNGGSCAVPXESVTRPLSLGGLGVPNLQLMSWALQAKWLWLEKTDPTRPWLGLCIPVQQQVRQFFNASVISVVGNGTNTFFWSDRWLNGQRIQDFAPEVVNMVSSKPFSSRTVAQALHNGQWIRDITNPLSLIGLHQYLQLWDALSGVVLNLEEDRHVWVHSSSGVFSSKSCYSALFMGAIIFQPWKWVWKSWAPPKCKFFIWLAIRXKCWTADRLQRKGLPHPVVCPLCDQEQETILHLLCSCSFARQFWHIIFSALRMGHLTPTREAGSFVDWWGKVHRRVPKHIRKGFHSLIILGAWCLWLHRNRAVFDGVNPSLSTIQRLFLDEVECWCLAGAKQLESLGLLAAFARGARAFPSV

SEQ ID NO: 28224 - protein, 357 aa, Pyrrosia longifolia
SDSGKDAGRLSAAWQVFKTQEDCVKVANQFGVKLTLFHGRGGSVGRGGGPTHLAILSQPPDTIHGSLRVTVQGEVIEQCFGEEHLCLRTLQRFTAATLEHGMQPPRAPKPEWRALTDEITPIATDEYRGVVFKEPRFVKYFRAVTPELEYGRMNIGSRPSKRKPSGGIESLRAIPWIFAWTQTRFHLPVWLGIGSALQHALNKDKRNLPLLQEMYNEWPFFRATIDLIEMVFAKGDPRIAALYDKYLVSGDLQQFGDELRKKYGDTRDLLLLVAGHSELLQGNPTLKQRLKLREPYLTVLNVQQVYTLRKMRDAGYIPKSPTSQSKPASELVSLNTTSEYAPGLEDTLILTMKGIAA

SEQ ID NO: 28225 - protein, 1062 aa, Magnaporthe grisea 70-15
MRRCSRTTSLHPNSRSTSLARFSSLAAARHTLNLQSSSNDSSAIRLQTEPAAATAATHPGRYRLPSLTCSPDPRATLRGPQNPLALVSRHHLHHLPRTSSSSRGQFSQKRDFATSSSKPSSDMAAIKIDGTAIAKKIRERLHAEIDEKQAVNPHYKPCLNIIQVGDRSDSSTYVRMKLKAAEEAGIQCELLHYPETISEAELLNQLHRINNDPNIHGVLVQLPLPKHLDEYAVTSAVADEKDVDGFGATNIGELAKKGGRPYFIPCTPKGIMVLLEEAGVDLKGKNAVVLGRSDIVGSPVSYLLKNADATVTVCHSRTVGLQDHLKAADIVVAAIGKAGFVKGEWLKPGAVVIDVGTNYIPDASKKSGQRLVGDVDFESAAQVASHITPVPGGVGPMTVAMLLQNVVDSATMHTQRQKNRKTVPLPLKLLDPVPSDIAISRAQVPKQIVRVAEEVGIGASELEPYGAYKAKVDLSLLDRLKHRRNGRYVVVTGITPTPLGEGKSTTTMGIAQALGGHLGRPTFANVRQPSQGPTFGIKGGAAGGGYSQVIPMDEFNLHLTGDIHAITAANNLLAAAIDTRIFHENTSKDAGLFKRLVPVKNGKREFAPIMFRRLKKLGITKTDPAELTEEEISRFVRLDIDPETITWRRVLDVNDRHLRGITIGTAPTEKGQTRESGFDISVASECMAILALSTSLADMRERLGSMVVATSRSGDPVTCDDIGAGGALTALMRDAIKPNLMQTLEGTPVFVHAGPFANISIGNSSILADKIALKLVGTEPDEDHSANTGFVVTEAGFDFTMGGERFFNIKCRTSGLVPDVVVIVATVRAIKVHGGGPPITPGAPLSPVYKEENVETLRAGCTNLRKQIENAKQYGVPVVVAINKFSTDTDAEVAVVREESLAAGAVDAVLSNHWAEGGKGAIDLAQAVIAASDLPKPDFKLLYSLEGTVQERIEKIAKDMYGAAAVEFSELAQKKVETYTRQGFGNLPICIAKTQYSTSHDPELKGAPKGFTVPIRDVRMAAGAGYLYALAADIQTIPGLPTAPGYLNVDVDLETGEIDGLF

SEQ ID NO: 28226 - protein, 357 aa, Pyrrosia longifolia
SDSGKDAGRLSAAWQAFKTQEDCVKVANQFGVKLTLFHGRGGSVGRGGFPTHLAILSQPPDTIHGSLRVTVQGEVIEQCFGEEHLCFRTLQRFTAATLEHGMQPPRAPKPEWRALMDEITPIATDEYRGVVFKEPRFVKYFRAVTPELEYGRMNIGSRPSKRKPSGGIESLRAIPRIFAWTQTRFHLPVWLGIGSALQHALNKDKRNLQLLQEMYNEWPFFRATIDLIEMVFAKGDPRIAALYDKYLVSGDLQQFGDELRKKYGDTRDLLLLVAGHSELLRGNPTLKQRLKLREPYLTVLNVQQVYTLRKIKDAGYIPKSPTSQSKPASELVSLNTTSEYAPGLEDTLILTMKGIAA

SEQ ID NO: 28227 - protein, 470 aa, Mycobacterium sp. JLS
MTHPDTVREQPELRRVMGPGLLLLFVVGDILGTGVYALTGDVAAEVGGAAWLPFLVAFLIATITAFSYLELVTKYPQAAGAALYAHKAFGLQFVTFLVAFVVMCSGITSASTASRFFGANLIEGFGLEWGTAGVAAVALGFMALLAAVNFRGVGESIKLNVVLTIIEATGLMLVLFVGLWAFTRGGDVDFSRVVAFDTAGDKNAFMAVTAATSLAFFAMVGFEDSVNMAEETKDPVKTFPKVLLSGLTIAGIVYMLVAVVAVALVPVGRLEESDTPLVEVVKAGAPNLPIDTLFPFISMFAVSNTALINMLMASRLIYGMARQHVLPPVFGTVHPRRLTPWVAILFTTLIAFGLIFYVSVFASSSAISVLGGTTSLLLLAVFAVVNVAVLRLRRDVQAGGAHFKTPTVMPVVGFIASLYLVLPFSGRPAQQYYVALILVAIGIVLFFINRLINRRLGVRDTEITDPTHLA

SEQ ID NO: 28228 - protein, 357 aa, Pyrrosia longifolia
SDSGKDAGRLSAAWQVFKTQEDCVKVANQFGVKLTLFHGRGGSVGRGGGPTHLAILSQPPDTIHGSLRVTVQGEVIEQCFGEEHLCFRTLQRFTAATLEHGMPPPRAPKPEWRALMDEITPIATDEYRGVVSKEPRFVKYFRAVTPELEYGRMNIGSRPSKRKPSGGIESLRAIPWIFAWTQTRFHLPVWLGIGSALQHALNKDKRNLQLLQEMYNEWPFFRATIDLIEMVFAKGDPRIAALYDKYLVSGDLQQFGDELRKKYGDTRDLLLLVAGHSELLQGNPTLKQRLKLREPYLTVLNVQQVYTLRKMRDAGYIPKSPTSQSKPASELVSLNTTSEYAPGLEDTLILTMKGIAA

SEQ ID NO: 28229 - protein, 531 aa, Escherichia coli CFT073
MMMFKAQEINMLDTNMKTQLKAYLEKLTKPVELIATLDDSAKSAEIKELLAEIAELSDKVTFKEDNSLPVRKPSFLITNPGSNQGPRFAGSPLGHEFTSLVLALLWTGGHPSKEAQSLLEQIRHIDGDFEFETYYSLSCHNCPDVVQALNLMSVLNPRIKHTAIDGGTFQNEITDRNVMGVPAVFVNGKEFGQGRMTLTEIVAKIDTGAEKRAAEELNKRDAYDVLIVGSGPAGAAAAIYSARKGIRTGLMGERFGGQILDTVDIENYISVPKTEGQKLAGALKVHVDEYDVDVIDSQSASKLIPAAVEGGLHQIETASGAVLKARSIIVATGAKWRNMNVPGEDQYRTKGVTYCPHCDGPLFKGKRVTVIGGGNSGVEAAIDLAGIVEHVTLLEFAPEMKADQVLQDKLRSLKNVDIILNAQTTEVKGDGSKVVGLEYRDRVSGNIHNIELAGIFVQIGLLPNTNWLEGAVERNRMGEIIIDAKCETNVKGVFAAGDCTTVPYKQIIIATGEGAKASLSAFDYLIRTKTA

SEQ ID NO: 28230 - protein, 492 aa, Bacillus licheniformis ATCC 14580
MNRIQQAEEALKKAGKKVNRRYRMGYHMMPRANWINDPNGLIQYKGEYHVFYQHHPYDENWGPMHWGHLKSKDLIHWEHLPVALAPGDEFDESGCFSGSAVEYNGDLALIYTGHNMIDEEKDDFYQTQNIAVSKDGIVFEKLKENPVIAEPPEDSARHFRDPKVWKHRENWYMVVGNSSKENVGRVILYRSPNFVDWEYVGVLAQSDGNLGFMWECPDFFELDGKHILLISPQGIEADGESYQNLYQTGYLIGDYDEETNEFVHGSFKELDHGHDFYAVQTLLDDKGRRIAIGWMDMWESEMPTKADGWCGALTLPRELTLKDGHKILMNPVEETKLLRGSEHHECDNQSISGSYFIKTAEKLLEVVAVFDLTICSAETVGLKIRGIEQEETTIKYSLIDQKLTLDCSKSGKARDGVRNVRLEADEKLTLHLFLDRSSIEVFANHGEATMTSRIYPKEGRAGIELFSEKGNVRVEEFTYWTLKDIWKGDEAK

SEQ ID NO: 28231 - protein, 166 aa, Glycine max
MAFVTTAEVCDANPQLILSGELRALQPVFQIYGRRQVFSGPIVTLKVFEDNVLVREFLEEKGNGRVLVVDGGASLRCAILGGNPVVQAQNNGWAGIIVNGCIRDVDEINGCDIGVRALASHPMKANKKGMGEKQVPINIAGTRISDGEWLYADTDGILISRTELSV

SEQ ID NO: 28232 - protein, 470 aa, Vibrio angustum S14
MIQFGTGGWRAFIGEEFTQANVRLVAQALANIMIKESVTENGFIIGYDRRFLSDKAATWFAEVLAGNNIKCSFIDKFVPTPVVMFKAKQTGATYSACITASHNPADYNGIKVFIEGGRDADEIITKKIEQQIAVLTDADVKRVDFEQAQNDKLVEIINPMNEFVDSIIDFIDMEAIKKANLRVLIDPMFGVAKNALQTVLISARCDVDVINDSENPGFGGLMPSPSAATLYRLKHLVAHEGYDIGIGTDGDADRLGIIDEKGNFIHPNEVLLLLYYYMLEYKGWKGSVVRNIATTHLLDKVAEAYGEKSFEVPVGFKHISSQMEADDSLIGGESSGGLTIRGHIKGKDGVFASSLLVEMISVTGKKLSELLGEIYGRFGYAYTAEGDCTFKPAERERLYNKIYVEKALPDFDYEIEKVSYADGAKVYFKNGGWAIARFSGTEPLLRIFVEMEDQPQAEAVLAQLKAFLSV

SEQ ID NO: 28233 - protein, 322 aa, Staphylococcus aureus subsp. aureus MRSA252
MKKIAVLTSGGDSPGMNAAVRAVVRTAIYNEIEVYGVYHGYQGLLNDDIHKLELGSVGDTIQRGGTFLYSARCPEFKEQEVRKVAIENLRKRGIEGLVVIGGDGSYRGAQRISEECKEIQTIGIPGTIDNDINGTDFTIGFDTALNTIIGLVDKIRDTASSHARTFIIEAMGRDCGDLALWAGLSVGAETIVVPEVKTDIKEIADKIEQGIKRGKKHSIVLVAEGCMTAQDCQKELSQFINVDNRVSVLGHVQRGGSPTGADRVLASRLGGYAVDLLMQGETAKGVGIKNNKIVATSFDEIFDGKDHKFDYSLYELANKLSI

SEQ ID NO: 28234 - protein, 331 aa, Glycine max
YLVFTLKDCTLLTCTTKGNASIRSIELVDSSTVSSCIDSPKIWNVCSGGNILCCKVDGNEKFALFGGKGVEMNIWDLNNFTKIWNSKPPPKDNLGIFTPTWFTSATFLMKDDHRKFVAGTNSHQVRLYDMSAQRRPVLSFDFRETPIKALAEDIDGYSIYVGNGSGDMASVDIRTGKMLGCFSGKCSGSIRSIVRHPELPVIASCGLDSYLRLWDTKTRQLLSAVFLKQHIMHVLFDSNFDVKGVDSLPCKEQTPTEILVSEEVEESPLKRKKSSRNKEHIPDGGERKKRSKQSKERKKSEGNDGGEKIASRDEGSRSASKKRNKRSIPVL

SEQ ID NO: 28235 - protein, 440 aa, Robiginitalea biformata HTCC2501
MDPKKTFDIPSLGPARFPSPLQLSNNSGDDLFNFVRESDRVLVDVSLSGFQQARESGSRPECLEKSGPRETIFFDPGKTTAAIVTCGGLCPGINNVIRSLVMALHYFYGVKRIIGVRYGYEGLSRDCPHEFMELTPDKVKDIHEFGGTILGSSRGAHPVSEMVDTLVENRIDILFTVGGDGTLKGAHAIGDEIAKRGLNIAVAGIPKTIDNDINLIDKSFGFETAFDVASPIVRDAHNEAIGAFNGISIVKLMGRDSGYIAASTALAMPVVNFVLVPEMPLKLEGEGGFLQALEDRLQRKHHAVIVVAEGAGQHLFDDDRRVTDASGNVKHKDIGILLKDRIQEHFGQSGTPVTIKYIDPSYIIRSAPANANDSLFSNRLAYQAVHGAMAGKTQFVAGRVHNRFVYLPISKVTDRRKKIDMEGEFWFAVLQSTGQPFKMG

SEQ ID NO: 28236 - protein, 148 aa, Brassica napus
FSFFAFCSLMETLQIRKPASLPVSQRLSPSSSSKDEHGVIRRRLSSLSLNLLNQPSEIASRFPKSKSVSDMGKQVGSSVKEWWEWGWSWILSRKPIFIRDLELNREEAKTIGSQNRGSIMHVFIKLRSQIRSLMGSSSDTLPKYKRQQ

SEQ ID NO: 28237 - protein, 300 aa, Arabidopsis thaliana
MYENNLLTLSSCTMNLNFAFSPFLVSQRQPFSSHKRNLHTLVAVSANSDNLAGEDNGGISAANKGSGTTARGRRLLKVREEKRKRDYDRLHDYPSWAKVLESACKDDEELRAVLGDSIGNPELMRKKVEERVRKKGKDFQKQKTGSVLSFKVNFRDFNPVDSFIWFELYGTPSDRDVDLIGSVIQAWYVMGRLGAFNTSNLQLANTSLEYDPLYDAEKGFKVMPSSFHDISDVEFQDNWGRVWVDLGTSDIFALDVLLNCLTVMSSEYLGIQQVVFGGKRMGDWEEGMTNPDFGYKYFKI

SEQ ID NO: 28238 - protein, 115 aa, Synechococcus elongatus PCC 6301
MRSRFGPTMSAATELNDQQFESAVLKAPGLVLVDFWAPWCGPCRLIAPLMDWAAQTYADQLTVYKLEVDPNPETVARYQVQGIPTLLLFQNGELVERVEGAIGRDRIQTLINAHL

SEQ ID NO: 28239 - protein, 289 aa, Glycine max
MGAGEYYKILKVNRNATDEELKRAYKRLAMKWHPDKNHQHHHVTKEEAEAKFKQVSEAYDVLSDPKKRQIYDFYGHYPLNSMKVNEENSDGDVNRVPKGKGEKNVGVVESKLVCTLEELYKGCKKKLKISRTVPHEFGKMKTVEEVLKIDIKPGWKRGTKITFPGKGNQEAESKTPDDLIFVVDEKPHAFFKRDGNDLVVTQKILLVEALVGKTLNLTTLDGRELTIQVTEVVKPKYVLVVPNEGMPISKEPGKKGNLRIKFDVLFPSRLTSQQKYELKRILSNSTADD

SEQ ID NO: 28240 - protein, 351 aa, Staphylococcus aureus subsp. aureus MRSA252
MTKISKIIDELNNQQADAAWITTPLNVYYFTGYRSEPHERLFALLIKKDGKQVLFCPKMEVEEVKASPFTGEIVGYLDTENPFSLYPQTINKLLIESEHLTVARQKQLISGFNVNSFGDVDLTIKQLRNIKSEDEINKIRKAAELADKCIEIGVSYLKESVTEREVVNHIEQTIKQYGVNEMSFDTMVLFGDHAASPHGTPGDRRLKSNEYVLFDLGVIYEHYCSDMTRTIKFGEPSQEAQEIYNIVLEAETSAIQAIKPGIPLKDIDHIARNIISEKGYGEYFPHRLGHGLGLQEHEYQDVSSTNSNLLEAGMVITIEPGIYVPGVAGVRIEDDILVTNEGYEVLTHYEK

SEQ ID NO: 28241 - protein, 670 aa, Lolium perenne
  misc_feature (69)..(69): Xaa can be any naturally occurring amino acid
MPMEARDGVSMPYSYAALPEDAEAAVVGRGRRTGPLFAALLLTLVAALLAVAALAGVRLVGELPAGGVXMPNHPMEVMDVSGSRGPESGVSEKTSGAASESGGMLGADAGSNAFPWSNAMLQWQRTGFHFQPEKNWMNDPNGPVYYKGWYHLFYQYNPEGAIWGNKIAWGHAVSRDMLRWRHLPIAMFPDQWYDINGAWSGSATVLPDGRIVMLYTGSTNASVQVQCLAFPSDPSDPLLTNWTKYEGNPVLYPPPHVGEKDFRDPTTAWYDGSDGMWRIVIGSKDNRRAGMALTYKTKNFHDFELVPGVLHRVPATGMWECIDLYPVGGARGIDMTEAVAAASNSGGGEVLHVMKESSDDDRHDYYALGRYDAATNKWTPLDADADVGIGLRYDWGKFYASKTFYDPAKKRRVLWGWVGETDSERADVAKGWASLQSIPRTVVLDTKTGSNLIQWPVVEVETLRTNSTNLGSIIVEHGSVFPLSLHRATQLDIEASFRLDPLDVAAAKEADVGYNCSTSGGAAGRGALGPFGLLVLADARRHGGDTEQTAVYFYVARGLDGNLRTHFCHDESRSSRANDIVKRVVGNIVPVLDGEALSVRVLVDHSIVESFAQGGRSVVTSRVYPTEAIYANAGVYLFNNATGARVTATSLVVHEMDPSYNQNQAEMASL

SEQ ID NO: 28242 - protein, 524 aa, Caulobacter crescentus CB15
MNNVGRPTRPEAANDAANGHETLTGARGLLQDEALIFELDGWNKTGVDLPPVTAAPSSDLNGLLRDAPIGLPGLSEPETVRHYVRLSQKNHAIDLALYPLGSCTMKHNPRLNEKMARLPGFSDIHPLQPQSTVQGALELMDRLAHWLKTLTGMPAVALTPKAGAHGELCGLLAIRAAHEAAGNGHRKTVLAPTSAHGTNPATAAFVGYTVVEIAQTEDGRVDLADLESKLGDHVAAIMVTNPNTCGLFERDVVEIARLTHAAGAYFYCDGANFNAIVGRVRPGDLGVDAMHINLHKTFSTPHGGGGPGAGPVVLSEALAPFAPTPWLTHGDNGFELAEHAGDDDAKTAFGRMSAFHGQMGMYVRAYAYMLSHGADGLRQVAEDAVLNANYIKAQLKDVMSPAFPEGPCMHEALFDDSWLEGTGVTTLDFAKAMIDEGFHPMTMYFPLVVHGAMLIEPTETESKHELDRFIAALRALAGAAKAGDTERFKGAPFHAPLRRLDETQAARKPRLRWKPVAAAPLAAE

SEQ ID NO: 28243 - protein, 448 aa, Caulobacter crescentus CB15
MRYLPLTPEDRVEMLGAIGVKSIDDLFVDVPVSARRDAPVDLPHHAGELDVEREMAGLARRNRAAGEGPFFCGAGAYRHHVPATVDHIIQRSEFLTSYTPYQPEIAQGTLQVLFEFQTQVAALTGMEVANASLYDGSTGAAEAVMMAQRVTRRNKAVMSGGVHPHYVGAIETLAHAAGVATQALPAAVDAEDAVIAAIDQDTACVVVQTPNVFGTVTDVSKIAEAAHAAGALLIVVTTEAVSFGLLKSPGEMGADIAVAEGQSIGNGLNFGGPYVGLFACKEKFVRQMPGRLCGETVDADGKRGFVLTLSTREQHIRRDKATSNICTNSGLCALAFSIHMSLLGETGLRQLAAVNHQKALALRDALKAVPGVEILTPRFFNEFAIRVPGKAAEVVEILAAHGVIAGVPFSRLDAKAGLDDVLLVAATETTLDIDIPVFAKALTKVFAQ

SEQ ID NO: 28244 - protein, 581 aa, Triticum aestivum
MVFSVTKKETKPYEGQKPGTSGLRKKVTVFQQPHYLANFVQSTFNALPADQVKGATIVVSGDGRYFSKDAVQIIAKMAAANGVRRVWVGQDSLLSTPAVSAIIRERISADGAKATGAFILTASHNPGGPTEDFGIKYNMGNGGPAPESVTDKIFSNTKTVTEYLIAEDLPNVDISVIGVTSFTGPEGPFDVDVFDSATDYIKLMKTIFDFESIKKLLASPKFSFCFDGLHGVAGAYAKRMFVDELGASESSLLNCVPKEDFGGGHPDPNLTYAKELVDRMGLGKTSNVEPPEFGAAADGDADRNMVLGKRFFVTPSDSVAIIAANAVQSIPYFASGLKGVARSMPTSAALDVVAKNLNLKFFEVPTGWKFFGNLMDAGMCSVCGEESFGTGSDHIREKDGIWAVLAWLSILAYKNKDNLGGDKLVTVEDIVLQHWATYGRHYYTRYDYENVDAEAAKELMANLVKMQSSLSDVNKSIKEIQPTVADVVSADEFEYKDPVDGSVSKHQGIRYLFGDGSRLVFRLSGTGSVGATIRIYIEQYEKDSSKTGRASSDALSPLVDVALKFSKIKEYTGRSAPTVIT

SEQ ID NO: 28245 - protein, 497 aa, Mycoplasma genitalium G37
MSTDKKTLGEKPNSTKPELSEELIAELKKQRILEKNRPYKKMIYVDNKVQRKHRHENIAFLKTLHENKESDVPKKRRGRKPKHAPLKEKNNLKLFDILEGSLKSHIENDDTNTVINLLTEAWEKKSKKKQKNITLSNKEIISVLAKFELPEDEIIYVLDELRDKGIQLQHDVEEHIHEFRANQDLSIIDEDIEELTSKNISNRDKVDDNVRFFLGSLDFSKMLDFESEQRIAKVLNSTDEESRKYAINQLVTSNLRLVVSIAKKHLERGLDFNDLIQEGNLGLLKAISKFNWSLGNKFSTYATWWIKQAITRAIADQARTVRIPVHMVETINRLAKAERALYQELGREPTDEELAEKMGGQAEGFNVKKIAEIKRLSLDPVSLDKTVGHDEESQFGDFVKDTDAQTPDEFTESRSNSEKIDELLNNNLSEQEELIVRMRIGMPPYNEPKTLDEVGQKILIPREKIRQIENKAIRKLRHAVRNNPISMSFLRINEKKD

SEQ ID NO: 28246 - protein, 365 aa, Oceanospirillum sp. MED92
TRFSASVKGFDVSEYMNPKDARKMDLFIQYGMAAASQALDDSGLEVTDQNAPRIGCAIGSGIGGLPMIEKNVDILSNSGPRRVSPFFVPGSIINMIGGNLAIKHGFKGPNIAITTACTTGTHNIGQAMRMIQYGDADVMVAGGAEMATTPLGIAGFAAARALSTRNDDPEAASRPWDKDRDGFVLGDGAGILILEEYEHAKSRGAQIYCELAGFGMSDDAFHMTAPPENGEGAALAMSNAIKDAQLAKDEIHYINAHGTSTPAGDIAESNAAKEVLGAAAEQVRMSSTKSMIGHLLGAAGAVEAIICTLALKHQVAPPTINLNNPSDGCDLNYVAHQPQECRIDAALSNSFGFGGTNGTLLFRNL

SEQ ID NO: 28247 - protein, 519 aa, Novosphingobium aromaticivorans DSM 12444
MPVLDAATTAQLKAYLGNLRRPIELVATLDDSPKSAEMRSLVEEIVAQSDKVSARFDGTGERVPSFAIRADEGRAQAVFAGLPMGHEFTSLILALLHVGGHPPKEDADLLDQVRGLEGPLHFETFFSLTCQNCPDVVQALNIMAALNPNVSHVAIDGALFKDEVERRQIMAVPTVYLNGELFGSGRMDLAQIVAKLDTNASARAAEKIAAKEPFDVLVVGGGPAGAAAAIYAARKGIRTGVVAERFGGQVLDTMGIENFISIQHTEGPKLAAQLEQHVKEYDVDVMNLQRATGLVPAGDDGLHEVKLENGASLKAKTLILSTGARWRQMGVPGEDEYRNKGVAYCPHCDGPLFKGKRTAVIGGGNSGVEAAIDLAGIVAHVTLIEFDNQLRADAVLQTKLRSLPNVTIVTSALTTEVLGDGAKVTGLVYKDRETGQTHTVELEGIFVQIGLVPNTEWLKGAIDLSPRGEIEVDARGATSVPGVFGAGDATTVPYKQIVIAMGEGSKAALSAFDYLIRQG

SEQ ID NO: 28248 - protein, 194 aa, Medicago sativa
MASASASLFKSSIVLDKSEWVKGQTLRQSSVSSVRCNPTAPSSLTIRAGSYADELVKTAKTIASPGRGILAMDESNATCGKRLASIGLENTEVNRQAWRTLLVTVPSLGEYISGAILFEETLYQSTTDGRKIVDVLIEQNIVPGIKVWTRVWCPLLVPMDESWCPGLDGLASRSAAYYQQGARFAKWRTVVSIP

SEQ ID NO: 28249 - protein, 362 aa, Glycine max
MVLVRVVPMASSSSIRPTLSSLRFLTPSSLSLSNPSSRISFSHLPSPSVSQSNSFGLKASRELRQHGNSTRIMASGHVSQSISAASPENVLEWVKQDKRRMLHVVYRVGDLDRTIKFYTECLGMKLLRKRDIPEEKYTNAFLGYGPEDSHFVIELTYNYGVDKYDIGTGFGHFGIAVDDVAKAVELIRAKGGKITREPGPVKGGRSVIAFIEDPDGYKFELIERGPTPEPLCQVMLRVGDLNRSIEFYEKAFGMELLRTRDNPEYKYTIAMLGYGPEDKSTVLELTYNYGVTEYDKGNAYAQIAVGTDDVYKTAEAIKLAGGKITREPGALPGINTKITACLDPDGWKSVFVDNVDFLKELE

SEQ ID NO: 28250 - protein, 541 aa, Pseudoalteromonas tunicata D2
MPHISIEQRLHNSLLDAAQDLQKLHLVELFQLQPTRAEIYQLNIAPIYLDYSKQRINQQALDSLVELAEHKQLSQARDAMFHGEKINHTEQRAVLHTALRNSQRLSSHAPDIAEEINQTKQRMLSFVDKILNQTLRGFTDKPITDVISIGIGGSFFGPKMLQSALVEYQTSNINVHYLANIDGAQIKQLLAKLNPATTLVIVASKSWTTIETQVNANAVMTWFKGKFPEQAAIEKHWVALTAKPELAQAYGIAPEYIFPLWDFVGGRYSVWSAIGLPLALSIGSKAFDELLAGAASMDEHFCQAPLNQNMPVLLALIGYWQQVYLGYNNLMVLPYSHGLKSLPAYLQQLDMESNGKSVNAIGDPIATSGPILWGAEGTNCQHSFMQLLHQGKQQAMIDFIVPAKGETLYPEHHKMMIANCLGQAQALMQGKTEQQAFDELIASNMPTEQAKALAKHKAMPGNTGSNTLVLESLTPYSVGALLALYEHKIFCQGILFGINSFDQWGVELGKQLGNQLMNAITTKNSSQLDPSTQALLKHINL

SEQ ID NO: 28251 - protein, 155 aa, Brassica napus
MADESPKSIYDFTVKDISGNDVSLSQFKGKTLLIVNVASKCGLTDANYKELNVLYEKYKEQGLEILAFPCNQFLGQEPGNNEEIQQTVCTRFKAEFPIFDKVDVNGKNTAPLYKYLKAEKGGLLIDAIKWNFTKFLVSPDGKVSQRRAKVLPNIP

SEQ ID NO: 28252 - protein, 341 aa, Fragaria x ananassa
MGLGAESGSVCVTGASGFVGSWLVMRLLEHGYTVRATVRDPANLKKVRHLLELPQAATRLTLWKADLDVEGSFDEAIKGCTGVFHVATPMDFESEDPENEVIKPTINGMLDIMKACLKAKTVRRLVFTSSAGAVAIEEHPKEVYSENNWSDVVFCRKVKMTGWMYFVSKTLAEQAAWKFAKENNIDFITIIPTLVIGPFLAPSMPPSLISGLSPLTGNEAHYGIIKQCQYVHLDDLCQSHIFLYEHAKAEGRYICSSHDATIHDIAKLLNEKYPKYNVPKKFKGIEENLTNIHFSSKKLKEMGFEFKHSLEDMFTGAVDACREKGLLPLPQEEETEKRRAG

SEQ ID NO: 28253 - protein, 523 aa, Chlorella sorokiniana
CRPPSSPSLSWPPGLRSPALPRAVACARGRSAKRDVAAKRLRSRSPRMDATTGDFTALQKAVKQMATKAGTEGLVHGIKNPELRQLLTEIFMKDPEQQEFMQAVREVAVSLQPVFEKRPELLPIFKQIVEPERVITFRVSWLDDAGNLQVNRGFRVQYSSAIGPYKGGLRFHPSVNLSIMKFLAFEQIFKNSLTTLPMGGGKGGSDFDPKGKSDAEVMRLWQSFMTELQRHISYVQDVPAGDIGVGAREIGYLFGQYKRITKNYTGVLTGKGQEYGGSEIRPEATGYGAVLFVENVLKDKGESLKGKRCLVSGAGNVAQYCAELLLEKGAIVLSLSDSQGYVYEPNGFTREQLQAVQDMKKKNNSARISEYKSDTAVYVGDRRKPWELDCQVDIAFPCATQNEIDEHDAELLIKHGCQYVVEGANMPSTNEAIHKYNKAGIIYCPGKAANAGGVAVSGLEMTQNRMSLNWTREEVRDKLERIMKDIYDSAMGPSREYNVDLAAGANIAGFTKVADAVKAQGAV

SEQ ID NO: 28254 - protein, 109 aa, Griffithsia pacifica
MSISQVIDTSFHEEVINSRQPVLVDFWAPWCGPCRMIASTIDEIAHDYKDKLKVVKVNTDQNPTIATEYGIRSIPTVMIFINGKKVDTVVGAVPKLTLLNTLQKHLKST

SEQ ID NO: 28255 - protein, 95 aa, Shewanella oneidensis MR-1
MQIHLSGHHIEITESLRAYVEEKFSKLERHFEQINNVHVVLNVEKMQQIAEARINLTGGEVFATSEHADMYAAIDVLIDKLDRQVIKHKEKLTKH

SEQ ID NO: 28256 - protein, 1733 aa, Staphylococcus epidermidis
MKKRRQGPINKRVDFLSNKVNKYSIRKFTVGTASILVGATLMFGAADNEAKAAEDNQLESASKEEQKGSRDNENSKLNQVDLDNGSHSSEKTTNVNNATEVKKVEAPTTSDVSKPKANEAVVTNESTKPKTTEAPTVNEESIAETPKTSTTQQDSTEKNNPSLKDNLNSSSTTSKESKTDEHSTKQAQMSTNKSNLDTNDSPTQSEKTSSQANNDSTDNQSAPSKQLDSKPSEQKVYKTKFNDEPTQDVEHTTTKLKTPSVSTDSSVNDKQDYTRSAVASLGVDSNETEAITNAVRDNLDLKAASREQINEAIIAEALKKDFSNPDYGVDTPLALNRSQSKNSPHKSASPRMNLMSLAAEPNSGKNVNDKVKITNPTLSLNKSNNHANNVIWPTSNEQFNLKANYELDDSIKEGDTFTIKYGQYIRPGGLELPAIKTQLRSKDGSIVANGVYDKTTNTTTYTFTNYVDQYQNITGSFDLIATPKRETAIKDNQNYPMEVTIANEVVKKDFIVDYGNKKDNTTTAAVANVDNVNNKHNEVVYLNQNNQNPKYAKYFSTVKNGEFIPGEVKVYEVTDTNAMVDSFNPDLNSSNVKDVTSQFAPKVSADGTRVDINFARSMANGKKYIVTQAVRPTGTGNVYTEYWLTRDGTTNTNDFYRGTKSTTVTYLNGSSTAQGDNPTYSLGDYVWLDKNKNGVQDDDEKGLAGVYVTLKDSNNRELQRVTTDQSGHYQFDNLQNGTYTVEFAIPDNYTPSPANNSTNDAIDSDGERDGTRKVVVAKGTINNADNMTVDTGFYLTPKYNVGDYVWEDTNKDGIQDDNEKGISGVKVTLKNKNGDTIGTTTTDSNGKYEFTGLENGDYTIEFETPEGYTPTKQNSGSDEGKDSNGTKTTVTVKDADNKTIDSGFYKPTYNLGDYVWEDTNKDGIQDDSEKGISGVKVTLKDKNGNAIGTTTTDASGHYQFKGLENGSYTVEFETPSGYTPTKANSGQDITVDSNGITTTGIINGADNLTIDSGFYKTPKYSVGDYVWEDTNKDGIQDDNEKGISGVKVTLKDEKGNIISTTTTDENGKYQFDNLDSGNYIIHFEKPEGMTQTTANSGNDDEKDADGEDVRVTITDHDDFSIDNGYFDDDSDSDSDADSDSDSDSDSDADSDSDADSDSDADSDSDSDSDSDADSDSDSDSDSDSDSDSDADSDSDSDSDSDADSDSDSDSDSDSDSDSDSDSDSDSDSDSDSDSDSDSDSDSDSDADSDSDADSDSDSDSDSDADSDSDSDSDSDADSDSDSDSDSDSDSDSDADSDSDSDSDSDSDSDSDSDSDSDSDSDSDADSDSDSDSDSDSDSDSDSDSDSDSDSDSDADSDADSDSDADSDSDADSDSDSDSDSDADSDSDSDSDSDSDSDSDSDSDSDSDSDSDSDSDSDADSDSDSDSDSDSDSDSDADSDSDSDSDSDADSDSDSDSDSDADSDSDSDSDSDADSDSDSDSDSDSDSDSDADSDSDSDSDSDSDSDSDSDSDSDSDSDSDSDSDSDSDSDSDSDSDSDSDSDSDSDSDSDSDSDSDSDSDSDSDSDSDSDSDSDSDSDSDSDSDSDSDSDSDSDSDSDSDSDSDSDSDSDSDSDSDSDSDSDADSDSDSDSDSDADSDSDSDSDSDSDSDSDSDSDSDSDSDSDSDSDSDSDSDSDSDSDSDSDSDSDKNAKDKLPDTGANEDHDSKGTLLGTLFAGLGALLLGRRRKKDNKEK

SEQ ID NO: 28257 - protein, 129 aa, Zea mays
MAARSSSSQPQLVAAAAVLAAALLLLAAGAGTASAAVSCGEVTSSVAPCLGYAMGSAASPSAACCSGVRSLNSRASSAADRQATCNCLKSMTGRLGGGVSMANAANIPGKCGVSVGVPISPTVDCTKIN

SEQ ID NO: 28258 - protein, 401 aa, Methylococcus capsulatus str. Bath
MVCPVGLNVPESWDSILNGRSGIGPIEHFDVSDFATRFGGSVRNFDVTRYLPEKEAKKMDTFIHYGMAAGSQAFEDSGLEVTESNADRVGVCVGSGIGGITGIEHGYGVFLKSGPRKISPFFVPANIINMISGNLSIKYGLKGPNYAIVTACATATHSIGSAARIIQYGDADVMLAGGAEMASSPTALGGFISARALSRRNDDPVRASRPWDKDRDGFVLGDGAGVVVLEELEHAKKRGARIYAELIGFGMSGDAHHMTQPPEDGDGAARCMMHAMRDAGVNPEDIDYVNAHGTSTPAGDLAETRAMKTVLGPHAYSTAISSTKSMTGHLLGAAGGIEAIFSVLAIRDRVVPPTINLDTPDPECDLDYVPHTAREKDLEVVMSNSFGFGGTNATLIFKKFR

SEQ ID NO: 28259 - protein, 412 aa, Silicibacter sp. TM1040
MPLLVMKFGGTSVANLDRIRRAAKRVGVEVAKGYDVIVIVSAMSGKTNELVGWVGETSPLYDAREYDAVVSSGENVTAGLMALTLQEMDVPARSWQGWQVPLKTNSAHSQARIEEIGTENINQKFGEGMKVAVVAGFQGISPEGRITTLGRGGSDTTAVAFAAAFGAERCDIYTDVDGVYTTDPRICEKARKLDKIAFEEMLELASLGAKVLQTRSVELAMRYKVKLRVLSSFEEQSDEAGTLVCDEEEIMESNVVNGVAYSRDEAKLTCLSVADRPGIAATIFGCLSDAGVNVDMIVQNISEDGRTDMTFSCPTDQVQRAEMALNAYKEKGELNFAELVADTGVAKISVVGIGMRSQSGVAAKMFKVLSDEGINIKVITTSEIKISVLVDRKYMELAVQALHDAFELDKAS

SEQ ID NO: 28260 - protein, 487 aa, Staphylococcus epidermidis
MKKFNIKHSFMLTGFAFMVTTSLFSHQAHAEGNHPIDINFSKDQIDRNTAKSNIINRVNDTSRTGISMNSDNDLDTDIVSNSDSENDTYLDSDSDSDSDSDSDSDSDSDSDSDSDSDSDSDSDSDSDSDSDSDSDSDSDSDSDSDSDSDSDSDSDSDSDSDSDSDSDSDSDSDSDSDSDSDSDSDSDSDSDSDSDSDSDSDSDSDSDSDSGTSSGKGSHTGKKPGNPKGNTNRPSQRHTNQPQRPKYNQTNQNNINNINHNINHTRTSGDGAPFKRQQNIINSNSGHRNQNNINQFIWNKNGFFKSQNNTEHRMNSSDNTNSLISRFRQLATGAYKYNPFLINQVKNLNQLDGKVTDSDIYSLFRKQSFRGNEYLNSLQKGTSYFRFQYFNPLNSSKYYENLDDQVLALITGEIGSMPELKKPTDKEDKNHSAFKNHSADEITTNNDGHSKDYDKKKKIHRSLLSLSIAIIGIFLGVTGLYIFRRKK

SEQ ID NO: 28261 - protein, 97 aa, Zea mays
MVSGSISEEIAVAVPAERMWKVAFAETKSALLPKACAGYVDAVEVDGDGGPGSVTTMKLNPSLRIPPAFFFAALGENKTLKSRVVALDAAARVVRTE

SEQ ID NO: 28262 - protein, 884 aa, Oryza sativa
MGFLNLVGNSFGCSASGERLVSAARDGDLQEARALLEYNPRLAWYSTFGGRNSPLHYTAAQGHHERYSYSRFASTSVVKQSSGGLFSWLLGEKSSQLPPLDVPLPGITLPPPLPDFVEPSKTKVTTLPNGIKIASETSVSPAASVGLYIDCGSIYETPASSGASHLLERMAFKSTTNRSHLRLVREVEAIGGNVSASASREQMCYTYDAFKAYVPEMVEVLIDSVRNPAFFNWEIKEQLEKIKAEIAEVSDNPQGLLLEALHSAGYSGALAKPLMAPQSAIHRLDSSILEEFIAENYTAPRMVLAASGVEHDELVSIAEPLLSDLPSVKRPEEPKSVYVGGDYRCQADSDKTHIALAFEVPGGWFEEKTAIIVTVLQMLMGGGGSFSAGGPGKGMHSRLYLRILNNYHQIESFSAFNSIYNHSGLFGIHATTSPNFASKAVDLAAGELLEVATPGKVTQEQLDRAKQATKSAVLMNLESRVVASEDIGRQILTYGERKPIEHFLKDLEAITLNDISSTAKKIISSPLTLASWGDECFLAVIHVPSYESVSQKFFSNTAELLRMCRDFKSMHAEIVLMIFPFMRRQKATAAVALSRAGGGSGGVQGGDRALQGGWGKRRLPGRAGEAVAVTAPSRSGGGSGGGGGGALQGGRGKRQRRRSPLGQVGKAAGATAAVADAVAVFFPLVGKLTDARALSAAERHDVPAFLRLVPSLEAPELPAPLLAVQVTRFVGGGDGGGVAVQHAVPDGQSFWRFMDAWSAPALGRPSAPAPVFDRSAIVHPMAAAMAQRILRKVTPELPLLLTANLLRRTWQHHDTTTLELERHRIADIKNLIVELDEATTSPGRVRGAAAAAAATDRRRPPDSPSHPRPPSARATKPCPQLLAH

SEQ ID NO: 28263 - protein, 122 aa, Brassica napus
LSYEDEFFGLEINSRNEIEDEEDEEEEEEEDRGGEMFPITTRSITGRNRILDWAEILMGIEDNSDRYAVNAADYVDDGAGYEALLQNLAEGDGGGRRGAPPAAKSAIEALETLEVGDSCDKM

SEQ ID NO: 28264 - protein, 846 aa, Mycobacterium tuberculosis CDC1551
MTLTPEASKSVAQPPTQAPLTQEEAIASLGRYGYGWADSDVAGANAQRGLSEAVVRDISAKKNEPDWMLQSRLKALRIFDRKPIPKWGSNLDGIDFDNIKYFVRSTEKQAASWDDLPEDIRNTYDRLGIPEAEKQRLVAGVAAQYESEVVYHQIREDLEAQGVIFLDTDTGLREHPDIFKEYFGTVIPAGDNKFSALNTAVWSGGSFIYVPPGVHVDIPLQAYFRINTENMGQFERTLIIADEGSYVHYVEGCLPAGELITTADGDLRPIESIRVGDFVTGHDGRPHRVTAVQVRDLDGELFTFTPMSPANAFSVTAEHPLLAIPRDEVRVMRKERNGWKAEVNSTKLRSAEPRWIAAKDVAEGDFLIYPKPKPIPHRTVLPLEFARLAGYYLAEGHACLTNGCESLIFSFHSDEFEYVEDVRQACKSLYEKSGSVLIEEHKHSARVTVYTKAGYAAMRDNVGIGSSNKKLSDLLMRQDETFLRELVDAYVNGDGNVTRRNGAVWKRVHTTSRLWAFQLQSILARLGHYATVELRRPGGPGVIMGRNVVRKDIYQVQWTEGGRGPKQARDCGDYFAVPIKKRAVREAHEPVYNLDVENPDSYLAYGFAVHNCTAPIYKSDSLHSAVVEIIVKPHARVRYTTIQNWSNNVYNLVTKRARAEAGATMEWIDGNIGSKVTMKYPAVWMTGEHAKGEVLSVAFAGEDQHQDTGAKMLHLAPNTSSNIVSKSVARGGGRTSYRGLVQVNKGAHGSRSSVKCDALLVDTVSRSDTYPYVDIREDDVTMGHEATVSKVSENQLFYLMSRGLTEDEAMAMVVRGFVEPIAKELPMEYALELNRLIELQMEGAVG

SEQ ID NO: 28265 - protein, 374 aa, Solibacter usitatus Ellin6076
MAASTRWSRMPRRRSCVSTIRRRSSAQSGTNSTPNFIIAMMAHQITLIPGDGIGPEVADATVRAVDATGAKIEWERVDAGARALAEQGQLIPDDVFASLECTRVGLKGPTATPIGGGHQSINVALRKKLGLYTNFRPVRMLPGLKTRYHDLALDLAIFRENTEDLYSGLEHEVVPGVVESLKIITQNASMRIARAAFEWSRRESRKKVVAIHKANIMKLSDGLFLKCCREVASHFPDVAYSEMIVDNACMQLVMRPETFDVLVLPNLYGDIISDLTAGLVGGLGIVPGANIGDNHAIFEAVHGTAPDIAGKCMANPTALMQSAVLMLAHLGERDASARLHAAIYQTYAERDHLTGDVGGKSSTTEFTEAVIRRL

SEQ ID NO: 28266 - protein, 635 aa, Persea americana
MKGCDCIEPQWSSDDLLVKYQYLSDFFIAVAYFSIPLELVYFVQKSAFFPYRWVLTQFGAFIILCGATHFISLWTFTIHSKTVILVMAVAKVSTAVVSCATALMLVHIIPDLLSVKTREMFLKNKAEELDREMVIIRAQEETGRHVRMLTHEIRSTLNRDTILKTTLVELGRTLGLEECALWMPSHNGSSLQLSLTLRYPISVGATVSIQLPIVNKVFNSIHAVIIPHSCPLARIRPLSGKYVPPEVAAVRVPLLYLSNSQVNNWPELSANGYAVMVLMLPSDSARKWHVHELELVEVVADQVAVALSHASILEESMRAQDMLTEQNAALDLARQEAERAICARNDFLAVMNHEMRTPVHAIIALSSLLLETELTPEQRVMVETVLKSSNLLETLINDVLDLSRLEDGSLKLDIGIFNLHAVFREVINLIKPIAAMKKLSLSLMVAPNVPAFAVGDERRLMQIILNVAGNAVKFTKEGQVSVMACVEKQESLADPQALESYPASSDSHFHLRVQIKDSGCRVSPQDIPHLFTKFCICTRSGVNRSQDGSGLGLAICKRFVNLMEGHIWLQSEGLGKGCTATIVVKLGNNGNKTEESTQVVPRAHPKCGVENLSSRNPFLTISSRTQILKKCLLDF

SEQ ID NO: 28267 - protein, 313 aa, Medicago truncatula
MVSLLVATTSDPASINPANALLAMPGWQPGPHFQDDMKSFVNEGLRVLLHGKSIVVEDYLDTRWEEVTGEVVDEVIFLSKHTAASNKPALTVHPIGVPHLREGDVPPQGGKPGWAALPNPRIGPWIRLLKNIAQAHNLVPEFEITLEATHHGPMTNKPTMFLEIGSTEDYWKRQDAAQVMAQLVWEGLGLGGGTDVGNWSRENDKKKVLLGIGGGHYVPRHMNVVLKDGVWVGHVLSGYSVPMEDPKGETNVEIGGTWKQSIKAAYEATKSAFPGGEIIAHLDQKSFKGWQKNAITGFLTEQNIKIGKPNNFY

SEQ ID NO: 28268 - protein, 110 aa, Arabidopsis thaliana
  misc_feature (59)..(59): Xaa can be any naturally occurring amino acid
LVGNAAGYVLICSGEGIGFAAQSGRTCAQAILEGSQNGNNMISLGDLKKSLDKWDQTCXPSDRALDVLQKVFSRSNPTIGAFLDMCNTEYVHHMTFDNYLYQRVAPGSPL

SEQ ID NO: 28269 - protein, 214 aa, Triticum aestivum
  misc_feature (198)..(198): Xaa can be any naturally occurring amino acid
AYLGDSLEQVCTKKQAGTGPEFPGYRRPTRPKEIPALIVWTLGGKNVSVEGSWDNWKSRKPMQKSGKDHSLLLILPSGVYRYRFVVDGERRCFPDLPCETDAMGNAVNLLDVHDFVPESVESVSEFEAPPSPESSYSFQSPEEKDFAKEPPALSSQLHLGVLNSQNSEEICARPQHIVLNHLFIEKGWGAHPLVALGXTHRFESKYVTVVLFNP

SEQ ID NO: 28270 - protein, 564 aa, Exiguobacterium sibiricum 255-15
MKEKQNSDSNDLVQKKTGADLVVDTLIEQGVDYIFGIPGAKIDSVFNVLQDRGPELIVARHEQNAAFMAQAIGRLTDKPGVVLVTSGPGASNLATGLVTANSEGDPVVAIAGAVTRADRLKRTHQSMDNQALFKPITNFSAEVQDADNIPEVLSNAFRTAETTSGAAFVSIPQDVGLNEANVTSFKAVEAPKLGIAPEEWIDETATLIEQAKLPVLLLGMRSSQPRVVQAIRALLERVSIPVVQTFQAAGTLSRELESNFYGRVGLFRNQPGDALLAEADLVLSIGYDPIGYDPKFWNQPSHERTLIHLDQMRAEIDHFYRPDRELVGDVAATINALSERLHALTLPASSTEFLHGLQQRLEERDIPPIVKDSPLTHPLYFMKTLREQIADDVTVTVDVGSHYIWMARHFRSYEPRHLLFSNGMQTLGVALPWAIAATLVRPGKKAVSISGDGGFLFSAMELETAVRLNAPLVHFVWRDSGFDMVAFQQEMKYKRKSGTSFGEVDLVKYAESFGAKGLRVNHPSELISVMEEAWQTEGPVIVDVPIDYSDNITLGKEVHLDQLN

SEQ ID NO: 28271 - protein, 672 aa, Pisum sativum
MEEHSVGPLVPAVVKPEPSKNFSTDTTAAGTFLLVPTMSDLDKDFLCPICMQIIKDAFLTACGHSFCYMCIITHLRNKSDCPCCGHYLTNSNLFPNFLLDKLLKKTSDRQISKTASPVEHFRQAVQKGCEVTMKELDTLLLLLTEKKRKMEQEEAERNMQILLDFLHCLRKQKVDELKEVQTDLQFIKEDIGAVEKHRMDLYRARDRYSVKLRMLDDSGGRKSRHSSMDLNSSGLASSPLNLRGGLSSGSHTKKNDGKSQISSHGHGIQRRDPITGSDSQYINQSGLALVRKKRVHTQFNDLQECYLQKRRQAADKPHGQQERDTNFISREGYSCGLDDFQSVLTTFTRYSRLRVIAEIRHGDIFHSANIVSSIEFDRDDDLFATAGVSRRIKVFDFSAVVNEPTDAHCPVVEMTTRSKLSCLSWNKYAKNQIASSDYEGIVTVWTMTTRKSLMEYEEHEKRAWSVDFSRTDPSMLVSGSDDCKVKVWCTNQEASVLNIDMKANICCVKYNPGSGNYIAVGSADHHIHYYDLRNISRPVHVFTGHKKAVSYVKFLSNDELASASTDSTLRLWDVKQNLPVRTFRGHANEKNFVGLTVRSEYIACGSETNEVFVYHKEISKPLTWHRFGTLDMEDAEDEAGSYFISAVCWKSDRPTILTANSQGTIKVLVLAA

SEQ ID NO: 28272 - protein, 553 aa, uncultured bacterium
MLRLKERPAWKALEAHAFEMREARIADLFTNDPARAQEFSVAACGLLLDYSKNPLSRQTRRLLMTLAEEASLPAQIVAMFEGKRINVTEKRAVLHTALRNRSGRPLLLDGKDVMPEVRAVLSRVRDFSERVRGGIARGYSGLPFTDVVNIGIGGSDLGPLMVCSALRPYGSHDLLVHFVSNIDGAHLAATLSGLNPETTLFVVSSKTFTTQETLTNARSAREWLLTLLRPSGATEVAVQQHFAAVSSNLEATSKFGIAPDRVFGFWDWVGGRYSLWSAIGLPIALGIGFNRFDELLAGAYDMDEHFRTAPLESSMPVIAALTGIWNINFLGHRSQAVLPYAQDLAHFPAFLQQLDMESNGKRVDRSGAEVEYATGPVIWGAPGTNGQHAFFQHLHQGTQVTPADFIVAANGADRLPEHQEILLANCIAQSEALLRGKNADEVRAELKARGIVGDEAERLIPHRTFPGNRPSNTIVMRHLDPRSLGALIALYEHKVFVQGAIWSINSFDQWGVELGKQLASGVLEDLKAGKARSGHDASTARLIEYVLGNKEDK

SEQ ID NO: 28273 - protein, 273 aa, Mycoplasma genitalium G37
MSFDGKLKAQSILETYKNFDWSKCKLVIIQANDDDSSDSFIKQKLIACNTVGAKSELIKLSNQITQAELIEKIISLNHDVNVTGIILQLPVYPHLDKNSLLEAINPLKDVDGLTTNHLAEIKPCIVEAIITLKELFNLEFNNQKIVVVGLGITGGKPIYEFLKTSGYKVQACDKDTPNTFELIKSADIVFTAIGKSHFFQAKNFKKGVILFDIGVSRNKQNKLCGDINPEGIEKKARWWTKTPGGVGPFTVLAIIKNLWILHEKNKRCLQSSI

SEQ ID NO: 28274 - protein, 858 aa, Brassica napus
MKGVRKTYDSSYTLSFLLVFFVMFLFHPALSIHINTLSSTESLTISNNRTLVSPGNVFELGFFRTTSSSRWYLGIWYKNLPYKTYVWVANRDNPLSDSIGTLKISNMNLVLLDHSNKSVWSTNLTRGNERSPVVAELLENGNFVIRYSNNNNASGFLWQSFDFPTDTLLPEMKLGYDRKKGLNRFLTAWRNSDDPSSGEISYQLDTQRGMPEFYLLKNGVRGYRSGPWNGVRFNGIPEDQKLSYMVYNFTDNSEEAAYTFRMTDKSIYSRLIISNDEYLARLTFTPTSWEWNLFWTSPEEPECDVYKTCGSYAYCDVNTSPVCNCIQGFKPFNMQQWELRVWAGGCIRRTRLSCNGDGFTRMKNMKLPETTMAIVDRSIGRKECKKRCLSDCNCTAFANADIRNGGSGCVIWTGELEDIRNYFDDGQDLYVRLAAADLVKKRNANGKTIALIVGVCVLLLMIMFCLWKRKQKRAKTTATSIVNRQRNQDLLMNGMILSSKRQLPIENKTEELELPLIELEAVVKATENFSNCNKLGQGGFGIVYKGRLLDGQEIAVKRLSKTSVQGTGEFMNEVRLIARLQHINLVRILGCCIEADEKMLVYEYLENLSLDSYLFGNKRSSTLNWKDRFNITNGVARGLLYLHQDSRFRIIHRDMKVSNILLDKNMTPKISDFGMARIFARDETEANTRKVVGTYGYMSPEYAMDGVFSEKSDVFSFGVIVLEIVSGKRNRGFYNLNHENNLLSYVWSHWTEGRALEIVDPVIVDSLSSLPATFQPKEVLKCIQIGLLCVQERAEHRPTMSSVVWMLGSEATEIPQPTPPGYSLGRSPYENNPSSSRHCDDDESWTVNQYTCSDIDAR

SEQ ID NO: 28275 - protein, 102 aa, Acinetobacter baumannii
RGATGEVIQDVVNIGVGGSDLGPQMVTHALCDFKVITANPLNVHFVSTMDGSQLSDLLHQLRPVTTLFIISSKSFGTIDTLSNAQTVRQWLEKALGQHDRVV

SEQ ID NO: 28276 - protein, 484 aa, Chlamydophila abortus S26/3
MSQSIEDFLHNHEDYPYGFVTPIESEGLTRGLSEETIIKISQLRNEPSFILDFRLKAYQHWKKLQEPIWARLSYPTIDYDSIVYFSAPKQKNPLGRLEEADPEILETFKKLGIPLDEQKRLLNVQNVAVDLVFDSVSIGTTFKEALDKAGVIFCSMNEAIREYPELVKKYLGLVVSYRDNYFAALNAAVFSDGSFVYLPKGVRCPMEISTYFRINDKESGQFERTLIIAEDDSFVSYLEGCTAPSYSSHQLHAAVVELVAHERAVVRYSTVQNWFSGDRKTGKGGIYNFVTKRGLCAGYKSKISWSQVEVGAAITWKYPSCILRGKESVGEFYSIALTNGKMQADTGTKMIHVGEKTTSTIVSKGISSEESHNTFRSLVSISEGAVGSRNHTQCDSMLIGRACGAYTDPRISVENSQSSVEHEATTSKLRADQLMYLRSRGLNAEEAVSLVVHGFCLEIIEQLPLEFAREASKLLFVKLENSVG

SEQ ID NO: 28277 - protein, 971 aa, Kluyveromyces lactis NRRL Y-1140
MLSVSVRNSLRHSSLRVLKTCSKYNPVRIPTCHYHLLSGTKIAKSIREEAFKEIKQIQIKSPSFEPCLKIIQVGTRPDSTAYVRMKLKASEESGVKCIVEKLPEDIDELALLQKIQQVNDDDSIHGLLIQLPLPRHLNEAEVTNAVSYQKDVDGFHRFNVGELSKRGGKPYFIPCTPNGCIRLLKESGIDLRGKRAVVIGRSDIVGTPVASLLKDLNATVTICHRYTENIADVVKNADVVIAACGVPNMVKPNWLKQDAIVIDVGINYVPDASKKSGRKLVGDVDFELCKDKASYITPVPGGVGPMTVAMLVQNVLLAAKRQREESTRMPHIKPLPLKIEAKVPSDIEISRKQKPKYIEAVANELGVHPSELELYGHYKAKVSPKIANRLADNENGKYVLVAGITPTPLGEGKSTTTIGLVQALSAHLHKPSIANVRQPSMGPTFGVKGGAAGGGYAQVIPMDEFNMHLTGDIHAIGAANNLLAAAIDTRMFHEATQKKHETFYKRLVPVKKGVRSFTPSMLTRLNKLGINKTNPDDLNTEEIIKFARLNIDPDTITIKRVVDVNDRMLRQITIGQAPTEKGFTRQTGFDITVASELMAILALSKDLKDLRERVGRIVIGSNYEKEPITVNDIGCAGAIAALLKDAVKPNLMQTLEGTPVLVHAGPFANISIGASSVIADRVALKLVGKPKEADESAESGYVVTEAGFDFTMGGERFFNIKCRASGLTPNAVVLVATVRALKLHGGAPDVKPGQSLPEEYLKENVDLVRNGTANMCKQIENIKQFGVPVVVAINKFESDTEAEIDAIKEAAQRVGAFDVVSTNHWAEGGKGAIKLAEAVIEASKQPSEFKFLYDVNDTVENKLSTIVQKMYGGANIEISEEAQKKIDMYRQQGFGDLPICIAKTQYSLSHDAKLKNVPTGFTFPIRDVRASIGAGYLYALAAEIQTIPGLSTHAGYMNVEIDEDGEIEGLF

SEQ ID NO: 28278 - protein, 421 aa, Silicibacter sp. TM1040
MRAARERAYAVCGAGICTARGLSRQGRQRRGQGLLDRAAPRAKGLLHMSYETPGPVESELRDAISPIEEIIDAARAGKMYILVDHEDRENEGDLIIPAEFADADAINFMATYGRGLICLPMTAERIDRLGLPMMAVNNSSRHETAFTVSIEAREGVDTGISAADRALTVATAINEQNTMAAIATPGHVFPLRAKRGGVLVRAGHTEASVDISRIAGCHPSAVICEIMKDDGTMARLPDLVEFAKTHDMKIGTISDLIAYRAKNDNLVDETARSTVTSEYGGDWEMRIFTDQTHDVEHVVLIKGDITTPEPVLTRTHALHEASDLLGLGPKPAGELPRAMELIADEGRGIVCLFRQPRNALYASDEEGVRTIKQTGLGAQILNKLGVEELILLTDSPQTKYVGLDAYGLSIVGTRPILSRDS

SEQ ID NO: 28279 - protein, 165 aa, Hordeum vulgare subsp. vulgare
VMASSATTVAPFQGLKSTAGLPVSRRSSASLGSVSNGGRIRCMQVWPIEGIKKFETLSYLPPLTTEALLKQVDYLIRSKWVPCLEFSKVGFVFREHNSSPGYYDGRYWTMWKLPMFGCTDATQVLNEVEEVKKEYPDAYVRIIGFDNLRQVQCVSFIAFRPPGCE

SEQ ID NO: 28280 - protein, 349 aa, Rubrobacter xylanophilus DSM 9941
MARIAVIGGDGIGPEVVGAGVRVLEAAARADSSLELEFERFPWGCEHYLKHGRMMPEDALETLSSFDAIYLGAVGWPSVPDHVSLWGLLLPIRRGFDQYVNLRPVRLLRGVGSPLAGRAQPDLLVVRENTEGEYSDAGGRLHRGTPHEIAVQESVFTRRGVERIVRYAYERARERRGLLTGATKSNGISVTMPFFDEIFREVGEEFPEVEASLMHADALAARLVLDPAAFDVIVGSNLLGDILSEITAAVCGAIGIAPSANLDPTGEHPSLFEPIHGSAPDIAGRGVANPAGAIWAASLMLDHLGHGEAASRVLGALEETLAGGVRTPDLGGDAGTEEVTRAVVRRLLF

SEQ ID NO: 28281 - protein, 509 aa, Burkholderia pseudomallei K96243
MNATPSSRKGHHVPTVKLLIAGEFVESHATEWRDIVNPATQELLARVPFSTVAEVGAAVEAAHAAFAKWKSTPISARMRIMLKFQDLVRANLPQIAKTLTAEQGKTLPDAEGDVFRGLEVVEHACSVGTLQLGEFAENVAGGVDTYTLRQPLGVCVGITPFNFPAMIPLWMFPMAIVCGNTFVLKPSEQDPLSTMQLVELAIEAGVPKGVLNVVHGGKEVVDALCSHPLVKAISFVGSTAVGTHVYRLGSEHGKRVQSMMGAKNHAVILPDANREQTVNALVGAAFGAAGQRCMATSVAVLVGAARDWLPDIVAKAKTLKVNAGAEAGTDVGPLVSRAAKQRVLGLIETGEQEGARLVLDGRGVSVPGYEHGNFVGPTIFADVRPEMSVYTHEIFGPVLCVMSVDTLDEAIALVNANPFGNGVGLFTQSGAAARKFQSEIDIGQVGINIPIPVPVPFFSFTGSRGSKLGDLGPYGKQVVQFYTQTKTVTARWFDDDATAGAVNTTIRLH

SEQ ID NO: 28282 - protein, 165 aa, Avena sativa
VTASSATSVAPFQGLKSTAGLPVGRRSNAGLGNVSNGGRIRCMQVWPIEGIKKFETLSYLPPLSEEALLKQIDFLIRSKWVPCLEFSKVGFIFREHGSTPGYYDGRYWTMWKLPMFGCTDASQVIKEVEEVKKEYPDAYVRIIGFDNIRQVQCVSFIAFKPPGCE

SEQ ID NO: 28283 - protein, 331 aa, Agrobacterium tumefaciens str. C58
MRQRLRETGMSDTNNPYGGSYGGQMTASAHHNGELNGAASGHIKDTTTAGFSKDVLEESRRQPVLVDFWAPWCGPCKQLTPVLEKVINEANGRVKLVKMNIDDHPSIPGQLGIQSIPAIVAFADGRPVDGFMGAVPESQIRQFIDKIAGPDAGDPKAEIEAALSEAKQLLADGDFNGAAQLFGAVMQADPENPAAIAGIAECMIAAGQYERASELLSSLPAELNDDAGIQLVSKKIAQYEEARKIGDPVALERDLAQNPDHHEARVKLAKVLNAQGRRDEAADHLLYVMRKDRTFDDDGARRQLLEFFESWGFKDPASIAGRRKLSAILFS

SEQ ID NO: 28284 - protein, 322 aa, Vibrio fischeri ES114
MNNKKTGVLLVNLGTPTAPTAAAVKQFLSEFLHDKRVVDMNRFIWCPLLHGVILPIRAPKVAKLYESVWMEEGSPLLVYSQRQVKALEARLSMPVALGMTYGEPRIKSGIESLEQQGCDEIIILPLYPQYSRTTTAAVFDQIAKQYKTTPVLPNFTMIHNYHDHPLYIKALANSVRQSWERNGKGDYVLCSYHGIPQRFVDNGDIYAAHCERTTELLAQELGLTSEQIGMSYQSRFGREEWLKPYTSETLKALAPKGIKSLDIISPAFSSDCLETLEELSEECKEIFMESGGQKYTFIPCLNDDELHIEMMADIVSSKIFNK

SEQ ID NO: 28285 - protein, 165 aa, Aegilops speltoides
VMASSATTVAPFQGLKSTAGLPVSRRSSASLGSVSNGGRIRCMQVWPIEGIKKFETLSYLPPLSTEALLKQVDYLIRSKWVPCLEFSKVGFVFREHNSSPGYYDGRYWTMWKLPMFGCTDATQVLSEVEEVKKEYPDAYVRVIGFDNLRQVQCVSFIAFRPPGCE

SEQ ID NO: 28286 - protein, 227 aa, Agrobacterium tumefaciens str. C58
MTIGFRVRNRDRIVDQEWIDKFRELPVANISDSMHRMYAGGAELRPMHRDGKLVGRALTVKAPPGDNLMLHKAMDMAVDGDVIVMDAAGDVTHALMGEMMLDYAHRRGVVGFVLNGAIRDADAFLEMNIPAFAVGVTHRGPYKNGPGEINTPIAIGGMVITPGDLIVGDADGVVVVPIDDVAEVYERTVAKHAAELKQIENIKAGTHKPTWFNDALVKAGCELPSTN

SEQ ID NO: 28287 - protein, 582 aa, Glycine max
MCGILAVLGCSDDSRAKRVRVLELSRRLKHRGPDWSGLHQHGDCFLAHQRLAIVDPASGDQPLFNEDKSVIVTVNGEIYNHEELRKQLPNHKFRTGCDCDVIAHLYEEHGEDFVDMLDGIFSFVLLDTRDNSFIVARDAIGVTSLYIGWGLDGSVWISSEMKGLNDDCEHFECFPPGHLYSSKERGFRRWYNPPWFSEATPSTPYDPLVLRHTFEQAVIKRLMTDVPFGVLLSGGLDSSLVASVTSRYLANTKAAEQWGSKLHSFCVGLEGSPDLKAAKEVADYLGTVHHEFTFTVQDGIDAIEDVIYHVETYDVTTIRASTPMFLMSRKIKSLGVKWVISGEGSDEIFGGYLYFHKAPNKEEFHRETCRKIKALHQYDCLRANKSTFAWGLEARVPFLDKAFINTAMSIDPESKMIKRDEGRIEKWILRRAFDDEEHPYLPKHILYRQKEQFSDGVGYSWIDGLKAHAAKHVTDKMMLNAGNIYPHNTPTTKEAYYYRMIFERFFPQNSARLTVPGGASVACSTAKAVEWDAAWSNNLDPSGRAALGVHISAYENQNNNKGVEIEKIIPMDAAPLGVAIQG
